United States Patent Application Publication US 2005/0153317 A1 - sequence listing, part 9

SEQ ID NO: 37152 - DNA, 600 bp, Chicken  19866894264898_1
gcctagggctccatccaacctggccttgaacacctccagggatggggcatccacagcctctctgggcagcctgttccagcacctcgccgctctcatagaaaagaacttccccctgacatccaaacctaatcttcaacttaaagccatttccccttgtcctgctgttatctacccgttcagagagttgacagacccacagagaggatggggatctgctctgagaattacagcataaatgaaataagccgaatcactgcttccaaaaatcagttcagagggactccttttctgaaagcacartgtttctgccagctgacacacaaggtgggctgcaggagtaaggcaaaggcaagcaactttgcattaagtattacccattcaacatgggtgaatgagggactactcacatagaaaaaatgccttgcagcatttaattacttcctttgcttgacattaagtgcagcccttaaacctggcagttcttaattggggttgcatgcaggcttcacatccctagccttgctacagtgcgtaccttccccatgaaggcacacattcatctctgcgagcgctcatgagacactgccccagagcctggag

SEQ ID NO: 37153 - DNA, 600 bp, Chicken  19866894264898_2
gaatgagggactactcacatagaaaaaatgccttgcagcatttaattacttcctttgcttgacattaagtgcagcccttaaacctggcagttcttaattggggttgcatgcaggcttcacatccctagccttgctacagtgcgtaccttccccatgaaggcacacattcatctctgcgagcgctcatgagacactgccccagagcctggagcagctcagacacccttggtatgaacctctgcaaagtgttaacgtaacaaagaggtgttctgcataggcacaacccaaccgagcttcttrgtagtaatacaaaagagctgcagaccaagtcgacgtgtcgacattaagaggcacagaatatcaaacttcaagtgtaggttcccaacatttcccaaaccaagggaatcagttttcttgcctaagtcattccctgtaaaataagtctgctatattcctgagaaatgataaacagaagacacagtgcagctgctagaaaaggatgctggcctcatttctcttacacagttcaaaaaccagcatggctctttgctggtttagacacaacttcatttttttttcctatgtaagttgacatttaag

SEQ ID NO: 37154 - DNA, 599 bp, Chicken  19866894264903_1
  misc_feature (1)..(92): n is any nucleotide
nnnnnnnnnnnnnnnnnnnnnnnnnnnnnnnnnnnnnnnnnnnnnnnnnnnnnnnnnnnnnnnnnnnnnnnnnnnnnnnnnnnnnnnnnnnntccccccatgtttccagtgcatgctggcattttggatgctactgtagaaagcacgtgccaccacttgaacaaaaggtgcaatctgtggatgtatggtatctgtgcatgtatggtatatctgtgcatgcaatctgtggatgtatggtatgcatgcgcgctgtgaggaagcaaaatagggtagcaaccatcacagtgtgcagatgctggkgtagctgactatgggmctaagaacagtttaaagtaggatctgattttctcatgttccttcaagttacctttgggttacgttcagcatctcgagaaagcaggatagtatagagatggtacatctatttgtaaaacatgcgggttttcagcagtaagatgctgacctacactagtgagccacatcttaatttgcagctgctgttatctgctatgtttaccagggcatgtggctctgcatctgagaatgggactcatagctgagcatagaccccaacctgttttttcacttcagctgctgcc

SEQ ID NO: 37155 - DNA, 599 bp, Chicken  19866894264903_2
  misc_feature (1)..(76): n is any nucleotide
nnnnnnnnnnnnnnnnnnnnnnnnnnnnnnnnnnnnnnnnnnnnnnnnnnnnnnnnnnnnnnnnnnnnnnnnnnnntccccccatgtttccagtgcatgctggcattttggatgctactgtagaaagcacgtgccaccacttgaacaaaaggtgcaatctgtggatgtatggtatctgtgcatgtatggtatatctgtgcatgcaatctgtggatgtatggtatgcatgcgcgctgtgaggaagcaaaatagggtagcaaccatcacagtgtgcagatgctggkgtagctgactatgggmctaagaacagtttaaagtaggatctgattttctcatgttccttcaagttacctttgggttacgttcagcatctcgagaaagcaggatagtatagagatggtacatctatttgtaaaacatgcgggttttcagcagtaagatgctgacctacactagtgagccacatcttaatttgcagctgctgttatctgctatgtttaccagggcatgtggctctgcatctgagaatgggactcatagctgagcatagaccccaacctgttttttcacttcagctgctgccacatgctgtagctgcc

SEQ ID NO: 37156 - DNA, 600 bp, Chicken  19866894264904_1
cttctgggtaccaagcccaaagtcttattttcttgtgcctgagtaatgtcttttttatatcctcacactgattatgtctaatgcacatcacaacactcactgtacctacatgtttagtgcgatcagagggtgtggaatgaatgcttaacaagagtatgcatcatgcactatggatccatattattgactgcataataaaagtcaagtagaatatcagtgaatgcagtcacagccaacacatttcacctcttgttcagtgaactgtttgaatgccaagaagattccttccataaagttacrgagaaagaactaggacaacgattttgatcatcaagtgacatcatcagcttttgattgagaatctacgtatgggcagtaattgaaacataggtactgagtaccccacttctggatataatttccagagactacttaagacgtaatttctgcatttaagccatgttgcagcttgcatgggcaaccttacgctttttgatctcctgagccagcagcccagttcttgttccccgtccatcagcataacgcatatgcagacacgtaaggagccagataagtttattcctataggattaattttca

SEQ ID NO: 37157 - DNA, 410 bp, Chicken  19866894264904_2
tttgcaataaattttactggcctaacactttccaacagggtgccaaggagacatgcttctgggctcaccaagtaccaaagctgctcctgtaggtgcagttacatagcaaattcctttttccagcagactgcctcgtttcccttctaagacattgttttgatgtgatggcatatggcacaggctttctgtatcaatgcgttcatgctgggaccacgttctgggagcttatgaagtcccaagaccattaaaggtacatatcaccttaaagcatcctgtttctcttctatcaacttcctaagsaaagggagttgctgatattgggactcaaaagtcttaggaagttcactgttaatgcacttattggttgccaccctatgatcttcatttaagcctgactcccttcaagcaca

SEQ ID NO: 37158 - DNA, 600 bp, Chicken  19866894264908_1
acttaattcttagggaacggaaggaaggcacaggaaggtgggcagaactgtctccagttgtacaggaatggtgaaacacacattggggactcagtggaagggaagggaaaggacaagagtgagtcctgccaaggcatggccgagtgccagcaggatgggggcaggagaatctgtcccagggccagatggagcctgggggaaagggaaaggtgaagaggggtgaaagctcccagcccagcttcttcttgagggcataaatgggaatgattcatctttgcttttgctgttgataccgctgcrcayrcagtgacagcagctgaatagctgagcactgcttgctgctggagaagcacagggtagtgatcttcattcagcagcagtgttctgttgcagtacaaccacaaagctgctggcaaggggctggatgttgtgaactaagaaaggtttctgcatcataaatcaatatctggctttaaccaggctgtccagagggatcacagagcacgcaggttgtcattgccattgagggcagaacagaagctatttctgcagccagagcgcttgcaaccttcaccacattgcacttggactgagagtttg

SEQ ID NO: 37159 - DNA, 600 bp, Chicken  19866894264908_2
taattcttagggaacggaaggaaggcacaggaaggtgggcagaactgtctccagttgtacaggaatggtgaaacacacattggggactcagtggaagggaagggaaaggacaagagtgagtcctgccaaggcatggccgagtgccagcaggatgggggcaggagaatctgtcccagggccagatggagcctgggggaaagggaaaggtgaagaggggtgaaagctcccagcccagcttcttcttgagggcataaatgggaatgattcatctttgcttttgctgttgataccgctgcrcayrcagtgacagcagctgaatagctgagcactgcttgctgctggagaagcacagggtagtgatcttcattcagcagcagtgttctgttgcagtacaaccacaaagctgctggcaaggggctggatgttgtgaactaagaaaggtttctgcatcataaatcaatatctggctttaaccaggctgtccagagggatcacagagcacgcaggttgtcattgccattgagggcagaacagaagctatttctgcagccagagcgcttgcaaccttcaccacattgcacttggactgagagtttggaa

SEQ ID NO: 37160 - DNA, 600 bp, Chicken  19866894264908_3
aattcttagggaacggaaggaaggcacaggaaggtgggcagaactgtctccagttgtacaggaatggtgaaacacacattggggactcagtggaagggaagggaaaggacaagagtgagtcctgccaaggcatggccgagtgccagcaggatgggggcaggagaatctgtcccagggccagatggagcctgggggaaagggaaaggtgaagaggggtgaaagctcccagcccagcttcttcttgagggcataaatgggaatgattcatctttgcttttgctgttgataccgctgcrcayrcagtgacagcagctgaatagctgagcactgcttgctgctggagaagcacagggtagtgatcttcattcagcagcagtgttctgttgcagtacaaccacaaagctgctggcaaggggctggatgttgtgaactaagaaaggtttctgcatcataaatcaatatctggctttaaccaggctgtccagagggatcacagagcacgcaggttgtcattgccattgagggcagaacagaagctatttctgcagccagagcgcttgcaaccttcaccacattgcacttggactgagagtttggaat

SEQ ID NO: 37161 - DNA, 600 bp, Chicken  19866894264913_1
ccccaggccttggaggatgtgaagatggttgtatggaagaacaccacggacggagtgcaggacaatggcctgacgttaaatggtaacagcatggggactccctgctccttcactgcaaggaatggatggatccacctccttcagcatattgcaaaggggctctgtgctcaggctgagcctcttggatcttgatccgggcctaattagcccccattgccaaagcaaatttgagtctgctatggccatgtaaagctctctgtccaagcaccgtttttccagtggatgcatagtcctgagatstggatccctgaagctgagtcccagcctggcccccattatctgagctgcctgatctctcccccacaggcttcctcttcctcaacacgctcttcatccagaggggccggcatgagaccacatggactatccttcgccgctttggctaygatgatgagctggagctgacggatgactatctgtacccacagtgcgtatcctggcgtggagtggggcaggcagggtgtgacaaggccgtggtgtacagctcggtaccctggcatctgctgcactgctcagctgaggctgaatctgcaccctgag

SEQ ID NO: 37162 - DNA, 600 bp, Chicken  19866894264913_2
tattgcaaaggggctctgtgctcaggctgagcctcttggatcttgatccgggcctaattagcccccattgccaaagcaaatttgagtctgctatggccatgtaaagctctctgtccaagcaccgtttttccagtggatgcatagtcctgagatstggatccctgaagctgagtcccagcctggcccccattatctgagctgcctgatctctcccccacaggcttcctcttcctcaacacgctcttcatccagaggggccggcatgagaccacatggactatccttcgccgctttggctaygatgatgagctggagctgacggatgactatctgtacccacagtgcgtatcctggcgtggagtggggcaggcagggtgtgacaaggccgtggtgtacagctcggtaccctggcatctgctgcactgctcagctgaggctgaatctgcaccctgagcttacagtygtgttcgtgttcctcacctttccctatggtcacgagctgagaactgggggttggcaataatgtgaaggccttgaagctattaactgtgctgttggctgtggtgtaggtgggcaaagaacagagcggtgaaggcttgt

SEQ ID NO: 37163 - DNA, 600 bp, Chicken  19866894264913_3
gaagctgagtcccagcctggcccccattatctgagctgcctgatctctcccccacaggcttcctcttcctcaacacgctcttcatccagaggggccggcatgagaccacatggactatccttcgccgctttggctaygatgatgagctggagctgacggatgactatctgtacccacagtgcgtatcctggcgtggagtggggcaggcagggtgtgacaaggccgtggtgtacagctcggtaccctggcatctgctgcactgctcagctgaggctgaatctgcaccctgagcttacagtygtgttcgtgttcctcacctttccctatggtcacgagctgagaactgggggttggcaataatgtgaaggccttgaagctattaactgtgctgttggctgtggtgtaggtgggcaaagaacagagcggtgaaggcttgtccctgacttgccttgacatcaacaagggacttttgaaggctgttctgtctctgcttgagctgagctgtcaggagccgtgagcagtcagcatagccttcctggctgattctgcagctgctgtctcttctctgctccctgccacccttggaggtggtgatctggc

SEQ ID NO: 37164 - DNA, 600 bp, Chicken  19866894264919_1
gtatacaggcattttagttctcatccagagcactagttaaatgctgtattttgtccatttcaggctttgttctgctatgctgtgctcatacaacctagtgaatgtggcctggtgctttctatcctcatagcctgttccaggcaccctccaagaaaagaggagaagagtctgaggggtgagcccactgctggagtgcccgcacaaaaagcgagaatggggatttgggaagaaacacaggctctcatactgttgatgggatttgtctaattggcttaataaggctttggatgtgaagtggtygcttgctgagatgctagaggctctatacattagccataaactttctgaaatagagacattaataaaacccagaaggtattcaagagaggagagattcatgcagaggttagcagtgacaagagagcggcaagtcctcttaggatgggtaggaaagcaaaagggtgaagggtccactgagatgacagcaatttctgctcacaccctgcatcactccatgtttctctgtgacgtaaaatcaaggctcagggatgtcccaaaaggatctgatggctcagcgtgctgcagctgagctgagagcca

SEQ ID NO: 37165 - DNA, 600 bp, Chicken  19866894264919_2
ggagagattcatgcagaggttagcagtgacaagagagcggcaagtcctcttaggatgggtaggaaagcaaaagggtgaagggtccactgagatgacagcaatttctgctcacaccctgcatcactccatgtttctctgtgacgtaaaatcaaggctcagggatgtcccaaaaggatctgatggctcagcgtgctgcagctgagctgagagccacagtgctgctggctgcatctcatggcagacggctggagggtcagggctgcacagggacaggcttgctgcttcccagtccatgcatgkttgcttacagctgtttcygtgttggctggaaaattcagcagtgcgctgtgtatgactgaatagaagaggcttgattatgaatgaagtcactagcatgagaatcagatggaatggcgtgtggcagagcggyttattccatttttttcccccatggtttgtcagaagttacattcacgtgtgaagaaaatatttttgcttaattggttgtagtgaatggatgctctgtaaattaattgcatctttaatgtttaaaaggttatgtcccgttcatttgtgactgattagggtcatttcactaga

SEQ ID NO: 37166 - DNA, 600 bp, Chicken  19866894264919_3
gttagcagtgacaagagagcggcaagtcctcttaggatgggtaggaaagcaaaagggtgaagggtccactgagatgacagcaatttctgctcacaccctgcatcactccatgtttctctgtgacgtaaaatcaaggctcagggatgtcccaaaaggatctgatggctcagcgtgctgcagctgagctgagagccacagtgctgctggctgcatctcatggcagacggctggagggtcagggctgcacagggacaggcttgctgcttcccagtccatgcatgkttgcttacagctgtttcygtgttggctggaaaattcagcagtgcgctgtgtatgactgaatagaagaggcttgattatgaatgaagtcactagcatgagaatcagatggaatggcgtgtggcagagcggyttattccatttttttcccccatggtttgtcagaagttacattcacgtgtgaagaaaatatttttgcttaattggttgtagtgaatggatgctctgtaaattaattgcatctttaatgtttaaaaggttatgtcccgttcatttgtgactgattagggtcatttcactagaatgagcgagcttgaggtc

SEQ ID NO: 37167 - DNA, 600 bp, Chicken  19866894264919_4
tttctctgtgacgtaaaatcaaggctcagggatgtcccaaaaggatctgatggctcagcgtgctgcagctgagctgagagccacagtgctgctggctgcatctcatggcagacggctggagggtcagggctgcacagggacaggcttgctgcttcccagtccatgcatgkttgcttacagctgtttcygtgttggctggaaaattcagcagtgcgctgtgtatgactgaatagaagaggcttgattatgaatgaagtcactagcatgagaatcagatggaatggcgtgtggcagagcggyttattccatttttttcccccatggtttgtcagaagttacattcacgtgtgaagaaaatatttttgcttaattggttgtagtgaatggatgctctgtaaattaattgcatctttaatgtttaaaaggttatgtcccgttcatttgtgactgattagggtcatttcactagaatgagcgagcttgaggtcatctgatatctgaagagcagagtttgttactttctgtgatttgctgctttagagggcacgaatgctatctggagatgtcagggtgtcagtgtcactttctaaacaccagtga

SEQ ID NO: 37168 - DNA, 600 bp, Chicken  19866894264925_1
agtgtacttcagtggtatcataccaagaatatggagaaattgcctaaaagaagacaattcaaaaaatatcaaacaaaaaaaaatcaaaagaaataaacatttccaaataaagaagtgaccacaatgggttttttttgttgtttgtttgtttaatgataaacaagtgtatagttccactgtatcaactatagctaaagaagatttaaagtgggatatatagaaagctgagaactgttgttggaagtctgctaggaaggaatgggagggagcactacacaagtagagcacgtagtctcaagwtcactgctaggaggattaaaggctaagttcaggatctcacttagatccttatatatatatatatgtatattgaatactcctaataaatgcccatttcttcagaaaacaacaacaaaaagaaaggttacatatattaacagtgaaaggttttcaattgctcagtaatctgtttaacatgtaaacaacttgtttttgtaatcttaattcctcccgatgctacagttttgaagcactcatcacaattttgaattgaggtctttacttctgcataattacaaataacctaatttgcatttyatt

SEQ ID NO: 37169 - DNA, 600 bp, Chicken  19866894264925_2
agwtcactgctaggaggattaaaggctaagttcaggatctcacttagatccttatatatatatatatgtatattgaatactcctaataaatgcccatttcttcagaaaacaacaacaaaaagaaaggttacatatattaacagtgaaaggttttcaattgctcagtaatctgtttaacatgtaaacaacttgtttttgtaatcttaattcctcccgatgctacagttttgaagcactcatcacaattttgaattgaggtctttacttctgcataattacaaataacctaatttgcatttyatttttccaaaagtaaatggtttccaccgttttgttaacaatataaatctataggaaagaactttcttaaccctgctcaataagcaggcagtttcctaatgtgaataatggctaaactgcccttctcattgcccgacagatttttcagactccgatcacttcacatctaagattttacacaaatgctgattgagcactactgaaagaaaatagacaacacacagtattctctacgtacagactgcaaaaccttggcacaagcttgtgctttttcactttcactattcaggcagagcatat

SEQ ID NO: 37170 - DNA, 600 bp, Chicken  19866894264926_1
ctatgagtgcatgggtagttgcacagccctcatgacctacagatctttgtcaaggtcaccactttcttaaatgtagacctctgtttggaaggcagttgtatgactgtgtaggtagctatataagaagtgccttttctttgaaatctcagttgttcagaatgactgcatctttgcttacagttcccgtcagtctttgtgtcatccataagttctgtcatgggtcatttccattcacctccaaaacactgactaagatgtggctttgtaccaatgcctgctaaagtccaatgaaataacccyatccatgataattcctcattggcagaagctttttgacatctgttcggtacattagattgttttaagttactaagtcaaacccctataataaatcatagcacatcgtttctatcctattatattcatcaaccagatgtgtcattacatctgaaatttaaatcaaatgtgttgacaaggtctctataaaaaacttgtgctttttgaaatcgattactttcttgcccctaaagggcaaggttattattaatttaatttcattggcattctcatttttgtcagggatagatgtcagggtaacca

SEQ ID NO: 37171 - DNA, 600 bp, Chicken  19866894264939_1
ttcaaggaagatcattgctgagtgcatgaaggctgtgctttcggggcagaaggtgtgtggtgcctttgggtggatgactcagcctgaagatctcttgctggtcagtgagagctgacatcaccaagacctgccggtcgcacagcaggcagctccagcccttctttaaacctgtggatgtttaagtggagtggcaatgctggcaagtttggaacagtaaggatttcatcagtaaaaacaaagctgcttaagagatagtcgtatctattgcatgtgtgaataagtaaaattagacacaaatargagacttaacggactccatatagcagagtctcaaaaggttggtgataaggctttctaacaagtgttgttggttactcttaggaatgggaagtgcttatttcatgtagaaccatcagccatttatatcgtacgatgacttctgctcagcactcaacagcagatgtgaatgctctcctgggtataatgttcaggggcttcagagaaagcccccttctcccctgtatctgcagcagaatgttgtttgcacagtgcctgtggtgtccatgtttccagctgccttcccctggatcagctcaggta

SEQ ID NO: 37172 - DNA, 600 bp, Chicken  19866894264939_2
acttaacggactccatatagcagagtctcaaaaggttggtgataaggctttctaacaagtgttgttggttactcttaggaatgggaagtgcttatttcatgtagaaccatcagccatttatatcgtacgatgacttctgctcagcactcaacagcagatgtgaatgctctcctgggtataatgttcaggggcttcagagaaagcccccttctcccctgtatctgcagcagaatgttgtttgcacagtgcctgtggtgtccatgtttccagctgccttcccctggatcagctcaggtatayttctggaaaatacagtgctcaggtactaagccattacacatttttgttcaagttaacttttgtttggaggaaaatctaatagtagttggtgggtgttgcattggagttccttctgggtgtgaacatttccacctattggaaggttaagcatttaataataacatgttttgagggtgttgagtgtacttcactttctctttagtttcctatcatagaaaattgaccttttctacccaaaatgaataatttcctccacttcttttccgactcttttagaaggaggagagctttctggcagcg

SEQ ID NO: 37173 - DNA, 600 bp, Chicken  19866894264939_3
atacagttttgagttgtagagtgttcacagaacaagcaagtggattcacattgctcttacgtacccagctacccattttagtgctggaaatcagcagttccttgtagtctgtggctgggatttgataaaggaactgaaatagctgctggtgtttcaagactgctaggggaaaaccaaatggagttcccctccaggcatggtggaaagcagtgtgttgtgctgtgtttctatgaagtcagggttttttgtgggcattgtaggacgtgtcatgccgtcacagatcttacctggctcctcctygctgtgtaaatgaaggagtgtgtccttttggtgttgaactactttactgacttgaatggaaagttactrtatttgagtttcaagctcaactaaaacacagaattgaatttgtatttagttaggaaacttaacaggatagctatcwccaagctatatgtcctaacaaaggtgcttgaaatataatacttgatgagctgtggtttgtgtttttctgactttggactaacaaactgattgggaagatgtgacttgaaggctgaactgctgaggtaaaccagacaaggagctacttgagagtgg

SEQ ID NO: 37174 - DNA, 600 bp, Chicken  19866894264939_4
tacccattttagtgctggaaatcagcagttccttgtagtctgtggctgggatttgataaaggaactgaaatagctgctggtgtttcaagactgctaggggaaaaccaaatggagttcccctccaggcatggtggaaagcagtgtgttgtgctgtgtttctatgaagtcagggttttttgtgggcattgtaggacgtgtcatgccgtcacagatcttacctggctcctcctygctgtgtaaatgaaggagtgtgtccttttggtgttgaactactttactgacttgaatggaaagttactrtatttgagtttcaagctcaactaaaacacagaattgaatttgtatttagttaggaaacttaacaggatagctatcwccaagctatatgtcctaacaaaggtgcttgaaatataatacttgatgagctgtggtttgtgtttttctgactttggactaacaaactgattgggaagatgtgacttgaaggctgaactgctgaggtaaaccagacaaggagctacttgagagtggtattaaaatgataaagtataagtgagttgcaccaagcttgctggcaggcaacacatttttgcagcagag

SEQ ID NO: 37175 - DNA, 600 bp, Chicken  19866894264939_5
ctggtgtttcaagactgctaggggaaaaccaaatggagttcccctccaggcatggtggaaagcagtgtgttgtgctgtgtttctatgaagtcagggttttttgtgggcattgtaggacgtgtcatgccgtcacagatcttacctggctcctcctygctgtgtaaatgaaggagtgtgtccttttggtgttgaactactttactgacttgaatggaaagttactrtatttgagtttcaagctcaactaaaacacagaattgaatttgtatttagttaggaaacttaacaggatagctatcwccaagctatatgtcctaacaaaggtgcttgaaatataatacttgatgagctgtggtttgtgtttttctgactttggactaacaaactgattgggaagatgtgacttgaaggctgaactgctgaggtaaaccagacaaggagctacttgagagtggtattaaaatgataaagtataagtgagttgcaccaagcttgctggcaggcaacacatttttgcagcagagtgagtcattctgatgcaatattagttggttcaaaaatacagggacaaaaacctttattaccraatgcccaataata

SEQ ID NO: 37176 - DNA, 600 bp, Chicken  19866894264939_6
caggatagctatcwccaagctatatgtcctaacaaaggtgcttgaaatataatacttgatgagctgtggtttgtgtttttctgactttggactaacaaactgattgggaagatgtgacttgaaggctgaactgctgaggtaaaccagacaaggagctacttgagagtggtattaaaatgataaagtataagtgagttgcaccaagcttgctggcaggcaacacatttttgcagcagagtgagtcattctgatgcaatattagttggttcaaaaatacagggacaaaaacctttattaccraatgcccaataatatttgtaaatgccaatttacgtacatttgtactgcatgaaacttctgcaggtgtcagtgagccctggtgtgtgcccactccaagcaccagccaagactcttcagtgaaggctcctgagggagcaggcaatgcatgtctctcaaacagtaatactttgccagtgatgcagagcaggtttggtaccgttgtgctcttttagcctgtgctgctgtctctgctgcagttggagctgttttatttacaggttatccttaggtgaaaatgaggaacagcgtgctggtgtgaga

SEQ ID NO: 37177 - DNA, 600 bp, Chicken  19866894264948_1
tacacgctataattgctcgtgttaaggctgcaatcttccactcaaaattcgtcctaaatatcttggtgtaaaacatgagctcatcaagtcgagaattatcaaatgcctcgggtccacagtctattaagcacagaaagaacataaggtccgcatatgtgcagacagtgccatacacaaatagagcactatatgcaaggagaaccgagcagcaacctcacctgagatccccttgcattgcctgaagcccttgtatgaagcagaagtctcatggtctttttgaagacacttgcagagaccatygaaaccaagtgacacacgtstctctcatttgacaacakaagaaaagaaaagcagaataaccagcacaccactgctggaacactgctgcatgagaactggatggtggcaaaacactgctaagccactactgcgatttttaagacctggtactttttaatctgttaaataatcagtttcctctgatttcctctgatttaaatgtattacccacagtttcacaagacactcatgcattcttcttatccgctgctcacttacagtcataacccattgtttctttcaagaatgtaagacttacga

SEQ ID NO: 37178 - DNA, 600 bp, Chicken  19866894264948_2
gttaaggctgcaatcttccactcaaaattcgtcctaaatatcttggtgtaaaacatgagctcatcaagtcgagaattatcaaatgcctcgggtccacagtctattaagcacagaaagaacataaggtccgcatatgtgcagacagtgccatacacaaatagagcactatatgcaaggagaaccgagcagcaacctcacctgagatccccttgcattgcctgaagcccttgtatgaagcagaagtctcatggtctttttgaagacacttgcagagaccatygaaaccaagtgacacacgtstctctcatttgacaacakaagaaaagaaaagcagaataaccagcacaccactgctggaacactgctgcatgagaactggatggtggcaaaacactgctaagccactactgcgatttttaagacctggtactttttaatctgttaaataatcagtttcctctgatttcctctgatttaaatgtattacccacagtttcacaagacactcatgcattcttcttatccgctgctcacttacagtcataacccattgtttctttcaagaatgtaagacttacgagctggagttcagctcttctg

SEQ ID NO: 37179 - DNA, 600 bp, Chicken  19866894264948_3
cactcaaaattcgtcctaaatatcttggtgtaaaacatgagctcatcaagtcgagaattatcaaatgcctcgggtccacagtctattaagcacagaaagaacataaggtccgcatatgtgcagacagtgccatacacaaatagagcactatatgcaaggagaaccgagcagcaacctcacctgagatccccttgcattgcctgaagcccttgtatgaagcagaagtctcatggtctttttgaagacacttgcagagaccatygaaaccaagtgacacacgtstctctcatttgacaacakaagaaaagaaaagcagaataaccagcacaccactgctggaacactgctgcatgagaactggatggtggcaaaacactgctaagccactactgcgatttttaagacctggtactttttaatctgttaaataatcagtttcctctgatttcctctgatttaaatgtattacccacagtttcacaagacactcatgcattcttcttatccgctgctcacttacagtcataacccattgtttctttcaagaatgtaagacttacgagctggagttcagctcttctgtcacctaattgaaaaata

SEQ ID NO: 37180 - DNA, 600 bp, Chicken  19866894264949_1
tatatcagtcttccttgtgctgaatctgtttctcccatgatggcagttggtaagtgatatctgtgtctttatctcaatgaacccctaaatatctcaatcaaacaattttttaaaattgtatttttccctctgttctgttgagtaggaggagtgagaaagcagtgtggttgtactgaactacctactggtgttaaactacctcaaagactgataatatggtagaggagtagaaacacagaactatatagtagtgtggggcacttttctagcaacaaatatttctgtactagtcccaagtcsaggactaagtatatgtttgagtcagtaaactgtcagagccaaaaaccattacatactaagccacacgaaaaggaattcagggatagtaatagagctactatatcttttgtttagttctttattgttccttgcccaggagagggaataggtatgaaggtgtggttaagagactcatatgaaaaatgaaatgtgatgtcatatttgtaatgaaataagcattgccacttcttaactcttcttattgcctgwcccatatgtcagcctgagagaattttcagcctgtcagaactcataccatat

SEQ ID NO: 37181 - DNA, 599 bp, Chicken  19866894264949_2
agtgtggggcacttttctagcaacaaatatttctgtactagtcccaagtcsaggactaagtatatgtttgagtcagtaaactgtcagagccaaaaaccattacatactaagccacacgaaaaggaattcagggatagtaatagagctactatatcttttgtttagttctttattgttccttgcccaggagagggaataggtatgaaggtgtggttaagagactcatatgaaaaatgaaatgtgatgtcatatttgtaatgaaataagcattgccacttcttaactcttcttattgcctgwcccatatgtcagcctgagagaattttcagcctgtcagaactcataccatataagatgctgaactgcatgacatttcctattaatttccaacagggtacattctccttgtatgcattcccttaatatacaaatttaacagttgtttttcaattatttaaaggacagctgtgcaaactaagaatatgtttaaaagaaacagtcctgtttttcagttctgcttctgctctgctgtcttaaaatcccatcttgctaaggtcatagattggcttctgttgtctttcttatctcccatcttccca

SEQ ID NO: 37182 - DNA, 565 bp, Chicken  19866894264951_1
tgtatcccactcatagcactgtagctttgaggatcaagacagttttgtcctagatacgtgttgattcaccgagaaaatgtacagtgttaaatcactgtgtcatatttcttacccatgctggggttagactgaaggttgcaaactgggttgtcaaaacagcacatgtgggatcccatagctgtgaaatctggctgttttaaacacccattcaaaatctatcttcacttaaaaaaaaactcaacaactgggaggggagggaggtgggagtgtatggcagaggaaggatcaccctgctgctcrttgtgttttacatctctatttccctaatcatctccttcaggcaaccatctgagaccaggtcccagatcaagtcccagacctttggagtgactccaaagagccatctgtatacttttatttaatctttcaagaactctaaaaaaacagacaggaagtatccacagcactacagcctgtaacaggtacattgctgtgtttaacattcccactgcattgctgtagatgttacagtggacaatgccagcaatatgcattacacaatttc

SEQ ID NO: 37183 - DNA, 600 bp, Chicken  19866894264953_1
ctctgcaggcttcgtcactggcagcctgttgaagagccaaatgacatagaacacggtgtcattttgcatagcactttaagactgaagtcagccgctaatgcaagcctgaaaataggagaaggcaggggaaaaggagtctgtagtctgtaaaacagaaagagggttgtcagcgttgtggtttttcaaaagagcttgccagaaggtagcatttaaatcatgagagtggagtctggtgataaaagcatggggcttcccgatgggccatgacccagtgcttgaagcagatagcactgtgttctyttagcttggaagacagttacacaggtgtcatgtacgtggaaatttctgtcccacccaattactgtgaaacaaagaagagatttaagttgctttcttttcctaccttaatgggagctcgtctgatcygtgtaggaaaatgggcccttgggtcagcaagtgctctgcatggactgaaataaccttaccctgttttttgtaaggacacttgagggctgaaatcctgatgtaaaatcctcttgtaaaaaccaagtgacggcctggcactgctgctctcacgtcattacctccttgtctctgcag

SEQ ID NO: 37184 - DNA, 600 bp, Chicken  19866894264953_2
ggaaaaggagtctgtagtctgtaaaacagaaagagggttgtcagcgttgtggtttttcaaaagagcttgccagaaggtagcatttaaatcatgagagtggagtctggtgataaaagcatggggcttcccgatgggccatgacccagtgcttgaagcagatagcactgtgttctyttagcttggaagacagttacacaggtgtcatgtacgtggaaatttctgtcccacccaattactgtgaaacaaagaagagatttaagttgctttcttttcctaccttaatgggagctcgtctgatcygtgtaggaaaatgggcccttgggtcagcaagtgctctgcatggactgaaataaccttaccctgttttttgtaaggacacttgagggctgaaatcctgatgtaaaatcctcttgtaaaaaccaagtgacggcctggcactgctgctctcacgtcattacctccttgtctctgcagaccaaccccaggaggccgtgttcagcagtgaccatgttgagcacgcagaggacggagaatggcagcgctctacttcaactacctcatcgcagagtgagcgggcagagcgactcttgcagaaccagc

SEQ ID NO: 37185 - DNA, 600 bp, Chicken  19866894264964_1
tgtatggacagtcattttgattccagttcatagtggtgacactatggctgactgagatgctcttcattttgtgctgtgcaaggctgtccagaacacgacttgtctttcacatttgctgtcaccactgttgaaatgcaccatccaccgcctcactgtgctcacacccactgtttggtctccatagacattcaacaagcatcgatgaatgccaatggatgccattttttgagcatggaggaatccagtgacacacctttgcttcatacatacttccaagtcagacaccactttgtcagactrcccctctgctgccatctgtcacatagcaacacagtgaaatattggtgggaaggctcaacctctactgccataccaccatcattggcctctgacatcatgggccaacrtaaaataggaggtattacttttgagtagtccttgcaagtggttatccagtaccacttgaccctgaagctgcaagactttaattgttcttgaattatgaaatctacctctacttggatatactttgcttgtttggacttggagaaagtctcattaccaatctggatttagtaaatattgtgtcgaaataaatgc

SEQ ID NO: 37186 - DNA, 600 bp, Chicken  19866894264964_2
cacatttgctgtcaccactgttgaaatgcaccatccaccgcctcactgtgctcacacccactgtttggtctccatagacattcaacaagcatcgatgaatgccaatggatgccattttttgagcatggaggaatccagtgacacacctttgcttcatacatacttccaagtcagacaccactttgtcagactrcccctctgctgccatctgtcacatagcaacacagtgaaatattggtgggaaggctcaacctctactgccataccaccatcattggcctctgacatcatgggccaacrtaaaataggaggtattacttttgagtagtccttgcaagtggttatccagtaccacttgaccctgaagctgcaagactttaattgttcttgaattatgaaatctacctctacttggatatactttgcttgtttggacttggagaaagtctcattaccaatctggatttagtaaatattgtgtcgaaataaatgcataaacttacaactttcacttagtcacaatcctatatctttgtttagaaagagcagagactggtcttggaagacagagtatcaccccactaacttttaagaaaggtt

SEQ ID NO: 37187 - DNA, 359 bp, Chicken  19866894264964_3
tcttgaattatgaaatctacctctacttggatatactttgcttgtttggacttggagaaagtctcattaccaatctggatttagtaaatattgtgtcgaaataaatgcataaacttacaactttcacttagtcacaatcctatatctttgtttagaaagagcagagactggtcttggaagacagagtatcaccccactaacttttaagaaaggtttatgcagtcattattggcagctatatatgcatatcagatacacatctttatagcactgagcttctatgtttttaaaaacacaagraaatattgtttatattaagttcttcaaaagtctgtgtgaaatgtgtagaagtttctctg

SEQ ID NO: 37188 - DNA, 600 bp, Chicken  19866894264971_1
cacagacatgtatttcagtaatttttcatcaacattctgcccaggagcctcatacagcaatgacaacagcagaaatgcttacttgcaaagtacattcacagcctaagcttctcagataaaagatttgctgttttgctcactttcttgctccgcctttacaaacagtctgtctaaaatcaccagtattgaaatgtgaaacataactgaaaagaaactgcctaatgataaagaagaaagcctcctcctacagtcacagcaatgtctgtaggcgcagcctacatgtgaactgcctggtccccygaccagagaaatactttgttttttaagagcagtttaaacttgctggagcatgcawatacacaggcatttcttcctaatctgttttttagcaagtgttcctaacatactactctactgaaaaagagtacagctggaattaaaacaatgcacagtatctggttttgacaggcacataatttttggaagagaagtatctgctgttagtaggttttgcaaggccataatcttgctctcacatgacccagcagcatattagaaggccacatttgcaattactggaattcacacagagtttagtaa

SEQ ID NO: 37189 - DNA, 600 bp, Chicken  19866894264971_2
agcaatgacaacagcagaaatgcttacttgcaaagtacattcacagcctaagcttctcagataaaagatttgctgttttgctcactttcttgctccgcctttacaaacagtctgtctaaaatcaccagtattgaaatgtgaaacataactgaaaagaaactgcctaatgataaagaagaaagcctcctcctacagtcacagcaatgtctgtaggcgcagcctacatgtgaactgcctggtccccygaccagagaaatactttgttttttaagagcagtttaaacttgctggagcatgcawatacacaggcatttcttcctaatctgttttttagcaagtgttcctaacatactactctactgaaaaagagtacagctggaattaaaacaatgcacagtatctggttttgacaggcacataatttttggaagagaagtatctgctgttagtaggttttgcaaggccataatcttgctctcacatgacccagcagcatattagaaggccacatttgcaattactggaattcacacagagtttagtaatttctgtagaattaatcctacagayrcatgaaagcacattcagactttgctagca

SEQ ID NO: 37190 - DNA, 600 bp, Chicken  19866894264971_3
agagcagtttaaacttgctggagcatgcawatacacaggcatttcttcctaatctgttttttagcaagtgttcctaacatactactctactgaaaaagagtacagctggaattaaaacaatgcacagtatctggttttgacaggcacataatttttggaagagaagtatctgctgttagtaggttttgcaaggccataatcttgctctcacatgacccagcagcatattagaaggccacatttgcaattactggaattcacacagagtttagtaatttctgtagaattaatcctacagayrcatgaaagcacattcagactttgctagcaagaagcatgtcatctgaaaatagaagcataatgttttttagtgtatttttgcacctgcagtaatgacaaaatgggagtgtacagaaacctggatgaaattgttcttatctcttgctaccatggtttatatttagaaacaaaaaatcatgatgaaggctattgttataactctgaactgtgctctgcatgtttgarcacgtgtacaaagcccaagtttacctaaaggaagcagtcaaccaaagatcaaatattcccttacagggaatggga

SEQ ID NO: 37191 - DNA, 600 bp, Chicken  19866894264971_4
gagcagtttaaacttgctggagcatgcawatacacaggcatttcttcctaatctgttttttagcaagtgttcctaacatactactctactgaaaaagagtacagctggaattaaaacaatgcacagtatctggttttgacaggcacataatttttggaagagaagtatctgctgttagtaggttttgcaaggccataatcttgctctcacatgacccagcagcatattagaaggccacatttgcaattactggaattcacacagagtttagtaatttctgtagaattaatcctacagayrcatgaaagcacattcagactttgctagcaagaagcatgtcatctgaaaatagaagcataatgttttttagtgtatttttgcacctgcagtaatgacaaaatgggagtgtacagaaacctggatgaaattgttcttatctcttgctaccatggtttatatttagaaacaaaaaatcatgatgaaggctattgttataactctgaactgtgctctgcatgtttgarcacgtgtacaaagcccaagtttacctaaaggaagcagtcaaccaaagatcaaatattcccttacagggaatgggaa

SEQ ID NO: 37192 - DNA, 600 bp, Chicken  19866894264971_5
tattagaaggccacatttgcaattactggaattcacacagagtttagtaatttctgtagaattaatcctacagayrcatgaaagcacattcagactttgctagcaagaagcatgtcatctgaaaatagaagcataatgttttttagtgtatttttgcacctgcagtaatgacaaaatgggagtgtacagaaacctggatgaaattgttcttatctcttgctaccatggtttatatttagaaacaaaaaatcatgatgaaggctattgttataactctgaactgtgctctgcatgtttgarcacgtgtacaaagcccaagtttacctaaaggaagcagtcaaccaaagatcaaatattcccttacagggaatgggaagcagcaagaactttggactttgtgagtttgagtttctgctgtgttgcttggtgtgcctccttcacagtgtgagagaaggagggtggcaaaagggttyctcaggacactcctgatagtctgagcaagtggaaggggcaggggagaggcaaggaagtgagtctagatatttctttttcctgagttctgcttcaaggtttctgagaagggaggatgaatagggacaa

SEQ ID NO: 37193 - DNA, 510 bp, Chicken  19866894264971_6
aaatgggagtgtacagaaacctggatgaaattgttcttatctcttgctaccatggtttatatttagaaacaaaaaatcatgatgaaggctattgttataactctgaactgtgctctgcatgtttgarcacgtgtacaaagcccaagtttacctaaaggaagcagtcaaccaaagatcaaatattcccttacagggaatgggaagcagcaagaactttggactttgtgagtttgagtttctgctgtgttgcttggtgtgcctccttcacagtgtgagagaaggagggtggcaaaagggttyctcaggacactcctgatagtctgagcaagtggaaggggcaggggagaggcaaggaagtgagtctagatatttctttttcctgagttctgcttcaaggtttctgagaagggaggatgaatagggacaagtacagaccgattataatcatagttactcctaagtcataggtgcctcgagcatcctcttaacttgtcctgcctctgacccaca

SEQ ID NO: 37194 - DNA, 599 bp, Chicken  19866894264982_1
  misc_feature (1)..(28): n is any nucleotide
nnnnnnnnnnnnnnnnnnnnnnnnnnnnccgtacggaatcaagtgtcagagcacccgtggaatctgaagttacagtgaggaaacgtggatggagtattggaaaaagccttttgtgtatctctcaatggttgctttgcagatgaatgtgggaacagctcttctgagagtctgtggtgccttgagatgactcaaggatttcttcatgattccatttgtggaagtttctttcacagtttcgatacctatctttttcaataaagtgtggaaattaccttctcctaatctgttttgatgtgtatrgcttctgttaaatgtatttgtaatacaaaatctgttgtaggattattttgggatttacttctgttccatataaattgaggagagtggactatatgctcttctgatttattcagagaaaaaaaacaggtttttgttgttgttgttgttgcttgttgcactgatttctgtgcagacaacagctggaaagatctgcacttcaacatgatttttatgtctggttttggacagattgtagcagtccgtgtggacagagatccagcgttcatttggcagcccatacgggtagaaccagctttgcc

SEQ ID NO: 37195 - DNA, 600 bp, Chicken  19866894264985_1
caattgctgcaggctggaattttagtagaaacctcaaggttccttctgagtataaagtgtaagcccagtacattttgaactaactgatatttctgaatggattactattgccatttggtagatattgcttccactgggtggtttaggttactgtgtgaaacctatttagattccttgaccttcttgtattttacattcattcagtgctattgttagtagttcccatagggcagtagtggaatgagctgtgaattgcacttacacagcagagctgctacttgaaaaacgatgatgtgaccrttttatttctttgtgctctgtatgtgtgtcagaaaaatagtttttgttcatgttaatgaagtgtttcccagttcttaatagctggttttgatgtcctagggagattggagttgctttataatttggtttcttgcagtccagaagtcattgctctaaaaaataaacaagagaatattcatgtttgatttatcgtttctttttcagcagttttcccctctcccccagcactatttctaagtctgtatgctaaaatattttgacatgctggatttcctttcttttaggaacacctgtgactcc

SEQ ID NO: 37196 - DNA, 599 bp, Chicken  19866894264990_1
  misc_feature (1)..(96): n is any nucleotide
nnnnnnnnnnnnnnnnnnnnnnnnnnnnnnnnnnnnnnnnnnnnnnnnnnnnnnnnnnnnnnnnnnnnnnnnnnnnnnnnnnnnnnnnnnnnnnnnactgaatgacagtgaagtattgtggctgtcaaaaaattctcagtagtgcagatcacatctttgtctgattaccgtccaacctattttctggtatttgtcttgtgaatagtagcgtctaccataaaaagacaaaacgtggtcccactacagcatgaatctgcatgaattaatatcaaactgttaagagtgcttcctaatatgaaygatttcaatacatagcaggatgtgcagtgtttacaaaastggattgtcagtctatgtgtaactgaaaaatctgtttacatttgctttttctttttttttacagtcttgcatagtttttcagaaaattttaataagtgtgatgccaaagagagtcaggagtacaaatcatagtatttactactaaactgagtttgtcattccacaattctaatggcttttacatctttagtctacagtggtgagtctattggaatcatgaacttatgtaacttctggttaaaattaaacttyagcaacat

SEQ ID NO: 37197 - DNA, 599 bp, Chicken  19866894264990_2
  misc_feature (1)..(57): n is any nucleotide
nnnnnnnnnnnnnnnnnnnnnnnnnnnnnnnnnnnnnnnnnnnnnnnnnnnnnnnnnactgaatgacagtgaagtattgtggctgtcaaaaaattctcagtagtgcagatcacatctttgtctgattaccgtccaacctattttctggtatttgtcttgtgaatagtagcgtctaccataaaaagacaaaacgtggtcccactacagcatgaatctgcatgaattaatatcaaactgttaagagtgcttcctaatatgaaygatttcaatacatagcaggatgtgcagtgtttacaaaastggattgtcagtctatgtgtaactgaaaaatctgtttacatttgctttttctttttttttacagtcttgcatagtttttcagaaaattttaataagtgtgatgccaaagagagtcaggagtacaaatcatagtatttactactaaactgagtttgtcattccacaattctaatggcttttacatctttagtctacagtggtgagtctattggaatcatgaacttatgtaacttctggttaaaattaaacttyagcaacataagtgattctttattgctcataatatccttcagacattg

SEQ ID NO: 37198 - DNA, 600 bp, Chicken  19866894264990_3
aatatgaaygatttcaatacatagcaggatgtgcagtgtttacaaaastggattgtcagtctatgtgtaactgaaaaatctgtttacatttgctttttctttttttttacagtcttgcatagtttttcagaaaattttaataagtgtgatgccaaagagagtcaggagtacaaatcatagtatttactactaaactgagtttgtcattccacaattctaatggcttttacatctttagtctacagtggtgagtctattggaatcatgaacttatgtaacttctggttaaaattaaacttyagcaacataagtgattctttattgctcataatatccttcagacattggctctattcaggtacactaagagtgtatgtcatacatatagagacaagtytaaagattgtagtagattacaagtaagcattgcttttctttttaatgtcaagaccttgatattacattcataaaagttataatataataaagaacacttaaatgctcatgactaattatgccatttaattggtgtaatgagtaatatacctccatactggtatatctgtattaatgcagttctataaaaatgatgacagaagg

SEQ ID NO: 37199 - DNA, 528 bp, Chicken  19866894264990_4
tctttttttttacagtcttgcatagtttttcagaaaattttaataagtgtgatgccaaagagagtcaggagtacaaatcatagtatttactactaaactgagtttgtcattccacaattctaatggcttttacatctttagtctacagtggtgagtctattggaatcatgaacttatgtaacttctggttaaaattaaacttyagcaacataagtgattctttattgctcataatatccttcagacattggctctattcaggtacactaagagtgtatgtcatacatatagagacaagtytaaagattgtagtagattacaagtaagcattgcttttctttttaatgtcaagaccttgatattacattcataaaagttataatataataaagaacacttaaatgctcatgactaattatgccatttaattggtgtaatgagtaatatacctccatactggtatatctgtattaatgcagttctataaaaatgatgacagaagggttactaaattctctacatgaaaga

SEQ ID NO: 37200 - DNA, 599 bp, Chicken  19866894264998_1
  misc_feature (1)..(19): n is any nucleotide
nnnnnnnnnnnnnnnnnnntgcctgatttccaactttcctctttgctgctgtatcaacatatctatatttcatggcagtgaattgagagtatctgcaagctcccatcacgcccatcttgtcatgaacacacccatgtactgtatgggtctcatgtcatcccaagaaacctggctgttcagggatggagcctccactcctgtcccctggcttacatttggacctcaagccttgcttgagcctttaacatttgcaagaaatttgcatgcacctttccacattctgtcaagcagaaaagagtrttctactactcatatccatgtgtactcattgcccagtctggcccctggcatgaccacaagaataccaagaatttttttttttctaccaaagtttygtttgtacttggggcactccctgattactccctctcagactactgcaagaaatcaaagttcaaacacttccctgatacaagcatccttccaacagtctttggtactcacacaagggcactttagaggagtgcattttcrtacaagaaataatgattgagtgactcatgaaaactgcagccaggaagcaagcaatagggcagcct

SEQ ID NO: 37201 - DNA, 600 bp, Chicken  19866894264998_2
tggcagtgaattgagagtatctgcaagctcccatcacgcccatcttgtcatgaacacacccatgtactgtatgggtctcatgtcatcccaagaaacctggctgttcagggatggagcctccactcctgtcccctggcttacatttggacctcaagccttgcttgagcctttaacatttgcaagaaatttgcatgcacctttccacattctgtcaagcagaaaagagtrttctactactcatatccatgtgtactcattgcccagtctggcccctggcatgaccacaagaataccaagaarttttttttttctaccaaagtttygtttgtacttggggcactccctgattactccctctcagactactgcaagaaatcaaagttcaaacacttccctgatacaagcatccttccaacagtctttggtactcacacaagggcactttagaggagtgcattttcrtacaagaaataatgattgagtgactcatgaaaactgcagccaggaagcaagcaatagggcagcctagaaaaggagacgctcagaaagcaaaaaatactacttcagctgcctgcctggagcagaacctctgcaaaacag

SEQ ID NO: 37202 - DNA, 600 bp, Chicken  19866894264998_3
caagctcccatcacgcccatcttgtcatgaacacacccatgtactgtatgggtctcatgtcatcccaagaaacctggctgttcagggatggagcctccactcctgtcccctggcttacatttggacctcaagccttgcttgagcctttaacatttgcaagaaatttgcatgcacctttccacattctgtcaagcagaaaagagtrttctactactcatatccatgtgtactcattgcccagtctggcccctggcatgaccacaagaataccaagaatttttttttttctaccaaagtttygtttgtacttggggcactccctgattactccctctcagactactgcaagaaatcaaagttcaaacacttccctgatacaagcatccttccaacagtctttggtactcacacaagggcactttagaggagtgcattttcrtacaagaaataatgattgagtgactcatgaaaactgcagccaggaagcaagcaatagggcagcctagaaaaggagacgctcagaaagcaaaaaatactacttcagctgcctgcctggagcagaacctctgcaaaacaggttaccccagctcaggaaccaac

SEQ ID NO: 37203 - DNA, 600 bp, Chicken  19866894264998_4
tgagcctttaacatttgcaagaaatttgcatgcacctttccacattctgtcaagcagaaaagagtrttctactactcatatccatgtgtactcattgcccagtctggcccctggcatgaccacaagaataccaagaatttttttttttctaccaaagtttygtttgtacttggggcactccctgattactccctctcagactactgcaagaaatcaaagttcaaacacttccctgatacaagcatccttccaacagtctttggtactcacacaagggcactttagaggagtgcattttcrtacaagaaataatgattgagtgactcatgaaaactgcagccaggaagcaagcaatagggcagcctagaaaaggagacgctcagaaagcaaaaaatactacttcagctgcctgcctggagcagaacctctgcaaaacaggttaccccagctcaggaaccaacccagcaaggatccccccatatatctccccagagggatcctggaggtgaaaaaaaataacttctgcctgaacaagaaatagcagtcacccctctgtaataggtgcagcagggatcttgactcccccagcagcaagcatgc

SEQ ID NO: 37204 - DNA, 600 bp, Chicken  19866894264998_5
ggaagggaagatgtgccttctccctcccttatccaggcccctctccaggatgctaatcccaccccttccaagaaggctgccggccactccaggaggagatccagctgtgtgtggccacgaagtcaatggaaaatagtttcacaatgagtattctatccaggcctttcatcccacgtggaaaatggtctgatggatcaaggcttggcagaaagagtctgagagctgggctcttcagctctgctgaaggaggagctggaatatcgctgagggtatacagtgcctcgagaactctctgtggtycaagtacacagaggactgatgttggatttggggagtctcagctgtaccaacaagccttgtggtcccctagagctgtccagctgctgacctasaccttgccaccagctcttgtagatacaggatccaaagaaggagacagcaagcctgtcctcttggaaaaatggggaggaatcatcctagaaagctcagtgtcaggctcttgcacctactctaggcacatctggggctgagaaacaaggggatgggcgcaaaatgctctgttataataagctatgggatctataggtcttttagctgcct

SEQ ID NO: 37205 - DNA, 600 bp, Chicken  19866894264998_6
gaggagatccagctgtgtgtggccacgaagtcaatggaaaatagtttcacaatgagtattctatccaggcctttcatcccacgtggaaaatggtctgatggatcaaggcttggcagaaagagtctgagagctgggctcttcagctctgctgaaggaggagctggaatatcgctgagggtatacagtgcctcgagaactctctgtggtycaagtacacagaggactgatgttggatttggggagtctcagctgtaccaacaagccttgtggtcccctagagctgtccagctgctgacctasaccttgccaccagctcttgtagatacaggatccaaagaaggagacagcaagcctgtcctcttggaaaaatggggaggaatcatcctagaaagctcagtgtcaggctcttgcacctactctaggcacatctggggctgagaaacaaggggatgggcgcaaaatgctctgttataataagctatgggatctataggtcttttagctgcctccactttgtgttccctttgcggcaagcgtgattcactctgggtgaaaggatccctttggaaaaagttacccaattactacatggctcaattg

SEQ ID NO: 37206 - DNA, 600 bp, Chicken  19866894265011_1
gtatggcaacctgaggccaagcctactgagtttggggagcaaacacagttgggaagaggcgatttttgacagctcatactccccttatatggtttgatctgtatccatcaaaatgcaccttccacacttgaaagcttttctccactgcttttccttctaaagtagggggacctgggaaagaaattctccattctgacacaaaaggagggaggtatataatgaacatcactgcgtgtgcacagagaaggatcgctgcacaactgccaattccttaaaattttccattcgtcctgaaagtcrgaagaatatctgccatcagcccccagtgccagccagcgttagataacggtacccaagagctttagcagtcagccaaggaaaactccgtgatgcaagtgctgaagtttattaaaccagccacagaggggctgtttcaggggaccaggcaagctggtaatattgcagcatatgattttcaagggtaagagatgcttagcttgatgctgactttataaagatgatggcaccactggcaggggcatccagtggaagaactggtaccaagctcccatgaaatatgctctttgtatggtggggttt

SEQ ID NO: 37207 - DNA, 600 bp, Chicken  19866894265017_1
aacaggttttgtgatttcagttccactgaaaacaccacagtatgaacagatgaacggacccccaactcttcacctgcccaggctgagatatcagcactaaggaatacaaaccaagactgaataatgagacctggacagtttgaaaatcttcagtaatatgccttttgagaaacagcactaccttcccaaatgtaatgaagaattcgagaataagttcacttccataaatcccacaagccacaaaacctttctttctcctcccccctttgggcaaaaacaactgaaatattgctatgttgyatgcatgccttcactgagcagttgggtagccttagatatgacctctgttcccctcttggaagtcttgagatatagcagtacagaaacttaacaaggaacatacgaagttaaaaacatgttctctggatcacagcaacatcagatcagctgatggagaaaagggcaaaagctcatttgatcttgattttcagtatgaatacagactgaaagcagggcctcacaatccttctttcaattaagccaaactaaaggagttcttcactcaaattacccatttattcctccagttgttttgctagt

SEQ ID NO: 37208 - DNA, 600 bp, Chicken  19866894265017_2
cagttgggtagccttagatatgacctctgttcccctcttggaagtcttgagatatagcagtacagaaacttaacaaggaacatacgaagttaaaaacatgttctctggatcacagcaacatcagatcagctgatggagaaaagggcaaaagctcatttgatcttgattttcagtatgaatacagactgaaagcagggcctcacaatccttctttcaattaagccaaactaaaggagttcttcactcaaattacccatttattcctccagttgttttgctagtttggttttggtctccctycaaatagacctgccaatgtctccttctgtgcttaattctcttccagcaatcaggtatttcatcttctsacaagcataggatatcttccttcatttccacttgagcattcagggagcttcccacacaggtaaccatctctattcttttaaggctctttcacctctgacacagcagtatactttaaaatgcaaaattaaagtattttccctttaaaaaaggaaataactcatgtacaatgaattctcacagttttgcagcagtaatcagaaatggcacttctgtagggattgggtgagggcc

SEQ ID NO: 37209 - DNA, 600 bp, Chicken  19866894265017_3
cttaacaaggaacatacgaagttaaaaacatgttctctggatcacagcaacatcagatcagctgatggagaaaagggcaaaagctcatttgatcttgattttcagtatgaatacagactgaaagcagggcctcacaatccttctttcaattaagccaaactaaaggagttcttcactcaaattacccatttattcctccagttgttttgctagtttggttttggtctccctycaaatagacctgccaatgtctccttctgtgcttaattctcttccagcaatcaggtatttcatcttctsacaagcataggatatcttccttcatttccacttgagcattcagggagcttcccacacaggtaaccatctctattcttttaaggctctttcacctctgacacagcagtatactttaaaatgcaaaattaaagtattttccctttaaaaaaggaaataactcatgtacaatgaattctcacagttttgcagcagtaatcagaaatggcacttctgtagggattgggtgagggcctgacatgactttcagcacacacctcccatcctacaggcagctaccatccctccaagcatacagagggt

SEQ ID NO: 37210 - DNA, 590 bp, Chicken  19866894265020_1
ctgctactgacctgtgatccaggaagcacttaatatcctacttggaagtaagccacaggagattactaaaagcaaacagtatgttggcagtgggcttcacctcaccgtgcatacaggtttctgtattatacaaaaatatcattaggcaaaatgtataattcaccaattagaaaatactacagacaattttcatttgttagtgagggaagtgttttacgggcacgctgagctttagaacaaccacattaaccattcaatctaatttttctcttatacttaatgctgaatttatgcaaatayagattactaataaatgacttaaaactaggaaatatcagctttacttagttttacttaacggactaaaacaattacccatctctaggtggaaatcttgactgcaattcctgtttgctgtgctcaaaaattaacataatttcaaaacttactgagagtcactttgcctcagagcagtcttttacatcatctcaaagctcaggtccttgagttttaaaaataacacttgagtttattattccaggcaaagaattctactgaaaagtccctttccatgcttgaacaaggaccga

SEQ ID NO: 37211 - DNA, 600 bp, Chicken  19866894265023_1
ccaagcactctttttcctctcctttgtcatcaaagcacagcagtgccctgaatcccagagtggttttagtgtgtctcagaagcaaaactacatgtgtcaacctgagcagaaaactaagaagaaatgattcagcctggtgttcagtgacaagtgcaaaagacctgacctagtagaggaaaagtgatcctcctaaatgttaatagcaattaaaaaccaaacaaaaagagatcaatgagaaaacaacaaatggagaactatctttctgtgagcagttatgttattttatgtgagacagctccwaacaactagggacaaggttggtggcacttggagttcagcgcggattggcacagggtgaatgtgggcaggtcttttacttgatcaatgcctcattttgcatttgggcaaacttgctcttacagaggggtgtcacactgattaactcattaacatttgtagagagctttgtattccttggataaatgacctggggaagtgggagcatgcgattatcctgtctgggtaatgaagtaaacagtcctcagctggtgtcaatggcagggattagcgttgtgtatatagagcatctgttatataaac

SEQ ID NO: 37212 - DNA, 600 bp, Chicken  19866894265034_1
tcatggcaacctagaaaaattgaatattttttgctaagattacttacataaaacgttggctgctaaatgccttccagaattaaattgtgtttaacgccatatctagacccaaattcctcaggcataacaaatgtatggtcccataatagcatggaatatagcatcaaatgcttaatatatggctatctagatattttttgcacaagtttatagcagattaggtttccttttaaaacttccagtgggacatagacatacctgtaagtttcaaaaggacacatgttttcaagaaccgcggamttttaaaagcatggcagtattgcatgtgtaagctaattgtctgctgtgtgggtaagtactggttgaataccaggttattttaagtaatgggagagtgcccctaaatacctatgcttaatatcctgatagctaaacaggcagggatagtccattaattaagcaggtaactacgtattagcaagttcctgtacctcgacatacagacctaaaagttgtaacagcctaatctcggtttcattcacaacagtagtgaaataagctgtattttattactgtaaaatgtaattcttttttctactt

SEQ ID NO: 37213 - DNA, 356 bp, Chicken  19866894265044_1
aaaagagaatatttccattttatgaaaaactactgtcatgaaatgactgcaaataactacacaaagtataacaacatcctattatgtaagctctaattttctacaaaaatatgtatatattttgacatcaccatcattgtttttgttactggtataagcaaactacaggttatctgcactgttcctgttgtctgtaatagagccttgccagctgtgggtaggagaaggcactcacagaacttggaatagagaaggaccttcatttatgcacttggcagctgtgctgttctgcagtttagkagacacagcagattttcatttctgaaaggaagcaaaatgctactgcagcatcaact

SEQ ID NO: 37214 - DNA, 600 bp, Chicken  19866894265045_1
ttttgaatatttcccagcatctcagaagctcactgctatgttcaaatgcatgggtcctatcttcttttcccccttatgcttacagggtattgtggtaccatgatgattgaagatgaggatgctgcaattggcttaacacttgatgatactaaacctgatggcagctttcctgctataatagggtaagagactgaagagatgtccagttcatgcctttttattttgtcttagaagccacaactgaaaaagaaaatctgctacttttggatgctttgataaaataagctccttgatccttgygggtcctttccaactatggctattctatgattctgtgatagttaaagggttggatctcagtgtatggtgaatattttctacgagtcttactttcaataaarttytcattgggatttattagcaaattttaaaatacaaaatactgtttcttctcttyttctgtctgtcatattttgcctcgtcacttcgcaaaatataagtggagaagcagaaagaaaggaggaaaaaagggagcgaatgcacaaatttaatgtttcctccaaatattttgctcccccaaaayttgcagctygttaagtg

SEQ ID NO: 37215 - DNA, 600 bp, Chicken  19866894265045_10
catatccaaataagcaaatatttttagggtaatggctagcataactagaggagatgtagtcatcttaaattggctttgtggatagtctagcagtctgtggataatgggtctagctgaggctgttagtatcccagtcttttgaagkgacagcctggaatcacaggctcccttcattttggcagcaatgggctcagactttggaggacagaagtagtgtagttattttgaaatccagaatgcccagtgttttcagtcatcataaacatcagatgacatcttacactgtgtcargctatgagrtattactgagcactkgcaatacctgagaacaaattctgtttctgtgaagagctattgtagtgatgtaagccacaactgaagaaaggaatttgtttcagtgaagaatggtcgtgaaatgtgcgtgggttggtacatacaacctggttgcctctctcaccccatgattctggtcacagcagtccaggcaggagcctcctgggctgcrgcttctccctgcacaccagcacaagtctccttccactggaaaccagggtccaggagaaggcagagtgcaaatggtttttgttatttagatagagg

SEQ ID NO: 37216 - DNA, 600 bp, Chicken  19866894265045_11
aaatatttttagggtaatggctagcataactagaggagatgtagtcatcttaaattggctttgtggatagtctagcagtctgtggataatgggtctagctgaggctgttagtatcccagtcttttgaagkgacagcctggaatcacaggctcccttcattttggcagcaatgggctcagactttggaggacagaagtagtgtagttattttgaaatccagaatgcccagtgttttcagtcatcataaacatcagatgacatcttacactgtgtcargctatgagrtattactgagcactkgcaatacctgagaacaaattctgtttctgtgaagagctattgtagtgatgtaagccacaactgaagaaaggaatttgtttcagtgaagaatggtcgtgaaatgtgcgtgggttggtacatacaacctggttgcctctctcaccccatgattctggtcacagcagtccaggcaggagcctcctgggctgcrgcttctccctgcacaccagcacaagtctccttccactggaaaccagggtccaggagaaggcagagtgcaaatggtttttgttatttagatagaggttatgatgttttggt

SEQ ID NO: 37217 - DNA, 567 bp, Chicken  19866894265045_12
cagaagtagtgtagttattttgaaatccagaatgcccagtgttttcagtcatcataaacatcagatgacatcttacactgtgtcargctatgagrtattactgagcactkgcaatacctgagaacaaattctgtttctgtgaagagctattgtagtgatgtaagccacaactgaagaaaggaatttgtttcagtgaagaatggtcgtgaaatgtgcgtgggttggtacatacaacctggttgcctctctcaccccatgattctggtcacagcagtccaggcaggagcctcctgggctgcrgcttctccctgcacaccagcacaagtctccttccactggaaaccagggtccaggagaaggcagagtgcaaatggtttttgttatttagatagaggttatgatgttttggtgcacaagtcctatggagagcggctgaaggaactgggattgttcagtctggagaagaggaggctgaggagagatcttattgctgaagcacctgaaagaaggttataacaaggtaggggtcagcctcttctcccaaataacagcaataggatgagaagt

SEQ ID NO: 37218 - DNA, 600 bp, Chicken  19866894265045_2
gatgattgaagatgaggatgctgcaattggcttaacacttgatgatactaaacctgatggcagctttcctgctataatagggtaagagactgaagagatgtccagttcatgcctttttattttgtcttagaagccacaactgaaaaagaaaatctgctacttttggatgctttgataaaataagctccttgatccttgygggtcctttccaactatggctattctatgattctgtgatagttaaagggttggatctcagtgtatggtgaatattttctacgagtcttactttcaataaarttytcattgggatttattagcaaattttaaaatacaaaatactgtttcttctcttyttctgtctgtcatattttgcctcgtcacttcgcaaaatataagtggagaagcagaaagaaaggaggaaaaaagggagcgaatgcacaaatttaatgtttcctccaaatattttgctcccccaaaayttgcagctygttaagtgaaaatttgttctctagcactgcattatttttattttaaatctgacagatcaatcttaaaaaagttactgatttcccggtcaatctcagatttcagctgttg

SEQ ID NO: 37219 - DNA, 600 bp, Chicken  19866894265045_3
gattgaagatgaggatgctgcaattggcttaacacttgatgatactaaacctgatggcagctttcctgctataatagggtaagagactgaagagatgtccagttcatgcctttttattttgtcttagaagccacaactgaaaaagaaaatctgctacttttggatgctttgataaaataagctccttgatccttgygggtcctttccaactatggctattctatgattctgtgatagttaaagggttggatctcagtgtatggtgaatattttctacgagtcttactttcaataaarttytcattgggatttattagcaaattttaaaatacaaaatactgtttcttctcttyttctgtctgtcatattttgcctcgtcacttcgcaaaatataagtggagaagcagaaagaaaggaggaaaaaagggagcgaatgcacaaatttaatgtttcctccaaatattttgctcccccaaaayttgcagctygttaagtgaaaatttgttctctagcactgcattatttttattttaaatctgacagatcaatcttaaaaaagttactgatttcccggtcaatctcagatttcagctgttgtta

SEQ ID NO: 37220 - DNA, 600 bp, Chicken  19866894265045_4
atggcagctttcctgctataatagggtaagagactgaagagatgtccagttcatgcctttttattttgtcttagaagccacaactgaaaaagaaaatctgctacttttggatgctttgataaaataagctccttgatccttgygggtcctttccaactatggctattctatgattctgtgatagttaaagggttggatctcagtgtatggtgaatattttctacgagtcttactttcaataaarttytcattgggatttattagcaaattttaaaatacaaaatactgtttcttctcttyttctgtctgtcatattttgcctcgtcacttcgcaaaatataagtggagaagcagaaagaaaggaggaaaaaagggagcgaatgcacaaatttaatgtttcctccaaatattttgctcccccaaaayttgcagctygttaagtgaaaatttgttctctagcactgcattatttttattttaaatctgacagatcaatcttaaaaaagttactgatttcccggtcaatctcagatttcagctgttgttattacatgctgcatgcactgctgtatgaaatttaggtcactgggaaacagctca

SEQ ID NO: 37221 - DNA, 600 bp, Chicken  19866894265045_5
agctccttgatccttgygggtcctttccaactatggctattctatgattctgtgatagttaaagggttggatctcagtgtatggtgaatattttctacgagtcttactttcaataaarttytcattgggatttattagcaaattttaaaatacaaaatactgtttcttctcttyttctgtctgtcatattttgcctcgtcacttcgcaaaatataagtggagaagcagaaagaaaggaggaaaaaagggagcgaatgcacaaatttaatgtttcctccaaatattttgctcccccaaaayttgcagctygttaagtgaaaatttgttctctagcactgcattatttttattttaaatctgacagatcaatcttaaaaaagttactgatttcccggtcaatctcagatttcagctgttgttattacatgctgcatgcactgctgtatgaaatttaggtcactgggaaacagctcatacggatawtacaacctatgagttccatccatagtgagtaaagcataaatcattgcgtgagacgaaatggatattttgggtagcgacccaaaagctaatattactgatcacatcatctcatccaga

SEQ ID NO: 37222 - DNA, 600 bp, Chicken  19866894265045_6
atccttgygggtcctttccaactatggctattctatgattctgtgatagttaaagggttggatctcagtgtatggtgaatattttctacgagtcttactttcaataaarttytcattgggatttattagcaaattttaaaatacaaaatactgtttcttctcttyttctgtctgtcatattttgcctcgtcacttcgcaaaatataagtggagaagcagaaagaaaggaggaaaaaagggagcgaatgcacaaatttaatgtttcctccaaatattttgctcccccaaaayttgcagctygttaagtgaaaatttgttctctagcactgcattatttttattttaaatctgacagatcaatcttaaaaaagttactgatttcccggtcaatctcagatttcagctgttgttattacatgctgcatgcactgctgtatgaaatttaggtcactgggaaacagctcatacggatawtacaacctatgagttccatccatagtgagtaaagcataaatcattgcgtgagacgaaatggatattttgggtagcgacccaaaagctaatattactgatcacatcatctcatccagaagtttgggt

SEQ ID NO: 37223 - DNA, 600 bp, Chicken  19866894265045_7
tcatattttgcctcgtcacttcgcaaaatataagtggagaagcagaaagaaaggaggaaaaaagggagcgaatgcacaaatttaatgtttcctccaaatattttgctcccccaaaayttgcagctygttaagtgaaaatttgttctctagcactgcattatttttattttaaatctgacagatcaatcttaaaaaagttactgatttcccggtcaatctcagatttcagctgttgttattacatgctgcatgcactgctgtatgaaatttaggtcactgggaaacagctcatacggatawtacaacctatgagttccatccatagtgagtaaagcataaatcattgcgtgagacgaaatggatattttgggtagcgacccaaaagctaatattactgatcacatcatctcatccagaagtttgggtgttttaaataatgcaggaggtgtagtaaaataatggaaacaaattgtttgtggtcttccttttttatagtttcattcttgctcgaaagtgtagaagactgaccaatctcacaaaagaagaaaggtgagtacaaacattggaaatttgaatgagttcagagtccaacttttggta

SEQ ID NO: 37224 - DNA, 600 bp, Chicken  19866894265045_8
agagaatttatgaaataatgaacttttttttccatcacactgattgacaggatctgattaaattaaaagctacatgtagactgtggaaatgagaagatccttattttgacaatgagaaaaatgtatttgtattttaagcataccacaaggaataccatatccaaataagcaaatatttttagggtaatggctagcataactagaggagatgtagtcatcttaaattggctttgtggatagtctagcagtctgtggataatgggtctagctgaggctgttagtatcccagtcttttgaagkgacagcctggaatcacaggctcccttcattttggcagcaatgggctcagactttggaggacagaagtagtgtagttattttgaaatccagaatgcccagtgttttcagtcatcataaacatcagatgacatcttacactgtgtcargctatgagrtattactgagcactkgcaatacctgagaacaaattctgtttctgtgaagagctattgtagtgatgtaagccacaactgaagaaaggaatttgtttcagtgaagaatggtcgtgaaatgtgcgtgggttggtacatacaacctggt

SEQ ID NO: 37225 - DNA, 600 bp, Chicken  19866894265045_9
aaggaataccatatccaaataagcaaatatttttagggtaatggctagcataactagaggagatgtagtcatcttaaattggctttgtggatagtctagcagtctgtggataatgggtctagctgaggctgttagtatcccagtcttttgaagkgacagcctggaatcacaggctcccttcattttggcagcaatgggctcagactttggaggacagaagtagtgtagttattttgaaatccagaatgcccagtgttttcagtcatcataaacatcagatgacatcttacactgtgtcargctatgagrtattactgagcactkgcaatacctgagaacaaattctgtttctgtgaagagctattgtagtgatgtaagccacaactgaagaaaggaatttgtttcagtgaagaatggtcgtgaaatgtgcgtgggttggtacatacaacctggttgcctctctcaccccatgattctggtcacagcagtccaggcaggagcctcctgggctgcrgcttctccctgcacaccagcacaagtctccttccactggaaaccagggtccaggagaaggcagagtgcaaatggtttttgttattt

SEQ ID NO: 37226 - DNA, 600 bp, Chicken  19866894265051_1
ctttcacccagaggcccttgtaaaaaggtcgagtgaaacaacacggacccataaaccaaagacccaagagatctgcaacattaatggatgatcacagagcatttttctaaatgttttggtttgttttttaaaataatcaccgttttaggcttttgaacaaagtgaaacacttttgctgctgccaatgaacaatgcttgaaactgaagtttcccatcctcaaaatccaggagcttttgagggacactgatctcactactgataaatggctttacaaatcaacccacctacaggtgatgggragctcaagttgctgtcagagcccccccaaagcagtgtgcactgatctgtgctttgtctgtgcagccacaggctctggggtttgtgctgagccatgttctgtacacatgtattacagaacagacttgcttgcctctgtctgcagtactgtaagaatacagcaatatataaatacacatgcagtcacacacggtgtatctgtgtatacactgtaatacagtcctcactctttcacactcacctcctctcctgtccacacaatctagcagagcagcactgggagccagcagagctgtgctatc

SEQ ID NO: 37227 - DNA, 600 bp, Chicken  19866894265054_1
actcactccttgtgttattacacctaccaggaccattgccacaaagtctaacagtgtgtaaaatccacataggacctgcagggagaggagatgggagggaggccatgacttcattctctacataccagccagcaacaaaggctctgcaaatagcactgcgttgacactttgacaatacaaggcaagaaggacttcagctcactctcctacagcaacagtggctctgcagtgttcataaggatgaagcactgtctgttaaggaacaccactgtccagcagatgagttgagtactatgcggrcagaacacatcatttgttgcatgcatagagagtgcgtgcagactgatgttgcactaggtaacacgatttagttcaatgctgttctattgacaggtaatgcaataatctaaatgaatactgataataaattatgggtaaacttcagtcttaccagggtctcacagggcaatccattttctcccagtctggaggaaatcacattaattacagtgaaagcacattcctgaccatgcttgaaatctcacttccagcacagagcgatagaagcagcaacctgtgatgcaatactgctgcagagtc

SEQ ID NO: 37228 - DNA, 600 bp, Chicken  19866894265057_1
taagtttagtacctcggggaacagtgtcttaactttctgaattgtaattttggcctgaactcctgtttggatgctgctacattcactagccttgatatcaatcataatttaagttgcaaagtacctctgagaaaaatgatagtcaattctagttttaggagcctaaatacttttgaaaatctgataatcagctgcacagtagagcatcttgcaacccaccaccaaagctcagggaacaggcatgaacaggcttttctcttttccttccttttccttccttttcctttctacctatctgaygtctctgtcagacatcctcaccaggatgcaggaaacaatgagcagctgaatcatatccaaaagcaatgaagggatgcatggaagcagatgaagtaataggtaaaaaaaaaacattgggaatgtgagtaccaaaaactcaaaactctccttcaagtaccagtatggctgcataaacattatccagggcatgtcaaagactttgatacaaagaatgtttttccccactggcagtgcaaaggcagtgtacaacagcagttttattgagggcatagggaactgcaaattccctaccaactttct

SEQ ID NO: 37229 - DNA, 599 bp, Chicken  19866894265065_1
  misc_feature (1)..(203): n is any nucleotide
nnnnnnnnnnnnnnnnnnnnnnnnnnnnnnnnnnnnnnnnnnnnnnnnnnnnnnnnnnnnnnnnnnnnnnnnnnnnnnnnnnnnnnnnnnnnnnnnnnnnnnnnnnnnnnnnnnnnnnnnnnnnnnnnnnnnnnnnnnnnnnnnnnnnnnnnnnnnnnnnnnnnnnnnnnnnnnnnnnnnnnnnnnnnnnnnnnnnnnnnnnnaaagttaaacttcttatttctgagtgtcctttcggaaaaaaaaataataattgtcaaagtagaaccagtgatcagaaatggctgcagaacttacttygtttctttccattatttatacgaaaagctttatattattatccagtcacattttagattattcactgttaggtttgcatastcaaatttgtctcaagtcaagctctctaaatgatagcattgttatcattgtctaatctttaaaggagctgaaggtcttgtcctcgaggatattggtttaaatccagctctgtgtatgtatttagctaactcagaggagatgatatggctcttagtgattaataactacgttcttcagaagctggcattttcactaaggtctacccgtatgtctaattg

SEQ ID NO: 37230 - DNA, 599 bp, Chicken  19866894265065_2
  misc_feature (1)..(122): n is any nucleotide
nnnnnnnnnnnnnnnnnnnnnnnnnnnnnnnnnnnnnnnnnnnnnnnnnnnnnnnnnnnnnnnnnnnnnnnnnnnnnnnnnnnnnnnnnnnnnnnnnnnnnnnnnnnnnnnnnnnnnnnnnnaaagttaaacttcttatttctgagtgtcctttcggaaaaaaaaataataattgtcaaagtagaaccagtgatcagaaatggctgcagaacttacttygtttctttccattatttatacgaaaagctttatattattatccagtcacattttagattattcactgttaggtttgcatastcaaatttgtctcaagtcaagctctctaaatgatagcattgttatcattgtctaatctttaaaggagctgaaggtcttgtcctcgaggatattggtttaaatccagctctgtgtatgtatttagctaactcagaggagatgatatggctcttagtgattaataactacgttcttcagaagctggcattttcactaaggtctacccgtatgtctaattgaattgaccctactgaatttaatccaaaattaagtacaattttaagtatagttattaaattatactttcatttgactaggaa

SEQ ID NO: 37231 - DNA, 600 bp, Chicken  19866894265067_1
aaaaaaaaaacaccaggctgctgaacttgttctgacatcatcgatggggaacgcagcctgcaatgctgacctgacctgacccgacccaacacacagggagcttgttgtgcacctgggggatgaattcaggcttcctgagtcctagacccttagggcacataataccccaaaggtaaaaaagccttggaaaaagaaaaaagaaatattcagagcttgtctcaggtattcatgggtagaaggagtaggacggacggaattccatcccgtccatgcgtggctgcctcacagcttcctgcagcycagagcaatgggcagaccctgtgagctgcgtgtcccacttagaaagggcaggggcagcagcaccagttccaacatcaataggtatgcacaggacaattccactgtgctgtccagacacagcagaaaagagaaggcttgatgtctccttggcacaccaatgggtttgcacctctttccatgagcatccatctgaaagacatgtccctccatcccacaaagataaagacctcacgcacagtaaggttggatcagccttgaaacttctcctccctcatttttgcggaaaaccatctttttttt

SEQ ID NO: 37232 - DNA, 600 bp, Chicken  19866894266945_1
aaggaacagaaaggtcaaacttatttagccaaaaatattttcctcatgggttttactcataaaatgaaaaagcgagaaaacttaaggtaaggctccagtttcatcacatcctaacacagaaaggaggagggaggagcaagaaaagaagcgcagtccttaaatgaaagacttgcggttgaccttggcacagaaccagaagccccatctgcaggtcccacgctacctttggtacacttagtacccccctagcccttggagctgggtgatgggatttctagagccacaagcacttagcgagasaagctgcgccagatacgtggccccagggaatgagcctcatagtttgctatttgcctgaggttgtgccatttatccaaacatcacacaatcacagaagccttttttttttttttttttttccatgcacacgtaaaatgaaaattatgtattctagtcgttggtattagcatgggaacatatatggcaggagttaccaacaggtcttcacaagggcttttaattcctttaaattttggggtatacccagaagagtagaaggtgcccttaagcacaagccagtgcctgctgatttctgggccc

SEQ ID NO: 37233 - DNA, 599 bp, Chicken  19866894266951_1
  misc_feature (1)..(77): n is any nucleotide
nnnnnnnnnnnnnnnnnnnnnnnnnnnnnnnnnnnnnnnnnnnnnnnnnnnnnnnnnnnnnnnnnnnnnnnnnnnnnatattattcattaagtttatcaaggaattctgtaatgtaataaggagcaattggaaaaggcaaggggtatcaaaagctatgtttgttttagaggttgaatcgcaaggtttgttaggcagtatgctggagaaattaaaaaggatattaaaaggaaggagacagaagacatcgtagcttttttgcacaagaggagcagacaaatcagcacacaaccagggacgtsgggaactgagagctccagatctggtcatgtgcatcataaggaaataccccttcagacctcttctctagcaccttcctgagaatgcagcttataggcatgaagggcagctgaaagggaccagagagaagaggcgtgcctgagctttacaagccaaagcgtgtttcccaatatgttttctggaaccttgtgctgcagctcatgctgtggaatgtggctggggggctggtatgctatcttgtctgcagttgcttcagaaacaactaatttaaaagtaattatgacaatagtgtacctgagca

SEQ ID NO: 37234 - DNA, 402 bp, Chicken  19866894266951_2
tggtatgctatcttgtctgcagttgcttcagaaacaactaatttaaaagtaattatgacaatagtgtacctgagcaggacagaggttaatttaactttctgaagaaggatatacaccttagtatagtgaaacaattacaagaaccagttttcccacaaataaagacaagaaaatggaatcttgcatgcacatgggtagggaaaacagtccactaaaaatgtgggaatgggagataacatgtcccttttgtctcccattcactaattatgcacgactataggcccagatcagttttcactscaggaaatgaatagcatcctatgagcttcagtggccttggtaagaagccttggagcaaactcactggcatgatagcttgaatctgctggtgactgtcatttc

SEQ ID NO: 37235 - DNA, 600 bp, Chicken  19866894266952_1
gggaagcgagagagaaatgaagtaacagtggaagggacaggttgctatttccactaataattctggcagcaggcattctcattctgacggtacttactccattaaatggctgctcctggaaatcaaaggaacaaaggtactgtgaaagatgttgtcagtgactcaattgtgactggctcccaagtaaaaagatacagtcttgctccctgcctgtcgaggaggtgacagctggacctgcaaatacagggctgtccttgtacacatccttcttggggcacaaccccagggcacttgtggcartgttaatgggcaaaactgtcccatggaaacaccgaaaggcctcagtgataagactaaccctgtgaatgcccaagaggaggcatctgtgactatccctccagcaaggrgactaagagacatcawggaatcatagaattgtttgagttggaagagaccttcaaaggtcataaagtccaactcccttgcaatgaacagggacaacttacagctacatcaggttgctcagaacctcttccagcctgactygaatgtctccagggatggagcatccaccacctctctgggcaaackgttccagtg

SEQ ID NO: 37236 - DNA, 600 bp, Chicken  19866894266952_2
ggctgctcctggaaatcaaaggaacaaaggtactgtgaaagatgttgtcagtgactcaattgtgactggctcccaagtaaaaagatacagtcttgctccctgcctgtcgaggaggtgacagctggacctgcaaatacagggctgtccttgtacacatccttcttggggcacaaccccagggcacttgtggcartgttaatgggcaaaactgtcccatggaaacaccgaaaggcctcagtgataagactaaccctgtgaatgcccaagaggaggcatctgtgactatccctccagcaaggrgactaagagacatcawggaatcatagaattgtttgagttggaagagaccttcaaaggtcataaagtccaactcccttgcaatgaacagggacaacttacagctacatcaggttgctcagaacctcttccagcctgactygaatgtctccagggatggagcatccaccacctctctgggcaaackgttccagtgcttcagatcctgcctccatatctcttgggggccttacataaagacagctttggctcctatttggtgactgatttttcttaagaaacaggcagtgagagacaactagc

SEQ ID NO: 37237 - DNA, 600 bp, Chicken  19866894266952_3
caaaggaacaaaggtactgtgaaagatgttgtcagtgactcaattgtgactggctcccaagtaaaaagatacagtcttgctccctgcctgtcgaggaggtgacagctggacctgcaaatacagggctgtccttgtacacatccttcttggggcacaaccccagggcacttgtggcartgttaatgggcaaaactgtcccatggaaacaccgaaaggcctcagtgataagactaaccctgtgaatgcccaagaggaggcatctgtgactatccctccagcaaggrgactaagagacatcawggaatcatagaattgtttgagttggaagagaccttcaaaggtcataaagtccaactcccttgcaatgaacagggacaacttacagctacatcaggttgctcagaacctcttccagcctgactygaatgtctccagggatggagcatccaccacctctctgggcaaackgttccagtgcttcagatcctgcctccatatctcttgggggccttacataaagacagctttggctcctatttggtgactgatttttcttaagaaacaggcagtgagagacaactagcgagtcaggctgtaacc

SEQ ID NO: 37238 - DNA, 600 bp, Chicken  19866894266952_4
ggctgtccttgtacacatccttcttggggcacaaccccagggcacttgtggcartgttaatgggcaaaactgtcccatggaaacaccgaaaggcctcagtgataagactaaccctgtgaatgcccaagaggaggcatctgtgactatccctccagcaaggrgactaagagacatcawggaatcatagaattgtttgagttggaagagaccttcaaaggtcataaagtccaactcccttgcaatgaacagggacaacttacagctacatcaggttgctcagaacctcttccagcctgactygaatgtctccagggatggagcatccaccacctctctgggcaaackgttccagtgcttcagatcctgcctccatatctcttgggggccttacataaagacagctttggctcctatttggtgactgatttttcttaagaaacaggcagtgagagacaactagcgagtcaggctgtaacctacttctgagctggacctgccctgggctcctaggttccctacagggagcaggtcccctaaacagcactgactacraatacagaacactgcacatcatggtttgcatatacacagtcttcaaca

SEQ ID NO: 37239 - DNA, 600 bp, Chicken  19866894266952_5
ttgtggcartgttaatgggcaaaactgtcccatggaaacaccgaaaggcctcagtgataagactaaccctgtgaatgcccaagaggaggcatctgtgactatccctccagcaaggrgactaagagacatcawggaatcatagaattgtttgagttggaagagaccttcaaaggtcataaagtccaactcccttgcaatgaacagggacaacttacagctacatcaggttgctcagaacctcttccagcctgactygaatgtctccagggatggagcatccaccacctctctgggcaaackgttccagtgcttcagatcctgcctccatatctcttgggggccttacataaagacagctttggctcctatttggtgactgatttttcttaagaaacaggcagtgagagacaactagcgagtcaggctgtaacctacttctgagctggacctgccctgggctcctaggttccctacagggagcaggtcccctaaacagcactgactacraatacagaacactgcacatcatggtttgcatatacacagtcttcaacacttttctgtttaaagaatgtagatccagcagtgaattcaagatct

SEQ ID NO: 37240 - DNA, 592 bp, Chicken  19866894266952_6
caacttacagctacatcaggttgctcagaacctcttccagcctgactygaatgtctccagggatggagcatccaccacctctctgggcaaackgttccagtgcttcagatcctgcctccatatctcttgggggccttacataaagacagctttggctcctatttggtgactgatttttcttaagaaacaggcagtgagagacaactagcgagtcaggctgtaacctacttctgagctggacctgccctgggctcctaggttccctacagggagcaggtcccctaaacagcactgactacraatacagaacactgcacatcatggtttgcatatacacagtcttcaacacttttctgtttaaagaatgtagatccagcagtgaattcaagatctactcagtgaatttaaagccacttacactgagctgtctctttttaatctgctatttgatgaataatttaagtcagcgtgtccgtttttataactgcttagtgaactggtccagagcaccaatctggctgaaaagcaacatgcctaaagcaaatcagtcagtgctgcttctcattcggctttccaagtaaccacataaaca

SEQ ID NO: 37241 - DNA, 600 bp, Chicken  19866894266959_1
tttatgatacgattgccaagcagctaactgcctgctagatggttgtcctcgagcagaggggttttatttctgaaccacctccccccccatatgcaaagtggatgaactaaatgaatgaaattttaatgtccttcagaggacttttgtaagctatcgttaagtagtctatagaggataaaaagtacgtgtgatatttttgtgtttttgtctttttttttcctgctctatgtgaaggaaaaaaaaaaggctgaaagttccctattttttgccacctctgtttttcttctaaatgagaaaaarcatgtcttgtttcctctattacttatttgcttctgccagaatgtatgatcataactgattgtctggtagaattatcccgaggttactgagagaacaaaaaatgagtaactctccagggaagaggtgtttttattcagctcgcttaaaagtttaaaacaaacaaacaaaaaacccaagcattcaaacacatggaaaaatactgggcaggaaaggtattttccaaactgtaagagcttgctcacattgatggtttaaagagtctgcatctaagacctctaaggaaactgcagagctcaaaaa

SEQ ID NO: 37242 - DNA, 557 bp, Chicken  19866894266965_1
  misc_feature (1)..(39): n is any nucleotide
nnnnnnnnnnnnnnnnnnnnnnnnnnnnnnnnnnnnnnnacgccgtactctctggcactgccgcccagaggacacaacacccatatggggacagcccgggggtgccgcagtggggacccagtgcccatagggggacacccccagcagtgacaccccagggccccagcgcccatctgagcaatccccgtggcagtagcacccagaggatgcggcacccatatggggacacccaatggcactccgggtacccagcaccccgatgggcagtgccatcccagcacccagccctcggcagtgccmcccgggtacccagcgcctgcaaagggccactccctgccatgccaccctggtgacacagagcccatctggggacccagcacccacaaagggacacctcctggcagtgccgtgctgcaggcgcagcacccatatggtgacacgctgtggtggtggcactctggggacccaatgcccacacggtgccacccacctgccaatacctcccgtgagtcacccgcaggagacatctgctaacacccagaattatccaccgctcc

SEQ ID NO: 37243 - DNA, 600 bp, Chicken  19866894266968_1
agagcataataaaatgttagctggaaaatttccttgccaactgttgcataaatcagtgctttagtattacttcagattccataacaaatttcctaaagtgctctagacagtgacattttaagctcaaatgttaaaagagaaattaaaaccttgagacatgatgcaaagactgtctgaattataaatctccaaactgtttgctattttttctcagaactgaagattgtagtagctagatataattgttttaactccttttctatattttttttctgaatggaaactatctataaaaagatmaatatttaataatttcctttcyrctttttataaaatactatgaatattgtggtaaggttccttcaaaccttcccttctgctgagtgaaaagtcatgactccttcagtctttcatcatagggcatattctccagacattttatcataactgtggtcctcctttggatgctctctagtctgtttgcatcttttctgaattctaaggaccagaatcagacrtagwattccaggtgtggcctgacaagtgctgagtgggatattcatatctctctatatctgctggtaatgcacttgcagatgc

SEQ ID NO: 37244 - DNA, 600 bp, Chicken  19866894266968_10
ggtaaggttccttcaaaccttcccttctgctgagtgaaaagtcatgactccttcagtctttcatcatagggcatattctccagacattttatcataactgtggtcctcctttggatgctctctagtctgtttgcatcttttctgaattctaaggaccagaatcagacrtagwattccaggtgtggcctgacaagtgctgagtgggatattcatatctctctatatctgctggtaatgcacttgcagatgctgcctaggatccaacttgccttygctgcagcaacacactgctgtgtcacrcccagcttgttttccaccaggacctctagtttcctttaaacaaggctgcttcccatccacgcagtcactagccagtactggggaatttggttatgtactcccaggcgtgggaaccttgtacttttctttgttcaactttatttagttcttgcttacccactctcccagcctgtatcataagacgtctgtcccttctgacatgtgcacctcaccacccagtttattgtcatctgcaaactttgtgatgctgcttttcaacctgaccatccagatcacttatgaagatgttaaatagcatgg

SEQ ID NO: 37245 - DNA, 600 bp, Chicken  19866894266968_2
agagcataataaaatgttagctggaaaatttccttgccaactgttgcataaatcagtgctttagtattacttcagattccataacaaatttcctaaagtgctctagacagtgacattttaagctcaaatgttaaaagagaaattaaaaccttgagacatgatgcaaagactgtctgaattataaatctccaaactgtttgctattttttctcagaactgaagattgtagtagctagatataattgttttaactccttttctatattttttttctgaatggaaactatctataaaaagatraatatttaataatttcctttcyrctttttataaaatactatgaatattgtggtaaggttccttcaaaccttcccttctgctgagtgaaaagtcatgactccttcagtctttcatcatagggcatattctccagacattttatcataactgtggtcctcctttggatgctctctagtctgtttgcatcttttctgaattctaaggaccagaatcagacrtagwattccaggtgtggcctgacaagtgctgagtgggatattcatatctctctatatctgctggtaatgcacttgcagatgc

SEQ ID NO: 37246 - DNA, 600 bp, Chicken  19866894266968_3; identical to SEQ ID NO: 37245

SEQ ID NO: 37247 - DNA, 600 bp, Chicken  19866894266968_4; identical to SEQ ID NO: 37245

SEQ ID NO: 37248 - DNA, 600 bp, Chicken  19866894266968_5
ggaaaatttccttgccaactgttgcataaatcagtgctttagtattacttcagattccataacaaatttcctaaagtgctctagacagtgacattttaagctcaaatgttaaaagagaaattaaaaccttgagacatgatgcaaagactgtctgaattataaatctccaaactgtttgctattttttctcagaactgaagattgtagtagctagatataattgttttaactccttttctatattttttttctgaatggaaactatctataaaaagataaatatttaataatttcctttcyrctttttataaaatactatgaatattgtggtaaggttccttcaaaccttcccttctgctgagtgaaaagtcatgactccttcagtctttcatcatagggcatattctccagacattttatcataactgtggtcctcctttggatgctctctagtctgtttgcatcttttctgaattctaaggaccagaatcagacrtagwattccaggtgtggcctgacaagtgctgagtgggatattcatatctctctatatctgctggtaatgcacttgcagatgctgcctaggatccaacttgcctt

SEQ ID NO: 37249 - DNA, 600 bp, Chicken  19866894266968_6
gaaaatttccttgccaactgttgcataaatcagtgctttagtattacttcagattccataacaaatttcctaaagtgctctagacagtgacattttaagctcaaatgttaaaagagaaattaaaaccttgagacatgatgcaaagactgtctgaattataaatctccaaactgtttgctattttttctcagaactgaagattgtagtagctagatataattgttttaactccttttctatattttttttctgaatggaaactatctataaaaagataaatatttaataatttcctttcyrctttttataaaatactatgaatattgtggtaaggttccttcaaaccttcccttctgctgagtgaaaagtcatgactccttcagtctttcatcatagggcatattctccagacattttatcataactgtggtcctcctttggatgctctctagtctgtttgcatcttttctgaattctaaggaccagaatcagacrtagwattccaggtgtggcctgacaagtgctgagtgggatattcatatctctctatatctgctggtaatgcacttgcagatgctgcctaggatccaacttgcctty

SEQ ID NO: 37250 - DNA, 600 bp, Chicken  19866894266968_7
gaagattgtagtagctagatataattgttttaactccttttctatattttttttctgaatggaaactatctataaaaagataaatatttaataatttcctttcyrctttttataaaatactatgaatattgtggtaaggttccttcaaaccttcccttctgctgagtgaaaagtcatgactccttcagtctttcatcatagggcatattctccagacattttatcataactgtggtcctcctttggatgctctctagtctgtttgcatcttttctgaattctaaggaccagaatcagacrtagwattccaggtgtggcctgacaagtgctgagtgggatattcatatctctctatatctgctggtaatgcacttgcagatgctgcctaggatccaacttgccttygctgcagcaacacactgctgtgtcacrcccagcttgttttccaccaggacctctagtttcctttaaacaaggctgcttcccatccacgcagtcactagccagtactggggaatttggttatgtactcccaggcgtgggaaccttgtacttttctttgttcaactttatttagttcttgcttacccactctcccag

SEQ ID NO: 37251 - DNA, 600 bp, Chicken  19866894266968_8
attgtagtagctagatataattgttttaactccttttctatattttttttctgaatggaaactatctataaaaagataaatatttaataatttcctttcyrctttttataaaatactatgaatattgtggtaaggttccttcaaaccttcccttctgctgagtgaaaagtcatgactccttcagtctttcatcatagggcatattctccagacattttatcataactgtggtcctcctttggatgctctctagtctgtttgcatcttttctgaattctaaggaccagaatcagacrtagwattccaggtgtggcctgacaagtgctgagtgggatattcatatctctctatatctgctggtaatgcacttgcagatgctgcctaggatccaacttgccttygctgcagcaacacactgctgtgtcacrcccagcttgttttccaccaggacctctagtttcctttaaacaaggctgcttcccatccacgcagtcactagccagtactggggaatttggttatgtactcccaggcgtgggaaccttgtacttttctttgttcaactttatttagttcttgcttacccactctcccagcctg

SEQ ID NO: 37252 - DNA, 600 bp, Chicken  19866894266968_9
ctttttataaaatactatgaatattgtggtaaggttccttcaaaccttcccttctgctgagtgaaaagtcatgactccttcagtctttcatcatagggcatattctccagacattttatcataactgtggtcctcctttggatgctctctagtctgtttgcatcttttctgaattctaaggaccagaatcagacrtagwattccaggtgtggcctgacaagtgctgagtgggatattcatatctctctatatctgctggtaatgcacttgcagatgctgcctaggatccaacttgccttygctgcagcaacacactgctgtgtcacrcccagcttgttttccaccaggacctctagtttcctttaaacaaggctgcttcccatccacgcagtcactagccagtactggggaatttggttatgtactcccaggcgtgggaaccttgtacttttctttgttcaactttatttagttcttgcttacccactctcccagcctgtatcataagacgtctgtcccttctgacatgtgcacctcaccacccagtttattgtcatctgcaaactttgtgatgctgcttttcaacctgaccatccagat

SEQ ID NO: 37253 - DNA, 600 bp, Chicken  19866894266979_1
cttgtattgaattcagtttacagtctacattaaggataaggagtcccagtgttttttcgttgtttatttctgaaccatatatatatgctgaaaatacagcatgctatgcagctgtgcctaagcttaacagctatctccctctgggtacattttttgtttctcactggattctcacaagcagatgaaatggtgcacaaaagctagcaaagatataagatagataaagaagtgattcactcatcattttttctttctttctttttctttttcctgtgttcatatgtacatttgtactgagaragtcagcagtacaatgctttaaattaatgtgcatcccaagacctactgtcatcttctcccgatgttctagttggattaayagaagtaataaccttgctgtaccatttttaatttacttctgcaaatttattccctgcctcctcctgaaagcacagctaaatcaggggtaactgcagtcatgaggtgagggaaaaataattagctctcattctgaagacaatccaaagaacaatcttcaaaaatgtatattttgaaactacagaagttaggaattcacatatacgtaatggaaaggaaatt

SEQ ID NO: 37254 - DNA, 600 bp, Chicken  19866894266979_2
atatatgctgaaaatacagcatgctatgcagctgtgcctaagcttaacagctatctccctctgggtacattttttgtttctcactggattctcacaagcagatgaaatggtgcacaaaagctagcaaagatataagatagataaagaagtgattcactcatcattttttctttctttctttttctttttcctgtgttcatatgtacatttgtactgagaragtcagcagtacaatgctttaaattaatgtgcatcccaagacctactgtcatcttctcccgatgttctagttggattaayagaagtaataaccttgctgtaccatttttaatttacttctgcaaatttattccctgcctcctcctgaaagcacagctaaatcaggggtaactgcagtcatgaggtgagggaaaaataattagctctcattctgaagacaatccaaagaacaatcttcaaaaatgtatattttgaaactacagaagttaggaattcacatatacgtaatggaaaggaaatttgcatttttgcttctgataatttcagtatttcgaggcaatgattttgagacatatatgaaaaaaaaacaacacaaatatt

SEQ ID NO: 37255 - DNA, 599 bp, Chicken  19866894266991_1
  misc_feature (1)..(152): n is any nucleotide
nnnnnnnnnnnnnnnnnnnnnnnnnnnnnnnnnnnnnnnnnnnnnnnnnnnnnnnnnnnnnnnnnnnnnnnnnnnnnnnnnnnnnnnnnnnnnnnnnnnnnnnnnnnnnnnnnnnnnnnnnnnnnnnnnnnnnnnnnnnnnnnnnnnnnnnnaatgccatttcttaagtgaaaaaaattatcatacaatgtcttctctgaaaaggcagctaaaacaaaaagggaaaattcaagcctacaaagaaagaaggaagcatggatgttatggagaagagacacagaatttctatgatggagtttmrtgtagttctcactaagcaayatacctttctcagttggcctatttagcctagtgcaaaagcaactgtattttctgatgcttacactagcttcagttaaaggccgtgcagggatatgtatagaagatatggatgaaggggtccccaggagacgttacctttcctttttccagctgcaatgcagaatcacctatacctacattatttcatatatgtatatataacccattttcawagaggagtagtagcataaatcccaccactacctcctgcagctcttaatgacctttactgtaaggtc

SEQ ID NO: 37256 - DNA, 599 bp, Chicken  19866894266991_2
  misc_feature (1)..(151): n is any nucleotide
nnnnnnnnnnnnnnnnnnnnnnnnnnnnnnnnnnnnnnnnnnnnnnnnnnnnnnnnnnnnnnnnnnnnnnnnnnnnnnnnnnnnnnnnnnnnnnnnnnnnnnnnnnnnnnnnnnnnnnnnnnnnnnnnnnnnnnnnnnnnnnnnnnnnnnnaatgccatttcttaagtgaaaaaaattatcatacaatgtcttctctgaaaaggcagctaaaacaaaaagggaaaattcaagcctacaaagaaagaaggaagcatggatgttatggagaagagacacagaatttctatgatggagtttmrtgtagttctcactaagcaayatacctttctcagttggcctatttagcctagtgcaaaagcaactgtattttctgatgcttacactagcttcagttaaaggccgtgcagggatatgtatagaagatatggatgaaggggtccccaggagacgttacctttcctttttccagctgcaatgcagaatcacctatacctacattatttcatatatgtatatataacccattttcawagaggagtagtagcataaatcccaccactacctcctgcagctcttaatgacctttactgtaaggtct

SEQ ID NO: 37257 - DNA, 599 bp, Chicken  19866894266991_3
  misc_feature (1)..(131): n is any nucleotide
nnnnnnnnnnnnnnnnnnnnnnnnnnnnnnnnnnnnnnnnnnnnnnnnnnnnnnnnnnnnnnnnnnnnnnnnnnnnnnnnnnnnnnnnnnnnnnnnnnnnnnnnnnnnnnnnnnnnnnnnnnnnnnnnnnnaatgccatttcttaagtgaaaaaaattatcatacaatgtcttctctgaaaaggcagctaaaacaaaaagggaaaattcaagcctacaaagaaagaaggaagcatggatgttatggagaagagacacagaatttctatgatggagtttmrtgtagttctcactaagcaayatacctttctcagttggcctatttagcctagtgcaaaagcaactgtattttctgatgcttacactagcttcagttaaaggccgtgcagggatatgtatagaagatatggatgaaggggtccccaggagacgttacctttcctttttccagctgcaatgcagaatcacctatacctacattatttcatatatgtatatataacccattttcawagaggagtagtagcataaatcccaccactacctcctgcagctcttaatgacctttactgtaaggtcttaaaagtctaaccccaatct

SEQ ID NO: 37258 - DNA, 600 bp, Chicken  19866894266991_4
cctacaaagaaagaaggaagcatggatgttatggagaagagacacagaatttctatgatggagtttmrtgtagttctcactaagcaayatacctttctcagttggcctatttagcctagtgcaaaagcaactgtattttctgatgcttacactagcttcagttaaaggccgtgcagggatatgtatagaagatatggatgaaggggtccccaggagacgttacctttcctttttccagctgcaatgcagaatcacctatacctacattatttcatatatgtatatataacccattttcawagaggagtagtagcataaatcccaccactacctcctgcagctcttaatgacctttactgtaaggtcttaaaagtctaaccccaatctttcccactgcacagtgcagtaccatcacagaagcggtacctgggtaagatttgtaattgactcctaacttgccacatccatgtttttttttttttcactaagtcttcagtgaagccattcttggcatcattagtatgcctctttactatgtttcacaactagggaccaagaagttgtgatttctcaagcacatcatgttgacaggtgcacctg

SEQ ID NO: 37259 - DNA, 600 bp, Chicken  19866894266995_1
ttctatttcattgcagttaaaatgttcatggttataaatcaccgaggagaacaaatgtttatatttgattttcttattgattaaaaatttagattctattgttacttcggtgcttccctttcttcaaccctgattaaagagccaagtaatcacatctggttttcatgtcaggtgatagaaatgagcgagctaacgacctgccgtgcatgctggaaaaaagcaggagctctgggttctactgttagacaggggatggatgaggtgcttgctcagtcctttctggttcttttgtctgctctyctaaaagaactgggaagagacttgaagcaaaccctggcttcagttgcagtatattgttgtactccaagctacctgcaaaacctgtgcgtgctgaagagcgtttgcatttgaatctggaattcagagctgtcaaggttcagatctgtgttggtagcaataacaggtaatttcaccttttaaattttatgtaacggtacagattattcctgtggatttttttggagtacaatagaaacatgattttgaagaaaggcagtgtttgccttctgctatctaacttattttccgtaagatgtagta

SEQ ID NO: 37260 - DNA, 599 bp, Chicken  19866894266997_1
  misc_feature (1)..(55): n is any nucleotide
nnnnnnnnnnnnnnnnnnnnnnnnnnnnnnnnnnnnnnnnnnnnnnnnnnnnnnnatttctatttggtagacttgctggccaagccttctaagagtatgtctcatccttctctcttttatttagtaggaatcccatagcagttatatattcccaaggaggtcataagttccatcggaagcatcaggcatcttgcaccttttacttttcttgacctaaaatggccatggtatggcctgaaagaggtgtaacaagcaagagagtctgggagaactgcatgcagaagtggcaaggctacaggsaatacagtgtgggctatttattcaattaattatgggaaaggccagacagcaacttaacgagcatggtcccactgcggcacactgacatgtgtgtgtgtagctgatctgtttcctggtagctttgtagtaaagataacttgcagtttacagccctataaagagttgtcatttatagtcctatccgttatagcaagtagcagactgctctacactactggcatggaaatatgaatacttttttccatctggggatattcatatcacttatccttaagacttaacttaagcccaagatgctc

SEQ ID NO: 37261 - DNA, 600 bp, Chicken  19866894266999_1
ctcacttgtgatgttttccggcttggcattacccaacaccaaaccctgaataacaggcaaggggaaagtcctgttttttttgcttcttgagaacgtggtcttacagactgccaagggatgtttgctgctggagtgtctgtactggaaacataaaaagcttccatttcccagataaataatactctggttttcacatgattagcaggaaagcacattcttagtccaaattgttttcttatcagtattcaggtttatgcttcagaaaaagaaaggccagagcttttctaaaaagccggctgygttgtttttgtttgtttgcttgtttatcataaattcattttttcttggcactactcttagaaaagacaatcaatttgtctgaaatttcccaaaattttggggtagctattcaacatgaaaaaaatcaggccagggagttgcactttggtagaattactaaggggttatcatctgacaggaagcatgggatagactatacaactgctaatgtgggagttacagccgttcttattacctgagagaatgtctgagctgttttataattctaaatatacattctgatgatgattataaaacctt

SEQ ID NO: 37262 - DNA, 529 bp, Chicken  19866894267004_1
gtacatgttttttttttatcaaatatgatactgcccagttactgattgttactctatatatccaggtgcccttagggttttcaaggcatccctgtaagcttcatcaacagacataacttgtcctcttaataatagcagatgtcaaattttcatgcccctaagatgcttactcatacctcgtagatccatctggtatagatcgagcctcagtcaatttgttctcatccatgaccttcccactgagaaagcaaatcgagcagagctcctcagtccaatgaaaaacaaacctgaatattataracrtatttatagtaccacaacccacttcacttcactgtctttcctaattgctttacacaggtgacaagactggtaacaatgcaatagggatggaattcctgaagcataccatcagtatctggtttccaagggtggaacaactagaatatgtcatttttgtgagaaaagattgtttaagattaagaaagagaaaaaaaaataatagagaaagtctactgataagtcaaga

SEQ ID NO: 37263 - DNA, 526 bp, Chicken  19866894267004_2
catgttttttttttatcaaatatgatactgcccagttactgattgttactctatatatccaggtgcccttagggttttcaaggcatccctgtaagcttcatcaacagacataacttgtcctcttaataatagcagatgtcaaattttcatgcccctaagatgcttactcatacctcgtagatccatctggtatagatcgagcctcagtcaatttgttctcatccatgaccttcccactgagaaagcaaatcgagcagagctcctcagtccaatgaaaaacaaacctgaatattataracrtatttatagtaccacaacccacttcacttcactgtctttcctaattgctttacacaggtgacaagactggtaacaatgcaatagggatggaattcctgaagcataccatcagtatctggtttccaagggtggaacaactagaatatgtcatttttgtgagaaaagattgtttaagattaagaaagagaaaaaaaaataatagagaaagtctactgataagtcaaga

SEQ ID NO: 37264 - DNA, 584 bp, Chicken  19866894267016_1
gggaaatgtgtgcactgctcctcagagggccgactcagagcagtcagcattggcactgcagggctgtgtaagaggcgctgctcgggaaataaccaaaggagaaatgctaccacagcaacgtgatgccgaccattgcttactattgccttcctcagcatggttagcgctaagaagggtgcagcacattgcacacggcatagaagagcttgcaccacagacagccctggacgtggtaacgaatctatccatcaaaacagaaaacatgagctgtactgctgtgctcttccttccaaaactcawgctcactgattaaaaaccagtatcatcgccactgcatgacatcttgcttacaattagtgcccaggatacgcaacccctgttgagcagaacggccagttagcaaccacgaccacatagcatagaagtccatttctggtcatgcacacgaggatggatttcatcccatgaaatgcaatcctctgctgagaagatcagcacttggcctgtgaaagaaactctgcactgagtttcctcacctgctggagccacagctcaacaagattggaagacttacctccaaggag

SEQ ID NO: 37265 - DNA, 599 bp, Chicken  19866894267024_1
  misc_feature (1)..(49): n is any nucleotide
nnnnnnnnnnnnnnnnnnnnnnnnnnnnnnnnnnnnnnnnnnnnnnnnnttcatgttcggccccagattgcatgctctgactaacgggtgcactgagctgtaaatatctatctgcattttctcaacacacagtaatctctcttgcccagccgtgctctttagctgttctaggattcctgcagatgaggcttctttcctacttacacaatacagatattcgggttggctttggaaattcctgctcgtggatagtagaaattaaaggctaccataagaaactgcatcagacttgcaatgtgyctacagtagtgaaacttaastctgggcaagatgtcrtgttaggagtgcagcagactgagtccatgcagtacagtgataaaagggtccaagtcctgagtcgccctccgtaagcacagtaggaagtaaatggagaaggagctaaggtggctaggaatctaargtcagtgcctaaaattaartgcaataaatctggctttgtacatgcaaaacaacacgttcacgtttgcaaaaatcatatctgcatttgtatctgctttttgatacaaggctgataatactcatagttaaaatgagttaat

SEQ ID NO: 37266 - DNA, 600 bp, Chicken  19866894267024_10
tccaagtcctgagtcgccctccgtaagcacagtaggaagtaaatggagaaggagctaaggtggctaggaatctaargtcagtgcctaaaattaartgcaataaatctggctttgtacatgcaaaacaacacgttcacgtttgcaaaaatcatatctgcatttgtatctgctttttgatacaaggctgataatactcatagttaaaatgagttaatgacacagctttatgaagaggtttacaacaaaaacyggwcrcagcaaagcargtatactttcctagctttatttttaatgctatayttttttgcatgtgcaggtcaacctaaacatttaattcccaatttttcaaaaatatcagtaagttcaaacttgaagtactcctcctaagaaatgaaacactttggattaatactattaaaacactgctttttgcttctattcacatcagatgttttatttccaattaatttgattattaaagccaaacagattccaaaaagcactaaacctttatactggatccaataaagcactcaatttacattacaaaattaaatgagatattaccttgcacacatattgaaaggaacatgcacacat

SEQ ID NO: 37267 - DNA, 599 bp, Chicken  19866894267024_2
  misc_feature (1)..(29): n is any nucleotide
nnnnnnnnnnnnnnnnnnnnnnnnnnnnnttcatgttcggccccagattgcatgctctgactaacgggtgcactgagctgtaaatatctatctgcattttctcaacacacagtaatctctcttgcccagccgtgctctttagctgttctaggattcctgcagatgaggcttctttcctacttacacaatacagatattcgggttggctttggaaattcctgctcgtggatagtagaaattaaaggctaccataagaaactgcatcagacttgcaatgtgyctacagtagtgaaacttaastctgggcaagatgtcrtgttaggagtgcagcagactgagtccatgcagtacagtgataaaagggtccaagtcctgagtcgccctccgtaagcacagtaggaagtaaatggagaaggagctaaggtggctaggaatctaargtcagtgcctaaaattaartgcaataaatctggctttgtacatgcaaaacaacacgttcacgtttgcaaaaatcatatctgcatttgtatctgctttttgatacaaggctgataatactcatagttaaaatgagttaatgacacagctttatgaagagg

SEQ ID NO: 37268 - DNA, 599 bp, Chicken  19866894267024_3
  misc_feature (1)..(13): n is any nucleotide
nnnnnnnnnnnnnttcatgttcggccccagattgcatgctctgactaacgggtgcactgagctgtaaatatctatctgcattttctcaacacacagtaatctctcttgcccagccgtgctctttagctgttctaggattcctgcagatgaggcttctttcctacttacacaatacagatattcgggttggctttggaaattcctgctcgtggatagtagaaattaaaggctaccataagaaactgcatcagacttgcaatgtgyctacagtagtgaaacttaastctgggcaagatgtcrtgttaggagtgcagcagactgagtccatgcagtacagtgataaaagggtccaagtcctgagtcgccctccgtaagcacagtaggaagtaaatggagaaggagctaaggtggctaggaatctaargtcagtgcctaaaattaartgcaataaatctggctttgtacatgcaaaacaacacgttcacgtttgcaaaaatcatatctgcatttgtatctgctttttgatacaaggctgataatactcatagttaaaatgagttaatgacacagctttatgaagaggtttacaacaaaaacyg

SEQ ID NO: 37269 - DNA, 600 bp, Chicken  19866894267024_4
agctgttctaggattcctgcagatgaggcttctttcctacttacacaatacagatattcgggttggctttggaaattcctgctcgtggatagtagaaattaaaggctaccataagaaactgcatcagacttgcaatgtgyctacagtagtgaaacttaastctgggcaagatgtcrtgttaggagtgcagcagactgagtccatgcagtacagtgataaaagggtccaagtcctgagtcgccctccgtaagcacagtaggaagtaaatggagaaggagctaaggtggctaggaatctaargtcagtgcctaaaattaartgcaataaatctggctttgtacatgcaaaacaacacgttcacgtttgcaaaaatcatatctgcatttgtatctgctttttgatacaaggctgataatactcatagttaaaatgagttaatgacacagctttatgaagaggtttacaacaaaaacyggwcrcagcaaagcargtatactttcctagctttatttttaatgctatayttttttgcatgtgcaggtcaacctaaacatttaattcccaatttttcaaaaatatcagtaagttcaaacttgaagt

SEQ ID NO: 37270 - DNA, 600 bp, Chicken  19866894267024_5
cagatgaggcttctttcctacttacacaatacagatattcgggttggctttggaaattcctgctcgtggatagtagaaattaaaggctaccataagaaactgcatcagacttgcaatgtgyctacagtagtgaaacttaastctgggcaagatgtcrtgttaggagtgcagcagactgagtccatgcagtacagtgataaaagggtccaagtcctgagtcgccctccgtaagcacagtaggaagtaaatggagaaggagctaaggtggctaggaatctaargtcagtgcctaaaattaartgcaataaatctggctttgtacatgcaaaacaacacgttcacgtttgcaaaaatcatatctgcatttgtatctgctttttgatacaaggctgataatactcatagttaaaatgagttaatgacacagctttatgaagaggtttacaacaaaaacyggwcrcagcaaagcargtatactttcctagctttatttttaatgctatayttttttgcatgtgcaggtcaacctaaacatttaattcccaatttttcaaaaatatcagtaagttcaaacttgaagtactcctcctaagaaatgaa

SEQ ID NO: 37271 - DNA, 600 bp, Chicken  19866894267024_6
crtgttaggagtgcagcagactgagtccatgcagtacagtgataaaagggtccaagtcctgagtcgccctccgtaagcacagtaggaagtaaatggagaaggagctaaggtggctaggaatctaargtcagtgcctaaaattaartgcaataaatctggctttgtacatgcaaaacaacacgttcacgtttgcaaaaatcatatctgcatttgtatctgctttttgatacaaggctgataatactcatagttaaaatgagttaatgacacagctttatgaagaggtttacaacaaaaacyggwcrcagcaaagcargtatactttcctagctttatttttaatgctatayttttttgcatgtgcaggtcaacctaaacatttaattcccaatttttcaaaaatatcagtaagttcaaacttgaagtactcctcctaagaaatgaaacactttggattaatactattaaaacactgctttttgcttctattcacatcagatgttttatttccaattaatttgattattaaagccaaacagattccaaaaagcactaaacctttatactggatccaataaagcactcaatttacattacaaa

SEQ ID NO: 37272 - DNA, 600 bp, Chicken  19866894267024_7
gttaggagtgcagcagactgagtccatgcagtacagtgataaaagggtccaagtcctgagtcgccctccgtaagcacagtaggaagtaaatggagaaggagctaaggtggctaggaatctaargtcagtgcctaaaattaartgcaataaatctggctttgtacatgcaaaacaacacgttcacgtttgcaaaaatcatatctgcatttgtatctgctttttgatacaaggctgataatactcatagttaaaatgagttaatgacacagctttatgaagaggtttacaacaaaaacyggwcrcagcaaagcargtatactttcctagctttatttttaatgctatayttttttgcatgtgcaggtcaacctaaacatttaattcccaatttttcaaaaatatcagtaagttcaaacttgaagtactcctcctaagaaatgaaacactttggattaatactattaaaacactgctttttgcttctattcacatcagatgttttatttccaattaatttgattattaaagccaaacagattccaaaaagcactaaacctttatactggatccaataaagcactcaatttacattacaaaatt

SEQ ID NO: 37273 - DNA, 600 bp, Chicken  19866894267024_8
taggagtgcagcagactgagtccatgcagtacagtgataaaagggtccaagtcctgagtcgccctccgtaagcacagtaggaagtaaatggagaaggagctaaggtggctaggaatctaargtcagtgcctaaaattaartgcaataaatctggctttgtacatgcaaaacaacacgttcacgtttgcaaaaatcatatctgcatttgtatctgctttttgatacaaggctgataatactcatagttaaaatgagttaatgacacagctttatgaagaggtttacaacaaaaacyggwcrcagcaaagcargtatactttcctagctttatttttaatgctatayttttttgcatgtgcaggtcaacctaaacatttaattcccaatttttcaaaaatatcagtaagttcaaacttgaagtactcctcctaagaaatgaaacactttggattaatactattaaaacactgctttttgcttctattcacatcagatgttttatttccaattaatttgattattaaagccaaacagattccaaaaagcactaaacctttatactggatccaataaagcactcaatttacattacaaaattaa

SEQ ID NO: 37274 - DNA, 600 bp, Chicken  19866894267024_9
cagactgagtccatgcagtacagtgataaaagggtccaagtcctgagtcgccctccgtaagcacagtaggaagtaaatggagaaggagctaaggtggctaggaatctaargtcagtgcctaaaattaartgcaataaatctggctttgtacatgcaaaacaacacgttcacgtttgcaaaaatcatatctgcatttgtatctgctttttgatacaaggctgataatactcatagttaaaatgagttaatgacacagctttatgaagaggtttacaacaaaaacyggwcrcagcaaagcargtatactttcctagctttatttttaatgctatayttttttgcatgtgcaggtcaacctaaacatttaattcccaatttttcaaaaatatcagtaagttcaaacttgaagtactcctcctaagaaatgaaacactttggattaatactattaaaacactgctttttgcttctattcacatcagatgttttatttccaattaatttgattattaaagccaaacagattccaaaaagcactaaacctttatactggatccaataaagcactcaatttacattacaaaattaaatgagatatta

SEQ ID NO: 37275 - DNA, 544 bp, Chicken  19866894267029_1
aaatgttacctagattagttcaagttattaagaagaaaataactgacacttatagtattattatcaagctgagttaccctcactttcagatttagatgaattttctatcactcccactttacagtctacaataaactacagcttttaattccattaattggtagttcagtcatttctattatgattttcactatcagctatgaattttgcctctagttccagtcttatctgcattatcactatttgttttcttccagtggatagcagtttatatacctgcactactaaacaatgtttatkgcagatagtgtctattcacttgtatcagccacaagtcccctacttcttgtctcctttacagtctgcacaattttgaatctcctatgatttgaatcaatgaaatatgtggccctggaaaagacatttctctattatattttaccatagtgatcatttttgtaaatatataaaacagtgaactgcatgactgaaaatatcctttaaaaagttttggttttttttgtactttaatattcacacttat

SEQ ID NO: 37276 - DNA, 599 bp, Chicken  19866894267036_1
  misc_feature (1)..(43): n is any nucleotide
nnnnnnnnnnnnnnnnnnnnnnnnnnnnnnnnnnnnnnnnnnngttgaaggtaagtcttttttttttttttttaaaccagagacacaggaaaagaaaaggaatgctataaataggataacaactgcaatagcactgagcatatctttcttttaggccaaagcaaataaatactgcaagtacattttaagttctcatttaaaaagaaaatcatgcctctgtggaagttagatatctacaataaagagaataaaaacatcagatgatgccaaatttaattaaaacatctctgatcctcaacyacmtatttaaattcctacaacacttcaccagaattagtaagatcatagaaatggctttaatagatgtatggttggaaagaaaaagctttttaggcattctattcgagaaatacacacaaggtgcgtgggcttggatttgtctgggactattgtaaagttgtttttttttgtttggttggtcgcagtcaacatcagatacgtaaaatcaaatactacaggtcacttcgccccagtaaatgtaaatattatgttctatgctttattctcttgaaacgtatagcattatttaatacaattca

SEQ ID NO: 37277 - DNA, 599 bp, Chicken  19866894267036_2
  misc_feature (1)..(40): n is any nucleotide
nnnnnnnnnnnnnnnnnnnnnnnnnnnnnnnnnnnnnnnngttgaaggtaagtcttttttttttttttttaaaccagagacacaggaaaagaaaaggaatgctataaataggataacaactgcaatagcactgagcatatctttcttttaggccaaagcaaataaatactgcaagtacattttaagttctcatttaaaaagaaaatcatgcctctgtggaagttagatatctacaataaagagaataaaaacatcagatgatgccaaatttaattaaaacatctctgatcctcaacyacmtatttaaattcctacaacacttcaccagaattagtaagatcatagaaatggctttaatagatgtatggttggaaagaaaaagctttttaggcattctattcgagaaatacacacaaggtgcgtgggcttggatttgtctgggactattgtaaagttgtttttttttgtttggttggtcgcagtcaacatcagatacgtaaaatcaaatactacaggtcacttcgccccagtaaatgtaaatattatgttctatgctttattctcttgaaacgtatagcattatttaatacaattcaata

SEQ ID NO: 37278 - DNA, 600 bp, Chicken  19866894267039_1
cttttctttgcaaatattgacttcccagctagcagtttaccagtccatgaggatttttttaaaatattaatttcattatcaatttcatgtaccaaatatttatcttcttttaaccactgtgagctgtgtccttgacaagatgaggcatttcaacagtagtcttgacccccttgtgaaacagcatttctctcagtatgacgcaaatcttagcctcttcatcagcacttgtaaaacagttgactcatgcacctgattcttcccatacttgtttctcataagatcacaagctaccttctcccmmaaaaaaaaagggcaaggtaaaataaaacaaacaaacaaaagccctaacaatctagtaagaggacagccagcaaagagcagtgcacaacctggagctcctctggtttctctgaattgcagatgtactcactcccttttcacctggtttactttaaatgtttctttttcagattgcttgttttgtggaattatttcctgcacttaactgcaagaattctgccactgagaatgttactttttatagaaaatatttctgccaccaatacttgtcccttttgtctagagaacacataatatggt

SEQ ID NO: 37279 - DNA, 600 bp, Chicken  19866894267039_2
ttttctttgcaaatattgacttcccagctagcagtttaccagtccatgaggatttttttaaaatattaatttcattatcaatttcatgtaccaaatatttatcttcttttaaccactgtgagctgtgtccttgacaagatgaggcatttcaacagtagtcttgacccccttgtgaaacagcatttctctcagtatgacgcaaatcttagcctcttcatcagcacttgtaaaacagttgactcatgcacctgattcttcccatacttgtttctcataagatcacaagctaccttctcccmmaaaaaaaaagggcaaggtaaaataaaacaaacaaacaaaagccctaacaatctagtaagaggacagccagcaaagagcagtgcacaacctggagctcctctggtttctctgaattgcagatgtactcactcccttttcacctggtttactttaaatgtttctttttcagattgcttgttttgtggaattatttcctgcacttaactgcaagaattctgccactgagaatgttactttttatagaaaatatttctgccaccaatacttgtcccttttgtctagagaacacataatatggtc

SEQ ID NO: 37280 - DNA, 599 bp, Chicken  19866894267041_1
  misc_feature (1)..(172): n is any nucleotide
nnnnnnnnnnnnnnnnnnnnnnnnnnnnnnnnnnnnnnnnnnnnnnnnnnnnnnnnnnnnnnnnnnnnnnnnnnnnnnnnnnnnnnnnnnnnnnnnnnnnnnnnnnnnnnnnnnnnnnnnnnnnnnnnnnnnnnnnnnnnnnnnnnnnnnnnnnnnnnnnnnnnnnnnnnnnttatcagaaaattagaaagaaatagtttcaaatcaaagactgttacactccttttgagaattgtccgttgttttttgtttgtttgttttatgaactgtataaaaagtcatgtgatacaatgaaattcrgacccacaaatatttctttggaacaggaggaaaaagaaaatgtattgacagtatcagatactgtggagtaaaactgagaagtaaataaacacagcagagagattaatatagaaatgtaaagaaggttgttggtggaattagcaacatgacaggcagagaaattagatcaggaatcacaggaggaattcaaaggaaaaagtaacatgatgatgatagcaacagagatagcagaaggcacagaagaaagtatgtcatgatctgatactgggaagggtgagatcggcaactatgcagtttgg

SEQ ID NO: 37281 - DNA, 599 bp, Chicken  19866894267042_1
  misc_feature (1)..(42): n is any nucleotide
nnnnnnnnnnnnnnnnnnnnnnnnnnnnnnnnnnnnnnnnnngtggtgaataaacgaagttggcttttattttcttgcttcaaaagagcttggattctggctattcagaacagaaaaagcaagagacttctggcaaatccggctcttttcacctcatctgaaactataatttatttgctttgattagacacaagcatttggcttcccctctaaaagctattttcatttttgatatgctgataagtttctgctaaggcatagcttttttatttctccctctacctttgtaatttctgaacrttttttcctctcttttgtgccttgcttacatgtactcatgaagattaatgaaagggggaaaaaagtattttyttcctgatggagagtaattttttttcacttattttaggacttgaaaatctatgaagaaaaaagaaaggctttgctataaacagtctcttccacatttttgtcagtggacggagttattcaaaactgtacagtactcagggcttacttgtgactgtgataatattttaaatatatatatatatttgatatgtagttcgccattttgcatagacatgtggcttgtgaat

SEQ ID NO: 37282 - DNA, 600 bp, Chicken  19866894267042_2
tcttgcttcaaaagagcttggattctggctattcagaacagaaaaagcaagagacttctggcaaatccggctcttttcacctcatctgaaactataatttatttgctttgattagacacaagcatttggcttcccctctaaaagctattttcatttttgatatgctgataagtttctgctaaggcatagcttttttatttctccctctacctttgtaatttctgaacrttttttcctctcttttgtgccttgcttacatgtactcatgaagattaatgaaagggggaaaaaagtattttyttcctgatggagagtaattttttttcacttattttaggacttgaaaatctatgaagaaaaaagaaaggctttgctataaacagtctcttccacatttttgtcagtggacggagttattcaaaactgtacagtactcagggcttacttgtgactgtgataatattttaaatatatatatatatttgatatgtagttcgccattttgcatagacatgtggcttgtgaatgcataggctatcagatatggcagtattagctaatggttatttttaaaataagcttcagtagaattgrcattca

SEQ ID NO: 37283 - DNA, 600 bp, Chicken  19866894267042_3
attttyttcctgatggagagtaattttttttcacttattttaggacttgaaaatctatgaagaaaaaagaaaggctttgctataaacagtctcttccacatttttgtcagtggacggagttattcaaaactgtacagtactcagggcttacttgtgactgtgataatattttaaatatatatatatatttgatatgtagttcgccattttgcatagacatgtggcttgtgaatgcataggctatcagatatggcagtattagctaatggttatttttaaaataagcttcagtagaattgrcattcactgaagtcatgcagaataagctaaagaagttatttcattgctgatagaaacacctttgtgactgcacgaaggggattggtgagaagcaacagcccacttaatgaagctactgacattctccccctgagagcagtgcraggtgctgcaggtcaagtgaatgtggaattttaaatgtagaagtacttacttctgctgtctttcctagggctcttaagactgagtgaatgtaagttcagcatccaggtgaagtttggctctgctccatcattcctgcccaccccgaactgtcctgcc

SEQ ID NO: 37284 - DNA, 600 bp, Chicken  19866894267042_4
gggcttacttgtgactgtgataatattttaaatatatatatatatttgatatgtagttcgccattttgcatagacatgtggcttgtgaatgcataggctatcagatatggcagtattagctaatggttatttttaaaataagcttcagtagaattgrcattcactgaagtcatgcagaataagctaaagaagttatttcattgctgatagaaacacctttgtgactgcacgaaggggattggtgagaagcaacagcccacttaatgaagctactgacattctccccctgagagcagtgcraggtgctgcaggtcaagtgaatgtggaattttaaatgtagaagtacttacttctgctgtctttcctagggctcttaagactgagtgaatgtaagttcagcatccaggtgaagtttggctctgctccatcattcctgcccaccccgaactgtcctgccacaccctctaaggcactccttggtctcatctggtctgtattggtcaggctgtggggatgctttgtaacaacctaatttaaaagctaactttctttttctgaatcatgttagaaatgtgaccctgtacagcctgttttagtaaa

SEQ ID NO: 37285 - DNA, 600 bp, Chicken  19866894267043_1
gggttcacacccaagagtgactttgatgactttttagtcagagcttattacgagttaccaaatcagtggagtcagaaatagagcaatcaagggatcaggtaagaatttaattgaaagaggaaaggtgtcttcagcaattatgacaaagattctgctgctttgagctgaaacagagagcaacacaacgattcatctgcttcagtcgtggatctgctcctcagctgaaactacaccaggcttctggataaccagcattttaaatatataacatgataccacacatataaatacggtataagsaatgcaaacaggatgagccaaaatacaacaaatgctgtccccactctttgaaaggtatcaaagtaatttgttgtcctgataatgcagagaaagcaatatcatctttctggagttgtcttgctcrggtctagctgtgaaaggtcaataacgtcctttgtcttttttgctctttgccttctcatttgggaacagaacttattagtttctatttttgacagttgtctggagactggtcacagttcaacatcctactgtcccaagaggtatacacaaaacagaaagaagaaccccagcatgtaa

SEQ ID NO: 37286 - DNA, 600 bp, Chicken  19866894267043_2
gtgtcttcagcaattatgacaaagattctgctgctttgagctgaaacagagagcaacacaacgattcatctgcttcagtcgtggatctgctcctcagctgaaactacaccaggcttctggataaccagcattttaaatatataacatgataccacacatataaatacggtataagsaatgcaaacaggatgagccaaaatacaacaaatgctgtccccactctttgaaaggtatcaaagtaatttgttgtcctgataatgcagagaaagcaatatcatctttctggagttgtcttgctcrggtctagctgtgaaaggtcaataacgtcctttgtcttttttgctctttgccttctcatttgggaacagaacttattagtttctatttttgacagttgtctggagactggtcacagttcaacatcctactgtcccaagaggtatacacaaaacagaaagaagaaccccagcatgtaaagtacatttaccctagtgaagttaaaacaggatttgaaggtactccaaactaggaattagaagagtctggagttttagctcctttatgggctgctccttccttgcttgctcattataactgaaa

SEQ ID NO: 37287 - DNA, 600 bp, Chicken  19866894267049_1
agtgctcatttacctcgttgagcaaagtaatgagtgcaggagcccccgggcagctgcagccacatggcacggtgcagcagtcgctttgcacagcagtgtcacagccctcataattcaggcaccacattaataatgtgcatatgcatttgggggttattttttatgtgtttggcttattgtttttattaaggacttgtgcgcagagctgcagctgttggctgtgctcctcagtccattgcagcagtgtggctgtgctctcgccgtgtttcatgccatgaacagaagccctcagagcagtgkgggggggagggggtgcagacacagaatctgagttaacttgaatttytttttgaaatatgagcccggcagcacagcctgcaccgtttctactttttttgtacctgtgttgtattgtctccaagatctgatgaagtattgctgagtgcagctggaccccaagcactgagggtttaaaccactgccagagctgcagcggagcgtcttcctgcaacaccactgctgccatgcctgaaccatgcagcggaaggccgagtaggttgagaacagcccttaggttggtagcactcaccttcagcttcc

SEQ ID NO: 37288 - DNA, 600 bp, Chicken  19866894267049_2
cgggcagctgcagccacatggcacggtgcagcagtcgctttgcacagcagtgtcacagccctcataattcaggcaccacattaataatgtgcatatgcatttgggggttattttttatgtgtttggcttattgtttttattaaggacttgtgcgcagagctgcagctgttggctgtgctcctcagtccattgcagcagtgtggctgtgctctcgccgtgtttcatgccatgaacagaagccctcagagcagtgkgggggggagggggtgcagacacagaatctgagttaacttgaatttytttttgaaatatgagcccggcagcacagcctgcaccgtttctactttttttgtacctgtgttgtattgtctccaagatctgatgaagtattgctgagtgcagctggaccccaagcactgagggtttaaaccactgccagagctgcagcggagcgtcttcctgcaacaccactgctgccatgcctgaaccatgcagcggaaggccgagtaggttgagaacagcccttaggttggtagcactcaccttcagcttccccacacccagcagtaacccctaacatagcgcagygaaagcagtgtc

SEQ ID NO: 37289 - DNA, 587 bp, Chicken  19866894267049_3
aacttgaatttytttttgaaatatgagcccggcagcacagcctgcaccgtttctactttttttgtacctgtgttgtattgtctccaagatctgatgaagtattgctgagtgcagctggaccccaagcactgagggtttaaaccactgccagagctgcagcggagcgtcttcctgcaacaccactgctgccatgcctgaaccatgcagcggaaggccgagtaggttgagaacagcccttaggttggtagcactcaccttcagcttccccacacccagcagtaacccctaacatagcgcagygaaagcagtgtcysccccctgggggtgtcaggagctttgggtgggacataacccagcaggarctcgttctttccagattagaacagcagggatttaaaaaccacccccttccttttggtactgtgctggagtggactcagggaggcagagctgttattggctccgggctgagcgcagctgagcacccacccaggaactgcatttgcttccatgtgtccgctctgcgcccccccacttttgtaccagtctgtgtgtaaaggaagtaataaacttgaagtttctacaat

SEQ ID NO: 37290 - DNA, 574 bp, Chicken  19866894267049_4
ttttgaaatatgagcccggcagcacagcctgcaccgtttctactttttttgtacctgtgttgtattgtctccaagatctgatgaagtattgctgagtgcagctggaccccaagcactgagggtttaaaccactgccagagctgcagcggagcgtcttcctgcaacaccactgctgccatgcctgaaccatgcagcggaaggccgagtaggttgagaacagcccttaggttggtagcactcaccttcagcttccccacacccagcagtaacccctaacatagcgcagygaaagcagtgtcysccccctgggggtgtcaggagctttgggtgggacataacccagcaggarctcgttctttccagattagaacagcagggatttaaaaaccacccccttccttttggtactgtgctggagtggactcagggaggcagagctgttattggctccgggctgagcgcagctgagcacccacccaggaactgcatttgcttccatgtgtccgctctgcgcccccccacttttgtaccagtctgtgtgtaaaggaagtaataaacttgaagtttctacaat

SEQ ID NO: 37291 - DNA, 573 bp, Chicken  19866894267049_5
tttgaaatatgagcccggcagcacagcctgcaccgtttctactttttttgtacctgtgttgtattgtctccaagatctgatgaagtattgctgagtgcagctggaccccaagcactgagggtttaaaccactgccagagctgcagcggagcgtcttcctgcaacaccactgctgccatgcctgaaccatgcagcggaaggccgagtaggttgagaacagcccttaggttggtagcactcaccttcagcttccccacacccagcagtaacccctaacatagcgcagygaaagcagtgtcysccccctgggggtgtcaggagctttgggtgggacataacccagcaggarctcgttctttccagattagaacagcagggatttaaaaaccacccccttccttttggtactgtgctggagtggactcagggaggcagagctgttattggctccgggctgagcgcagctgagcacccacccaggaactgcatttgcttccatgtgtccgctctgcgcccccccacttttgtaccagtctgtgtgtaaaggaagtaataaacttgaagtttctacaat

SEQ ID NO: 37292 - DNA, 525 bp, Chicken  19866894267049_6
tgtacctgtgttgtattgtctccaagatctgatgaagtattgctgagtgcagctggaccccaagcactgagggtttaaaccactgccagagctgcagcggagcgtcttcctgcaacaccactgctgccatgcctgaaccatgcagcggaaggccgagtaggttgagaacagcccttaggttggtagcactcaccttcagcttccccacacccagcagtaacccctaacatagcgcagygaaagcagtgtcysccccctgggggtgtcaggagctttgggtgggacataacccagcaggarctcgttctttccagattagaacagcagggatttaaaaaccacccccttccttttggtactgtgctggagtggactcagggaggcagagctgttattggctccgggctgagcgcagctgagcacccacccaggaactgcatttgcttccatgtgtccgctctgcgcccccccacttttgtaccagtctgtgtgtaaaggaagtaataaacttgaagtttctacaat

SEQ ID NO: 37293 - DNA, 521 bp, Chicken  19866894267049_7
cctgtgttgtattgtctccaagatctgatgaagtattgctgagtgcagctggaccccaagcactgagggtttaaaccactgccagagctgcagcggagcgtcttcctgcaacaccactgctgccatgcctgaaccatgcagcggaaggccgagtaggttgagaacagcccttaggttggtagcactcaccttcagcttccccacacccagcagtaacccctaacatagcgcagygaaagcagtgtcysccccctgggggtgtcaggagctttgggtgggacataacccagcaggarctcrttctttccagattagaacagcagggatttaaaaaccacccccttccttttggtactgtgctggagtggactcagggaggcagagctgttattggctccgggctgagcgcagctgagcacccacccaggaactgcatttgcttccatgtgtccgctctgcgcccccccacttttgtaccagtctgtgtgtaaaggaagtaataaacttgaagtttctacaat

SEQ ID NO: 37294 - DNA, 600 bp, Chicken  19866894267050_1
tcctttaaagtaacacaacaactccaattaagaatcactacaaactttttgcctcgactttctctatacttcttatacatttacattacattggagttaaatagcttagtttcacttgtccatcctattctgctaccggacaatacagagacattttaaaggaagagaaaaatcagcatatcatacatgagaagacgtatgcttctgataacactgatacacccttctgcattgtaacgatgttttaaatggtctgctaaacccagaaaatgcttatgatgaagtgaggaaagaagcagyrctaccaccaaaagaaaggggagaagaggagaaggagtacattaaaacaatatgcctggacttagccataagctattggatgaatttccaagctcagatttcccatctggttttgtttctttgggttttctggttttgtggctttccattttttgctgttgttgtttttgactgggggtggggaggtgcttgtctttttatatatgtttcttcaacaccttcatacaatatcactattccagaggacaggtctacctcaggatgctgggtgataagtatgttcaacaaaggcaaaatgat

SEQ ID NO: 37295 - DNA, 600 bp, Chicken  19866894267050_2
cctttaaagtaacacaacaactccaattaagaatcactacaaactttttgcctcgactttctctatacttcttatacatttacattacattggagttaaatagcttagtttcacttgtccatcctattctgctaccggacaatacagagacattttaaaggaagagaaaaatcagcatatcatacatgagaagacgtatgcttctgataacactgatacacccttctgcattgtaacgatgttttaaatggtctgctaaacccagaaaatgcttatgatgaagtgaggaaagaagcagyrctaccaccaaaagaaaggggagaagaggagaaggagtacattaaaacaatatgcctggacttagccataagctattggatgaatttccaagctcagatttcccatctggttttgtttctttgggttttctggttttgtggctttccattttttgctgttgttgtttttgactgggggtggggaggtgcttgtctttttatatatgtttcttcaacaccttcatacaatatcactattccagaggacaggtctacctcaggatgctgggtgataagtatgttcaacaaaggcaaaatgata

SEQ ID NO: 37296 - DNA, 600 bp, Chicken  19866894267053_1
aaaaagcaaaatatttaaatctatttaaatcccacatagtgtcaataatatgcttcctcacagggtgtttatgcactcagatacaggtacacacatttgtgaatgttttctattcatttatgtatgtgtgcacacgtctacaaaaacatattccagtctccattaacctaggactacactaaaatataggtggaagctctagttctaattcttgattcgaatttggacaattcttgattagaattagacaaatggggctgagttcactcatgaccactcaaacgcaatggttgatcagcrcwgaaaccagttctggacctgcaacaccacctgcaacaacaagcccaaaatgacccagtgttgctcccactcacctcctggcccacgctgggtgagcactgactgcaacgaagcccacatgtcagggwaaacccctgatcctgcaactgatttgtgtgatctacagaacaaattcctcctgagaagataaggaaagctggtggaatttgagacaagccaaattctgactaggctgacctgccagcctaatcaaagctctgtaagaagaaatgtaatattatacaaatatatattttctca

SEQ ID NO: 37297 - DNA, 600 bp, Chicken  19866894267053_2
aaagcaaaatatttaaatctatttaaatcccacatagtgtcaataatatgcttcctcacagggtgtttatgcactcagatacaggtacacacatttgtgaatgttttctattcatttatgtatgtgtgcacacgtctacaaaaacatattccagtctccattaacctaggactacactaaaatataggtggaagctctagttctaattcttgattcgaatttggacaattcttgattagaattagacaaatggggctgagttcactcatgaccactcaaacgcaatggttgatcagcrcwgaaaccagttctggacctgcaacaccacctgcaacaacaagcccaaaatgacccagtgttgctcccactcacctcctggcccacgctgggtgagcactgactgcaacgaagcccacatgtcagggwaaacccctgatcctgcaactgatttgtgtgatctacagaacaaattcctcctgagaagataaggaaagctggtggaatttgagacaagccaaattctgactaggctgacctgccagcctaatcaaagctctgtaagaagaaatgtaatattatacaaatatatattttctcaaa

SEQ ID NO: 37298 - DNA, 600 bp, Chicken  19866894267053_3
tgcacacgtctacaaaaacatattccagtctccattaacctaggactacactaaaatataggtggaagctctagttctaattcttgattcgaatttggacaattcttgattagaattagacaaatggggctgagttcactcatgaccactcaaacgcaatggttgatcagcrcwgaaaccagttctggacctgcaacaccacctgcaacaacaagcccaaaatgacccagtgttgctcccactcacctcctggcccacgctgggtgagcactgactgcaacgaagcccacatgtcagggwaaacccctgatcctgcaactgatttgtgtgatctacagaacaaattcctcctgagaagataaggaaagctggtggaatttgagacaagccaaattctgactaggctgacctgccagcctaatcaaagctctgtaagaagaaatgtaatattatacaaatatatattttctcaaatgactctacaaacccacaggaaattttttttcttaaatagagaggagaaaatctatatcttggagagtgaaaaacaaattaaaggttcttgaagagtgtttcttaacatttaccagtgtttttccc

SEQ ID NO: 37299 - DNA, 600 bp, Chicken  19866894267059_1
cacgtcttaccttcctgaatatcttcgaagagagctgcacagcgaagcattgcaatttgctcttgagtactccagcccctatttatttccattcttttgtgaggagcaagttttggaaactgtaggtcggactctgcatccatatagacacacaggggttccttaggtgcaacaaggcagctgcctaatggcaaagaggagcgtgaagttacattgaggaagaagacatagagcaccacattcatgcagctgctgggtgaatcggactactgaaactctgatcaccagaatggatgctawgtctggaggagaagatttcttgtgtgactagtgataggactrgagggaatggcttcaagctgygccagggaaggttcaggctggacgttaggaaatactacttctctgaaagggtggtcaggcactggaatgggctgcccagagaggtggtggagtcactgaccctgaaggtgttcaaggaacgcttggacgttgtgttgagggacatggtttagcgagaaccattggtgatgggtgaatggttggactggatgatcctatgggtcttttccaaccttagcgattctatgattctatgtt

SEQ ID NO: 37300 - DNA, 600 bp, Chicken  19866894267059_2
cgaagcattgcaatttgctcttgagtactccagcccctatttatttccattcttttgtgaggagcaagttttggaaactgtaggtcggactctgcatccatatagacacacaggggttccttaggtgcaacaaggcagctgcctaatggcaaagaggagcgtgaagttacattgaggaagaagacatagagcaccacattcatgcagctgctgggtgaatcggactactgaaactctgatcaccagaatggatgctawgtctggaggagaagatttcttgtgtgactagtgataggactrgagggaatggcttcaagctgygccagggaaggttcaggctggacgttaggaaatactacttctctgaaagggtggtcaggcactggaatgggctgcccagagaggtggtggagtcactgaccctgaaggtgttcaaggaacgcttggacgttgtgttgagggacatggtttagcgagaaccattggtgatgggtgaatggttggactggatgatcctatgggtcttttccaaccttagcgattctatgattctatgtttctatgataatggtgttgtgcaagagagtcagagaaagagat

SEQ ID NO: 37301 - DNA, 600 bp, Chicken  19866894267059_3
tgagtactccagcccctatttatttccattcttttgtgaggagcaagttttggaaactgtaggtcggactctgcatccatatagacacacaggggttccttaggtgcaacaaggcagctgcctaatggcaaagaggagcgtgaagttacattgaggaagaagacatagagcaccacattcatgcagctgctgggtgaatcggactactgaaactctgatcaccagaatggatgctawgtctggaggagaagatttcttgtgtgactagtgataggactrgagggaatggcttcaagctgygccagggaaggttcaggctggacgttaggaaatactacttctctgaaagggtggtcaggcactggaatgggctgcccagagaggtggtggagtcactgaccctgaaggtgttcaaggaacgcttggacgttgtgttgagggacatggtttagcgagaaccattggtgatgggtgaatggttggactggatgatcctatgggtcttttccaaccttagcgattctatgattctatgtttctatgataatggtgttgtgcaagagagtcagagaaagagattgcctctgctcttgtttaata

SEQ ID NO: 37302 - DNA, 600 bp, Chicken  19866894267059_4
cctcctctccctgggtgccccccagggcacagttggccctgctgactcaggctcaacttgtgagataacacacaacaaagcaattattcagagggaaatgtaggggctggtgcacagccctgctgagtggctgcatcttctgcacctggcaccaaatattctaaaaggagggagagatttgctttgttctctccttttacaagctgttctgagaatatttacagggatcgtgggctgcagttgagtgctgttgaagtgttgtgcagtgctggtgagggctgacgttgctgatcaaaggtragagatagcatgcagggagcacagtggggttgacagtcccaaaggggatgraaagcaaagatgtatatgctgatgcaacagagaagggagagggcaaacaatccaggaaagtaatcctcatagctgctttctgaacatatcaccsggctccttcctcgcagcacttgaccttgataaggtttgagatttccagtgagacagcccaagtggtacagctgtgtctgcaatgggaaggagacttcatggagtgctgtgactttcctaaacgagccaggcttcatgggttttcatctcagcgaa

SEQ ID NO: 37303 - DNA, 600 bp, Chicken  19866894267059_5
ctcaacttgtgagataacacacaacaaagcaattattcagagggaaatgtaggggctggtgcacagccctgctgagtggctgcatcttctgcacctggcaccaaatattctaaaaggagggagagatttgctttgttctctccttttacaagctgttctgagaatatttacagggatcgtgggctgcagttgagtgctgttgaagtgttgtgcagtgctggtgagggctgacgttgctgatcaaaggtragagatagcatgcagggagcacagtggggttgacagtcccaaaggggatgraaagcaaagatgtatatgctgatgcaacagagaagggagagggcaaacaatccaggaaagtaatcctcatagctgctttctgaacatatcaccsggctccttcctcgcagcacttgaccttgataaggtttgagatttccagtgagacagcccaagtggtacagctgtgtctgcaatgggaaggagacttcatggagtgctgtgactttcctaaacgagccaggcttcatgggttttcatctcagcgaacataggaaaactatttaaatattgatgagcatacattaaacctgttcccca

SEQ ID NO: 37304 - DNA, 600 bp, Chicken  19866894267059_6
ctggcaccaaatattctaaaaggagggagagatttgctttgttctctccttttacaagctgttctgagaatatttacagggatcgtgggctgcagttgagtgctgttgaagtgttgtgcagtgctggtgagggctgacgttgctgatcaaaggtragagatagcatgcagggagcacagtggggttgacagtcccaaaggggatgraaagcaaagatgtatatgctgatgcaacagagaagggagagggcaaacaatccaggaaagtaatcctcatagctgctttctgaacatatcaccsggctccttcctcgcagcacttgaccttgataaggtttgagatttccagtgagacagcccaagtggtacagctgtgtctgcaatgggaaggagacttcatggagtgctgtgactttcctaaacgagccaggcttcatgggttttcatctcagcgaacataggaaaactatttaaatattgatgagcatacattaaacctgttccccagcctttctctcttaccctgggtttcacaagtactaactgagaaatcactattaaattactctgaagggaagaaactaaaaaacgctttcaatgg

SEQ ID NO: 37305 - DNA, 600 bp, Chicken  19866894267059_7
tctgaagggaagaaactaaaaaacgctttcaatggatggcatgtagcagcatcacctctacagcagtcacacaaaatacatataattgacacagtgcattgggagcatgaggactcatttctgatatacccaaggaagggacgtgaaatacactggtatgatagggaaagagagagggagagttgctataaccacaaactacatctagattccacaggccacatgtaaccctcttgcttcacgatttcctataacacttgctatgagaaaaaggtttatatcaggttcactttgagaatkactgaagttttttcctctgatttcaaagaaaattaatcaaattggtttttatattccagttttcctgtgagacctgcgaggaggataaaatgggatctacattgtatttttgcttctttgtttgctttattagttgcctctcagtctcataaaagtgtcgcaccagagtggccatygaaatctctgtgtgtccctgacgtatgttgtaatatacaatgaatgtcatggatacagcataaaactggataacgtcatggtcttgtgaagaggcacgtaaggatggtttgagggaaggctgta

SEQ ID NO: 37306 - DNA, 600 bp, Chicken  19866894267059_8
ggagagttgctataaccacaaactacatctagattccacaggccacatgtaaccctcttgcttcacgatttcctataacacttgctatgagaaaaaggtttatatcaggttcactttgagaatkactgaagttttttcctctgatttcaaagaaaattaatcaaattggtttttatattccagttttcctgtgagacctgcgaggaggataaaatgggatctacattgtatttttgcttctttgtttgctttattagttgcctctcagtctcataaaagtgtcgcaccagagtggccatygaaatctctgtgtgtccctgacgtatgttgtaatatacaatgaatgtcatggatacagcataaaactggataacgtcatggtcttgtgaagaggcacgtaaggatggtttgagggaaggctgtatctttgtttaaagcagatgtctttaaagaccttcagtggcagaaactaatagctaacccaaactagaaaccttgactgaatgttgtaaatgcaaattacctaaaggaaagagctttctaaaagctaaatttttcatttttaattagttgtaaagctaaaagctgttatgcaagtat

SEQ ID NO: 37307 - DNA, 600 bp, Chicken  19866894267061_1
ttacactattccagattttatttagtggatcatgatttttttttctgtattttttttagtatggatttaattcatttggcaacactacttaggcatggatggctgatggaccattacaagtcattggctacagagaaggttaatcagagaaatgttctcattaacctgaatctgattctcctcttcattactgaaaactagatcattttcactatgcaggtaaggaatgagttaccttattataacatacgttcatatatatatttaatgtgtgtgtttgtagcttctatgagagctttrtaaaataaataatatattgtgcagaaacattttatattgccttgagaacagaaaaacacactacmtatataggaacagaatactgctcgtttccagtgcataaatgcacaagaacaactctcagaagtttattttgttagctggtgaccttgatagctcttcttttctacagtttttctgttttctgtgttcttgtgttggcttcctattttctttctttcttttttttttaatttagtatcctgtccatttaataattcaatattttatgaagatatttcattttccttgaactgattc

SEQ ID NO: 37308 - DNA, 600 bp, Chicken  19866894267061_2
tttaattcatttggcaacactacttaggcatggatggctgatggaccattacaagtcattggctacagagaaggttaatcagagaaatgttctcattaacctgaatctgattctcctcttcattactgaaaactagatcattttcactatgcaggtaaggaatgagttaccttattataacatacgttcatatatatatttaatgtgtgtgtttgtagcttctatgagagctttrtaaaataaataatatattgtgcagaaacattttatattgccttgagaacagaaaaacacactacmtatataggaacagaatactgctcgtttccagtgcataaatgcacaagaacaactctcagaagtttattttgttagctggtgaccttgatagctcttcttttctacagtttttctgttttctgtgttcttgtgttggcttcctattttctttctttcttttttttttaatttagtatcctgtccatttaataattcaatattttatgaagatatttcattttccttgaactgattccttgcttaaagtacatgacgttccattccttttggtggtgattctcattttgtctacmcagtttt

SEQ ID NO: 37309 - DNA, 600 bp, Chicken  19866894267061_3
aggaatgagttaccttattataacatacgttcatatatatatttaatgtgtgtgtttgtagcttctatgagagctttrtaaaataaataatatattgtgcagaaacattttatattgccttgagaacagaaaaacacactacmtatataggaacagaatactgctcgtttccagtgcataaatgcacaagaacaactctcagaagtttattttgttagctggtgaccttgatagctcttcttttctacagtttttctgttttctgtgttcttgtgttggcttcctattttctttctttcmtttttttttaatttagtatcctgtccatttaataattcaatattttatgaagatatttcattttccttgaactgattccttgcttaaagtacatgacgttccattccttttggtggtgattctcattttgtctacmcagtttttcacaaaaccttagtagactcacgaatggtacactaytgtctcttaacaaagtgcttatgtttttaaaactgatcttctcattgcgagctttatttctcagactgtcaggtaaaaacctacttatttatttattttggcaaacacatgatgccaata

SEQ ID NO: 37310 - DNA, 600 bp, Chicken  19866894267061_4; identical to SEQ ID NO: 37309

SEQ ID NO: 37311 - DNA, 600 bp, Chicken  19866894267061_5
cactacmtatataggaacagaatactgctcgtttccagtgcataaatgcacaagaacaactctcagaagtttattttgttagctggtgaccttgatagctcttcttttctacagtttttctgttttctgtgttcttgtgttggcttcctattttctttctttcttttttttttaatttagtatcctgtccatttaataattcaatattttatgaagatatttcattttccttgaactgattccttgcttaaagtacatgacgttccattccttttggtggtgattctcattttgtctacmcagtttttcacaaaaccttagtagactcacgaatggtacactaytgtctcttaacaaagtgcttatgtttttaaaactgatcttctcattgcgagctttatttctcagactgtcaggtaaaaacctacttatttatttattttggcaaacacatgatgccaatatttcatggtgagtattgtgtagatagcagatcaacttgcttcctgagcaattcaaacatgacaaagttattcacctattttttcaactattcatgaaaatggacttcatgcatgcttccatttatgtgcataggag

SEQ ID NO: 37312 - DNA, 600 bp, Chicken  19866894267061_6
aatgcacaagaacaactctcagaagtttattttgttagctggtgaccttgatagctcttcttttctacagtttttctgttttctgtgttcttgtgttggcttcctattttctttctttcttttttttttaatttagtatcctgtccatttaataattcaatattttatgaagatatttcattttccttgaactgattccttgcttaaagtacatgacgttccattccttttggtggtgattctcattttgtctacmcagtttttcacaaaaccttagtagactcacgaatggtacactaytgtctcttaacaaagtgcttatgtttttaaaactgatcttctcattgcgagctttatttctcagactgtcaggtaaaaacctacttatttatttattttggcaaacacatgatgccaatatttcatggtgagtattgtgtagatagcagatcaacttgcttcctgagcaattcaaacatgacaaagttattcacctattttttcaactattcatgaaaatggacttcatgcatgcttccatttatgtgcataggagagatcaagactaaaggagcccagggtgtcctctatttgcagcca

SEQ ID NO: 37313 - DNA, 600 bp, Chicken  19866894267064_1
acttcagcagtgcttctcagctattctgcttccccccccccgagctactcaatagttttataaattatcaatataactaatttaaactgagtttgtaagcatggactgatgcatttttaatttaggaacattaaggggagtggctgacatgagtgaaatataccgtgttccacatttgctcaaagtaatctagcaatagtttcccatcaacaactcaaattggtattaagatcatcactttcccttaagctacctggacaaactggaccttcccctgccagcaccagctcagtcacttcytgcttactcccattcccaccttctggagccatagatatttgtaacagtccaaacttgggaactgatcttcatcagtaactattttttaagcttaggtttggataatttgcttattagtttcactgcatatgctaatccaaatcatcagcattttaggggcaaraaagggtatttaggcaaacatggctgccactgaaatgcaggtctttccagaaaggtgcagtcatgcayrcatggtttcttagcagtaatgtcacaagtagtgcacctttctgttgcttactccatgatatcccagca

SEQ ID NO: 37314 - DNA, 600 bp, Chicken  19866894267064_2
cgtgttccacatttgctcaaagtaatctagcaatagtttcccatcaacaactcaaattggtattaagatcatcactttcccttaagctacctggacaaactggaccttcccctgccagcaccagctcagtcacttcytgcttactcccattcccaccttctggagccatagatatttgtaacagtccaaacttgggaactgatcttcatcagtaactattttttaagcttaggtttggataatttgcttattagtttcactgcatatgctaatccaaatcatcagcattttaggggcaaraaagggtatttaggcaaacatggctgccactgaaatgcaggtctttccagaaaggtgcagtcatgcayrcatggtttcttagcagtaatgtcacaagtagtgcacctttctgttgcttactccatgatatcccagcayaactggctgtcaggatccaaaccaggtttgtatgacatccttagctccctgttgttctcacgttattagcagagcttcagaaattggaactgcttttaagccaggactgccactgagagcatcagctgtaaaaccacacccttatgtaccaaggacaacctc

SEQ ID NO: 37315 - DNA, 600 bp, Chicken  19866894267064_3
tcatcactttcccttaagctacctggacaaactggaccttcccctgccagcaccagctcagtcacttcytgcttactcccattcccaccttctggagccatagatatttgtaacagtccaaacttgggaactgatcttcatcagtaactattttttaagcttaggtttggataatttgcttattagtttcactgcatatgctaatccaaatcatcagcattttaggggcaaraaagggtatttaggcaaacatggctgccactgaaatgcaggtctttccagaaaggtgcagtcatgcayrcatggtttcttagcagtaatgtcacaagtagtgcacctttctgttgcttactccatgatatcccagcayaactggctgtcaggatccaaaccaggtttgtatgacatccttagctccctgttgttctcacgttattagcagagcttcagaaattggaactgcttttaagccaggactgccactgagagcatcagctgtaaaaccacacccttatgtaccaaggacaacctcaacagacttcagagaggaagtgaaataaaaagactaccacrgtccaccatctgattttttttaaggag

SEQ ID NO: 37316 - DNA, 600 bp, Chicken  19866894267064_4
catcactttcccttaagctacctggacaaactggaccttcccctgccagcaccagctcagtcacttcytgcttactcccattcccaccttctggagccatagatatttgtaacagtccaaacttgggaactgatcttcatcagtaactattttttaagcttaggtttggataatttgcttattagtttcactgcatatgctaatccaaatcatcagcattttaggggcaaraaagggtatttaggcaaacatggctgccactgaaatgcaggtctttccagaaaggtgcagtcatgcayrcatggtttcttagcagtaatgtcacaagtagtgcacctttctgttgcttactccatgatatcccagcayaactggctgtcaggatccaaaccaggtttgtatgacatccttagctccctgttgttctcacgttattagcagagcttcagaaattggaactgcttttaagccaggactgccactgagagcatcagctgtaaaaccacacccttatgtaccaaggacaacctcaacagacttcagagaggaagtgaaataaaaagactaccacrgtccaccatctgattttttttaaggaga

SEQ ID NO: 37317 - DNA, 600 bp, Chicken  19866894267064_5
gcttactcccattcccaccttctggagccatagatatttgtaacagtccaaacttgggaactgatcttcatcagtaactattttttaagcttaggtttggataatttgcttattagtttcactgcatatgctaatccaaatcatcagcattttaggggcaaraaagggtatttaggcaaacatggctgccactgaaatgcaggtctttccagaaaggtgcagtcatgcayrcatggtttcttagcagtaatgtcacaagtagtgcacctttctgttgcttactccatgatatcccagcayaactggctgtcaggatccaaaccaggtttgtatgacatccttagctccctgttgttctcacgttattagcagagcttcagaaattggaactgcttttaagccaggactgccactgagagcatcagctgtaaaaccacacccttatgtaccaaggacaacctcaacagacttcagagaggaagtgaaataaaaagactaccacrgtccaccatctgattttttttaaggagaaagaggaacctgtacagatcgatgtgcagacacaccatcaagttggccactctcctgtggctattacac

SEQ ID NO: 37318 - DNA, 497 bp, Chicken  19866894267064_6
tctttccagaaaggtgcagtcatgcayrcatggtttcttagcagtaatgtcacaagtagtgcacctttctgttgcttactccatgatatcccagcayaactggctgtcaggatccaaaccaggtttgtatgacatccttagctccctgttgttctcacgttattagcagagcttcagaaattggaactgcttttaagccaggactgccactgagagcatcagctgtaaaaccacacccttatgtaccaaggacaacctcaacagacttcagagaggaagtgaaataaaaagactaccacrgtccaccatctgattttttttaaggagaaagaggaacctgtacagatcgatgtgcagacacaccatcaagttggccactctcctgtggctattacacatcaaaaagccacacagttcaaaactgaaagtgctttgctctccagcagcactgggaagagatggtggggtgggaatctcttctctgtaacagtttccca

SEQ ID NO: 37319 - DNA, 599 bp, Chicken  19866894267077_1
  misc_feature (1)..(113): n is any nucleotide
nnnnnnnnnnnnnnnnnnnnnnnnnnnnnnnnnnnnnnnnnnnnnnnnnnnnnnnnnnnnnnnnnnnnnnnnnnnnnnnnnnnnnnnnnnnnnnnnnnnnnnnnnnnnnnnnnctgttgatggggcccctctggaggagcagtttgatgctttcatctgcttccttagggtgagccaagcaaaaccgtgggggttttggggtgagatttgcttctccagttctctgggactggtgggaagggttgttactcctgcactgaggtaaaggaaccgcctccaccccaggcagagtgctggagrtgctcttagaatcatagaatgatttgagttggaagggacctctaaggtcatgtagttccagcccccctgctataggcagggacacctcccactagaccaggctgctcacagtcccatccagcctggccttagtagctccttgcttaggttaattaattttgggtgractttattttgcaagcccttcatatacaacagtcaccaaaccaatgtgcaggcttggtgtcaccatgttcttccctcttctaaaataaaacagaagttctttctgtgcaaagtagcctgtctggggaaacagc

SEQ ID NO: 37320 - DNA, 600 bp, Chicken  19866894267077_2
agggtgagccaagcaaaaccgtgggggttttggggtgagatttgcttctccagttctctgggactggtgggaagggttgttactcctgcactgaggtaaaggaaccgcctccaccccaggcagagtgctggagrtgctcttagaatcatagaatgatttgagttggaagggacctctaaggtcatgtagttccagcccccctgctataggcagggacacctcccactagaccaggctgctcacagtcccatccagcctggccttagtagctccttgcttaggttaattaattttgggtgractttattttgcaagcccttcatatacaacagtcaccaaaccaatgtgcaggcttggtgtcaccatgttcttccctcttctaaaataaaacagaagttctttctgtgcaaagtagcctgtctggggaaacagcagctggaggggtccctgagtctaccttcttccccttttggcttcatgtaatggggggcctgtgcatgtgattgtatcctgttcctgcttgtccaccccccttgctgggaggtgaccatctttcacacctcccagctttcctgcacacagggctcctgttcggggggg

SEQ ID NO: 37321 - DNA, 600 bp, Chicken  19866894267082_1
tcattggaacctaaaaataacaggaagacgactgctggtgccagaacgataccaaaccaaatctattattgaattagattcttccccactgttgttcttaggaatatatttcccattttcccttggggtttgtttggagccaaagtattctgcctgccagtgccattctagcactcaaattaacaagaagtgatgtctcttacagtaaaaaccaatagctattgaaatattgatgaagccgaggagctggcggtgtctggttcctcactgccagctgggcatgctgcatggggaaggagygtgaggctaccgtgcctggaccatgggtggtccaagaggagtccaacccatgttgtgttgggagctcctggtactctttcctccttgctttccttctcattggatcagcaggctctgtttgctcgccagggtaggttttagaggccccacttgctgtctgtttgcataaaaagttgcatcttttatttatttttcccaactttttactctaattaagctgctatcaagctcatttcattgtagctaaacaacgtgggacattaccctgtgatggggaagggacttgatccagcaggttgg

SEQ ID NO: 37322 - DNA, 600 bp, Chicken  19866894267082_10
aattcatcttaccatgccctttcttacaggttggagcatgctaatcctggttcctcagatgctttttccttgggggagctgacttcagccccaacataggctgctcagagagcacattgcctgctgctcctctgctacaaggactggctgaggccatcaatcagagaggagaatataagaatgtaagcagagagatctggtagcaaactgcatgcttttaaattcacatccgctgcacgtgctctgggtgggagaagaagctgtaggcttgcatgatagcaaagcatatgcagtaggaamacaatggggtgaggaaaggaaacgtggtcacgaaaggtttagcatacacgctagaacagcttgygtgagaggctccaaaaggtctgtgtgcagagcctgttcctgagcacctccatctggggtgggtttttgtggagctatgtcctaatgctgragaggtgagctgccagactgtcgcagttcactccatccctacttcttatgttttttgcagtattgctgctggaggtcaggaagtataaaagtgaaactctgtcttctcttataaacctggaagtaaaagcagagtacagcttaatc

SEQ ID NO: 37323 - DNA, 600 bp, Chicken  19866894267082_11
tttccttgggggagctgacttcagccccaacataggctgctcagagagcacattgcctgctgctcctctgctacaaggactggctgaggccatcaatcagagaggagaatataagaatgtaagcagagagatctggtagcaaactgcatgcttttaaattcacatccgctgcacgtgctctgggtgggagaagaagctgtaggcttgcatgatagcaaagcatatgcagtaggaamacaatggggtgaggaaaggaaacgtggtcacgaaaggtttagcatacacgctagaacagcttgygtgagaggctccaaaaggtctgtgtgcagagcctgttcctgagcacctccatctggggtgggtttttgtggagctatgtcctaatgctgragaggtgagctgccagactgtcgcagttcactccatccctacttcttatgttttttgcagtattgctgctggaggtcaggaagtataaaagtgaaactctgtcttctcttataaacctggaagtaaaagcagagtacagcttaatcaaagytactgacttccccaaacaagctggrtgtaagtaggtgtagcagaaatgctaagtcacag

SEQ ID NO: 37324 - DNA, 600 bp, Chicken  19866894267082_12
catcaatcagagaggagaatataagaatgtaagcagagagatctggtagcaaactgcatgcttttaaattcacatccgctgcacgtgctctgggtgggagaagaagctgtaggcttgcatgatagcaaagcatatgcagtaggaamacaatggggtgaggaaaggaaacgtggtcacgaaaggtttagcatacacgctagaacagcttgygtgagaggctccaaaaggtctgtgtgcagagcctgttcctgagcacctccatctggggtgggtttttgtggagctatgtcctaatgctgragaggtgagctgccagactgtcgcagttcactccatccctacttcttatgttttttgcagtattgctgctggaggtcaggaagtataaaagtgaaactctgtcttctcttataaacctggaagtaaaagcagagtacagcttaatcaaagytactgacttccccaaacaagctggrtgtaagtaggtgtagcagaaatgctaagtcacagcctgaagcagtgattgagcacctggtgggaaggcagggccaacccaggggagctcaggtgtatgcaatgaacctgagtgatggggaggta

SEQ ID NO: 37325 - DNA, 600 bp, Chicken  19866894267082_13
ggggtgaggaaaggaaacgtggtcacgaaaggtttagcatacacgctagaacagcttgygtgagaggctccaaaaggtctgtgtgcagagcctgttcctgagcacctccatctggggtgggtttttgtggagctatgtcctaatgctgragaggtgagctgccagactgtcgcagttcactccatccctacttcttatgttttttgcagtattgctgctggaggtcaggaagtataaaagtgaaactctgtcttctcttataaacctggaagtaaaagcagagtacagcttaatcaaagytactgacttccccaaacaagctggrtgtaagtaggtgtagcagaaatgctaagtcacagcctgaagcagtgattgagcacctggtgggaaggcagggccaacccaggggagctcaggtgtatgcaatgaacctgagtgatggggaggtatggagcagggatccacccctttccagaccccatttaaaggttggcaaaacaggaatcctatagcttatccactccagagcaggaatgggaggggggatgagggaatagttttaatggttctttggcaagttagttgtgcagtttcctgttg

SEQ ID NO: 37326 - DNA, 600 bp, Chicken  19866894267082_14
cgaaaggtttagcatacacgctagaacagcttgygtgagaggctccaaaaggtctgtgtgcagagcctgttcctgagcacctccatctggggtgggtttttgtggagctatgtcctaatgctgragaggtgagctgccagactgtcgcagttcactccatccctacttcttatgttttttgcagtattgctgctggaggtcaggaagtataaaagtgaaactctgtcttctcttataaacctggaagtaaaagcagagtacagcttaatcaaagytactgacttccccaaacaagctggrtgtaagtaggtgtagcagaaatgctaagtcacagcctgaagcagtgattgagcacctggtgggaaggcagggccaacccaggggagctcaggtgtatgcaatgaacctgagtgatggggaggtatggagcagggatccacccctttccagaccccatttaaaggttggcaaaacaggaatcctatagcttatccactccagagcaggaatgggaggggggatgagggaatagttttaatggttctttggcaagttagttgtgcagtttcctgttgttctgggccttctttgaaggcttag

SEQ ID NO: 37327 - DNA, 600 bp, Chicken  19866894267082_2
ctgtttgcataaaaagttgcatcttttatttatttttcccaactttttactctaattaagctgctatcaagctcatttcattgtagctaaacaacgtgggacattaccctgtgatggggaagggacttgatccagcaggttggtttcctggcttcatctacgtctctttctcctttagtatctaagcgttattttaagactctcctgaagtcatctgtcttcattgctgagcatttcttgcttgctggtatctcattttccagctgccccattattcccaccatctcagcaggtgcactrattgctcatgctgcagaaagcccctctggaaacacaggctgagctttcattagctgagtggcatgcacttaatctacagcaccgcyctggattyatctccccaagtcrtcttcacccataggattccctgccattatattgacacagctgacagccttctcctgttggggctgacttccttagaatcacagaacaacttgggttggaagggacctcaaagatcatccaattccaaccccctgccatgggcagggttgccacccactagatcatgcaccagatcacactgtccagagcccc

SEQ ID NO: 37328 - DNA, 600 bp, Chicken  19866894267082_3
ctaaacaacgtgggacattaccctgtgatggggaagggacttgatccagcaggttggtttcctggcttcatctacgtctctttctcctttagtatctaagcgttattttaagactctcctgaagtcatctgtcttcattgctgagcatttcttgcttgctggtatctcattttccagctgccccattattcccaccatctcagcaggtgcactrattgctcatgctgcagaaagcccctctggaaacacaggctgagctttcattagctgagtggcatgcacttaatctacagcaccgcyctggattyatctccccaagtcrtcttcacccataggattccctgccattatattgacacagctgacagccttctcctgttggggctgacttccttagaatcacagaacaacttgggttggaagggacctcaaagatcatccaattccaaccccctgccatgggcagggttgccacccactagatcatgcaccagatcacactgtccagagccccatctgacctggctttgaatacctccagagatggggcatccacaacttctctagrcagcctgtcgtttcaccagaccagaactcact

SEQ ID NO: 37329 - DNA, 600 bp, Chicken  19866894267082_4
cgtgggacattaccctgtgatggggaagggacttgatccagcaggttggtttcctggcttcatctacgtctctttctcctttagtatctaagcgttattttaagactctcctgaagtcatctgtcttcattgctgagcatttcttgcttgctggtatctcattttccagctgccccattattcccaccatctcagcaggtgcactrattgctcatgctgcagaaagcccctctggaaacacaggctgagctttcattagctgagtggcatgcacttaatctacagcaccgcyctggattyatctccccaagtcrtcttcacccataggattccctgccattatattgacacagctgacagccttctcctgttggggctgacttccttagaatcacagaacaacttgggttggaagggacctcaaagatcatccaattccaaccccctgccatgggcagggttgccacccactagatcatgcaccagatcacactgtccagagccccatctgacctggctttgaatacctccagagatggggcatccacaacttctctagrcagcctgtcgtttcaccagaccagaactcactctttgcgt

SEQ ID NO: 37330 - DNA, 600 bp, Chicken  19866894267082_5
ctgtgatggggaagggacttgatccagcaggttggtttcctggcttcatctacgtctctttctcctttagtatctaagcgttattttaagactctcctgaagtcatctgtcttcattgctgagcatttcttgcttgctggtatctcattttccagctgccccattattcccaccatctcagcaggtgcactrattgctcatgctgcagaaagcccctctggaaacacaggctgagctttcattagctgagtggcatgcacttaatctacagcaccgcyctggattyatctccccaagtcrtcttcacccataggattccctgccattatattgacacagctgacagccttctcctgttggggctgacttccttagaatcacagaacaacttgggttggaagggacctcaaagatcatccaattccaaccccctgccatgggcagggttgccacccactagatcatgcaccagatcacactgtccagagccccatctgacctggctttgaatacctccagagatggggcatccacaacttctctagrcagcctgtcgtttcaccagaccagaactcactctttgcgtctccactgatgcaa

SEQ ID NO: 37331 - DNA, 600 bp, Chicken  19866894267082_6
tgagtggcatgcacttaatctacagcaccgcyctggattyatctccccaagtcrtcttcacccataggattccctgccattatattgacacagctgacagccttctcctgttggggctgacttccttagaatcacagaacaacttgggttggaagggacctcaaagatcatccaattccaaccccctgccatgggcagggttgccacccactagatcatgcaccagatcacactgtccagagccccatctgacctggctttgaatacctccagagatggggcatccacaacttctctagrcagcctgtcgtttcaccagaccagaactcactctttgcgtctccactgatgcaaatgcaacagtgatgctgtgcaaatctaccacaagatcttggtttgacctaggatcagtaaaaacaaagtgcacgttgtccarcatcctcttttgagctttcctttgcaggagytgaccacagaattgttcaggctgaacctgccaatggcattaacacaaccaatttttctacagctgtctaaaaccccatccctggaggtgcttaagagctgtgtagttgaggcactgagaggcatgctcagtag

SEQ ID NO: 37332 - DNA, 600 bp, Chicken  19866894267082_7
gaacaacttgggttggaagggacctcaaagatcatccaattccaaccccctgccatgggcagggttgccacccactagatcatgcaccagatcacactgtccagagccccatctgacctggctttgaatacctccagagatggggcatccacaacttctctagrcagcctgtcgtttcaccagaccagaactcactctttgcgtctccactgatgcaaatgcaacagtgatgctgtgcaaatctaccacaagatcttggtttgacctaggatcagtaaaaacaaagtgcacgttgtccarcatcctcttttgagctttcctttgcaggagytgaccacagaattgttcaggctgaacctgccaatggcattaacacaaccaatttttctacagctgtctaaaaccccatccctggaggtgcttaagagctgtgtagttgaggcactgagaggcatgctcagtaggcayggtggggatgggctgatggctgggcttgatgatctcatctggatggtcccttccaaccttaatgattctgattctctgacctgccttgccccagctgccttcccatagccagcgagcacatcagatgcgatg

SEQ ID NO: 37333 - DNA, 600 bp, Chicken  19866894267082_8
tcatccaattccaaccccctgccatgggcagggttgccacccactagatcatgcaccagatcacactgtccagagccccatctgacctggctttgaatacctccagagatggggcatccacaacttctctagrcagcctgtcgtttcaccagaccagaactcactctttgcgtctccactgatgcaaatgcaacagtgatgctgtgcaaatctaccacaagatcttggtttgacctaggatcagtaaaaacaaagtgcacgttgtccarcatcctcttttgagctttcctttgcaggagytgaccacagaattgttcaggctgaacctgccaatggcattaacacaaccaatttttctacagctgtctaaaaccccatccctggaggtgcttaagagctgtgtagttgaggcactgagaggcatgctcagtaggcayggtggggatgggctgatggctgggcttgatgatctcatctggatggtcccttccaaccttaatgattctgattctctgacctgccttgccccagctgccttcccatagccagcgagcacatcagatgcgatgccttcagctttaccacccagacatgcagtac

SEQ ID NO: 37334 - DNA, 600 bp, Chicken  19866894267082_9
ctgtcgtttcaccagaccagaactcactctttgcgtctccactgatgcaaatgcaacagtgatgctgtgcaaatctaccacaagatcttggtttgacctaggatcagtaaaaacaaagtgcacgttgtccarcatcctcttttgagctttcctttgcaggagytgaccacagaattgttcaggctgaacctgccaatggcattaacacaaccaatttttctacagctgtctaaaaccccatccctggaggtgcttaagagctgtgtagttgaggcactgagaggcatgctcagtaggcayggtggggatgggctgatggctgggcttgatgatctcatctggatggtcccttccaaccttaatgattctgattctctgacctgccttgccccagctgccttcccatagccagcgagcacatcagatgcgatgccttcagctttaccacccagacatgcagtacgtgacacaatccgggctggaaggagccatgtgttttctcctgcatgcagctctagctctgcttccaaacacatcctctttgtacggtgactttgcacacaaacgtcaaacagcagctgtttggccaggacttggaaa

SEQ ID NO: 37335 - DNA, 600 bp, Chicken  19866894267086_1
gtttggtttggaactgatggtacggtaatggttttaattttaactctctgcttgagaagactgactggtaaacactggctgacaggcatatctttcatctcactgacagtaaacccatctgtcaaaaattccaattaatgttcagagagggagaaaagtaatgcaattcaaattaggttaaatcattcgagttagaatttgtaagtttttccctttgaatatctaagatctttctttaagatattattcttcgcaggtaatgtccagttgcagtgaagtgatgtctgtctgaatgctgcygttgyrcctytagaaaggagtgaccagttcaggacttctgtttwtactgtccttgctcatggttctgtcttagcagtcagcagcaatgcctcaggctgggaagcttcttgtttcttggggtatgtcattcactggcctttttgcatttccctcagtgaaaatatgtatattctttccacacattccattagctatagatatttgagagcttcttaattacattttaaaaaacataaagtcaaacacacagcaggtcagcaagcactctgcacatgctgaagggtgttttcagcgctcaca

SEQ ID NO: 37336 - DNA, 600 bp, Chicken  19866894267086_2
gtttggaactgatggtacggtaatggttttaattttaactctctgcttgagaagactgactggtaaacactggctgacaggcatatctttcatctcactgacagtaaacccatctgtcaaaaattccaattaatgttcagagagggagaaaagtaatgcaattcaaattaggttaaatcattcgagttagaatttgtaagtttttccctttgaatatctaagatctttctttaagatattattcttcgcaggtaatgtccagttgcagtgaagtgatgtctgtctgaatgctgcygttgyrcctytagaaaggagtgaccagttcaggacttctgtttwtactgtccttgctcatggttctgtcttagcagtcagcagcaatgcctcaggctgggaagcttcttgtttcttggggtatgtcattcactggcctttttgcatttccctcagtgaaaatatgtatattctttccacacattccattagctatagatatttgagagcttcttaattacattttaaaaaacataaagtcaaacacacagcaggtcagcaagcactctgcacatgctgaagggtgttttcagcgctcacaaatga

SEQ ID NO: 37337 - DNA, 600 bp, Chicken  19866894267086_3
tttggaactgatggtacggtaatggttttaattttaactctctgcttgagaagactgactggtaaacactggctgacaggcatatctttcatctcactgacagtaaacccatctgtcaaaaattccaattaatgttcagagagggagaaaagtaatgcaattcaaattaggttaaatcattcgagttagaatttgtaagtttttccctttgaatatctaagatctttctttaagatattattcttcgcaggtaatgtccagttgcagtgaagtgatgtctgtctgaatgctgcygttgyrcctytagaaaggagtgaccagttcaggacttctgtttwtactgtccttgctcatggttctgtcttagcagtcagcagcaatgcctcaggctgggaagcttcttgtttcttggggtatgtcattcactggcctttttgcatttccctcagtgaaaatatgtatattctttccacacattccattagctatagatatttgagagcttcttaattacattttaaaaaacataaagtcaaacacacagcaggtcagcaagcactctgcacatgctgaagggtgttttcagcgctcacaaatgaa

SEQ ID NO: 37338 - DNA, 600 bp, Chicken  19866894267086_4
gaactgatggtacggtaatggttttaattttaactctctgcttgagaagactgactggtaaacactggctgacaggcatatctttcatctcactgacagtaaacccatctgtcaaaaattccaattaatgttcagagagggagaaaagtaatgcaattcaaattaggttaaatcattcgagttagaatttgtaagtttttccctttgaatatctaagatctttctttaagatattattcttcgcaggtaatgtccagttgcagtgaagtgatgtctgtctgaatgctgcygttgyrcctytagaaaggagtgaccagttcaggacttctgtttwtactgtccttgctcatggttctgtcttagcagtcagcagcaatgcctcaggctgggaagcttcttgtttcttggggtatgtcattcactggcctttttgcatttccctcagtgaaaatatgtatattctttccacacattccattagctatagatatttgagagcttcttaattacattttaaaaaacataaagtcaaacacacagcaggtcagcaagcactctgcacatgctgaagggtgttttcagcgctcacaaatgaacttg

SEQ ID NO: 37339 - DNA, 600 bp, Chicken  19866894267086_5
tctctgcttgagaagactgactggtaaacactggctgacaggcatatctttcatctcactgacagtaaacccatctgtcaaaaattccaattaatgttcagagagggagaaaagtaatgcaattcaaattaggttaaatcattcgagttagaatttgtaagtttttccctttgaatatctaagatctttctttaagatattattcttcgcaggtaatgtccagttgcagtgaagtgatgtctgtctgaatgctgcygttgyrcctytagaaaggagtgaccagttcaggacttctgtttwtactgtccttgctcatggttctgtcttagcagtcagcagcaatgcctcaggctgggaagcttcttgtttcttggggtatgtcattcactggcctttttgcatttccctcagtgaaaatatgtatattctttccacacattccattagctatagatatttgagagcttcttaattacattttaaaaaacataaagtcaaacacacagcaggtcagcaagcactctgcacatgctgaagggtgttttcagcgctcacaaatgaacttgtacagcccccacagaaatgcctgaataaccacat

SEQ ID NO: 37340 - DNA, 600 bp, Chicken  19866894267089_1
gaaaacattttttctttggcatctagtaccagagaagccccttggagtagaattctccaattaatggccatcccggtggatttggaacgcctccacctgaagtggggcagaacaagggacactttcaaactgtgagcagattcgttgtctttgcgaggaagactgttctgattgagatcggcctttttttcccccagcaacagggtcatgtcaggaaggaatgcaacatctctggttcagttcaggggggtaatcttattcggtttgcagagctgcttggagaactgagagcttcagtcygtaagatggactaatgcccagtgtggctagtaaaagtaagactgctgttaaagtcattactagagaaaaaacacacccgctaacttcaaataggctgttggcttcttgagagagggccaaacttcttgtgatactgagaattttgccagttacccacccattatatgtatctatgttatatgtatgtataaaatgttcctttttagcctgaattgctaaggaaactgggcataaatgagctcactgtctatttatccatccccacttcgataacttttagcctcactgcacagttccttc

SEQ ID NO: 37341 - DNA, 600 bp, Chicken  19866894267091_1
tagatgatatctttcgacaaatgctttgatatttagcggtacttaccctaaatttgatttctcttgttgaagcttacaggagagtgtgagtgcaacccttcttctagtgacaatttaatatatttagtacagaagccagcttcctgatgtgggggaaacagtgggggcaataataggatcaatgagcatttcaaagaaataaaatatattttgaaaattataagttttaatcaatttataaatcaatatgcttgtattgaattatagattcctgaggatgattactactgaaactattayatttatcaaactcttcgtaaaaacacaagtggacaaaacagatcctaatatgacaaaggcatttaaggacattctggagtcaagaattatggcatacatttacaggtgtaggtagatggtatagggacagctatagggacagttaagctgttactacattcagaagtgaggagtgaatgcctgtggtctgagatagaaaaggagaacagattaatttttgtggtcagtgaatttccaggagctgtcctggaatatttcattaacattgaaattgagaaccgtgatctgtgtgaacatcag

SEQ ID NO: 37342 - DNA, 600 bp, Chicken  19866894267092_1
tatggcaatgacaagttacttccttctccctccctccccaccaagtatagtttttattgctatgtagcatataaaacaaaatccttacatgatttaaattaagggttattgccaacgtttcaccttcagatgagtgtaacttttaataaattacatgaagtctaggagagggaccaacatgattcactctggaacatcttgagtgctgaggtatgccaacagaaataattaacttcaacaaggctctctattaagatgcagcatgcacaattaaaggagttgtagctttgaacaaatggytcaacatgtaggtgtcaaatggaactgttctccctcctccatcgccttggcagccgttgggcttcactgtgaggagcaaaacataaaagcatgcggacagacaggcacacaacagcattaactactccacaacaaggcagagcaacagcttgttttttggatgttgacagcacaaagactgaaaaagaccattcagagccatgaaaatgatttggggtgagcattaaaaataatacatttaatgaaaatatgagcaatccacagcataagcacagcctccaaaaataagggaattgccaa

SEQ ID NO: 37343 - DNA, 599 bp, Chicken  19866894267096_1
  misc_feature (1)..(61): n is any nucleotide
nnnnnnnnnnnnnnnnnnnnnnnnnnnnnnnnnnnnnnnnnnnnnnnnnnnnnnnnnnnnngaccctcagtatcctccaagttcttgaatttcttcctaagaagcagagattcacagagttagacgtaaaagacagtattttgcttctctttttttaatgagatgtgacactggaattttccacaaggctgtgtgggttctttaaacttcggaatcattcctcaacaattacatattttatcagaaagatctgtgataatttcaaaggcaggagagtagtaaacgttcctcttaaattaygggatttgtgatttttccagtcaaatgatttccatgtcctgcactgagctacaaggagtgaggtactgttagagtcagacttctacccttttttgtttgtttgtttcttccagccagtggagtttcttaaggaagacagtttctcagtataagmaacctgaaatatacttttttcttttttttttttcctgtaggaatgatgaatagtgaatatagtgactcttttcttctacaaacctttgtcctgctctgcaaagaagtgcaaaggggatttcacataaatttaattcaactgacta

SEQ ID NO: 37344 - DNA, 600 bp, Chicken  19866894267096_2
ttaatgagatgtgacactggaattttccacaaggctgtgtgggttctttaaacttcggaatcattcctcaacaattacatattttatcagaaagatctgtgataatttcaaaggcaggagagtagtaaacgttcctcttaaattaygggatttgtgatttttccagtcaaatgatttccatgtcctgcactgagctacaaggagtgaggtactgttagagtcagacttctacccttttttgtttgtttgtttcttccagccagtggagtttcttaaggaagacagtttctcagtataagmaacctgaaatatacttttttcttttttttttttcctgtaggaatgatgaatagtgaatatagtgactcttttcttctacaaacctttgtcctgctctgcaaagaagtgcaaaggggatttcacataaatttaattcaactgactaggttaatcaccccatataatcaatggaaataagtaagaataaatcatttacttagttgaaccccatctttgagtcttcagacaactgctctagaataaagtgaattgtacttttgaagtatctgtttctctccactgcctatgtagtgagctctg

SEQ ID NO: 37345 - DNA, 600 bp, Chicken  19866894267107_1
ataaagactgattttctttagattgccccatccaatagtagatctgcttttgcagcccagcagcagtctgtacctcagcccccatcactgcattagctctgtgcctccccaccagcacactgcacgcaaagtttttaagtgcctttgctacagcagccattaacagctttatagcctatgtgaaatgacattctgggatgtatttctctactctgctgtacctgatgactacttggagacaaagagtcacgtcaaaaagcaagaagcagcttgaaaaagtagtggggaaatattgctttsctctgaactgtgagtgaggttagaggatctgaatgctccatgctgaatacaagatagaagcacttacagagaggaaaagcaatccagtccatacactgtttgtgcaagcccattagagcaggcaggcagcttatagatctgagtctaaggagacaaaataaacccacagaaatgatggtcgggcttcccttatggctttgcatgtttctgaaatwcacagattctcttattcattgggtacatagagagatcgagtcttatatttccaaatgcaatgaaagtgctgagattttgaaaata

SEQ ID NO: 37346 - DNA, 600 bp, Chicken  19866894267107_2
ctgtacctgatgactacttggagacaaagagtcacgtcaaaaagcaagaagcagcttgaaaaagtagtggggaaatattgctttsctctgaactgtgagtgaggttagaggatctgaatgctccatgctgaatacaagatagaagcacttacagagaggaaaagcaatccagtccatacactgtttgtgcaagcccattagagcaggcaggcagcttatagatctgagtctaaggagacaaaataaacccacagaaatgatggtcgggcttcccttatggctttgcatgtttctgaaatwcacagattctcttattcattgggtacatagagagatcgagtcttatatttccaaatgcaatgaaagtgctgagattttgaaaatataaaaaaaaactatggaaacaaatawgtatgcctgtgcragctgtttataaatatagatacaagtaagccctgtaaccacagccagagttcccagcaggatgtccctctgacccacacggtgtcatgtattcacgtctcacagcacatcagctccctgctccatgccactgctccccaccttgggctccaaccagggctccaactatktgcaatg

SEQ ID NO: 37347 - DNA, 600 bp, Chicken  19866894267107_3
atctgaatgctccatgctgaatacaagatagaagcacttacagagaggaaaagcaatccagtccatacactgtttgtgcaagcccattagagcaggcaggcagcttatagatctgagtctaaggagacaaaataaacccacagaaatgatggtcgggcttcccttatggctttgcatgtttctgaaatwcacagattctcttattcattgggtacatagagagatcgagtcttatatttccaaatgcaatgaaagtgctgagattttgaaaatataaaaaaaaactatggaaacaaatawgtatgcctgtgcragctgtttataaatatagatacaagtaagccctgtaaccacagccagagttcccagcaggatgtccctctgacccacacggtgtcatgtattcacgtctcacagcacatcagctccctgctccatgccactgctccccaccttgggctccaaccagggctccaactatktgcaatggcacagctggttttccccactttacctgaaacattttacactagaagaaatgaattaggttgtaggttactgggttgcaaagcaagccgtgctgccatgttgtgggtacgg

SEQ ID NO: 37348 - DNA, 600 bp, Chicken  19866894267107_4
atgctgaatacaagatagaagcacttacagagaggaaaagcaatccagtccatacactgtttgtgcaagcccattagagcaggcaggcagcttatagatctgagtctaaggagacaaaataaacccacagaaatgatggtcgggcttcccttatggctttgcatgtttctgaaatwcacagattctcttattcattgggtacatagagagatcgagtcttatatttccaaatgcaatgaaagtgctgagattttgaaaatataaaaaaaaactatggaaacaaatawgtatgcctgtgcragctgtttataaatatagatacaagtaagccctgtaaccacagccagagttcccagcaggatgtccctctgacccacacggtgtcatgtattcacgtctcacagcacatcagctccctgctccatgccactgctccccaccttgggctccaaccagggctccaactatktgcaatggcacagctggttttccccactttacctgaaacattttacactagaagaaatgaattaggttgtaggttactgggttgcaaagcaagccgtgctgccatgttgtgggtacgggcaggagggaatt

SEQ ID NO: 37349 - DNA, 548 bp, Chicken  19866894267107_5
tgaaatwcacagattctcttattcattgggtacatagagagatcgagtcttatatttccaaatgcaatgaaagtgctgagattttgaaaatataaaaaaaaactatggaaacaaatawgtatgcctgtgcragctgtttataaatatagatacaagtaagccctgtaaccacagccagagttcccagcaggatgtccctctgacccacacggtgtcatgtattcacgtctcacagcacatcagctccctgctccatgccactgctccccaccttgggctccaaccagggctccaactatktgcaatggcacagctggttttccccactttacctgaaacattttacactagaagaaatgaattaggttgtaggttactgggttgcaaagcaagccgtgctgccatgttgtgggtacgggcaggagggaattgttggttggagmttaggagttagggagagaaaggaggggaaggagcttatatcaggcctttgctgcattagaaaggaattagtgacaggtggggaaagcatgcacagcaaagagaaa

SEQ ID NO: 37350 - DNA, 405 bp, Chicken  19866894267107_6
atatagatacaagtaagccctgtaaccacagccagagttcccagcaggatgtccctctgacccacacggtgtcatgtattcacgtctcacagcacatcagctccctgctccatgccactgctccccaccttgggctccaaccagggctccaactatktgcaatggcacagctggttttccccactttacctgaaacattttacactagaagaaatgaattaggttgtaggttactgggttgcaaagcaagccgtgctgccatgttgtgggtacgggcaggagggaattgttggttggagmttaggagttagggagagaaaggaggggaaggagcttatatcaggcctttgctgcattagaaaggaattagtgacaggtggggaaagcatgcacagcaaagagaaa

SEQ ID NO: 37351 - DNA, 600 bp, Chicken  19866894267112_1
tagtgagcgtagattgcatggatctctgtacccatattttctttttaggtaaataatttgtccgtcttaccataatttcttgttataaggtaatggaaatatggtatcatatctagaagtaggactagaaaagagaaatagtgtaggaaaaacgttttgtgaacaggacaaaagaaataagagaaatgagaagaaaaatattttagggatctgtaagttcgttttgctactgctttgtgaaaagtgtatatttttgcggagttctgtattttacagttaagacaaagtgagagccattaygtatttggcaattatctttatcagttgtaaatagctgcatttacaactttgaagtgaactgtccatttgggagtattcaactacaataattcttagcagttatgtaaaaactttgtgtttgtatataataataagtatacattttccatgtaatgcatttctttatatattcggtttgctggagtctttccccccacccgtttccctcagattagtttattcctgttttttaaaagactttagcagaaggagggaaagcagtttagatccagtctctgtgaaagctgtttcattcagcaa

SEQ ID NO: 37352 - DNA, 600 bp, Chicken  19866894267112_2
atgtaaaaactttgtgtttgtatataataataagtatacattttccatgtaatgcatttctttatatattcggtttgctggagtctttccccccacccgtttccctcagattagtttattcctgttttttaaaagactttagcagaaggagggaaagcagtttagatccagtctctgtgaaagctgtttcattcagcaagaagttatcttcgtttagcttgcatttttgtactcctgccaggaaggaaaaggatgtggtattaggctttgaagattattgctttcattttgtctgcttcrtgcaatgttttgtagctatcttgaaaaattatatacaaaataaaaatgctttagcacttattctgggtattggttttatagctaagaatgcctagctaacactctttcaaaaccaatggatttttcatcagtctaagttttaatccttacagaagatgctcttcagataaaccattaagttctattactgaatttagatccacttacatgaaattatgtgaaggcccattcgcttcaaataacttgcaggcacctaatgtttgcaggtcagaattgagatcttccaagacattgctgtag

SEQ ID NO: 37353 - DNA, 600 bp, Chicken  19866894267128_1
taaaatgcttgtggctacagggaaaatattggagcaatgagaacattctcactaacctggagattagagaggtctttttggcaggcagtaaatgtagtttgcttataacacctgcatatacttgcatgtctatgatcttctaattttacagcttttcgtgtctattctttccctgatatatttgcagaattcatctggtcttctgctggaggtttggttggggaaacagagtgcctagtacaaacagttccttgtgaatgcttcactcctacagttatcagtcatagagaaaaaatgccrctcaataacctatttttagtacagtttctgatggtagtaattaaatatatttttaaaaagcataacatataatattaagccaactccagccatgacatttacatttacactgctctgtgtgtaagtagtctctatgaagatacagtggcatttactgtttatcttgccaactatcttctcattgaatctttctaaggaaaggagaagaaagaagcttgcttgtgttcagtttgtctcttttactgccgttggttcagcacagttcttgttgtaaagaatatctgttctgtgatgtatctg

SEQ ID NO: 37354 - DNA, 599 bp, Chicken  19866894267129_1
  misc_feature (1)..(1): n is any nucleotide
ncaataaaggcagcaatcttccacctatgctaaaccaaaggtactgttttctaatgtccccaatacatctgaggaacagatgctactataagccacagtcttttgatcctgtaaattgaatgcttttgagaatgtcacccagaattctcccatcaatcctaagaaaacatcatctaaaacagaagatgattttgattttcctcgtgacttggcagatgaagagataattaggtatggaaaaatgagtgtttctgaggatgaacgtacctgctgtaatcctaccgccaactgaattaaggyttgcctcctgcagtaaggagtattctarctcagcatctggaggaaagctaatccctatcacatttcagaagtcatcagtgggccttcctatgaaaccaatggacagaaggaaagggaagagaggggaaagtagcaaaagtccttcctgtctccgtccgtggctataagcaacagcaataaaagaatccagcaacaccacaccaaaaaagagacctaaggctggtgattgcctattcttttctccccattaaacctaaatgattcctcttatggaccggtcacatgaagcagcttatttt

SEQ ID NO: 37355 - DNA, 600 bp, Chicken  19866894267129_2
gctaaaccaaaggtactgttttctaatgtccccaatacatctgaggaacagatgctactataagccacagtcttttgatcctgtaaattgaatgcttttgagaatgtcacccagaattctcccatcaatcctaagaaaacatcatctaaaacagaagatgattttgattttcctcgtgacttggcagatgaagagataattaggtatggaaaaatgagtgtttctgaggatgaacgtacctgctgtaatcctaccgccaactgaattaaggyttgcctcctgcagtaaggagtattctarctcagcatctggaggaaagctaatccctatcacatttcagaagtcatcagtgggccttcctatgaaaccaatggacagaaggaaagggaagagaggggaaagtagcaaaagtccttcctgtctccgtccgtggctataagcaacagcaataaaagaatccagcaacaccacaccaaaaaagagacctaaggctggtgattgcctattcttttctccccattaaacctaaatgattcctcttatggaccggtcacatgaagcagcttattttgtcaagtgctcttcagcctaaccatggct

SEQ ID NO: 37356 - DNA, 600 bp, Chicken  19866894267132_1
tccttcctgtttctctcaacagctacacaaatgattgtcaacacatgcacaatagtctatcagcagcagataagcatgaagtgcacagaagccagtgtccacatggccattcccaaacacagatttgtgtgcattaaaaatggtatagaataaatacttccagtggaaacagggagggagaattctgtccttttggggtatgggttctgaatgttgtgctgatccatgcattgaagttatgcagacagaccttgcaaaagagaagtctaagccaggcagatcgcagctttcctaaaggarataactgatctatatcacagctgtatcaccgttgtcactgagggttttaccttctgctgtgcctgaagggagcagcaggaccacagcccagatcgctgtcctgactatccatacaaatgatgcgacatttaagccccgagccagaattctgtatgcccatacaccacaaacctttgcccgatgacagcttatctcagttctagaagacttttcctacagaattatcatgttcttaagaggttatttgtctttcagtttcttatctgcctcagtggaaaaatggattcaaatatctctcca

SEQ ID NO: 37357 - DNA, 600 bp, Chicken  19866894267139_1
gaatatcctactagctatcaccatacattgtgaagagaaagtgaaacgctgctttatagaatcagtagcaataccagcacatagaaaacagctacaatatatgaaatgctacttctaccaaaaacaatgcaacaccaacgtactcatacaaagcacgtcagtctgaacagctgctaaaaattcactgaagcttggaggaagatattttattcactgaagcttggaggaagatattttagtctcttcagccaaccatggtttgaaaacagaatgtaatgtaataaatgaaggaatctaacwcctaaaatacattagtcgtacacagccctacaaatawtttttaactatttgtagcacaactggtgtttctagagatgtttgcatgctgaacatatttggtaagaaaattcatagaacgatagaattgtttgagttggaggggatccgtaaaggtcacctcgtccaactcccctrcagtgaacagggacaccacagctagatcaggttgctcagaactccatccagcctgacctcagatgtcttcagggatggggcaacaccacctatctgggcaacctgtctcagtgcctcaccaycctt

SEQ ID NO: 37358 - DNA, 600 bp, Chicken  19866894267139_2
aaagtgaaacgctgctttatagaatcagtagcaataccagcacatagaaaacagctacaatatatgaaatgctacttctaccaaaaacaatgcaacaccaacgtactcatacaaagcacgtcagtctgaacagctgctaaaaattcactgaagcttggaggaagatattttattcactgaagcttggaggaagatattttagtctcttcagccaaccatggtttgaaaacagaatgtaatgtaataaatgaaggaatctaacwcctaaaatacattagtcgtacacagccctacaaatawtttttaactatttgtagcacaactggtgtttctagagatgtttgcatgctgaacatatttggtaagaaaattcatagaacgatagaattgtttgagttggaggggatccgtaaaggtcacctcgtccaactcccctrcagtgaacagggacaccacagctagatcaggttgctcagaactccatccagcctgacctcagatgtcttcagggatggggcaacaccacctatctgggcaacctgtctcagtgcctcaccayccttattataaaaaacttttatacccagtccaattctcccc

SEQ ID NO: 37359 - DNA, 600 bp, Chicken  19866894267139_3
taaaaattcactgaagcttggaggaagatattttattcactgaagcttggaggaagatattttagtctcttcagccaaccatggtttgaaaacagaatgtaatgtaataaatgaaggaatctaacwcctaaaatacattagtcgtacacagccctacaaatawtttttaactatttgtagcacaactggtgtttctagagatgtttgcatgctgaacatatttggtaagaaaattcatagaacgatagaattgtttgagttggaggggatccgtaaaggtcacctcgtccaactcccctrcagtgaacagggacaccacagctagatcaggttgctcagaactccatccagcctgacctcagatgtcttcagggatggggcaacaccacctatctgggcaacctgtctcagtgcctcaccayccttattataaaaaacttttatacccagtccaattctcccctcctttagttttaaaccatatacccttgtctcatcacaacaaatgctactaaagaaggggacaccccttctttcctgtagctcccctttagatactgaaaggctgctctcaggtcacttcacagccttctgttctcc

SEQ ID NO: 37360 - DNA, 600 bp, Chicken  19866894267139_4
aacwcctaaaatacattagtcgtacacagccctacaaatawtttttaactatttgtagcacaactggtgtttctagagatgtttgcatgctgaacatatttggtaagaaaattcatagaacgatagaattgtttgagttggaggggatccgtaaaggtcacctcgtccaactcccctrcagtgaacagggacaccacagctagatcaggttgctcagaactccatccagcctgacctcagatgtcttcagggatggggcaacaccacctatctgggcaacctgtctcagtgcctcaccayccttattataaaaaacttttatacccagtccaattctcccctcctttagttttaaaccatatacccttgtctcatcacaacaaatgctactaaagaaggggacaccccttctttcctgtagctcccctttagatactgaaaggctgctctcaggtcacttcacagccttctgttctccaggctgaacagccccagttctctcagcctgtcctcatgggaggagatgttccatcccttggatgatttttctgactttcctctgaacacgctccaacaggttcacatctcttctgcactgag

SEQ ID NO: 37361 - DNA, 599 bp, Chicken  19866894267140_1
  misc_feature (1)..(173): n is any nucleotide
nnnnnnnnnnnnnnnnnnnnnnnnnnnnnnnnnnnnnnnnnnnnnnnnnnnnnnnnnnnnnnnnnnnnnnnnnnnnnnnnnnnnnnnnnnnnnnnnnnnnnnnnnnnnnnnnnnnnnnnnnnnnnnnnnnnnnnnnnnnnnnnnnnnnnnnnnnnnnnnnnnnnnnnnnnnnnacattgcttctttggttgtgttaccacagtctcagcttttaccctctagccatggatttgtctgtattcctgtggtgtaattcagctgaaactgttccatgtgcttcagtaatgtttaaatatctcrtatttatttttttgttttggtttaacatataaaaagtttcttcttaatgttatattttatcttttcagacaaaatattattggctacagatgaaaaacagattttctccaattctactgtttttatgttattgtgattaataagttagaaaaaatatttactaccacaaaattaaagtagcacatagaaaaactggcccaaggcattgattcagttcagaggagaaagcaagaatcaacaagaaccaaaatatctacttaacccaacaggggagcggtggaaatagtttgccccataat

SEQ ID NO: 37362 - DNA, 599 bp, Chicken  19866894267144_1
  misc_feature (1)..(150): n is any nucleotide
nnnnnnnnnnnnnnnnnnnnnnnnnnnnnnnnnnnnnnnnnnnnnnnnnnnnnnnnnnnnnnnnnnnnnnnnnnnnnnnnnnnnnnnnnnnnnnnnnnnnnnnnnnnnnnnnnnnnnnnnnnnnnnnnnnnnnnnnnnnnnnnnnnnnnnttgttttgtcctttgctctggaaaaggagatagcagtggggattaaatcaagtgctcaaaaataagcaaacgcttaaatgctttcttggatttgaaccagaataataaacttgggaaatggcaattttgcactgtgaatcagtatagaargtcttattttacctaattaaaaatggtcttggattctttattttaagagaagattcccagcactccacatttgtactgaatcatagtttaatgcatgcatacatgtggtttgaatatgacacctctagaatttatctggttcattattcttgtgttattcaaacgctactttgtgtggcctttatttcacactgtctgcaccaagctgcagtagraagacaggcataccacrgtgaaaaataaaggaaggattgtgaattgccctctcatcctattgccttgccctggacaagctttat

SEQ ID NO: 37363 - DNA, 600 bp, Chicken  19866894267144_2
gcaaacgcttaaatgctttcttggatttgaaccagaataataaacttgggaaatggcaattttgcactgtgaatcagtatagaargtcttattttacctaattaaaaatggtcttggattctttattttaagagaagattcccagcactccacatttgtactgaatcatagtttaatgcatgcatacatgtggtttgaatatgacacctctagaatttatctggttcattattcttgtgttattcaaacgctactttgtgtggcctttatttcacactgtctgcaccaagctgcagtagraagacaggcataccacrgtgaaaaataaaggaaggattgtgaattgccctctcatcctattgccttgccctggacaagctttatctacaccctcttgttaacatgccacttcattgaaaagtcagtttgtgtcttcttggtatgattaatagaagtgaagtacaagccagtttaagataattttggatatctccatgttgaattattgaatttcaaattgcaagggggggttctttaaaataccagccaaatgggttagttttatctaacttactgggatctacaattctgggaggcctt

SEQ ID NO: 37364 - DNA, 600 bp, Chicken  19866894267144_3
ttcttggatttgaaccagaataataaacttgggaaatggcaattttgcactgtgaatcagtatagaargtcttattttacctaattaaaaatggtcttggattctttattttaagagaagattcccagcactccacatttgtactgaatcatagtttaatgcatgcatacatgtggtttgaatatgacacctctagaatttatctggttcattattcttgtgttattcaaacgctactttgtgtggcctttatttcacactgtctgcaccaagctgcagtagraagacaggcataccacrgtgaaaaataaaggaaggattgtgaattgccctctcatcctattgccttgccctggacaagctttatctacaccctcttgttaacatgccacttcattgaaaagtcagtttgtgtcttcttggtatgattaatagaagtgaagtacaagccagtttaagataattttggatatctccatgttgaattattgaatttcaaattgcaagggggggttctttaaaataccagccaaatgggttagttttatctaacttactgggatctacaattctgggaggcctttttaagtgtgaaaaatg

SEQ ID NO: 37365 - DNA, 600 bp, Chicken  19866894267160_1
gagcaaccagtgtctgctctggtgcatgcacaatggaaatggaatgttgctgtttacctgcatcctttgttttcatgtagtccaggagatatgcagaggtagtgattgaagcaggaggtttatgaaatgccaccaagaaaaaaaaaaagaaaaatccagtgtagtcaaaaaggaagtgagaaagagattgcccttatgcagcagctctgctctgttttgcagagatgttggcgtccttacagaggctaaggaggatcaaagaggtagtcttgcagatgacaaagctgttgccaaatcccrgttctttatagcccttgctgtagggagctctgacagcagtggtgaagctctccacttatcaggtagtgggttaaaggaaaacctgtcttgcaggcttcctgcttgtaaatccaagtgctttctttgtctggagagcgcattatctgccttaaaggtaatatatgtttatgcacctattagcagggccaatttattttttttcctagaggattaggattcccagatctgaaatttcaagaagaaacaagascagaagcagcagaatgatttggtgggactggcagatttttgtttggtcat

SEQ ID NO: 37366 - DNA, 477 bp, Chicken  19866894267160_2
gaggatcaaagaggtagtcttgcagatgacaaagctgttgccaaatcccrgttctttatagcccttgctgtagggagctctgacagcagtggtgaagctctccacttatcaggtagtgggttaaaggaaaacctgtcttgcaggcttcctgcttgtaaatccaagtgctttctttgtctggagagcgcattatctgccttaaaggtaatatatgtttatgcacctattagcagggccaatttattttttttcctagaggattaggattcccagatctgaaatttcaagaagaaacaagascagaagcagcagaatgatttggtgggactggcagatttttgtttggtcattggtaatccatcagtaaagctagcttcaaaacaagtttccaagtcttctggggacagaaagtctctagctgggtacagggtatttgctatacattctgctccagaaagcagctgttgaaaacacaca

SEQ ID NO: 37367 - DNA, 600 bp, Chicken  19866894267171_1
aacagtcttgagggaaatagcaaaggctccgtgcctagtgactgagcccatcccatgcatgctattctttctttaaaatctcactgagataataggtctagtgtgatgacagtgataattcctctgctgacaggctctgcactggagcagtagctcaactttaactactggagctaggaattcctgctgaggtttaccagttttacccccaggttatgtccctgtattgtcctgccatttggccactgtgtttccctgcttctgcccaatgctgtgattgtaggaatggagcacttttaytcttgaaatatctgagacctgttgcaaagcccattaaaactgatgcagctttcttttatggatttcactaggtttggctcaagtcctcagcagcattgctcttgcttaatgtgaaacttggaagcaaccctgggtaaacaagccaggctaatattctacaggctgatcataactacttgaaggagaaggtaaggtgtgagatgggtaaacgagggaaaaatattaacaatctttatcttaaaagtttttatccaatcaacgtcaggcttgatttgactttggtgaaatatatatctaatc

SEQ ID NO: 37368 - DNA, 525 bp, Chicken  19866894267171_2
atattaacaatctttatcttaaaagtttttatccaatcaacgtcaggcttgatttgactttggtgaaatatatatctaatcttatatgagtatgtcagctttacactaagattcgtgaatgggtgccaaatttcagctctgaaagagagagactttcagcttgtggcaaagcccagctcagacttacgcataggcaagggagttgccaagaacagaagatactgcacagcctcgtgtgttaatctcaggctcctggagagccaggcctgaggctaagggagagatgcaaataactaaagyagtgctgcttgatagggacatgggtgatggatacgcccatccttctggagatgaaattgggtgctgcctgtgcttctgagatgtctactccatatggaaatgtcctgcttctagcctcaaacatggtgactttagtagttctgcattgttctgctcttctgtgctcttctcgggagtcattgaccagtacacttctaaattattttgtaacttgtgctaaatgca

SEQ ID NO: 37369 - DNA, 599 bp, Chicken  19866894267172_1
  misc_feature (1)..(184): n is any nucleotide
nnnnnnnnnnnnnnnnnnnnnnnnnnnnnnnnnnnnnnnnnnnnnnnnnnnnnnnnnnnnnnnnnnnnnnnnnnnnnnnnnnnnnnnnnnnnnnnnnnnnnnnnnnnnnnnnnnnnnnnnnnnnnnnnnnnnnnnnnnnnnnnnnnnnnnnnnnnnnnnnnnnnnnnnnnnnnnnnnnnnnnnntgtcatccagaaacttgctcaccgtacttgaacccactgcccacattactgattaagatattaaccagtaccagtcccaatatgcctcttatcactggtctccactttgacactgmgccattgtctgcaactctttggatgtggccatccagccaattccttatccaccaaacagtccatccatcagatccacacgtctctgattcagagagaaggatttggggtgggactgtgtcaaaagctttgcacaggaaaaggcatatgaaatctgtgcctcttccctcatccaccaacacagacactggagtttataatcagtgtgtacgcttacataagacaacwgcacaatgcccatgaacaacacttagggaatggaattgtcagatagaatcatcatctcttgacaggatgctga

SEQ ID NO: 37370 - DNA, 600 bp, Chicken  19866894267172_2
acattactgattaagatattaaccagtaccagtcccaatatgcctcttatcactggtctccactttgacactgmgccattgtctgcaactctttggatgtggccatccagccaattccttatccaccaaacagtccatccatcagatccacacgtctctgattcagagagaaggatttggggtgggactgtgtcaaaagctttgcacaggaaaaggcatatgaaatctgtgcctcttccctcatccaccaacacagacactggagtttataatcagtgtgtacgcttacataagacaacwgcacaatgcccatgaacaacacttagggaatggaattgtcagatagaatcatcatctcttgacaggatgctgacagtagcaaaattcaccttaaaaaagaaactattaaaaacaacracaataaaaaaaccctgtgaaagttaactgattatactgtgtagctcagagcaggcacagtaccaagcaaagttagagctgctactatctgatrcctctgcragaactactgaaagcaaacccctttcaacaggaagagtggtctaagtcacgtggtaacaaggttctgcacttgcaatctga

SEQ ID NO: 37371 - DNA, 600 bp, Chicken  19866894267172_3
cttatccaccaaacagtccatccatcagatccacacgtctctgattcagagagaaggatttggggtgggactgtgtcaaaagctttgcacaggaaaaggcatatgaaatctgtgcctcttccctcatccaccaacacagacactggagtttataatcagtgtgtacgcttacataagacaacwgcacaatgcccatgaacaacacttagggaatggaattgtcagatagaatcatcatctcttgacaggatgctgacagtagcaaaattcaccttaaaaaagaaactattaaaaacaacracaataaaaaaaccctgtgaaagttaactgattatactgtgtagctcagagcaggcacagtaccaagcaaagttagagctgctactatctgatrcctctgcragaactactgaaagcaaacccctttcaacaggaagagtggtctaagtcacgtggtaacaaggttctgcacttgcaatctgaaaacaagcttgaagcccttgtgcaatactgaacaggaaacaccaacggcatcacaaatgagattaccatctctgcaactctggtctcagttgagttggatgcagtctaatgaaccaa

SEQ ID NO: 37372 - DNA, 537 bp, Chicken  19866894267172_4
aaaggcatatgaaatctgtgcctcttccctcatccaccaacacagacactggagtttataatcagtgtgtacgcttacataagacaacwgcacaatgcccatgaacaacacttagggaatggaattgtcagatagaatcatcatctcttgacaggatgctgacagtagcaaaattcaccttaaaaaagaaactattaaaaacaacracaataaaaaaaccctgtgaaagttaactgattatactgtgtagctcagagcaggcacagtaccaagcaaagttagagctgctactatctgatrcctctgcragaactactgaaagcaaacccctttcaacaggaagagtggtctaagtcacgtggtaacaaggttctgcacttgcaatctgaaaacaagcttgaagcccttgtgcaatactgaacaggaaacaccaacggcatcacaaatgagattaccatctctgcaactctggtctcagttgagttggatgcagtctaatgaaccaaagggctatagaaaaaaaaaagaggaacaagg

SEQ ID NO: 37373 - DNA, 529 bp, Chicken  19866894267172_5
atgaaatctgtgcctcttccctcatccaccaacacagacactggagtttataatcagtgtgtacgcttacataagacaacwgcacaatgcccatgaacaacacttagggaatggaattgtcagatagaatcatcatctcttgacaggatgctgacagtagcaaaattcaccttaaaaaagaaactattaaaaacaacracaataaaaaaaccctgtgaaagttaactgattatactgtgtagctcagagcaggcacagtaccaagcaaagttagagctgctactatctgatrcctctgcragaactactgaaagcaaacccctttcaacaggaagagtggtctaagtcacgtggtaacaaggttctgcacttgcaatctgaaaacaagcttgaagcccttgtgcaatactgaacaggaaacaccaacggcatcacaaatgagattaccatctctgcaactctggtctcagttgagttggatgcagtctaatgaaccaaagggctatagaaaaaaaaaagaggaacaagg

SEQ ID NO: 37374 - DNA, 600 bp, Chicken  19866894267179_1
actctctaaatcatttttggaaggagatattttaaagttttcccagatacaagcctaacactgagggtggttagcatccaggacacacagcagtcctcagctctcctgtcaagcagggtcagattgttatttaagacagaaaaatccaaggcacgggaggtaagtcatttgccagccctaacaactgcaggactgcccacaccaagcagccaccagtatttgtaattcccattggtgggacccacccagaggaaattcagatgacatggctgaaaagccactctgctatttgtcatgtaygccagtgsctagtgcttactgctccttatcaaggtatcagagcaagctgtgcctggggtcacacatacagtgctgaataagagtgacatccagactgctatcaatacatggcatgggcagctccaacagagggcaataggtgaaaatccttaaagactcactattycctgaagctaacrtttccccttagaagtaagggtggatggcaaaggcacccaaggctcaacaagagctcatactgtgacagacagaactccttccagcatcacctggtggcggccaccacgaatcccacccatg

SEQ ID NO: 37375 - DNA, 600 bp, Chicken  19866894267179_2
aatcatttttggaaggagatattttaaagttttcccagatacaagcctaacactgagggtggttagcatccaggacacacagcagtcctcagctctcctgtcaagcagggtcagattgttatttaagacagaaaaatccaaggcacgggaggtaagtcatttgccagccctaacaactgcaggactgcccacaccaagcagccaccagtatttgtaattcccattggtgggacccacccagaggaaattcagatgacatggctgaaaagccactctgctatttgtcatgtaygccagtgsctagtgcttactgctccttatcaaggtatcagagcaagctgtgcctggggtcacacatacagtgctgaataagagtgacatccagactgctatcaatacatggcatgggcagctccaacagagggcaataggtgaaaatccttaaagactcactattycctgaagctaacrtttccccttagaagtaagggtggatggcaaaggcacccaaggctcaacaagagctcatactgtgacagacagaactccttccagcatcacctggtggcggccaccacgaatcccacccatgccacgacc

SEQ ID NO: 37376 - DNA, 600 bp, Chicken  19866894267179_3
atttgccagccctaacaactgcaggactgcccacaccaagcagccaccagtatttgtaattcccattggtgggacccacccagaggaaattcagatgacatggctgaaaagccactctgctatttgtcatgtaygccagtgsctagtgcttactgctccttatcaaggtatcagagcaagctgtgcctggggtcacacatacagtgctgaataagagtgacatccagactgctatcaatacatggcatgggcagctccaacagagggcaataggtgaaaatccttaaagactcactattycctgaagctaacrtttccccttagaagtaagggtggatggcaaaggcacccaaggctcaacaagagctcatactgtgacagacagaactccttccagcatcacctggtggcggccaccacgaatcccacccatgccacgaccagaacacagccaaacccaccagcttttcygagggcagcagcccacgcagccagctctattttgaacgtttgctggtagcggtcgaagacaccatgccgagatgtgggctatacaattagctgcagcagtggctgtggcttcctgtcccaaccactgag

SEQ ID NO: 37377 - DNA, 600 bp, Chicken  19866894267179_4
aacaactgcaggactgcccacaccaagcagccaccagtatttgtaattcccattggtgggacccacccagaggaaattcagatgacatggctgaaaagccactctgctatttgtcatgtaygccagtgsctagtgcttactgctccttatcaaggtatcagagcaagctgtgcctggggtcacacatacagtgctgaataagagtgacatccagactgctatcaatacatggcatgggcagctccaacagagggcaataggtgaaaatccttaaagactcactattycctgaagctaacrtttccccttagaagtaagggtggatggcaaaggcacccaaggctcaacaagagctcatactgtgacagacagaactccttccagcatcacctggtggcggccaccacgaatcccacccatgccacgaccagaacacagccaaacccaccagcttttcygagggcagcagcccacgcagccagctctattttgaacgtttgctggtagcggtcgaagacaccatgccgagatgtgggctatacaattagctgcagcagtggctgtggcttcctgtcccaaccactgagccccacggcggag

SEQ ID NO: 37378 - DNA, 600 bp, Chicken  19866894267179_5
cagagcaagctgtgcctggggtcacacatacagtgctgaataagagtgacatccagactgctatcaatacatggcatgggcagctccaacagagggcaataggtgaaaatccttaaagactcactattycctgaagctaacrtttccccttagaagtaagggtggatggcaaaggcacccaaggctcaacaagagctcatactgtgacagacagaactccttccagcatcacctggtggcggccaccacgaatcccacccatgccacgaccagaacacagccaaacccaccagcttttcygagggcagcagcccacgcagccagctctattttgaacgtttgctggtagcggtcgaagacaccatgccgagatgtgggctatacaattagctgcagcagtggctgtggcttcctgtcccaaccactgagccccacggcggagagtccgacccagggcttgtggccagctaacgtgcactgccaccaccccaagcacagggttgcaggggtgtgcaaatgcagccagtccaacgctatttcggtagctgtctgttggctccctgcacatttggggtttgaggatgagttcaagccccacag

SEQ ID NO: 37379 - DNA, 600 bp, Chicken  19866894267180_1
aagacaaacagcagttaatctcttctgaaaaatcagttcttcagtgacttattttcgacagagaccagctgcttgtggccctaaaaatagatgctcttgccaaccaccagtatctctgtgctggctgtagtactgcagctgagcaggaaggcaagaccaagcacctgttgctatctgacacacacaggccatgcatctgcaaatgcttcatgggtgggttaatgttccctaattaccttccatgactgccttgctggaagagcctggggtgaaggaattcaatccttcttcctttcctgytgttgctcatgctttcacagggtggaagaaggaaagggaacagtgtgccaagagatgagcttgctgttgggtgaatataattacatccccttaatgctagatgaagggactcacctggaagtgaaagatgccagcatagttctgtatgaaggactggtcatgaggtatgactctgcaragcagttttttattcagtgtcaggcaagcaatggcagccaggaaccagcaatcrcctgtaagcaagcagaagcagcaggcaaaatgaggggagagagcagctagaattaaagtggaaagcta

SEQ ID NO: 37380 - DNA, 600 bp, Chicken  19866894267180_2
cacacacaggccatgcatctgcaaatgcttcatgggtgggttaatgttccctaattaccttccatgactgccttgctggaagagcctggggtgaaggaattcaatccttcttcctttcctgytgttgctcatgctttcacagggtggaagaaggaaagggaacagtgtgccaagagatgagcttgctgttgggtgaatataattacatccccttaatgctagatgaagggactcacctggaagtgaaagatgccagcatagttctgtatgaaggactggtcatgaggtatgactctgcaragcagttttttattcagtgtcaggcaagcaatggcagccaggaaccagcaatcrcctgtaagcaagcagaagcagcaggcaaaatgaggggagagagcagctagaattaaagtggaaagctaaggtactgccaggtgaaacactgattttcaatagagcgtgccacagcctttcagcaaagggctcttctcattgtgttctgtggtacttcagcacttcttagttattgatgctgtggaaacactcattggcagcactgtttaggcacacatctgtcacaggagaagcaataaaaccatg

SEQ ID NO: 37381 - DNA, 600 bp, Chicken  19866894267180_3
ttaccttccatgactgccttgctggaagagcctggggtgaaggaattcaatccttcttcctttcctgytgttgctcatgctttcacagggtggaagaaggaaagggaacagtgtgccaagagatgagcttgctgttgggtgaatataattacatccccttaatgctagatgaagggactcacctggaagtgaaagatgccagcatagttctgtatgaaggactggtcatgaggtatgactctgcaragcagttttttattcagtgtcaggcaagcaatggcagccaggaaccagcaatcrcctgtaagcaagcagaagcagcaggcaaaatgaggggagagagcagctagaattaaagtggaaagctaaggtactgccaggtgaaacactgattttcaatagagcgtgccacagcctttcagcaaagggctcttctcattgtgttctgtggtacttcagcacttcttagttattgatgctgtggaaacactcattggcagcactgtttaggcacacatctgtcacaggagaagcaataaaaccatggaaggcatggaaaagctaagtgggaaatgtctttacaaagcagtgcaggtgagt

SEQ ID NO: 37382 - DNA, 600 bp, Chicken  19866894267183_1
ttaagtatctatgctcagaatccagtccagggttcaggctcacaagcatacggtgtggctgaaaatgcataaaatcaaacatgcacatttagctaaagtatcagataaacatgaatgatcgaaaacatctatgaatccaactcccctgcaatgaacagggacatccacagatagatcaggtcgcccagagcctgatccagccttgcctggaaaacctccatggatagggcatccctgggcaacccgttccagtgcctcaccaccttccaatgttcctctactggagcgtttcatacttcrttctcaaatgttttgctccttatagggatgaagccagtcttctgggtttccttccactatgagaaacagcagcagaaaagaagttggatttgactgagataccagagaacccctgctgctcctgggaaagacccgcacttgcaacaactgacagcctcatcagcatccaccagaggagcaggctagggactggatgatctgaaaggtcttttccaatcttggtgattctatgactacagtttatatttgttcctgtaatctgaaaccttaagtttgtttttagtcagaagttgctcaagc

SEQ ID NO: 37383 - DNA, 600 bp, Chicken  19866894267190_1
tcacccaggaatgcatccagttgggttctgaatgtctccagagaagaagaccccacaacctctctaggcagcctgttccagtgttctgttacctttattatcactccttatttgttagagttggctgtcaaagatttatgaattatctaagacgatacattagttgttttacaaaggttaccaacattagttgtcagagaaaaagagcctgtgaactatcttcacctcagtgaatggaaataaaaaaagaactggtgttattagtaaaaggagaaaagtgtcattatatgaatttagatygtgagattacatcaacaaccatatcatttgcacccagaaactatacaacataatgcaggtctattttttgcacactcaaatctacatgtggctaatcacaaattagtctgtctgcacaaaataaaatcatctatgaccaatattaacacagatgaaactgagaaaatgatttgtagtgcaatgtgtrcatctctttgcgctgccctcagctctagctggttaggaartgacaacaagaaggaaaayaggaccakttcttattctcagcaaggctgaaagctcagcaagctctgcacacac

SEQ ID NO: 37384 - DNA, 600 bp, Chicken  19866894267190_2
tagttgtcagagaaaaagagcctgtgaactatcttcacctcagtgaatggaaataaaaaaagaactggtgttattagtaaaaggagaaaagtgtcattatatgaatttagatygtgagattacatcaacaaccatatcatttgcacccagaaactatacaacataatgcaggtctattttttgcacactcaaatctacatgtggctaatcacaaattagtctgtctgcacaaaataaaatcatctatgaccaatattaacacagatgaaactgagaaaatgatttgtagtgcaatgtgtrcatctctttgcgctgccctcagctctagctggttaggaartgacaacaagaaggaaaayaggaccakttcttattctcagcaaggctgaaagctcagcaagctctgcacacacagtaggaaatgattttgccaaaagacaaatcattcaatattttgcaaatattgttttgctccctgacagatggttattctgtttgatacattcccatggtttttagggaattacatagaaataaaggtgaagataaaaacagacagaacaataatgatgtgagatgtccaggggtattgataacgtc

SEQ ID NO: 37385 - DNA, 600 bp, Chicken  19866894267190_3
cagtgaatggaaataaaaaaagaactggtgttattagtaaaaggagaaaagtgtcattatatgaatttagatygtgagattacatcaacaaccatatcatttgcacccagaaactatacaacataatgcaggtctattttttgcacactcaaatctacatgtggctaatcacaaattagtctgtctgcacaaaataaaatcatctatgaccaatattaacacagatgaaactgagaaaatgatttgtagtgcaatgtgtrcatctctttgcgctgccctcagctctagctggttaggaartgacaacaagaaggaaaayaggaccakttcttattctcagcaaggctgaaagctcagcaagctctgcacacacagtaggaaatgattttgccaaaagacaaatcattcaatattttgcaaatattgttttgctccctgacagatggttattctgtttgatacattcccatggtttttagggaattacatagaaataaaggtgaagataaaaacagacagaacaataatgatgtgagatgtccaggggtattgataacgtcacacagtaactacayctgatggcactttacttagtggaag

SEQ ID NO: 37386 - DNA, 600 bp, Chicken  19866894267190_4
aagaactggtgttattagtaaaaggagaaaagtgtcattatatgaatttagatygtgagattacatcaacaaccatatcatttgcacccagaaactatacaacataatgcaggtctattttttgcacactcaaatctacatgtggctaatcacaaattagtctgtctgcacaaaataaaatcatctatgaccaatattaacacagatgaaactgagaaaatgatttgtagtgcaatgtgtrcatctctttgcgctgccctcagctctagctggttaggaartgacaacaagaaggaaaayaggaccakttcttattctcagcaaggctgaaagctcagcaagctctgcacacacagtaggaaatgattttgccaaaagacaaatcattcaatattttgcaaatattgttttgctccctgacagatggttattctgtttgatacattcccatggtttttagggaattacatagaaataaaggtgaagataaaaacagacagaacaataatgatgtgagatgtccaggggtattgataacgtcacacagtaactacayctgatggcactttacttagtggaagatgtgtacagatcagaagt

SEQ ID NO: 37387 - DNA, 600 bp, Chicken  19866894267190_5
gtgttattagtaaaaggagaaaagtgtcattatatgaatttagatygtgagattacatcaacaaccatatcatttgcacccagaaactatacaacataatgcaggtctattttttgcacactcaaatctacatgtggctaatcacaaattagtctgtctgcacaaaataaaatcatctatgaccaatattaacacagatgaaactgagaaaatgatttgtagtgcaatgtgtrcatctctttgcgctgccctcagctctagctggttaggaartgacaacaagaaggaaaayaggaccakttcttattctcagcaaggctgaaagctcagcaagctctgcacacacagtaggaaatgattttgccaaaagacaaatcattcaatattttgcaaatattgttttgctccctgacagatggttattctgtttgatacattcccatggtttttagggaattacatagaaataaaggtgaagataaaaacagacagaacaataatgatgtgagatgtccaggggtattgataacgtcacacagtaactacayctgatggcactttacttagtggaagatgtgtacagatcagaagtagaaagta

SEQ ID NO: 37388 - DNA, 566 bp, Chicken  19866894267190_6
ccctcagctctagctggttaggaartgacaacaagaaggaaaayaggaccakttcttattctcagcaaggctgaaagctcagcaagctctgcacacacagtaggaaatgattttgccaaaagacaaatcattcaatattttgcaaatattgttttgctccctgacagatggttattctgtttgatacattcccatggtttttagggaattacatagaaataaaggtgaagataaaaacagacagaacaataatgatgtgagatgtccaggggtattgataacgtcacacagtaactacayctgatggcactttacttagtggaagatgtgtacagatcagaagtagaaagtagggagatgtccataaaaaaggccaaaaacactgtaatggattatatatatctgaggggtgtggctcaacatatagctgcatcctctttaaaaacttcacctaaaggctaccagatgcacttcctagaggcagatacttcaggcagaggaacagacttcagtggttatagatgcctaatgcttcctatacatgcaacagcatcaatgtgggatat

SEQ ID NO: 37389 - DNA, 600 bp, Chicken  19866894267199_1
ggggcagaggggtggcagaccctcctgacaccgtgctgctcgataacctctgccttgcctgcatgtctgcatgcgcacccattccttccctgcccacatcacaaagaggaaagctgtgccgtgccgtggggagcgctgacagtcccaggagctgggagtggcggtgggcaggcggtgttggcagcatcccccagcctggcaggttcctggtgatgcaggggagcggctgacggggtctcgttgcaacgagaaggctaatttgtgccttgtccaatgacaacatgtgtaaacgccaggctygtgctgccaagattagatattctgatgtaataaatgcaaagctgcctgcagaccgtggggagagtgcgaggcagaagggaaggagcggagcagagccttcgccacaaatggggctcacgacagcaatccttgttcagccccgaggcaggagttgataagctgtgaccrgagggctcccgggccccgacgcaccctttgtgcacagcctgcccgagcgagaggcagctcctcttgttccaaattgtaaaaattttagttggtgagcatttgtgctcgaggaatattttagcgttgccatgc

SEQ ID NO: 37390 - DNA, 600 bp, Chicken  19866894267199_2
caggcggtgttggcagcatcccccagcctggcaggttcctggtgatgcaggggagcggctgacggggtctcgttgcaacgagaaggctaatttgtgccttgtccaatgacaacatgtgtaaacgccaggctygtgctgccaagattagatattctgatgtaataaatgcaaagctgcctgcagaccgtggggagagtgcgaggcagaagggaaggagcggagcagagccttcgccacaaatggggctcacgacagcaatccttgttcagccccgaggcaggagttgataagctgtgaccrgagggctcccgggccccgacgcaccctttgtgcacagcctgcccgagcgagaggcagctcctcttgttccaaattgtaaaaattttagttggtgagcatttgtgctcgaggaatattttagcgttgccatgccaacggcaggagaaggggctgtgtgctcaagctgtgaagcattggctatttttagcccaataagatccttcttgagaagccgaagctgtcaagtttgggttcactagaaacttttgcccgcatgctctcctccatttcaaagcttcggcgccgaattgctcacagggg

SEQ ID NO: 37391 - DNA, 599 bp, Chicken  19866894267201_1
  misc_feature (1)..(183): n is any nucleotide
nnnnnnnnnnnnnnnnnnnnnnnnnnnnnnnnnnnnnnnnnnnnnnnnnnnnnnnnnnnnnnnnnnnnnnnnnnnnnnnnnnnnnnnnnnnnnnnnnnnnnnnnnnnnnnnnnnnnnnnnnnnnnnnnnnnnnnnnnnnnnnnnnnnnnnnnnnnnnnnnnnnnnnnnnnnnnnnnnnnnnnntctgcttgtttggagctattatgactctcttcatttttgcatgccatgagaggcccaaatctcttggtttccactatgtgttgacaacagaatcctctgagccctgacatacccttygttaytgtgatctgttctcagcagacttaggctaccgttaagctttcacacagcagaaacgaagttggtaagaactcccttgcactctattcccaaaatctcagctgcttcttcagataatttcaggtctcttatttatttagaattcattagatttgcattttgcaaaatcgttcaacacgtgcagttccaaggtctgggacatcaacttcaagaacttccagcaaattagccacaaatgtcccaggcgccacccaaatagatcagtgtaacagacagaagggttgtggcagttcacc

SEQ ID NO: 37392 - DNA, 599 bp, Chicken  19866894267201_2
  misc_feature (1)..(178): n is any nucleotide
nnnnnnnnnnnnnnnnnnnnnnnnnnnnnnnnnnnnnnnnnnnnnnnnnnnnnnnnnnnnnnnnnnnnnnnnnnnnnnnnnnnnnnnnnnnnnnnnnnnnnnnnnnnnnnnnnnnnnnnnnnnnnnnnnnnnnnnnnnnnnnnnnnnnnnnnnnnnnnnnnnnnnnnnnnnnnnnnnntctgcttgtttggagctattatgactctcttcatttttgcatgccatgagaggcccaaatctcttggtttccactatgtgttgacaacagaatcctctgagccctgacatacccttygttaytgtgatctgttctcagcagacttaggctaccgttaagctttcacacagcagaaacgaagttggtaagaactcccttgcactctattcccaaaatctcagctgcttcttcagataatttcaggtctcttatttatttagaattcattagatttgcattttgcaaaatcgttcaacacgtgcagttccaaggtctgggacatcaacttcaagaacttccagcaaattagccacaaatgtcccaggcgccacccaaatagatcagtgtaacagacagaagggttgtggcagttcaccagttt

SEQ ID NO: 37393 - DNA, 600 bp, Chicken  19866894267202_1
ccatgatgatcccatccaccatcttctccagtcccactgacatttactgtgaactctcccacccactttctgcaacagggaaagacagagctcacatgaactgcattctggacacaaagtttgtactcagacccacagattcagaagccaccagagaacagaaatatagccaaagaggagcccgcaaggcaggcctaatcactctcactgatcaagtaaaaatcctgctgaaaagcacagcaggccatcctgcaatacattgtaatacacagagggaccaaattaagattgtaaatcacwgcaatcctgaatcattagggtatttcaaccataatatccccaaggcttcatagggtttaggagcgtaattcagaatcaggcagaaaaatctgtgggtgttagagccagaagacatctaccaggcttgggaaacaaggccaatgctgattggcagccagagaaaacacatagcagcttactgaagggacaggggatcccagctgtcatcagtgtcacacagggacagctatgtgctttgaatgcgagttattcctgcatgcagagcaggcccagcaaggaaatgcagctctctccagtgta

SEQ ID NO: 37394 - DNA, 600 bp, Chicken  19866894267216_1
gaactttgagctctttcttagatgaccaggtccttgtagagtgcacagcaagacttagatgcattgaggtgggattcaagatgagaaaagtgatgactgggtgcctattcagttagccattcagatgtgctgaggataacagtggggtttatgcatcttgtcactgtgtttaccttcacttgttaggaatcataatttcacatgcctccttcctaacacatttaaacttgatttctttcctacgttgtgaaatggcttataaaagatgtggtaggaatgaccctctcctgttcttaagcrgtctctatcttggccagtagggtttcttgaaaagtgataaatgtaaggcttcagcccatcgaacagaaacactccgcttcttggagagcgttgattactgaattgagaatgaaccatctcttggactgcatttgccccccagaaaagtcatgattacattttaattgtatagcatattgctatacagtctgcatactctaaatctgccaatagacttgagtgcctctgaaaatctcaagcgccctgtttctggaacaggagcaagcaggccttgctgagcacagaggtgccttagctgtg

SEQ ID NO: 37395 - DNA, 600 bp, Chicken  19866894267227_1
taccattttacagcattcaagaagtgccttttatgtcgtaacagtgaatggagaactgtcagtactgaattacgctacagtttttggttttaacactaaccaatctaaaaaaatgtaaacaagttctcagatcactactgacagcttcttttagtgagttaagtggatacagaagtgggtactaagtctggaagcattattgttatttatcgtccatacctaaaatggatctagatgggcttcaccctgagccacagagatttaattaaaaagttgccatcaacttgattcctgccttayaagagcactcccaattgatccagatgaaacttcaagtttcacagaaaaccatcatccaccttaaacaatcacaggaagaaaaaggaataaaagaattagggagaaaaatgtgcgcctacatacactaatgctctcaaggtacttctttgtcttcctgaccttatccctctccgactgttagaaagttgaaaaagcactggcatgcattccataaactttccccatattttatcagcacgactgtaaccaggaaaacaagcaaatttgctatattggcacatttttacactttcatgtgtg

SEQ ID NO: 37396 - DNA, 600 bp, Chicken  19866894267229_1
ccagggggtcgtttttatagtgttgttcttatcttgtaaagaatcctactgtaatggcaattattaacatcagaatgcattaggaaaataatgaaagtaactgtacttcttgagagtcgtcttggtggcttagcagcagtgatgctgagggtaaaaagagtgctgtatcttacaaccaaaaacatgttttggaagggctttacaacacctgaggagaccgtaaacagcccaggctgcaactggcaggcagctgctgctgtgtgtgtgtgtgtgtgtgtgtgtgcagccacggagcctgcrtttcccgttcttatggaggtgaaatgagccaaaggcatgttaagttccacgggagcttgggtgggcagggtgctctgagagcagccatcaccatggtggtgttggctgtgttcttggagctcttggcagctctgggtgctcgagggctccagtgatgaaggtgaagcccaaactggtttgattccygtttgagcagagaagctgcccttttctgtactggatagctgctcattgtaggatgttgttgaaaaacagcaactagggttttttttttttttttaatcttaatttatagagcat

SEQ ID NO: 37397 - DNA, 600 bp, Chicken  19866894267229_2
ttttggaagggctttacaacacctgaggagaccgtaaacagcccaggctgcaactggcaggcagctgctgctgtgtgtgtgtgtgtgtgtgtgtgtgcagccacggagcctgcrtttcccgttcttatggaggtgaaatgagccaaaggcatgttaagttccacgggagcttgggtgggcagggtgctctgagagcagccatcaccatggtggtgttggctgtgttcttggagctcttggcagctctgggtgctcgagggctccagtgatgaaggtgaagcccaaactggtttgattccygtttgagcagagaagctgcccttttctgtactggatagctgctcattgtaggatgttgttgaaaaacagcaactagggttttttttttttttttaatcttaatttatagagcatctcttagatgtagtttcctagaggagtactttttagttgaaagcaaaaccagtacagctcaagtgtttccatttatagcgtatctaattctagggaagcctgatatagctgaattgaaaactgaagactagacataaccatcttttttttcccacttgagtgctacttcgagttattcctgatgag

SEQ ID NO: 37398 - DNA, 600 bp, Chicken  19866894267238_1
aatgggtgaagctggcttaaggctgaagcttagaaaagccacaccactttctgctttttccacccctttatttggcaataggtaataacagtgggctggggaaacctagtacaacagcagctgcaaccatctgcagcagcgtgcagcgtgagccaactgtgagatgctgtatgccaggcctgaaccaacctcaagagctcttccctgctggttactaatagcctagacactgtgcacaaagttggcctgtttaattctggctggcttctgtgctttgcattttcttgtatctcatgcttytgttttcctttagctttgaataagctttgactttattcattcctgagcatctgtatccatattgacttaagtagctaccagatcatgatggatggaggtctacctccacatcaccactttctgatcatagacagggcaactgcaataatctccttggaaattgctaacaagggactaggataaacaaatgctgttactattgccaatggtagtaaaaaaagacaaccttaaagattggcttcaagtggaagtggcagcctgagcatactccaaacaattggctccccacaaccaccacac

SEQ ID NO: 37399 - DNA, 600 bp, Chicken  19866894267240_1
aaatctgtgggatgatttcaaagaagcagtgttgtcttacttcatccaaaagatagtgagctttatctgaaatgtctaacctcacagaagcaggaaagtagaagagttctttatttgaatgatttgaggcttgcatatctttaagccttcttaacacagttcaatttgcaacaaaaatgaacatccttagattgagcctattctgcagcatctaaattataaaagcaagtaaaaattaggaaaccaaattagcattaaacccggaaaataaataaatatatttacctttttatttttccmtgtgcatttcattgactttgaaagctgatcctttttcttggcttcattctgacacttcattacccagtgggtcatcacctttcactccactgagtagcggttatttttcatgccagcacagacagaagattgagatctgatttgtattgcaggtaataaatggtaattatctgcacctttttactgatgtgaatctctgtctcygaactgggaaactaagtctttgtagctttgatgacagcagattagagacaataaccagtccttctctgctatacttactggggcaaagacttagag

SEQ ID NO: 37400 - DNA, 600 bp, Chicken  19866894267240_2
gcagcatctaaattataaaagcaagtaaaaattaggaaaccaaattagcattaaacccggaaaataaataaatatatttacctttttatttttccmtgtgcatttcattgactttgaaagctgatcctttttcttggcttcattctgacacttcattacccagtgggtcatcacctttcactccactgagtagcggttatttttcatgccagcacagacagaagattgagatctgatttgtattgcaggtaataaatggtaattatctgcacctttttactgatgtgaatctctgtctcygaactgggaaactaagtctttgtagctttgatgacagcagattagagacaataaccagtccttctctgctatacttactggggcaaagacttagaggtcaagtattcagttctgtgtaattactgccagtttaatgatgaagacgaaagaagatagtgtatacttaatcaggcaaagaagcatatgaagctttttcattaaagatttaatggaacaatagacacagaactggaaaaaaggacaatgggcaaaacatattccttctgtcaccacttaggctttactttgaatgataagcat

SEQ ID NO: 37401 - DNA, 599 bp, Chicken  19866894267249_1
  misc_feature (1)..(62): n is any nucleotide
nnnnnnnnnnnnnnnnnnnnnnnnnnnnnnnnnnnnnnnnnnnnnnnnnnnnnnnnnnnnnnctgcttcaacttgagtccactttatctttgtgtcccgccttcagctgagacagttgtgctgttagtcagctgttggtcagctggtagcatgtaattgcattgcagagatatatatatatatatatatatagttatcattacacttttctttttacctgctctatcttagtaaatagtttttatctcagttcacaagttctattttgcttcccgttctctctctcaccccactgggaargagtgaacgaacggctgygtggtgctgctaggttaaatcacaacatgctaacatcgcaggagatctttagtagcaatggatatgttagccatgagtaacctgtagacttaaattcacttccaaacagtaaatcaaagcatcaaagggtgcttctgaaatttataatctccaatgcacgtgcgtaagaaaacttggagtatgtcccaagttactgaatttgcaatgctgtatttcatagttggctataaactcaggataagcaaagttagaagctgaactactgcagtgcaggagtttct

SEQ ID NO: 37402 - DNA, 599 bp, Chicken  19866894267249_2
  misc_feature (1)..(44): n is any nucleotide
nnnnnnnnnnnnnnnnnnnnnnnnnnnnnnnnnnnnnnnnnnnnctgcttcaacttgagtccactttatctttgtgtcccgccttcagctgagacagttgtgctgttagtcagctgttggtcagctggtagcatgtaattgcattgcagagatatatatatatatatatatatagttatcattacacttttctttttacctgctctatcttagtaaatagtttttatctcagttcacaagttctattttgcttcccgttctctctctcaccccactgggaargagtgaacgaacggctgygtggtgctgctaggttaaatcacaacatgctaacatcgcaggagatctttagtagcaatggatatgttagccatgagtaacctgtagacttaaattcacttccaaacagtaaatcaaagcatcaaagggtgcttctgaaatttataatctccaatgcacgtgcgtaagaaaacttggagtatgtcccaagttactgaatttgcaatgctgtatttcatagttggctataaactcaggataagcaaagttagaagctgaactactgcagtgcaggagtttctgccatggatttggaagaa

SEQ ID NO: 37403 - DNA, 600 bp, Chicken  19866894267260_1
agatgtcctctgtgtttatatacacacccgtacagggctgctcagtgactgctgtatcctccgtgttgtctcccttccccaagcccagcactgcaggtgctctgtagcaaacacgttttgcattcctattaatagctacttttcttacacagtgtcttcacctgaggaaaccctgcagcactgcaacagtgtgtgcatgcagaggctgctgctgctttgggatcccaggggtttgcatgggctggtgcaaagcaagcagcaatgcacagggtgcccaatgccagagctgctgtgtatgcycacaccctgcaggacagcacgttgtcttgcagatcactgctctcctgcaggtttgttggggatttaaatcctcatcttgatgcatcagatttgcttttccatgctcgtcctcatcttgctgcctttataaacactgtgcttcctgtgggagtgctttgtgtaaatgcgagctgttgattaaatgatgcttacgtgcaattaatttgtaggtgaactggtggatattttcctcttctttgtctgtttttctcccagttcataggactgtggaatcatgaaggctggaaaagacctctgaga

SEQ ID NO: 37404 - DNA, 600 bp, Chicken  19866894267275_1
aaaagaagcatcaagtggatcactgaggagagcctcctgctctttccagtggtttggcttgctctttgtctctctggggtttctgaaccatagcatcttcttacaaattgagaggaatctattctcatcaagggaggatgaggaccagaggggaagggttagttgtttacagatgtggagtcttctgctagacagcttctgttgtaagtcagccctcctaaaattccccacacacatatattttgtttcagacctacctactcatctgaaatgcagagttgaagagaaataactcatccyttctctctrtgcccatctgcagcccccttaaaaagtgagggtgactcccctcttagcattcattttgatgcttttgtctttttgctttaagtggcatcagcagagcatttctaagctactataccaaatctgatttaccaaaagcaaacaaacaaacaaaaatccctaaaaccaaaacaagaaaaagcaccaaaaaattatgtgaatcccaaagactgttctctttaaaagacagaggggtgaattgggagctattcttagaatgatgtctttgaagaagaaattcagtaaaagagggct

SEQ ID NO: 37405 - DNA, 600 bp, Chicken  19866894267275_2
atcaagtggatcactgaggagagcctcctgctctttccagtggtttggcttgctctttgtctctctggggtttctgaaccatagcatcttcttacaaattgagaggaatctattctcatcaagggaggatgaggaccagaggggaagggttagttgtttacagatgtggagtcttctgctagacagcttctgttgtaagtcagccctcctaaaattccccacacacatatattttgtttcagacctacctactcatctgaaatgcagagttgaagagaaataactcatccyttctctctrtgcccatctgcagcccccttaaaaagtgagggtgactcccctcttagcattcattttgatgcttttgtctttttgctttaagtggcatcagcagagcatttctaagctactataccaaatctgatttaccaaaagcaaacaaacaaacaaaaatccctaaaaccaaaacaagaaaaagcaccaaaaaattatgtgaatcccaaagactgttctctttaaaagacagaggggtgaattgggagctattcttagaatgatgtctttgaagaagaaattcagtaaaagagggctgtccatctt

SEQ ID NO: 37406 - DNA, 599 bp, Chicken  19866894267281_1
  misc_feature (1)..(153): n is any nucleotide
nnnnnnnnnnnnnnnnnnnnnnnnnnnnnnnnnnnnnnnnnnnnnnnnnnnnnnnnnnnnnnnnnnnnnnnnnnnnnnnnnnnnnnnnnnnnnnnnnnnnnnnnnnnnnnnnnnnnnnnnnnnnnnnnnnnnnnnnnnnnnnnnnnnnnnnnnttgctgaaaagtagatctgctgttccaaaaccttacttagtccttcttcactgtggtattacatgtctgtaaacatatattaatgctgcatggcatcatacagatgtgctcttttttgtggggggcttttttattattagaaaaaawatataaataatwcaatatatttgtgccaatacaatacatttgtgctaaacagacttygtggaatattctgataaataaaacaattcatttcttcattattcatttctgtaaggattgagtcattattctgtagtgtgggtgcagaatattttaaacaaatagcataagcaattatttccaatggcagatgatgggtatttcaggtgtcacactttcaccccataagtagaatgctgagaagcaagagtttggacttttggaggaagagctgtgctattatttgggacacaaataaagaa

SEQ ID NO: 37407 - DNA, 599 bp, Chicken  19866894267281_2
  misc_feature (1)..(141): n is any nucleotide
nnnnnnnnnnnnnnnnnnnnnnnnnnnnnnnnnnnnnnnnnnnnnnnnnnnnnnnnnnnnnnnnnnnnnnnnnnnnnnnnnnnnnnnnnnnnnnnnnnnnnnnnnnnnnnnnnnnnnnnnnnnnnnnnnnnnnnnnnnnnnttgctgaaaagtagatctgctgttccaaaaccttacttagtccttcttcactgtggtattacatgtctgtaaacatatattaatgctgcatggcatcatacagatgtgctcttttttgtggggggcttttttattattagaaaaaawatataaataatwcaatatatttgtgccaatacaatacatttgtgctaaacagacttygtggaatattctgataaataaaacaattcatttcttcattattcatttctgtaaggattgagtcattattctgtagtgtgggtgcagaatattttaaacaaatagcataagcaattatttccaatggcagatgatgggtatttcaggtgtcacactttcaccccataagtagaatgctgagaagcaagagtttggacttttggaggaagagctgtgctattatttgggacacaaataaagaagtgatgataaaa

SEQ ID NO: 37408 - DNA, 599 bp, Chicken  19866894267281_3
  misc_feature (1)..(96): n is any nucleotide
nnnnnnnnnnnnnnnnnnnnnnnnnnnnnnnnnnnnnnnnnnnnnnnnnnnnnnnnnnnnnnnnnnnnnnnnnnnnnnnnnnnnnnnnnnnnnnnnttgctgaaaagtagatctgctgttccaaaaccttacttagtccttcttcactgtggtattacatgtctgtaaacatatattaatgctgcatggcatcatacagatgtgctcttttttgtggggggcttttttattattagaaaaaawatataaataatwcaatatatttgtgccaatacaatacatttgtgctaaacagacttygtggaatattctgataaataaaacaattcatttcttcattattcatttctgtaaggattgagtcattattctgtagtgtgggtgcagaatattttaaacaaatagcataagcaattatttccaatggcagatgatgggtatttcaggtgtcacactttcaccccataagtagaatgctgagaagcaagagtttggacttttggaggaagagctgtgctattatttgggacacaaataaagaagtgatgataaaagggtagaagacactttctgatgtgtttgtctgaatgccagattgg

SEQ ID NO: 37409 - DNA, 599 bp, Chicken  19866894267292_1
  misc_feature (1)..(2): n is any nucleotide
nngcacttgggtgaaccctcaagaaaatgcaggatgaaggttttgctctacgctcctacaaggataggggaagcagccctgactttaaagccttctgtaacaaaactaacagctatgactggcactgacaccttggtttgcagctgagaaggcagactgtgagagctcctctttctgtggccccactcagacccttcaaacacactcacccccataagcaccctttttccactctcacatatctatccatgggtcccagcagctcctcaaccagaagtccagggcagcccagcggagcayacacacccttcactctttaatctgagcttattacaaaggaaaccaaaactttctgattccctatcactgtttcagcaaacaaccaggaagttccagccacaacatcaactaaaacacagcgcccatgcaggagaactgctagacaagagcacctcctggaggagattccctttgggcacacagctgggcttccttcactgcacagtaagggagctgcagaactcagaacttgggaggagtcatcayttatctattgctgtgtgtcacagcttactcatacaagctgttcatctgtttta

SEQ ID NO: 37410 - DNA, 600 bp, Chicken  19866894267292_2
ccatgggtcccagcagctcctcaaccagaagtccagggcagcccagcggagcayacacacccttcactctttaatctgagcttattacaaaggaaaccaaaactttctgattccctatcactgtttcagcaaacaaccaggaagttccagccacaacatcaactaaaacacagcgcccatgcaggagaactgctagacaagagcacctcctggaggagattccctttgggcacacagctgggcttccttcactgcacagtaagggagctgcagaactcagaacttgggaggagtcatcayttatctattgctgtgtgtcacagcttactcatacaagctgttcatctgttttaacagcactgtacaagcatgactcctgcttactataaaagctagcaaaaccactgagcaggtatgaattaaagacagtagagagattaagcaaagtgaagttaaattaagacattttactccttgtttttccttttttcttccctttttctactgaacaatgagaaacaagccagatattgtgatatttcaaccttacccaaagacagccttcgagcttcaggcttaccaaagtggcactcagaacta

SEQ ID NO: 37411 - DNA, 600 bp, Chicken  19866894267292_3
aaatgtatactcagctaccagagcctatgaaaacagtgtgaaaaaacagatttaaaagaaaatatcacaaaaacaaagtgcttactgataaaattaaattacttttattttaaggatactgttacaaagagctctcactttgttacacgcttaaatgccttattaaggaaatccttcactccacagaaagttcacaccactgacagcctccaaacaaatcccatctgcagaggtgcacaggacacagcgtgaccaaaataccaaccagacacactctgcagtgatccaacttactcactyatggccggtaaagcaggttgtgtgtttcccttaagccttctatctagaaaacatgacaagaaacagaacaaactgcaccacatgagtcagtagaaatggatttgccttccctttccttgaaaagctctgtgggcaaaaataaataaataaaggcacgttctcccttcttccaggaaacattcttggtaagaaatcacatatatagtagcttggatttcaagagcactttctaggaacagcaacctcagaacccacaagataggtcagaactgtcaccacatttttgcagatgcaaagagg

SEQ ID NO: 37412 - DNA, 432 bp, Chicken  19866894267295_1
atgtaagggtagagtgcagccctgccaaaaaggacctggggtagtggtggatgggaagctggacacgagccaacaatgtgccctcacagctcagaaagccaactgtatcctgggctgcatcaaagacagcttggccagcagggcaagagaggtgatcctgcccctctgctctgcactggtgaggcctcaccagtactgcgtccagatgtggagtcctcagcagaggagagatgtgaacccactggagtgagtccagaagagggccacaaaagtgatctgagtgatggagtgcttctcctrtgaggacaggctgagagagctgaggctgttcagcatgaaaaacagaaggctctgagaagacctgagagcggcctttcagcatctaaagggggctgtaaaaaagaaggggacagactccttagcagagtctgt

SEQ ID NO: 37413 - DNA, 599 bp, Chicken  19866894267301_1
  misc_feature (1)..(51): n is any nucleotide
nnnnnnnnnnnnnnnnnnnnnnnnnnnnnnnnnnnnnnnnnnnnnnnnnnncaggatttactacaaagctgtcaagtagaatccgtaacccagagaaggtttttttgaacaagaaataaaatttcaagcagtgccttggctgacaacaagactgctatctccctgcacatgcacctcccacttgctgtgaaggcacatccctccggcaaaccctgccaggggacttccactaactgtgccaggtggatgaggtgctcccggtgggactattggtggcatcccagagattgtcttatacayaccagtgacgccagaaaacagccrtgggaacagytggtggaacctgaagcaaaagctctttctctgctcccgcactggagctttccagctgctacatctcaagggagaactcgctcacgcacatgggccagcctgcaaagggaggtctcgggggtgagcggctgcaggtgcaaggtcattgctcctgtgagtgataggaagcacagatcctctgccatgcctgcgattctcaaggttagcccctctcacacgttcacttctttgctttcatgcaaacgtgccctcgcagcccagaaagc

SEQ ID NO: 37414 - DNA, 599 bp, Chicken  19866894267301_2
  misc_feature (1)..(27): n is any nucleotide
nnnnnnnnnnnnnnnnnnnnnnnnnnncaggatttactacaaagctgtcaagtagaatccgtaacccagagaaggtttttttgaacaagaaataaaatttcaagcagtgccttggctgacaacaagactgctatctccctgcacatgcacctcccacttgctgtgaaggcacatccctccggcaaaccctgccaggggacttccactaactgtgccaggtggatgaggtgctcccggtgggactattggtggcatcccagagattgtcttatacayaccagtgacgccagaaaacagccrtgggaacagytggtggaacctgaagcaaaagctctttctctgctcccgcactggagctttccagctgctacatctcaagggagaactcgctcacgcacatgggccagcctgcaaagggaggtctcgggggtgagcggctgcaggtgcaaggtcattgctcctgtgagtgataggaagcacagatcctctgccatgcctgcgattctcaaggttagcccctctcacacgttcacttctttgctttcatgcaaacgtgccctcgcagcccagaaagccaactgtaccctgggctacaccaa

SEQ ID NO: 37415 - DNA, 599 bp, Chicken  19866894267301_3
  misc_feature (1)..(17): n is any nucleotide
nnnnnnnnnnnnnnnnncaggatttactacaaagctgtcaagtagaatccgtaacccagagaaggtttttttgaacaagaaataaaatttcaagcagtgccttggctgacaacaagactgctatctccctgcacatgcacctcccacttgctgtgaaggcacatccctccggcaaaccctgccaggggacttccactaactgtgccaggtggatgaggtgctcccggtgggactattggtggcatcccagagattgtcttatacayaccagtgacgccagaaaacagccrtgggaacagytggtggaacctgaagcaaaagctctttctctgctcccgcactggagctttccagctgctacatctcaagggagaactcgctcacgcacatgggccagcctgcaaagggaggtctcgggggtgagcggctgcaggtgcaaggtcattgctcctgtgagtgataggaagcacagatcctctgccatgcctgcgattctcaaggttagcccctctcacacgttcacttctttgctttcatgcaaacgtgccctcgcagcccagaaagccaactgtaccctgggctacaccaaaagaagcacg

SEQ ID NO: 37416 - DNA, 600 bp, Chicken  19866894267302_1
tgcggcccattttccagcactaactgcctttcaagaccattcattcctaggtgttaagccttatttgtctatttattttgtcccaagggaatcgatacggcaaagcattcaggactgctgctggggaaggagtgtccctattgctccctcattgctggcagcccgtgggacctctgtcatttggctgctgttcccacaagcgagccatctttccaaacgcagggagttctctttggataaaggccgagggatggtcacaggggagctgggactgcctgtcccccagatgtgctcctccargcccctccagactgccccgaagtcatcgcaccgccgctctgtcagagctctgagtcagcccagcacccggcgggacggagccttcagcagcgccggctttccagtgcggatgcagaaatgcaccaaaagcaaaacaggggacatcatcacttctttcttctaaacccacttaagggccttacactgaaaagtgcgtaactggagaaaagagacatgcaaatactgagtgcccttacagtgcgagcagctcatagaaacacagctaccgctcctcttagagaaaggagccagtgctggcaa

SEQ ID NO: 37417 - DNA, 600 bp, Chicken  19866894267302_2
caaaacaggggacatcatcacttctttcttctaaacccacttaagggccttacactgaaaagtgcgtaactggagaaaagagacatgcaaatactgagtgcccttacagtgcgagcagctcatagaaacacagctaccgctcctcttagagaaaggagccagtgctggcaatcagcagattccctcctcgcctatgtttgttgatagaggagcagacctgctctctcatttgctctatcaccaccctgacattccctgagtcactgcatgttatcttgcctgtcagtgccatatactttycactccagacactctctctggagcatttgttactcagagacataattactcagtgcttccttaatcagcccaaatgcaaggcatcggccacggaagacatctaagagctcagcttcttggagaccccraagcgtgaagacagacaacatcttctcccagcaaaacttaaggggaaatcagtccagatttatgtgcccaccccccatggctcccagctctgcagcagcagcccaggccctggcacggtgtgacccagtgctgcgggtgcagggaggggtgctgggaatcaccgcagccaca

SEQ ID NO: 37418 - DNA, 600 bp, Chicken  19866894267302_3
cacagctaccgctcctcttagagaaaggagccagtgctggcaatcagcagattccctcctcgcctatgtttgttgatagaggagcagacctgctctctcatttgctctatcaccaccctgacattccctgagtcactgcatgttatcttgcctgtcagtgccatatactttycactccagacactctctctggagcatttgttactcagagacataattactcagtgcttccttaatcagcccaaatgcaaggcatcggccacggaagacatctaagagctcagcttcttggagaccccraagcgtgaagacagacaacatcttctcccagcaaaacttaaggggaaatcagtccagatttatgtgcccaccccccatggctcccagctctgcagcagcagcccaggccctggcacggtgtgacccagtgctgcgggtgcagggaggggtgctgggaatcaccgcagccacagcgctgcctgagtccttccctgcacattacagatgtaacacggcgctgctttgaagagaaatttccttgatatcgttagataggttgctctttaatcaaagtactgcagttaagtgagttattaagct

SEQ ID NO: 37419 - DNA, 600 bp, Chicken  19866894267302_4
aacacccacctggcggcagtcccacgggggggagcaaatatccccacactccatcactgtgtctgcaagctgcaggaaaacggtcttctcagcctcacctgtgcagtcaatgcaggacaaatctgtctgttctggagacaaagacgaggaagttgttggggcagttgctctttcagccatgagaagtgaaatgtgggctgaaatctgcatcacacggagcccatcaggtggagactcctcactgagctcacagtttaagcacactcctccccattgactcctcagaggagtaggaagagrtggaggagtgcttatytgagggagggtcataagcttccaattcacagctctgagttttgtgagtaatagtaaactctgtatttgattgcagcatcatttctgtgtgtttctcctgtctatatccagcagcatcctygggatcgagccccggtcctagctatagcagtatcaatgcacagtacttctcctccacacccagagggtttgatgtgtgccctgcaagggctttcagtgcatgcagggcagggagggggagatgtcagccccatccaygtgatgttactgcagatcatggtcgcc

SEQ ID NO: 37420 - DNA, 600 bp, Chicken  19866894267302_5
cagtcccacgggggggagcaaatatccccacactccatcactgtgtctgcaagctgcaggaaaacggtcttctcagcctcacctgtgcagtcaatgcaggacaaatctgtctgttctggagacaaagacgaggaagttgttggggcagttgctctttcagccatgagaagtgaaatgtgggctgaaatctgcatcacacggagcccatcaggtggagactcctcactgagctcacagtttaagcacactcctccccattgactcctcagaggagtaggaagagrtggaggagtgcttatytgagggagggtcataagcttccaattcacagctctgagttttgtgagtaatagtaaactctgtatttgattgcagcatcatttctgtgtgtttctcctgtctatatccagcagcatcctygggatcgagccccggtcctagctatagcagtatcaatgcacagtacttctcctccacacccagagggtttgatgtgtgccctgcaagggctttcagtgcatgcagggcagggagggggagatgtcagccccatccaygtgatgttactgcagatcatggtcgccacggtcagacctcagc

SEQ ID NO: 37421 - DNA, 600 bp, Chicken  19866894267302_6
gacaaagacgaggaagttgttggggcagttgctctttcagccatgagaagtgaaatgtgggctgaaatctgcatcacacggagcccatcaggtggagactcctcactgagctcacagtttaagcacactcctccccattgactcctcagaggagtaggaagagrtggaggagtgcttatytgagggagggtcataagcttccaattcacagctctgagttttgtgagtaatagtaaactctgtatttgattgcagcatcatttctgtgtgtttctcctgtctatatccagcagcatcctygggatcgagccccggtcctagctatagcagtatcaatgcacagtacttctcctccacacccagagggtttgatgtgtgccctgcaagggctttcagtgcatgcagggcagggagggggagatgtcagccccatccaygtgatgttactgcagatcatggtcgccacggtcagacctcagctcctgggtgagtaagcatcctcacagaggtgagcactgctccagttactgcaacagggaacaaatgggctactcaaaataacagcaaacccccaggagtgccattagagcaaatgcaagc

SEQ ID NO: 37422 - DNA, 600 bp, Chicken  19866894267302_7
ttgactcctcagaggagtaggaagagrtggaggagtgcttatytgagggagggtcataagcttccaattcacagctctgagttttgtgagtaatagtaaactctgtatttgattgcagcatcatttctgtgtgtttctcctgtctatatccagcagcatcctygggatcgagccccggtcctagctatagcagtatcaatgcacagtacttctcctccacacccagagggtttgatgtgtgccctgcaagggctttcagtgcatgcagggcagggagggggagatgtcagccccatccaygtgatgttactgcagatcatggtcgccacggtcagacctcagctcctgggtgagtaagcatcctcacagaggtgagcactgctccagttactgcaacagggaacaaatgggctactcaaaataacagcaaacccccaggagtgccattagagcaaatgcaagccctctcttaaaggaacaaatgaaggcttggatgaggctttgagaaacctcatttagtgagagatgtctcagcacgcagcagcacttggactggatgacctttaaggtcccctccaacccaaaccattcaatgggttt

SEQ ID NO: 37423 - DNA, 599 bp, Chicken  19866894267303_1
  misc_feature (1)..(239): n is any nucleotide
nnnnnnnnnnnnnnnnnnnnnnnnnnnnnnnnnnnnnnnnnnnnnnnnnnnnnnnnnnnnnnnnnnnnnnnnnnnnnnnnnnnnnnnnnnnnnnnnnnnnnnnnnnnnnnnnnnnnnnnnnnnnnnnnnnnnnnnnnnnnnnnnnnnnnnnnnnnnnnnnnnnnnnnnnnnnnnnnnnnnnnnnnnnnnnnnnnnnnnnnnnnnnnnnnnnnnnnnnnnnnnnnnnnnnnnnnnnnnnntaaggcatcgtatgtggcatactgtgtctttgccttcactttcattatactacttagactragtagatgcaagtatattatcaggagggagttgtctgtgttgtatgtgctggagctttataagaaggccatattgatagtagcacagtgtggtttgtatttacgcttatctgactacagtgtaattgaattcaaaattccaatacaaaaagctaagaaaaaatgcccaaatkattaagaggggaaaggattggagatatgaagggatacaacactatgttgacttatttcataaagttagaatttacaaagtcagacctgttgaaaataccttycaggatgctatggttcagtatgaac

SEQ ID NO: 37424 - DNA, 599 bp, Chicken  19866894267303_2
  misc_feature (1)..(67): n is any nucleotide
nnnnnnnnnnnnnnnnnnnnnnnnnnnnnnnnnnnnnnnnnnnnnnnnnnnnnnnnnnnnnnnnnnntaaggcatcgtatgtggcatactgtgtctttgccttcactttcattatactacttagactragtagatgcaagtatattatcaggagggagttgtctgtgttgtatgtgctggagctttataagaaggccatattgatagtagcacagtgtggtttgtatttacgcttatctgactacagtgtaattgaattcaaaattccaatacaaaaagctaagaaaaaatgcccaaatkattaagaggggaaaggattggagatatgaagggatacaacactatgttgacttatttcataaagttagaatttacaaagtcagacctgttgaaaataccttycaggatgctatggttcagtatgaacatcctgtacccagcagcctggtgacagaacagccagttccaacaatgaggccttttgcttagcagtactctgaagtgaaaagctaatttctcagctcaattataaaatcagtggagcagtgctccatttctccacattacacatcattttgacaaatagaatttggtgaaaa

SEQ ID NO: 37425 - DNA, 600 bp, Chicken  19866894267303_3
tcactttcattatactacttagactragtagatgcaagtatattatcaggagggagttgtctgtgttgtatgtgctggagctttataagaaggccatattgatagtagcacagtgtggtttgtatttacgcttatctgactacagtgtaattgaattcaaaattccaatacaaaaagctaagaaaaaatgcccaaatkattaagaggggaaaggattggagatatgaagggatacaacactatgttgacttatttcataaagttagaatttacaaagtcagacctgttgaaaataccttycaggatgctatggttcagtatgaacatcctgtacccagcagcctggtgacagaacagccagttccaacaatgaggccttttgcttagcagtactctgaagtgaaaagctaatttctcagctcaattataaaatcagtggagcagtgctccatttctccacattacacatcattttgacaaatagaatttggtgaaaatcttttatgtttgrggaaaataagtgttccaacttgcagaacaattctattctagataaaaaaaatggtattaaaattagttcctcacttcttgctactttag

SEQ ID NO: 37426 - DNA, 600 bp, Chicken  19866894267303_4
aggattggagatatgaagggatacaacactatgttgacttatttcataaagttagaatttacaaagtcagacctgttgaaaataccttycaggatgctatggttcagtatgaacatcctgtacccagcagcctggtgacagaacagccagttccaacaatgaggccttttgcttagcagtactctgaagtgaaaagctaatttctcagctcaattataaaatcagtggagcagtgctccatttctccacattacacatcattttgacaaatagaatttggtgaaaatcttttatgtttgrggaaaataagtgttccaacttgcagaacaattctattctagataaaaaaaatggtattaaaattagttcctcacttcttgctactttagactgattctatttaaatacatttaaatcagcctacctgggactgcaggacattctttgctagttgtgttatcattacctacacatgactaaagaaaactgtcacaaacacagtagaccaaagccatcatttacaccatacaggatgcctgcgtctgtgccctttgttaccctatctaaacaccttacagttacaaaaattgcataaccatc

SEQ ID NO: 37427 - DNA, 600 bp, Chicken  19866894267314_1
gtccttttgcaacctgcagcctgaacctttgcaacctgaagctggaacccttgcaatgtgcagctgggtccttcgcaacctgctgcaatcccacaccagaagggatgcttttccctcccctcctccttttctcacctgcaattcctaaagcagactgcagctcctctccccgaaatcagggtctcatttgctcacttttctttgactctcagacagctcctgcaatcccaagcagcctggggcacagagcatggagcactgccagcagccaggcactgggacatgatcactcctatgctrtacacacccattgagctgcaccaacatgacagcaatagcagctcataacactcacaagtgtgtgcttgtgccttgcagcagtgtgcgtgctggagagacaggtgcatgccaggaaatgatggtatatgtatccatgacataccgttgccctcctgttgtgtgctgtggatacagaaaagcccacagatggttggggtgggatgaagcacagcctgcagggggaacagggagcaagattttcagcccttgtgagcctgactgagtgatgcagacagctctgaagctctggacactgagtct

SEQ ID NO: 37428 - DNA, 379 bp, Chicken  19866894267314_2
ggttggggtgggatgaagcacagcctgcagggggaacagggagcaagattttcagcccttgtgagcctgactgagtgatgcagacagctctgaagctctggacactgagtctttgtgaaaaatcaaggcagcacggcacaggagctgggactggagagggatgctcacatctcttccatttattcctacatccctctaatcaaccaagcaagcagcgcgcctggagctgcagcatgcaagctgcttgaaacctcctctccaaagatatgaaatccatgggaaagtgtccgttgctgctcytggtcaccctgagtccccaacccactcagcacaagggctctgtccccatcccatgggcatcccgaccctatggccagca

SEQ ID NO: 37429 - DNA, 599 bp, Chicken  19866894267315_1
  misc_feature (1)..(71): n is any nucleotide
nnnnnnnnnnnnnnnnnnnnnnnnnnnnnnnnnnnnnnnnnnnnnnnnnnnnnnnnnnnnnnnnnnnnnnnactagctccgttgttctcccgactctcctgtgactgctcagtatgtcaacactcaaatgagttattacgctcagtttctgcattggagaggtgctgttcctgtctggtaagaggcagaggaaaggaaggatctctagtatgcttgcccttatatagtaaaaagaaatataccaagaacatacaatccagcagagcaaaacagaacagtggaggagtcagttaaattaakttaagtaagagaaaagccaccatgaacaccattcacagcaggcctcccatagaaggatgtgatttacatcctttgccatgaaggctaccaaggtccagcagacagggatccagtctacagctggacacctgcctctggactgctaacacttgctatctatctgccatgttaggacagaagtacttcacttcttgcctacaaccttgaattccgtgtgtcataggaatgaaacgttaytttgctgggtgtaagcactcacccatgagttgctgctggctctggtcagaagcctgaactgt

SEQ ID NO: 37430 - DNA, 600 bp, Chicken  19866894267315_2
tataccaagaacatacaatccagcagagcaaaacagaacagtggaggagtcagttaaattaakttaagtaagagaaaagccaccatgaacaccattcacagcaggcctcccatagaaggatgtgatttacatcctttgccatgaaggctaccaaggtccagcagacagggatccagtctacagctggacacctgcctctggactgctaacacttgctatctatctgccatgttaggacagaagtacttcacttcttgcctacaaccttgaattccgtgtgtcataggaatgaaacgttaytttgctgggtgtaagcactcacccatgagttgctgctggctctggtcagaagcctgaactgtgcagagaggataacaaacttggaggcacttttgggaatgtcccaacagtgtctgtcaaatgcggtctggagagcactcaagaagtggtgtgagctcagtgcacaagaaaacgggaaacacctctcttccccaaagtctccagatagagcccttcacctccctctcaagaggtggggacagaattcagccatcagcaggtgcttgctgaatgagttgaacttccattgctctgctcaga

SEQ ID NO: 37431 - DNA, 600 bp, Chicken  19866894267340_1
tctctaatggctttaagtccttcccatattgttacccaaactgcacccagggctggaggtgaggccgtgcagcacagagaagagaggacaaccccttccctcactctctggcagtgctgggcctagtgccccccatggtactgttttggttttggcttcagggtacattgctggctccaattcaacttacatcaggcagaacccccagactcctttccacagggatgctctccagcctcttgttccccagcctgaacacagaggcagggctgctccatctgtcaaaagtagagcttctcratacacagccattacacaaaccactattcacagcacaatcataggggaagaaagaacctgctgcatgagatagggttagagaataggggaaaataagtttgtggactgtaacataaactattccattccactcaactagtggtttggttggagcaaactccgcagctattctctgcctcgaattacctgctatggagaaagcatccattaaagtgctgtgaaaatcatttcttgggtcacacctgaaaccataagatggagtactctattgtgcttctattgcagtttcttttctgcgct

SEQ ID NO: 37432 - DNA, 600 bp, Chicken  19866894267341_1
ccttgaatggacttagcaaatagcctaagcacaaattcacataacgcacacacacacaaaaagcaagaaacacttatacagagtgtaagggaacacgagaaaacatctgacatgtcacacagcctcagaagttaataggctactatatacaaaacaacatttcggtaccttaaattcatttgaacaagcaaaaggttctgacacttcctaatgtactttagaagttctgttagaaaatgcacaacagaggatattttcaagatggaaagtgtgagtgtataagaacctataatatcactwcctggaataatttaaaagacctgtgatatataagacatccattctttattcagttcccaaattaagggattgacgggcaagcagacctaaatgccaaaggaacaaatactcccagttataaggaaaggatgctagcatctccttaatttggaatgagagaaaacaacatgcaagacaaagagagtgtgtctcaagataccagcagagaggaaaggagaaaaactgaacagattggagctccgtaacagaattcagatggtattgtatgcagctataattggcaaaggtattttattttta

SEQ ID NO: 37433 - DNA, 599 bp, Chicken  19866894267342_1
  misc_feature (1)..(258): n is any nucleotide
nnnnnnnnnnnnnnnnnnnnnnnnnnnnnnnnnnnnnnnnnnnnnnnnnnnnnnnnnnnnnnnnnnnnnnnnnnnnnnnnnnnnnnnnnnnnnnnnnnnnnnnnnnnnnnnnnnnnnnnnnnnnnnnnnnnnnnnnnnnnnnnnnnnnnnnnnnnnnnnnnnnnnnnnnnnnnnnnnnnnnnnnnnnnnnnnnnnnnnnnnnnnnnnnnnnnnnnnnnnnnnnnnnnnnnnnnnnnnnnnnnnnnnnnnnnnnnnnnntaatctcacttaggcccggttctagcactgcaagtggttcartaaatatgcttaatctatcttaaatcacaagttttaaaagtacagcacagtatattcattaagaaagttatattttaacgcttcttgtatctttgtaagatatttctgaacagatatgtgtaactagaatctattttttttagatcttttttgttggaccatattatgcattaatctatctgtcatgaacaatagcactgttaacctctttgcagagcagtaatcagtgatttgttggcttacccaccacaaaagcatatgcagaagaaacagtgatgtgaaatgtagaaaagtatgat

SEQ ID NO: 37434 - DNA, 600 bp, Chicken  19866894267346_1
ctgccacctctgctcagcttgtctcagcccaaagagcctgttaggaagaatatgaccaatccatactgacgatcttgcctggatgttgtcattccatgccatgaacaggtctggtcataaagcacacaaagaaatccaaaggtttggaatggctgtggatactgcagagcaagaagacacggggggggggcatggaaagaggaagggtgggctgtcaggatgcatgatacaagtgagatacttgcaccgaaacagcactcagtagctgttgtagttaaatgattcatcctcccagacacrtggggcatttgccctgtgccaggtgccaagcagcaggctggagcccagctccaattcacagctgatagcacttcttctatcatgctctttttctcctcctgccaatgtatccccttggttcgtgttcagctgcattytggtagctaccttcaaaaataataataataattagtttcccatgctgcctacttttcccratatggtacagcatacagagatacaagtgctgacatgtctaactaggtgtgtaattaatggttccttgtaatcaagctattccatctagcacagttacaccac

SEQ ID NO: 37435 - DNA, 600 bp, Chicken  19866894267346_2
aaaggtttggaatggctgtggatactgcagagcaagaagacacggggggggggcatggaaagaggaagggtgggctgtcaggatgcatgatacaagtgagatacttgcaccgaaacagcactcagtagctgttgtagttaaatgattcatcctcccagacacrtggggcatttgccctgtgccaggtgccaagcagcaggctggagcccagctccaattcacagctgatagcacttcttctatcatgctctttttctcctcctgccaatgtatccccttggttcgtgttcagctgcattytggtagctaccttcaaaaataataataataattagtttcccatgctgcctacttttcccratatggtacagcatacagagatacaagtgctgacatgtctaactaggtgtgtaattaatggttccttgtaatcaagctattccatctagcacagttacaccacgttacgaccaagaggaacttttgctgcgttcagtcagattcagttctttacttgcacagcacataacccttccaagccattaatgaaagtgagacactgaacataagcagaaagaaaaaaggacaggaatagatttc

SEQ ID NO: 37436 - DNA, 596 bp, Chicken  19866894267346_3
agaggaagggtgggctgtcaggatgcatgatacaagtgagatacttgcaccgaaacagcactcagtagctgttgtagttaaatgattcatcctcccagacacrtggggcatttgccctgtgccaggtgccaagcagcaggctggagcccagctccaattcacagctgatagcacttcttctatcatgctctttttctcctcctgccaatgtatccccttggttcgtgttcagctgcattytggtagctaccttcaaaaataataataataattagtttcccatgctgcctacttttcccratatggtacagcatacagagatacaagtgctgacatgtctaactaggtgtgtaattaatggttccttgtaatcaagctattccatctagcacagttacaccacgttacgaccaagaggaacttttgctgcgttcagtcagattcagttctttacttgcacagcacataacccttccaagccattaatgaaagtgagacactgaacataagcagaaagaaaaaaggacaggaatagatttcccaccacagtagtgtaaggagtctttaagaagatcctatctgcatgggttcctttt

SEQ ID NO: 37437 - DNA, 600 bp, Chicken  19866894267353_1
agatcagacctaaagaaggcatgcataatgttttgtatttacccttttaaatggcataattgtaatctcctgtttgcgctctcgtgactttaaaaaaaaaaaacctgaataaaatatcaaggcttttcattttttttccacttcactcattggcttagtgctgtcttcaaaatgttttgaaatactaacacctagtgtttgccccctatgcgttcgagccccacagtcctccctggggtggtggagggaggaagagaagagtatttactcagacaaacctgagagatgcacgtggtcttytcctgcctaacaggtyggctgatccaatcctggtgtgggatagcacctctctgaaatagggagcagacagctatctgggggagacagccccacttcgtgcaacagctcttattttctgcattctgttaaataggattaaaattccaaattagctttcttctgtcccgtagtctgtacagaggttgcctcacatttcataagctgtcaatgcaatcacgttaatttccttcaagcatccagaaaatgcttaggggtagacagaaattcaggtaaaagcccatctcagattctgtaaataat

SEQ ID NO: 37438 - DNA, 600 bp, Chicken  19866894267353_2
aggcatgcataatgttttgtatttacccttttaaatggcataattgtaatctcctgtttgcgctctcgtgactttaaaaaaaaaaaacctgaataaaatatcaaggcttttcattttttttccacttcactcattggcttagtgctgtcttcaaaatgttttgaaatactaacacctagtgtttgccccctatgcgttcgagccccacagtcctccctggggtggtggagggaggaagagaagagtatttactcagacaaacctgagagatgcacgtggtcttytcctgcctaacaggtyggctgatccaatcctggtgtgggatagcacctctctgaaatagggagcagacagctatctgggggagacagccccacttcgtgcaacagctcttattttctgcattctgttaaataggattaaaattccaaattagctttcttctgtcccgtagtctgtacagaggttgcctcacatttcataagctgtcaatgcaatcacgttaatttccttcaagcatccagaaaatgcttaggggtagacagaaattcaggtaaaagcccatctcagattctgtaaataatgaataagcctgtcctt

SEQ ID NO: 37439 - DNA, 600 bp, Chicken  19866894267368_1
catctccttttcattgcaaaactccctctagaccctgcgtggccctgacagttactcaggaggttttgagagtcctcttcattcgtgtgcccttgcagttaaaagagaaacatgagggtaaaagcaggaacagcccatactttctgcagccaaaagatatccctgtgctaatgttgcagcttgtgcaggacttgccatgatgttggggtgaattgagccgcttgtcacatgggtttggcatggctgctgtggcaggtgctgcctctggaacggtttgtgaaggatgtacacgggaagcaygagcctgtggtgtactgattttccctccatcccttcttcttccagcacgggaaaacctctgctccttttggggaagctgaatttccacctccagcagtgtttgggttggtttatttataacacagtaggtgaggcccatcattaaagcagcaccagtttaccaaggtgctgtgtttccatgcgggggaaggctctctggagcagctccagttcacaagtgaaagcattttttccatttttgccaccccatttctccacaggcagttccacccagcctgtgtccagcctaccttagccatc

SEQ ID NO: 37440 - DNA, 600 bp, Chicken  19866894267369_1
aaatcatagcaggattttactaaatgtccttgcttttcaacaagaaaaacagtaatattttaaataaaagagctcaatgaagctggaaaagagactagaaaacaagacttaagaggagcagctgtcatctcactgttctacaactacatgaaaggaagtttcaacaaggagggtgttgctttcttttctcaagtaacaagtgatagagtaagttgtgctaggggaagtttagattggacattaagcaaaatttattcacagagagcttggtaaagcattggaacacgctgcccaggagtrcagagtrtgcatccctggaggtattgaagaaatgtgtggttgtggcagtaagtgacaaggtttagtgatggggcttagtaggtcaggctgatgatttgacttggtgatcttgaaggtcttttccaatctagatgattccacgattcaaaaatatgttcatctgagctaccttcagaatagctcagcccctcctccaggatgaaattaattgccagctagagaacttcctmgctgaagttttgacatttaatgactattgttattgcctccagcaggactctcagggaagccaagggtgac

SEQ ID NO: 37441 - DNA, 600 bp, Chicken  19866894267369_2
agcaggattttactaaatgtccttgcttttcaacaagaaaaacagtaatattttaaataaaagagctcaatgaagctggaaaagagactagaaaacaagacttaagaggagcagctgtcatctcactgttctacaactacatgaaaggaagtttcaacaaggagggtgttgctttcttttctcaagtaacaagtgatagagtaagttgtgctaggggaagtttagattggacattaagcaaaatttattcacagagagcttggtaaagcattggaacacgctgcccaggagtrcagagtrtgcatccctggaggtattgaagaaatgtgtggttgtggcagtaagtgacaaggtttagtgatggggcttagtaggtcaggctgatgatttgacttggtgatcttgaaggtcttttccaatctagatgattccacgattcaaaaatatgttcatctgagctaccttcagaatagctcagcccctcctccaggatgaaattaattgccagctagagaacttcctmgctgaagttttgacatttaatgactattgttattgcctccagcaggactctcagggaagccaagggtgactagctta

SEQ ID NO: 37442 - DNA, 578 bp, Chicken  19866894267369_3
agattggacattaagcaaaatttattcacagagagcttggtaaagcattggaacacgctgcccaggagtrcagagtrtgcatccctggaggtattgaagaaatgtgtggttgtggcagtaagtgacaaggtttagtgatggggcttagtaggtcaggctgatgatttgacttggtgatcttgaaggtcttttccaatctagatgattccacgattcaaaaatatgttcatctgagctaccttcagaatagctcagcccctcctccaggatgaaattaattgccagctagagaacttcctmgctgaagttttgacatttaatgactattgttattgcctccagcaggactctcagggaagccaagggtgactagcttagacttgtagaatctaactcgcctaaattagkggaggctaactgacccagagtgaagaaagcacatttcacttcagaggtctccttgctagttcctggtgtcttaccatttcctcccttatagtttctgccactttctagagacagcagagattttcagagattacaaatgtagcaaatgagcaggacttacaagagctttt

SEQ ID NO: 37443 - DNA, 470 bp, Chicken  19866894267369_4
gttgtggcagtaagtgacaaggtttagtgatggggcttagtaggtcaggctgatgatttgacttggtgatcttgaaggtcttttccaatctagatgattccacgattcaaaaatatgttcatctgagctaccttcagaatagctcagcccctcctccaggatgaaattaattgccagctagagaacttcctmgctgaagttttgacatttaatgactattgttattgcctccagcaggactctcagggaagccaagggtgactagcttagacttgtagaatctaactcgcctaaattagkggaggctaactgacccagagtgaagaaagcacatttcacttcagaggtctccttgctagttcctggtgtcttaccatttcctcccttatagtttctgccactttctagagacagcagagattttcagagattacaaatgtagcaaatgagcaggacttacaagagctttt

SEQ ID NO: 37444 - DNA, 600 bp, Chicken  19866894267376_1
cctgcttagaacctttctgaagtgaacagctaaggggaaaaaaaaacaaaacaaaactggtaactagaaaccactgaagtgaagaagccatgaaaaagacaaatgtgattttagaatcattgaaagatacatccaataaaatattgaaaaggcagtatgctattataaaaaacatcagtgaaattttaagtgcagtatctcagttagctggaaggaagagatttttagcctagttaaagacagatggctaggttgtcttatagcacattagacttgtttgttcaaccaaaggtggtgtcrctcaccccagttttcttcatgtgactcaagtttacctctccacacacgtccccttgccagcacaagcactgccttgtgagagctgctcacctttgtcctgcctttgctttgtgcacagttttatatcctgcttatggtctgcaacctggctgggtaatggtaatcatagctgtggagtgattctgcaagtacacatcataattgtgattgcagtgaaagttattttaaaagtgtccctgcctcccttattcattgcattacaagggtgggggtgcagattacagtacaactgaggcatgc

SEQ ID NO: 37445 - DNA, 600 bp, Chicken  19866894267377_1
gagctctccgtatctacacgacgtgctttcttttagctcttttatttatcttaacaagaatgggaaaacatcccaagagaacaaaataaatgaggattacccagcagcaccctgccacctcgccctgagcaccttccctctctgggagctctcacttcagaggctctgcagtctttaaatgtttctgggccattctgacagtgagttgaatctgagtcagccgtgagccgtggcagcacaaagggcctaccgtacccaggggtgcaccgggcccagcactgccagtgggtgagggagtgkgaacaggctgcccagggcagtgggcacagccccaagtgccagagttccaggagcgtttggacaccactttcagacgtagggtttagattttgggtggtgctgtgtgaagcctggagtcggactcagtgttccgagttgcttcctcctgctcaggacgttctgtgatcctgkcttttttctcttttctactggctgtcacatcccttctgtagtagaagggctgctccactcccatgggtgtgtggggagaccagtccctacctggggctgcctcctcctgcaaaccctgaaaagccaagc

SEQ ID NO: 37446 - DNA, 600 bp, Chicken  19866894267377_2
tctttaaatgtttctgggccattctgacagtgagttgaatctgagtcagccgtgagccgtggcagcacaaagggcctaccgtacccaggggtgcaccgggcccagcactgccagtgggtgagggagtgkgaacaggctgcccagggcagtgggcacagccccaagtgccagagttccaggagcgtttggacaccactttcagacgtagggtttagattttgggtggtgctgtgtgaagcctggagtcggactcagtgttccgagttgcttcctcctgctcaggacgttctgtgatcctgkcttttttctcttttctactggctgtcacatcccttctgtagtagaagggctgctccactcccatgggtgtgtggggagaccagtccctacctggggctgcctcctcctgcaaaccctgaaaagccaagctgtgctcaactcytggcaggtgggtgaccccagagatccaggtttcaagggtgttcacctgccatgaggttaaaatgcaatcatgtgaatgtcagccagcagctgtaagtagcacagctgtgcccagggattccagcaggcacaatttctccaattgctgccatccttgca

SEQ ID NO: 37447 - DNA, 490 bp, Chicken  19866894267377_3
agggcagtgggcacagccccaagtgccagagttccaggagcgtttggacaccactttcagacgtagggtttagattttgggtggtgctgtgtgaagcctggagtcggactcagtgttccgagttgcttcctcctgctcaggacgttctgtgatcctgkcttttttctcttttctactggctgtcacatcccttctgtagtagaagggctgctccactcccatgggtgtgtggggagaccagtccctacctggggctgcctcctcctgcaaaccctgaaaagccaagctgtgctcaactcytggcaggtgggtgaccccagagatccaggtttcaagggtgttcacctgccatgaggttaaaatgcaatcatgtgaatgtcagccagcagctgtaagtagcacagctgtgcccagggattccagcaggcacaatttctccaattgctgccatccttgcagggcatagcctgaggcaccaccatcagaaacc

SEQ ID NO: 37448 - DNA, 599 bp, Chicken  19866894267378_1
  misc_feature (1)..(8): n is any nucleotide
nnnnnnnnaaaagaagacaatgaggtgaggtagcaacatatttctgcttgcagccattctcattttaacgccacatgtaatttagtgaatgttcattaattcatttatccttcatgcttctgctcagtaatacaatgatgatataaaaaatgtatttaaaaaaaaaaaaaaattgccatgtggcttgtgtgcagattgcccagagaaaggagagctgctggagaacgtggtgatgcccttatatcttctgcacatgtgtctcatccatcttgaaaccatggcaggcattgatgtgttgcwtggggattttgcttgtcttagggctggagtgtgtgtggttgggcatgtacctaggtctgggaactctaatgggttcccaggggtatctccagaaaggtaattcagtccctagagccaggtttcttaacagaccacaaaagacctctcaggacattagttggatgatcagaggagtgattccagatcttagcaacccagatacgaggacagtaaaatagctgaatttcaggtacgctgctagaactaatttacatgcatagtctctctatatagtgaaatgcctgtttggatccagtgca

SEQ ID NO: 37449 - DNA, 600 bp, Chicken  19866894267385_1
gcctgttttcagccgggcacccagccctccttggcaggctctgtgctgcatgcagccggccgcattcctgcccgcagcagaaacatctcagtgcttctgcagtgtggtacagtgctccggcttattgccggcaccgctgaaatccctcaaactgaggagcgtggtcatctctgaactgactgaatgaaaggcagctgaagttgtcagagcttccactgcatcacaggcactcgtccagagcgggcagggagcacaccgcacgctctcctacaccgttcgcatccctcctaaaagtttttsacattaaaggtaggacgaggagcatctcagaagcaaacgtgagatatagctggtaaccgggtcatcctcagacgccttcagattcatccaaaataaaccagcctatgttaagattaaatatgtttgcaatttggctgcctggtgcaaagttaaaatactcggagggttattcctggatgcccagagggaatttaggttcagacttctgcttctggatccacgtgaaatccattctgcccaaatttagtttcctcaatgtgccagacagcagctgagcccagctcccagcacaaaggtgcc

SEQ ID NO: 37450 - DNA, 599 bp, Chicken  19866894267393_1
  misc_feature (1)..(96): n is any nucleotide
nnnnnnnnnnnnnnnnnnnnnnnnnnnnnnnnnnnnnnnnnnnnnnnnnnnnnnnnnnnnnnnnnnnnnnnnnnnnnnnnnnnnnnnnnnnnnnnngaagaataggttaaatgtatagatacaaatataaccattcaaatattttgtgattaagtgtgcacatgtgtgagcaacaactgaaatatattgttttattatccagctccaatggccagcctgcctcctctaactgctaccaaagagaattttcaggaagaatccaacccatctcatataggccttgaacagtaatgctcacartgttaggacacttcagagaacataactttcaatgtctacagatactctcttgggtatgtgcaagctgagatttttcatggatgtagaactaagcaaatgacgtgcttcccatatttaatcatagaatcatagaattgctcaggttggaaaagaccttaaagattgtgctatgcatgagatgcatattaaaaactgtgtttctttagtttcagagaagaaacaagattcagactgatagattttaagaaaggtcctgccttgtataggacatttgacaaagcttgaagtaatgaagctag

SEQ ID NO: 37451 - DNA, 484 bp, Chicken  19866894267393_2
aaatgacgtgcttcccatatttaatcatagaatcatagaattgctcaggttggaaaagaccttaaagattgtgctatgcatgagatgcatattaaaaactgtgtttctttagtttcagagaagaaacaagattcagactgatagattttaagaaaggtcctgccttgtataggacatttgacaaagcttgaagtaatgaagctaggaacctgtccagtgattacagctactgctgtggcacaaagagaagagggaacagtttgtcacagaggtttctcatgtattggtggactgcagcamaataaatgaacaagaaactttcaataccttgcagttacccatactgtggtgtgtacattgtacaatgtatatctttcttcaacagaacataggtcatagaaaatcctgtctctaatacaatatctattccctatgcaaaatattttgtaatgatggaagagtaagctgctgtgtatagagaaaa

SEQ ID NO: 37452 - DNA, 600 bp, Chicken  19866894267397_1
aaaatattttattggtgaagaataaatttttacttattttgccagccatgcttccacccatctccaaacaccaatatactgtgggatgctacagcctttcacttgttagcaagctgccagggtgcatgagtattcacatagaatagtctcagacatgggcatatttaaaacctagtgggaggtagagaaggggctgatatagccagcagcctgaaatttcatgcatgttttgaaagagctgttatcactagagataagaggatggacaggtgaacactgcaccatcttttgttttcattrcgataagctgagacttcttaggatgctagagctgagtcttcttgattttacctcatccagagcatgcctgcatatgagtgcaaagggcaggagcagacagcagcctggatgctgggagcaatgcagccacgtaagggctttctgccccacagacctcagcagtgtgggtgcagtattgtccacggtggctctgctgtttgcggctccagagcagcagtacgtgatacagacgtctcttccctgccctgcccagccgtgcactccaccctgcaccagacagaagttttccattccagtgca

SEQ ID NO: 37453 - DNA, 600 bp, Chicken  19866894267400_1
aagctattcaaagtttaatctttgttacaccaagaataataggcacctctagatgctttctgtgtctacatttctttgtaacacagagctgctgcctttctccttcatcagccttttacagcataatatttattagtttctcaagtgtgagtgacaaggtccaaaatttgaagctgctctgtattgcatttctctcccattcagactacttgcctccctgactagtaactctgggtttcttggtaatctcaagatagctagcacatcagtaggaactaatttgttcatactaactactasaaataagctaaattcaacagctgtttaactcaaggtgcaaaaatgaaggcaaaaccctgttagcacagggcaagtgagaagggcaggaaagtgaagattgctatcagtgagcttccttgtaacttctggcagagataatatttctgacagcttaatttcrtcttttaastgagagtgctgaattgctgctgcctacctacactcaaaaaggctgggagtcacttcaatgtgaactatttattaccatgtcaagtaatgggagcaaagccctaagtatctgttagcattgcattcagtatt

SEQ ID NO: 37454 - DNA, 600 bp, Chicken  19866894267400_2
ccaaaatttgaagctgctctgtattgcatttctctcccattcagactacttgcctccctgactagtaactctgggtttcttggtaatctcaagatagctagcacatcagtaggaactaatttgttcatactaactactasaaataagctaaattcaacagctgtttaactcaaggtgcaaaaatgaaggcaaaaccctgttagcacagggcaagtgagaagggcaggaaagtgaagattgctatcagtgagcttccttgtaacttctggcagagataatatttctgacagcttaatttcrtcttttaastgagagtgctgaattgctgctgcctacctacactcaaaaaggctgggagtcacttcaatgtgaactatttattaccatgtcaagtaatgggagcaaagccctaagtatctgttagcattgcattcagtatttactgacaaaagacatgctataagacacatttctggatgattttccttcctaatctgtactgtacagtataatgtggagtgaaaaagtcaaagctctaggaggcagtgccattaacgtggtcacactgccacaaatatcttagcagttcttttcttttgc

SEQ ID NO: 37455 - DNA, 600 bp, Chicken  19866894267400_3
gaagctgctctgtattgcatttctctcccattcagactacttgcctccctgactagtaactctgggtttcttggtaatctcaagatagctagcacatcagtaggaactaatttgttcatactaactactasaaataagctaaattcaacagctgtttaactcaaggtgcaaaaatgaaggcaaaaccctgttagcacagggcaagtgagaagggcaggaaagtgaagattgctatcagtgagcttccttgtaacttctggcagagataatatttctgacagcttaatttcrtcttttaastgagagtgctgaattgctgctgcctacctacactcaaaaaggctgggagtcacttcaatgtgaactatttattaccatgtcaagtaatgggagcaaagccctaagtatctgttagcattgcattcagtatttactgacaaaagacatgctataagacacatttctggatgattttccttcctaatctgtactgtacagtataatgtggagtgaaaaagtcaaagctctaggaggcagtgccattaacgtggtcacactgccacaaatatcttagcagttcttttcttttgcagaacaaat

SEQ ID NO: 37456 - DNA, 600 bp, Chicken  19866894267405_1
ccatttgcacaggaggtaccattgccatcttcaagagtcagcgtgaagtttcctcagaaaggggccagaagcagcgctagcagctccagaggggagcacctctccagaatcaagtttgggtgaggatggagagcagacacacagtgctgcaccccttgaggcattgagcatcgcttcctcaacctccaggcacaccggtgtgcctcacaagtcaggaactgccctggctcccaactccctggcaggtgtgtcccaggcagggcagggagtggtggggtgccagcagcaccttgctgggaygcctgcaccagggcatcaaggacaggtccaaaaagggggaggctgggaaattccaaagggaaaagattgtgctaagatgtggggacacctcagggtatatgtggaaaagacttcagtgtggccaatattactattgattacttcaagcgcaaaaagcaaaggctctcctgtgccacccttcttgctccagtggtaaagagccatttgtgaggtacaagcagaacctgaaggattcatttcttataatggcaaactagtcagagtagggaggccacttaaagtaatactgggaaaatccta

SEQ ID NO: 37457 - DNA, 600 bp, Chicken  19866894267419_1
gaactataaaatcttctaagttccatgttgttgttgggaatctgccaataataactcttaccctaagttttttggggtaattttgaaatgtttgattgtccttcaactgcttccaaagctgaaggaggacctgattgggctggcgatcaattttcgcaaattgaaccccagcccaggttaagttattaaacatttgctttcgggatacccgtatgggtcccgattgaggagttggtacagctggcctcctagttttaattactggcaggacttctgcttcttctagttcgaatattgcgyctggtttgcaggcgctgtttctcccaggttggccactagttgggcagcctgttggactactgattctaaggccaccagaggattcagtatagaaactaaagtcccatatagatgggaaggggcctgttgcaagatcaaatcactcatatcgctgaaaacctaaccatatcagagctgtcaaatgtatcttcatagattgcctcccttatacccaattcacagatgtaatttttgaaggtcctccgtggaggaccacaaccctgtatgtaacggtatgtctgatttattcggccataccat

SEQ ID NO: 37458 - DNA, 600 bp, Chicken  19866894267419_2
cccatgtataatctctgcctaagggcagggtgcacagtcatggtggccaatttaggtatttccagcccattaaccatgacacttcctgcccctgtgtcccataatcttaatagccaagttggcatactttctctaggcttctgccggaactgttgtaccaggtccactaactctgttgccgtgtacagctgggctgttatatgtaagtgagtttgggcagaggaccgctgatcagggggcacccctactgatctattttgtatctctttcattttttgagttataataggacggatctcmaagggatccgttgcaagcagaactttgagatctgatttagaatttttaatttcctgatcaaccaggtccattgattcaggagtctggtcattattgattgaaatattacggacctgccctatgtgaaaacagaaagttgtttttttccccgttggtacaatcacatatgcttagaaagctgagaaatgcatgtcttgtaaatatatgcatccacaatactttattttataaaaggtctgggggaaagaagttctttatgaggtagattcttgatgttgcagtaacgtaaaagtgtttttt

SEQ ID NO: 37459 - DNA, 600 bp, Chicken  19866894267425_1
ctgccagaatcactaactgcctggttttatgtaactccaaatatctgcagtagggctggagcatacacacatggaggaagttttgtggcttttaagctatgcccagaagtttgccttaactttcttaggtgggagggggaaggaggaggaatgcagcgagggtatacataggacttttcaaaatagatcagaaattcggtctgcagggaggataggtatagttttgggtttgaaatcccctcctttttggaagggactcaaaacacgtttctcggtttgagtgtttttgctgttatgttygataagtgtaaatacaccagtaagaattttgagagattttcagttcttcgtgtctgttgctctaggggatcagatctaactcacagcagctattgccagtgtttgtacagccaaaagggccagtggttttccccaaccctaactaacagcttcccagatcaatctgctgtgcctgggcttctgcagccaagcaaagcaaatggacatgcagcttctgcggcacttgaagctttacactccagtaccacagaaaaaattgtcagccactcagaggagtcaggcagggcacggaggctggca

SEQ ID NO: 37460 - DNA, 600 bp, Chicken  19866894267426_1
gcatttccatttagccctatcactccaactctatcccaaacacgtgaagtccaccacgtgcaccaagtctcccttcagttgcaccaagactgctgtgcctgtgagctgctttttctcttctaatccactgctggccattttttctcctttggttcaggccaaaaactgatggcacgtacctggtcttggtggggggtggcctatactcccatccccatagtagagctgccccttgttgctcattgccacagcaaaaaaaggttgaaagggttaagagaaacatgactgcagctgaactgrgctcttaaaaagtaaataattcagtggagcaaactgctgcccaatactgattggccttccctgctctgtgtttgcaccatctacatcaaaatttggatctttttttcccccygagctgttgcttcctgctgttctgggaccaacatcaagttcctcatgttttacttatggttatgccccatcctcgggggtgcagaaacatttagggctcctgacatggagacagggctgcagaagagcttaggaatgcctgtgataagtgaatgtttctgcagacattcttctctgtggcaattagct

SEQ ID NO: 37461 - DNA, 600 bp, Chicken  19866894267426_2
ttctcttctaatccactgctggccattttttctcctttggttcaggccaaaaactgatggcacgtacctggtcttggtggggggtggcctatactcccatccccatagtagagctgccccttgttgctcattgccacagcaaaaaaaggttgaaagggttaagagaaacatgactgcagctgaactgrgctcttaaaaagtaaataattcagtggagcaaactgctgcccaatactgattggccttccctgctctgtgtttgcaccatctacatcaaaatttggatctttttttcccccygagctgttgcttcctgctgttctgggaccaacatcaagttcctcatgttttacttatggttatgccccatcctcgggggtgcagaaacatttagggctcctgacatggagacagggctgcagaagagcttaggaatgcctgtgataagtgaatgtttctgcagacattcttctctgtggcaattagctggatttaaatagagatctgctgtgctgagaacgtcatcactgcacagctgcaggaattgttgtcccaaggtctcatgacgagagctgtttttgtgtttgtccctgcttggat

SEQ ID NO: 37462 - DNA, 600 bp, Chicken  19866894267438_1
tttggaaacgtttagtcaagtatcagtaaggacaatttagcttttgagttaagttgttctttgtgtctctcaaacatgttagaagatagaaatatgaacttctggagcatatcttcattcatttattattatgtaaaaagaactaaacctgaaaggaaatataatttctactacaccctgaaaaaagaatgatgttacccttaacgatttctcacagctcatcactgaaggctggctttcttaaacttgatattcagagcacatgtattccagtatttgtttattcatccctcaaaatgygcagtttgacatgaagatttacagtctaaaatatcattagcaattacttcaataagttgtgctgctgcaytgctcacaatgggcaaattattggccagctttagtacaaacaatttcaaataaaattgaagtgtcatgtctgttgcctgtgtaaataaaagagtaagaacagagactcagaaataaacaatggttaactgcaaaataaatacaggcctgtatttattgccatgtgtattatttattattctctgtcttcaatttgtgaagttcagcctagctgtatctgctcaaaaatca

SEQ ID NO: 37463 - DNA, 600 bp, Chicken  19866894267438_2
caaacatgttagaagatagaaatatgaacttctggagcatatcttcattcatttattattatgtaaaaagaactaaacctgaaaggaaatataatttctactacaccctgaaaaaagaatgatgttacccttaacgatttctcacagctcatcactgaaggctggctttcttaaacttgatattcagagcacatgtattccagtatttgtttattcatccctcaaaatgygcagtttgacatgaagatttacagtctaaaatatcattagcaattacttcaataagttgtgctgctgcaytgctcacaatgggcaaattattggccagctttagtacaaacaatttcaaataaaattgaagtgtcatgtctgttgcctgtgtaaataaaagagtaagaacagagactcagaaataaacaatggttaactgcaaaataaatacaggcctgtatttattgccatgtgtattatttattattctctgtcttcaatttgtgaagttcagcctagctgtatctgctcaaaaatcatgctaacagctgataaaagcctaggtaaagggatagaatatttttgggatctgggtctaagaaatcctcc

SEQ ID NO: 37464 - DNA, 600 bp, Chicken  19866894267446_1
gtcagaccggatagtcatctagggaaaactgccatttaccatggatttaacagatgtgacatttgttaatatgcaataaacaatgctgatggtgtagcaaatacagttcaattgaaaatggactgcatcactgtaactgttaatgggtttcctaggaatctcctctgtgcctggtaagaacctttcttttattagtttgagcatcagagcagtttatgtgccttgtaggggttcttaacatatgctaagaacatcaagataatatcaggaacacataatgagaaataatcatttatgaaytgaaatgtaccagcctcggggaaacctgtgtgctggtgtccaaacagagtggtaagccaagtattacctccagttttctttccaattctgccacaagtggctttatggccaagaaccccttttggtttccctgtccttgagggaaaatgaaagtactcaagtttgtgcatatttaacatgtcaaatctctgctagtgaaaggctctgggccgttacagtgaaagacagaagatacgcaagacttaccacaatgtcatagccacaaatacctccatacacaaacagttggtaatggggttg

SEQ ID NO: 37465 - DNA, 599 bp, Chicken  19866894267448_1
  misc_feature (1)..(144): n is any nucleotide
nnnnnnnnnnnnnnnnnnnnnnnnnnnnnnnnnnnnnnnnnnnnnnnnnnnnnnnnnnnnnnnnnnnnnnnnnnnnnnnnnnnnnnnnnnnnnnnnnnnnnnnnnnnnnnnnnnnnnnnnnnnnnnnnnnnnnnnnnnnnnnnnttttgtgttgcccaagtgcccttgtgtggcattactcactgactgacagcaggataaagactggctctccattggaccacctgcctatagccccatccaacttgcccatgccaggagggaattcagcctttacgcagcaggtgagcagttttcagraaagggagatctggtggtccaggataatagctgtattgtagctctttcagggttttcttttcgtgttgtgtgataagcacaaccagaggtgctgttgcactgctcccattctaccctaagcaagacggtgttttggaagatgggcaaaatctaacctcaagtagaactactgttgccttctttgttttatgataactttttacacgggacttctaagatgtcctcttgaatgctgacacaaatctggtgcttctaggttcgtgcaaagctccgtgaaattgagcagcagataaaagaac

SEQ ID NO: 37466 - DNA, 600 bp, Chicken  19866894267448_2
tgcactgctcccattctaccctaagcaagacggtgttttggaagatgggcaaaatctaacctcaagtagaactactgttgccttctttgttttatgataactttttacacgggacttctaagatgtcctcttgaatgctgacacaaatctggtgcttctaggttcgtgcaaagctccgtgaaattgagcagcagataaaagaacgtggccaagctgtggaggttcgttggtcctttgacaagtgccaggaaaccacagcaggtaacttgctgtaggttaaagtttttctcccctgtgctrtgggttatgcttattagctttctgtctgattattttctttattttttccyatgtgctggcattggtattcactgtcagccttgaaaagaaccaaatagagcttcttttagtgcagaatcttgcgtgggtcagtttccctgagcatagcaggagtgtctgttgctggaagctggaaatttgtatcagaggattgtagtttgttatgcatgccacattctgatgctttcccctaacatctgctgttggcctctgagagacatgatactaagctagatggatcctttcctgactggtacagct

SEQ ID NO: 37467 - DNA, 600 bp, Chicken  19866894267448_3
agatgggcaaaatctaacctcaagtagaactactgttgccttctttgttttatgataactttttacacgggacttctaagatgtcctcttgaatgctgacacaaatctggtgcttctaggttcgtgcaaagctccgtgaaattgagcagcagataaaagaacgtggccaagctgtggaggttcgttggtcctttgacaagtgccaggaaaccacagcaggtaacttgctgtaggttaaagtttttctcccctgtgctrtgggttatgcttattagctttctgtctgattattttctttartttttccyatgtgctggcattggtattcactgtcagccttgaaaagaaccaaatagagcttcttttagtgcagaatcttgcgtgggtcagtttccctgagcatagcaggagtgtctgttgctggaagctggaaatttgtatcagaggattgtagtttgttatgcatgccacattctgatgctttcccctaacatctgctgttggcctctgagagacatgatactaagctagatggatcctttcctgactggtacagctttttttaggcaatttcctgagcagcgagctctcagaaactgt

SEQ ID NO: 37468 - DNA, 600 bp, Chicken  19866894267448_4
aaaatctaacctcaagtagaactactgttgccttctttgttttatgataactttttacacgggacttctaagatgtcctcttgaatgctgacacaaatctggtgcttctaggttcgtgcaaagctccgtgaaattgagcagcagataaaagaacgtggccaagctgtggaggttcgttggtcctttgacaagtgccaggaaaccacagcaggtaacttgctgtaggttaaagtttttctcccctgtgctrtgggttatgcttattagctttctgtctgattattttctttattttttccyatgtgctggcattggtattcactgtcagccttgaaaagaaccaaatagagcttcttttagtgcagaatcttgcgtgggtcagtttccctgagcatagcaggagtgtctgttgctggaagctggaaatttgtatcagaggattgtagtttgttatgcatgccacattctgatgctttcccctaacatctgctgttggcctctgagagacatgatactaagctagatggatcctttcctgactggtacagctttttttaggcaatttcctgagcagcgagctctcagaaactgttttactga

SEQ ID NO: 37469 - DNA, 600 bp, Chicken  19866894267451_1
gtgacctccccaatgcatctggcacctcactgcacagcactcggtgtgacctgaatgcatggcacagaccatggggaacgtgtctgcttattgctaacaagatgggaaacagaatgagctgcagggattggaagagatgcttcagtgccatcagcagaaattctgcagccaggtttgggctcatcccccatatatctccgagcactgtgcatgagtgctgctattccacagcatcacctgctgaagaagcaatgtgtgtctcatctcaggagccagcacggcatcgtcgatggagcagcytgcttatctcagtcttattttcctgctggtttgaagaataagaaccttcccaaatgacttcaacatgcagcagtatggcctgagttctttgcagcttcaaatcaggcccctatttactgagtgtctttaacgtcccttttaaacccagccagcgttctgccacggatttcaatgggcgcagcccatagctgtcagactcaggatggtacgcagtttttcatcagctgcctcttcccaccatatgcttcctgcaacgttcatgtcacgtcagcttgcaatcgaagcctacgtttgtgccgt

SEQ ID NO: 37470 - DNA, 537 bp, Chicken  19866894267454_1
gtccgtgatacgtaattccctgacagccttcctctgcaggctggcacaagcatgatggtcataatacaaatcccacctcatggtaaaagactgcagaagactctccaagtcctgtatgagttgtgctttaattgatattctggctgcatgtctgtttgctgctctgaaaagaatggaacatgcattgaggccgctggcacttgaataccaggagcctaattgcactttttaatgtaggaagacttgggaaccttttgggaagcttttgaccatcttaggctggtgcagtagattactggytgggagctcctgcctgaacgccagcttttgttttcttacagagcacatgatgaaactgccattctttggctacaacatcttctttgtggagaaagtcagtgacagctcaatccctgtgccctgttattttggcgtgaataaagaacagatcattgtggtggacagcatcacccaggtatgccatacaattcctcccttgtgtccaaatccctcagttctttcaggtattagcttgaa

SEQ ID NO: 37471 - DNA, 600 bp, Chicken  19866894267458_1
cagagcaacacgaagctgttctgtggttctgtcattaagagccgtttgtaagctgctttattcttttccgtgaggctttgggttgccctgtggtgtgcacagtctcttatctccaattgccggccggttggttctgctgcagctctgccttactttaccagacctgaagaaataataaatcaggaaggctggcccttaaacaccagtcagtctgtttttatgaggcttgggcttcattgtttgaggcaaaaagcaaatcagtgaaatgcttttcaggacaagttgttaacatgtgaagayacaagtcctgcttctgcaaatggctaacacttaatatgtggggaaggagcatggttgtcctttgtaagatgcccagcagagtgtttgctggtgcacctgagcacgcagcggtaattaacgcatgcccactcactgtgctggagcatcagagtgcttgctgcccccagtgccttgtgctttaattagtgccacggggcagcaggaatggcctctagaaagctgttcacagcaaggcagggagaggtggtgacttggctgggaagggcccgtttgtgcagtgcctgagtgaggagagcgaag

SEQ ID NO: 37472 - DNA, 548 bp, Chicken  19866894267460_1
tcaccacccactaagaacaattctccaacctgacaaaggttatgaaatgctgcagggctctgggaatgcatccaaacatccatgtactcttactcttgcaaggggctagaagaccaggcttctccctgctaacatctgaagctatttcacagggtcttgctgagatacgaaaacctaaaaatagggctcatgatcagcagaggggcctggaggtagtggagaaaaggccacaaatgtctctggccctgatgacaaactcaacatggattagatctcagcgtggcacccccctggcagagytcaaagctcccrtcaaayacctctgcttgcacagagaggccacccagcactgtgccctgacacccagcacagtaccccgacacccagcaccatgccctgacattcagcatggcccactgccatgcatggccccagggagctctccctggtgctgggagcagctgggcccgtgatgaactttggtagttcgctctctcgttcaggaatcattatcatttattgataggatgccttttgcaagccccaag

SEQ ID NO: 37473 - DNA, 536 bp, Chicken  19866894267460_2
aagaacaattctccaacctgacaaaggttatgaaatgctgcagggctctgggaatgcatccaaacatccatgtactcttactcttgcaaggggctagaagaccaggcttctccctgctaacatctgaagctatttcacagggtcttgctgagatacgaaaacctaaaaatagggctcatgatcagcagaggggcctggaggtagtggagaaaaggccacaaatgtctctggccctgatgacaaactcaacatggattagatctcagcgtggcacccccctggcagagytcaaagctcccrtcaaayacctctgcttgcacagagaggccacccagcactgtgccctgacacccagcacagtaccccgacacccagcaccatgccctgacattcagcatggcccactgccatgcatggccccagggagctctccctggtgctgggagcagctgggcccgtgatgaactttggtagttcgctctctcgttcaggaatcattatcatttattgataggatgccttttgcaagccccaag

SEQ ID NO: 37474 - DNA, 530 bp, Chicken  19866894267460_3
aattctccaacctgacaaaggttatgaaatgctgcagggctctgggaatgcatccaaacatccatgtactcttactcttgcaaggggctagaagaccaggcttctccctgctaacatctgaagctatttcacagggtcttgctgagatacgaaaacctaaaaatagggctcatgatcagcagaggggcctggaggtagtggagaaaaggccacaaatgtctctggccctgatgacaaactcaacatggattagatctcagcgtggcacccccctggcagagytcaaagctcccrtcaaayacctctgcttgcacagagaggccacccagcactgtgccctgacacccagcacagtaccccgacacccagcaccatgccctgacattcagcatggcccactgccatgcatggccccagggagctctccctggtgctgggagcagctgggcccgtgatgaactttggtagttcgctctctcgttcaggaatcattatcatttattgataggatgccttttgcaagccccaag

SEQ ID NO: 37475 - DNA, 600 bp, Chicken  19866894267464_1
aaaaataaagcaaacaaaaccaaaaattcacagtgttctgtaggattgtgccactgtgactgcagtcagacaagtggggctgggtaacacctagagcttgagttgcacacttaatgttgccctgctgtactacaactgcagtcttggggcaaagctagcttggggcatcctggctctggcagtgagaaggggcactgagtgacaaggaggctgtaatgtaatgtaacgttcattattaagttctttgtgtagagggatattgttgttatggcaagggagagaagaactgaaaattcattscagctgtgatacagtgtgataaatcagtcagtgaggagcagagccacrgatgtacagagcaaagctgtgtatgctacagtacatctgaaattacattgttagactagatttagccatgttctgcacagcagagcctgaaacagtccaagatttgttgcaattattctttagttgagaagtagccatcaaacattcggatatgaattttcccaagcagtattctgtgaaggaaagagatctctgtagcatgggatctggggtagaaagacttaacaggcagctcataagtcatgtggcaaa

SEQ ID NO: 37476 - DNA, 600 bp, Chicken  19866894267464_2
tgccactgtgactgcagtcagacaagtggggctgggtaacacctagagcttgagttgcacacttaatgttgccctgctgtactacaactgcagtcttggggcaaagctagcttggggcatcctggctctggcagtgagaaggggcactgagtgacaaggaggctgtaatgtaatgtaacgttcattattaagttctttgtgtagagggatattgttgttatggcaagggagagaagaactgaaaattcattscagctgtgatacagtgtgataaatcagtcagtgaggagcagagccacrgatgtacagagcaaagctgtgtatgctacagtacatctgaaattacattgttagactagatttagccatgttctgcacagcagagcctgaaacagtccaagatttgttgcaattattctttagttgagaagtagccatcaaacattcggatatgaattttcccaagcagtattctgtgaaggaaagagatctctgtagcatgggatctggggtagaaagacttaacaggcagctcataagtcatgtggcaaaggcacaggcttacaagtgatagtttttggctcagtgcctatctctgct

SEQ ID NO: 37477 - DNA, 482 bp, Chicken  19866894267484_1
aaatggctgtatctatgtaagacatcataacttcatctccctttgcttatccccatttaactctttaggattctttaaaactgtagtagtgttctgtgagtgatgcagtgctgaagatacaaccgagtccatctgtactgctgatcagggctgtgaacagcacagctgcactgaatagatttgtttaactaccttgagcccaattaatacctaattgttcattacaaattaaataacttgtgtttaaaaattaaaaatatttgggaattaaatatttaatgaaacaggggctactacagsagctctgtcaatttagatacttggcgtgccaatttatatttctatttattgcaagaaaatgaaacgagtcaaaggacygaatgcttcctctatgtacaatttgcccacaaagtgaatcagtgagtggcattggtgcctgctgtacagaagagttactaacacaactgattgctgtgttccag

SEQ ID NO: 37478 - DNA, 404 bp, Chicken  19866894267484_2
aactgtagtagtgttctgtgagtgatgcagtgctgaagatacaaccgagtccatctgtactgctgatcagggctgtgaacagcacagctgcactgaatagatttgtttaactaccttgagcccaattaatacctaattgttcattacaaattaaataacttgtgtttaaaaattaaaaatatttgggaattaaatatttaatgaaacaggggctactacagsagctctgtcaatttagatacttggcgtgccaatttatatttctatttattgcaagaaaatgaaacgagtcaaaggacygaatgcttcctctatgtacaatttgcccacaaagtgaatcagtgagtggcattggtgcctgctgtacagaagagttactaacacaactgattgctgtgttccag

SEQ ID NO: 37479 - DNA, 600 bp, Chicken  19866894267486_1
cacagtgacaataagtacacacacagatgcagacaatatgccattcacggctctctgcattgccttgaccttcagagccctgcatttggcctagagacaatgcttgccattggagatgtattattttatgctgcttaatgactacataaagctcttccaaactccattaagtctgatattctttctatcatcccttttccctcaattaatagcaaaccttagaggaaaaacaggacacagctttgacacatctccgatagatttcaatcccgcttgaaaagaaatagaaggaataaactrrtaattcttagtatcctgagctctcttactttctggaagtacccagaaaatgccagatacaccctatctacacaacctcttgatacctgacttagtagtacaagtctgatcagccgtgtggaatttcccctgcactttcctccaaccccagctgactgacctcagcatcacccttattttgttcctttttctctgccagcacagaaagctagagcagccgtgcttaagaacgaataaaacaaaaccctcatggcagacacagcggctgcagccaccccgttcctggttcacacatcaatc

SEQ ID NO: 37480 - DNA, 600 bp, Chicken  19866894267486_2
acagtgacaataagtacacacacagatgcagacaatatgccattcacggctctctgcattgccttgaccttcagagccctgcatttggcctagagacaatgcttgccattggagatgtattattttatgctgcttaatgactacataaagctcttccaaactccattaagtctgatattctttctatcatcccttttccctcaattaatagcaaaccttagaggaaaaacaggacacagctttgacacatctccgatagatttcaatcccgcttgaaaagaaatagaaggaataaactrrtaattcttagtatcctgagctctcttactttctggaagtacccagaaaatgccagatacaccctatctacacaacctcttgatacctgacttagtagtacaagtctgatcagccgtgtggaatttcccctgcactttcctccaaccccagctgactgacctcagcatcacccttattttgttcctttttctctgccagcacagaaagctagagcagccgtgcttaagaacgaataaaacaaaaccctcatggcagacacagcggctgcagccaccccgttcctggttcacacatcaatcc

SEQ ID NO: 37481 - DNA, 600 bp, Chicken  19866894267491_1
tttttatgttgcacttcactatttacataggtagtgtagtactgaacgtttggacttatattgtgtaaggaatatgctgataacatttctgtggttcttttgcaaagttgtgttttcagcttgtcacattgtcctgagatgtgcagcacatgctgctttttatgccttgctgagataggatgcagtggagctgccaaggcttctatgggaagttaaataatgagaggatttgacagcagtgtggttctgtcatacaaatggtacagcttggtatccaaattgtgcaatttttagagtatrttgcaactcaaagttactaagattttctgctatgatttttgtttattaattccagggatgcaaaatgagtagacaggcaatgctggaagtccatatgaggcagctttttatgcttggccttcatctttggttatgagagctccaaatctggcttgctaaagagaattcttaacttcttcttcactgtatgacaaaagcgttcttcagagcagccagagctgagtttccccaggagaaagcagagttagaagagagagtatttcgcatgtaggaattcacgttgcatgcacagtccctaat

SEQ ID NO: 37482 - DNA, 599 bp, Chicken  19866894267494_1
  misc_feature (1)..(5): n is any nucleotide
nnnnnaatgtgaactcttgttatcactccttcctgagagggactgaacagagcattgcatgttacaaacacacatttcaaagacaagtattatttcagtgaaaacggaacagaagaaaatgcattagataaagggctgacaaaaaggctcaaagccatgcctttgcaggacaatctgaagaacgcactgatgttagcaaatatcaacagagatgcaggaacaaaaggttcatctcagtaaggttgtactcctacaggcaggggagaacataaagcctatcagctctgctttgtagacggrcagagattattcactcatcatgccataaagaggaactgacacatgctttgggctttgatcacaagagatccaagaggtgcaatatgcgatgtgaaagtgaggcaggacttgtggacagaaactcccaaagcaaatactctctttcagtgacagcagctcaaggactgcattgtcttcttgttgaagagcatactgatgtcctgtgcggagaagcgcaacccctacaggggcagcaacatgatatcggggcttaaaggaatgaacctggtcctcagaaaaacctcaacattccccttcct

SEQ ID NO: 37483 - DNA, 600 bp, Chicken  19866894267512_1
tcactgctagtaatcagctttttgactgttttttgttgttgttgttttaagggactagagcagggtagggttgcagtggggaaaaagagtccaaaatggtaacaaatagacccaaaacttttgtcattaaatcacagcgctgtgacaatttataccagttgaaggtatgggctaaagtgtttagagcacaatctgcttcgtcattctgaaatacaaagagctggccaaaagataacacagacatttaaatcaacttgtggcatctactaatacaccctcaagactcaattattttgattmgcagcatttgactacagacagaatgataacatctctgacagttctaatwcacttggaaaggctctataggtcactgtgatatgaacagaacaagaagccccaagactttcaagttgtggatagctgttcttcccttgcccagttacaaatgggtatctgatatttatgagtatcaaaaatgcagagaaaaaggatgagatactaagcactaaacaaatgaaacagtaagtgcctgaagttgaacatttaaacataaaggcacctcagccaaagagtattgttgatacatggcccttcaac

SEQ ID NO: 37484 - DNA, 600 bp, Chicken  19866894267512_2
agggactagagcagggtagggttgcagtggggaaaaagagtccaaaatggtaacaaatagacccaaaacttttgtcattaaatcacagcgctgtgacaatttataccagttgaaggtatgggctaaagtgtttagagcacaatctgcttcgtcattctgaaatacaaagagctggccaaaagataacacagacatttaaatcaacttgtggcatctactaatacaccctcaagactcaattattttgattmgcagcatttgactacagacagaatgataacatctctgacagttctaatwcacttggaaaggctctataggtcactgtgatatgaacagaacaagaagccccaagactttcaagttgtggatagctgttcttcccttgcccagttacaaatgggtatctgatatttatgagtatcaaaaatgcagagaaaaaggatgagatactaagcactaaacaaatgaaacagtaagtgcctgaagttgaacatttaaacataaaggcacctcagccaaagagtattgttgatacatggcccttcaactcatcgcttagtacaggctgtccaacagcagaatttctgcaactgatca

SEQ ID NO: 37485 - DNA, 600 bp, Chicken  19866894267516_1
ctagttcaaagccttatccagtccttaagaatgccttaaaatctgtgattattaagctcttgtatcaccaccatttgagtggttaggagtatgatctaaatgacaaagttacaacatccaggatcaattgttgaaagcaattaagagggaaaagacaaccataattaagggagaaaattccacccacagaattcaatagaaatataagtcaactgagaggaattaaattgcttgttttctacataaataaaaaatccagccattatataaacacaaaatattttaaagtaaaatatagayccaaggaaattaagatgaattggcaaaggtagaactcaaattttgctgtgataaatttcaaagaagaatcaatattttccagaaaagatggccagaaatgcaaatttttagaccttcaagacttctaaatcatgtatatgatttattggcactactatacaaattctatacacattttttttttccaagcatttttcttcattttccaatactgaaacaatctgtaacttaagtaataataatgttttgcttggaatattttcttttatgcaaacattccacaaacgcttatcagttagc

SEQ ID NO: 37486 - DNA, 600 bp, Chicken  19866894267519_1
tttttcagaacataaggatcacaaccagcaggctgtgatcttgctgtctgcacagacccacgttcccaccccaccaccccctttctttccctgccatgtgccctacgccgcagtgacagctgagcagcagtgggttgacacgtttgctgcttgaaggatggcctcctgtcatcacagttcaattggcctaatgaataaggaggggtacattttgtcctttcctagtgaaaagttgtaataatacttcttcctcccccttcccccccttcttgcaacaatgtaagattagctcactagccwgtctcattaaggtactcagtgtcagggaactgaagacttcacaacaggcaaagcagcaagaggaaccccaggctgctcctcagcatgggagaaatgcgtaggagaaatatgtcacaaggtgattttaaacactgctactcaaagacaccaggcaaaacacgcaacactactattcaaatggcaaaggcaatcacaagcctgttttcaggagtaccattcctagagctattaacagcaggaaaaggtcattcgtcaaggtactatccatccacacatcctgtccttctaataagaaggatt

SEQ ID NO: 37487 - DNA, 600 bp, Chicken  19866894267522_1
aatgctccatttcaaagctgtaacagaaatgggtgtttttttatgtattttttataattactgagattgcattacatcttgggtgaggccagaaatccagcatgagcagcagacagagtttagttcccttgatcccagtccatcagttgaacatttccaacacaggggcagtagtcccatctcttcttcgtttattctggagactgaataaatagctgcagcctggagaagagagcccataggctccagaggtgaaaatggccccatgaaggccttcacagttaaagccaagtctactgyggactgaaatatgaaatgtaatctgaaaactgtctttctctctgaggcaatgagaccatttcatgaaaagaaatgccattttctcaagttatacatagatggtagcacattcagacagatctctttattcagtgaaatcctcagtcactgtaaggtgtatactccactgttgaccaaacatagcagtggcagagcagagccaaggcactctgaattgtctttcagaccattatgtctccattaagggggttatattaatgacatgctgataaatataaggaattttctgtttaacaaagc

SEQ ID NO: 37488 - DNA, 600 bp, Chicken  19866894267522_2
ttatacatagatggtagcacattcagacagatctctttattcagtgaaatcctcagtcactgtaaggtgtatactccactgttgaccaaacatagcagtggcagagcagagccaaggcactctgaattgtctttcagaccattatgtctccattaagggggttatattaatgacatgctgataaatataaggaattttctgtttaacaaagctgttttacttgtccacaaatccttaaaaaaataagggaacactgctgttcattccttgaaatgtctgtatctggtaatcagctctgckaaayactcctcaaggttctgctgagtgtttatcttgtgcttgctcttcagcatgtctgctgggttctctgagagctctcacattgatttcaaatgtagtcccattgagtttactcctccaagtgtttactcaacaaaataataactatcttatcttgccaaaaatgcctctgtctgagcaacatttatactcaacccaccagggaaaacagaaccagtgcttgttagaaagcctccccagattcttccctctcacctgtccctcttcccctctgaatatgctttttcctgtcatgggaat

SEQ ID NO: 37489 - DNA, 600 bp, Chicken  19866894267522_3
acatagatggtagcacattcagacagatctctttattcagtgaaatcctcagtcactgtaaggtgtatactccactgttgaccaaacatagcagtggcagagcagagccaaggcactctgaattgtctttcagaccattatgtctccattaagggggttatattaatgacatgctgataaatataaggaattttctgtttaacaaagctgttttacttgtccacaaatccttaaaaaaataagggaacactgctgttcattccttgaaatgtctgtatctggtaatcagctctgckaaayactcctcaaggttctgctgagtgtttatcttgtgcttgctcttcagcatgtctgctgggttctctgagagctctcacattgatttcaaatgtagtcccattgagtttactcctccaagtgtttactcaacaaaataataactatcttatcttgccaaaaatgcctctgtctgagcaacatttatactcaacccaccagggaaaacagaaccagtgcttgttagaaagcctccccagattcttccctctcacctgtccctcttcccctctgaatatgctttttcctgtcatgggaatgtga

SEQ ID NO: 37490 - DNA, 562 bp, Chicken  19866894267528_1
cacatgcagtagtactaacatataataaatacataaatgaataactggaaaaggttgttttaacttttgaactgttgttcaaaaagatggaagatggtaattaaaaacaaacaaacaaaaaaagccaacaacattaaaaccagtgaagtctgggtttgttcctgggacaaagactaaacctacagtaaattttacatgcaacaaataccctaacaagttctcttcaaagacctgcacctaagtaggtgttcaacctgaccagacatcctaaaatatatttattcttacatagaagttctrtacttgtgtgtttttcttaagcttccaagtagaaaagtcgtttttaccctacaccatatttttgtccttttgctatttatactataatcaaatgttgtgatagttcatcggagtgaagacattcaccaaacctggatgaggagtgcaccgagtgccttttataagaatttctccagacacagcatttgttgtaaataagtaactgagctcttatgggagctatcagacaattttgaaattgttctttttggaaaaagaaaat

SEQ ID NO: 37491 - DNA, 600 bp, Chicken  19866894267539_1
gaaaccataagtgacatttaaatacacgcacacacaaagtgtctgacacctgttcatcagcttgaagcagaaagaattttggattataaaacaaaaccattcttcactgttcaacttctcatttcatttattttctgtatggtacctttgcactttaccgctttttgagatattccctcaatgtctggatcctgttttgggttttggatcctgtccagcagaagtcctatgataaacttgtagaggtttacatttttcagtctttatactgagtgtggggggggtaatacacttaatatraaaacacagtcayggtctgcaaacatccattgtgtttgtgcacaaaataaataagatttaaatgcatttcaataagacaaatgaagttatcagccttgtgaactttaagaaaaagtgcaatgagaacattagctttggatgtgcattatttagtaaataatgttcaaaggctatgtcttccaaaaaaaaaaaaaatctacatactacatgtttcttggtgtaatgttgtacacttaatcacatattttgtacattcgtacatattttatttttttacaaagagaagaccttactgggatt

SEQ ID NO: 37492 - DNA, 600 bp, Chicken  19866894267539_2
acatttaaatacacgcacacacaaagtgtctgacacctgttcatcagcttgaagcagaaagaattttggattataaaacaaaaccattcttcactgttcaacttctcatttcatttattttctgtatggtacctttgcactttaccgctttttgagatattccctcaatgtctggatcctgttttgggttttggatcctgtccagcagaagtcctatgataaacttgtagaggtttacatttttcagtctttatactgagtgtggggggggtaatacacttaatataaaaacacagtcayggtctgcaaacatccattgtgtttgtgcacaaaataaataagatttaaatgcatttcaataagacaaatgaagttatcagccttgtgaactttaagaaaaagtgcaatgagaacattagctttggatgtgcattatttagtaaataatgttcaaaggctatgtcttccaaaaaaaaaaaaaatctacatactacatgtttcttggtgtaatgttgtacacttaatcacatattttgtacattcgtacatattttatttttttacaaagagaagaccttactgggattcagagacattcaa

SEQ ID NO: 37493 - DNA, 599 bp, Chicken  19866894267540_1
  misc_feature (1)..(78): n is any nucleotide
nnnnnnnnnnnnnnnnnnnnnnnnnnnnnnnnnnnnnnnnnnnnnnnnnnnnnnnnnnnnnnnnnnnnnnnnnnnnnnatagctgctgatcatatgagccctgtcaagatggtgcacttaataagacttaagcactgcagaaaaatattttaaattaattttagcattctattaattctagcattctattctaattagcattctattaattagcaaactattaattttagcattcctgatggctgaatatgagtaaataacttctgtaatcataataatattctctaaaaaggattgttkgagatttactaatcataacagtgtatgtagtctttacaaataactgtttgaaactgttttcactgtatataatattttgaggtaagaactgaaatgccttttttttttttttattcctgagtaaaaaattaaaataactgtaatctctctgtgagctcaatagaagccaagtttggcatatctcctctctctacagctggggcttggatatgtgtcaacacaatggagttggctagaggaagcgaaccaatctaggtcagaatagagatctatagtctatatttattctttacatatac

SEQ ID NO: 37494 - DNA, 600 bp, Chicken  19866894267541_1
aacaaagctgggaggattgcctgatgcacttgaaggctgtcttcaagaagacctgaacactctgaagagttggacagggaggaatctgatgaggtttagcaagtgtagagtcttgcacctggggaagaataactgcatgcatcagtacaggttaggggataacctgctggagatgagctctgcagagtaggagctgggagtcctggtggagagcaggttggccatgagccagcagtgtgccctggtggccaagaaggccaatggaatccagggatgcattagaaagagtgtggccagcargtcaagggaggtgatcttccccctctactctgccgtggtgargccacatttagactactgtgtccagttctggtctccccagtccaaaaaagacagggatctcyaagaaggagtcctctggacttctatcaaaaaagttaacaattttccatttcacatatccaaagtgaatagagagaattcatgaatcttagaatttaggagtrtgttttgcccacaatactgttcaggaatttgactccgattacccattcaatatcctattggactcaatacttggacttcaagtatttcaaagtc

SEQ ID NO: 37495 - DNA, 600 bp, Chicken  19866894267541_2
tcaagaagacctgaacactctgaagagttggacagggaggaatctgatgaggtttagcaagtgtagagtcttgcacctggggaagaataactgcatgcatcagtacaggttaggggataacctgctggagatgagctctgcagagtaggagctgggagtcctggtggagagcaggttggccatgagccagcagtgtgccctggtggccaagaaggccaatggaatccagggatgcattagaaagagtgtggccagcargtcaagggaggtgatcttccccctctactctgccgtggtgargccacatttagactactgtgtccagttctggtctccccagtccaaaaaagacagggatctcyaagaaggagtcctctggacttctatcaaaaaagttaacaattttccatttcacatatccaaagtgaatagagagaattcatgaatcttagaatttaggagtrtgttttgcccacaatactgttcaggaatttgactccgattacccattcaatatcctattggactcaatacttggacttcaagtatttcaaagtctgatgcacaacaatatctcttgcagctacatcaatgttattg

SEQ ID NO: 37496 - DNA, 600 bp, Chicken  19866894267541_3
gtagagtcttgcacctggggaagaataactgcatgcatcagtacaggttaggggataacctgctggagatgagctctgcagagtaggagctgggagtcctggtggagagcaggttggccatgagccagcagtgtgccctggtggccaagaaggccaatggaatccagggatgcattagaaagagtgtggccagcargtcaagggaggtgatcttccccctctactctgccgtggtgargccacatttagactactgtgtccagttctggtctccccagtccaaaaaagacagggatctcyaagaaggagtcctctggacttctatcaaaaaagttaacaattttccatttcacatatccaaagtgaatagagagaattcatgaatcttagaatttaggagtrtgttttgcccacaatactgttcaggaatttgactccgattacccattcaatatcctattggactcaatacttggacttcaagtatttcaaagtctgatgcacaacaatatctcttgcagctacatcaatgttattgataatgtacagaaacttttcacattttytgtctgcaaacattttacatcatttctgtttttg

SEQ ID NO: 37497 - DNA, 600 bp, Chicken  19866894267541_4
tggagagcaggttggccatgagccagcagtgtgccctggtggccaagaaggccaatggaatccagggatgcattagaaagagtgtggccagcargtcaagggaggtgatcttccccctctactctgccgtggtgargccacatttagactactgtgtccagttctggtctccccagtccaaaaaagacagggatctcyaagaaggagtcctctggacttctatcaaaaaagttaacaattttccatttcacatatccaaagtgaatagagagaattcatgaatcttagaatttaggagtrtgttttgcccacaatactgttcaggaatttgactccgattacccattcaatatcctattggactcaatacttggacttcaagtatttcaaagtctgatgcacaacaatatctcttgcagctacatcaatgttattgataatgtacagaaacttttcacattttytgtctgcaaacattttacatcatttctgtttttgacaagtgagtccaatgataagccaggagttggactcagtgatccctgtaggtgtcttccaaatgtagatattctataatcctatctgtaaacttttgtttgg

SEQ ID NO: 37498 - DNA, 600 bp, Chicken  19866894267541_5
tggtctccccagtccaaaaaagacagggatctcyaagaaggagtcctctggacttctatcaaaaaagttaacaattttccatttcacatatccaaagtgaatagagagaattcatgaatcttagaatttaggagtrtgttttgcccacaatactgttcaggaatttgactccgattacccattcaatatcctattggactcaatacttggacttcaagtatttcaaagtctgatgcacaacaatatctcttgcagctacatcaatgttattgataatgtacagaaacttttcacattttytgtctgcaaacattttacatcatttctgtttttgacaagtgagtccaatgataagccaggagttggactcagtgatccctgtaggtgtcttccaaatgtagatattctataatcctatctgtaaacttttgtttggcttacagtatcctaagtaataatcatatagtctatgtgcaaggagtcctcctaatcccatcaacttatggtttcacatctaaacatgtatttaaaaataatacacattcctgggctttaggatttcaagatagaccttaagaatatttacctacattagcaaag

SEQ ID NO: 37499 - DNA, 600 bp, Chicken  19866894267545_1
catcagactgaaaactaggagaaattacaaatagcctgaagggcactctttgtttaattgctgttcagtaacttaccagcatttaattttggaattttttttgttttaagtgttgaaatgtacccaaacattcatggaaatctgattcaaacataattctctaatgtggagaaggaagcagagcctacaatggtgttaattttgttcctttttgttatgtactgtgaagtccctctagaggctattctgttaggatccaactatattgtattcagtgtacaaacacacagaactggtttygatctcgagcatctcaatttaattaaagataatatttgagtagggatgagaattgataaattaggtgctgtggcacaacgaaactaactttttgctgcagataacacaaacatactctccatgttctccgtaattctatcttgacgttttaatttgatgttctgccatgatgaacaatttgccttagaattctcaygccttgtaataaaggctgtttaaaaattacatcttatcttttggggagattcctagctatgttattggggtattatgtgttgcttttattgaccctcgtcttgg

SEQ ID NO: 37500 - DNA, 600 bp, Chicken  19866894267545_2
taattttgttcctttttgttatgtactgtgaagtccctctagaggctattctgttaggatccaactatattgtattcagtgtacaaacacacagaactggtttygatctcgagcatctcaatttaattaaagataatatttgagtagggatgagaattgataaattaggtgctgtggcacaacgaaactaactttttgctgcagataacacaaacatactctccatgttctccgtaattctatcttgacgttttaatttgatgttctgccatgatgaacaatttgccttagaattctcaygccttgtaataaaggctgtttaaaaattacatcttatcttttggggagattcctagctatgttattggggtattatgtgttgcttttattgaccctcgtcttggacattcccagatgtcaattttaactggcgagtcatgacattcttctgttgcatctgagccattctgtaccccaatgaagaacatttgcttctcaagaaagagaaacaaaaggatttaatctttctctaaagaaaaactattgctggacctctaaatatccaaatcaaatacgttggtcatacttgattacagcatt

SEQ ID NO: 37501 - DNA, 600 bp, Chicken  19866894267545_3
tctctaaagaaaaactattgctggacctctaaatatccaaatcaaatacgttggtcatacttgattacagcattataagcagactattgggcaagttaagcttcagtggtcatactcctccctttgtcttctattcctgtctggtgtctttgagaattgtattttgtcagaatgttaacaaagatgagccttcccacgctttatttgttgtgggactggtatataattgcatggtttgacttgagtttaattgaagcgaggatgtatgtctggttcgcaaaaatgggtttgcccctttgycaagctctccctttcaaattaatgtaattggtcattaatgtaaaaaaatgttttcctaagttagtattttagtatgttaaagcctttttttctttttgttcttgttttttatttcataaagttaatggggccaaatcctgtcctctctgttccttacttgagcagtgaagtcagaggggtattgcctgggtatgcgtttcaggcttttgcttgtggtaaggatatggcttgtaattttgttttaatacaaggaattgctgttctattagtatgactttatagtaattacacaggctttgc

SEQ ID NO: 37502 - DNA, 600 bp, Chicken  19866894267545_4
gggtaatttaattggaatcaaaattaagtactgtccatcctggaagagaggtagcgactcgtacagtggatttccagtgttagcccataagagatgaagccccagtgcatgcttatggggggagggagttgtggggaagtgaaacacttcaattctaatgtttacaaggcacctaagtaacaaaaattgtcttcctcaagaactgtaaagctacatcttgtattagtttctgccaaaatcgctaattatccaaatatttttattgaatatgacaattgagctatacatttttataactgraaatgaaaatccgtaagagtttatagtattaccaagttttgcattttatgtgattgatggatgcttaagttcaccttttaaatttgcaacagcgccccactgaatccataaagatcacgtgtactacagcttagtccagtagtgatgtacaatgaactcgaacttatctaatgaaattattggaatgaaaaaaaagggacaaatactgtagcacagtgggaaaatctactgtacgtgatgagagactcaagggaagaatcttctcagcacagttctgatatatagtcaaaggaaaaaata

SEQ ID NO: 37503 - DNA, 600 bp, Chicken  19866894267548_1
tataagcaccatgtaattagggaccgagtataataaactaatacagatagtccgtttgaacaaaatgaaggtaatataattatggaaaagacactattgctaaaacaggggcccttgaataccccaggaggagtgctaatgtagccaggaaatgatcgcggtttgacaggctaacgagagccttaattaagtatgaaaaactgctgcgcgaacgcactgcaaaagtttttctgctcatttctggaacggcagaggctctctggatggacgccttgcgccccatagcatcaccacccctcygtccttaccatcctccagcgtggtggcattgatctcgctggaggacggccccgtccccgcacggttgaaggcctgaaccaccaccccatactgcgcgaacttcttcaggttgtccagcgtgtagacctcgctgtcacccgtggccttcatctccacgatgctgtactgcccattgctgcccgggctgttctcacggtagccaatctggtacccacggatcaccccattctgcagctccttcttcggggcctgaagcaatggggacacgaaggggagtggtgtcacggagctgacagcccc

SEQ ID NO: 37504 - DNA, 600 bp, Chicken  19866894267552_1
tgaatactctctattctttccttgcctagctctgatgcagcgtccttatcacgtgatcacagaaatgttcttgctactcatcactgctttaaatgtcttgtatatctccactggtttgtttcagtgccttacaaattttacaaggctgcgtacacgtagcagggctcccttttcacgtgtctctcttccataaaagctgctcacttattttaaatgtaactacaagccaagagaaaatgattacaaagagcactatcattagttttgtaccatcaggacaatgtttatatgagtttataygacagaggaactcatatttgaataacacatgcatattgtcctcagacaaggaaaaaatgtccaaccaaccatgtaagccaaggcaagaaatttaattaggaagataagagttgggtttttgtttttggggttttttttttaggttacggaaaaaagataattttaagcatggaattagcatcttctaataatcttagacaaaaaaatgattttgttttgctttggtttgtaaattagctcatgattaaagtatctctctagttgagcttcattggctttttgggcctattttctgaatgc

SEQ ID NO: 37505 - DNA, 600 bp, Chicken  19866894267556_1
aagcagttctgcgggacagccatggtgttgccaaggatagatgctgttgttgttactaaatctgaaagggttatggagtcatttgctcatcagtttcctatttctttgcatttctcagaaattttggtaatttctcttctgattcattcatccttgcccagccaatgctgactgaactgatagatgcaggcacatgtggtaatacctcagatacatcataacctttcagttatagtgcagacatgtgctgactcagcaacattgccttggccctgggacttggttggtcaccttcagcaragtgccttttgtcagactgcagatacctagaaatgggtttagagatgttccatgttcttcattawgtcttgaacagtacagtgtcaagggtcatcttgtcctctcataatagccaaagtgatcaaataccccattatccaaactaagcagcagcagaataaccaagcacctcttgttgagagtagaatggtcccacacaaccactratctgcccagtatgtttcttccatactcccctcagtcccgcagtgctttatttcgagcaacaaatattgctgtcttgtggtagtcacactaaat

SEQ ID NO: 37506 - DNA, 600 bp, Chicken  19866894267556_2
aagggttatggagtcatttgctcatcagtttcctatttctttgcatttctcagaaattttggtaatttctcttctgattcattcatccttgcccagccaatgctgactgaactgatagatgcaggcacatgtggtaatacctcagatacatcataacctttcagttatagtgcagacatgtgctgactcagcaacattgccttggccctgggacttggttggtcaccttcagcaragtgccttttgtcagactgcagatacctagaaatgggtttagagatgttccatgttcttcattawgtcttgaacagtacagtgtcaagggtcatcttgtcctctcataatagccaaagtgatcaaataccccattatccaaactaagcagcagcagaataaccaagcacctcttgttgagagtagaatggtcccacacaaccactratctgcccagtatgtttcttccatactcccctcagtcccgcagtgctttatttcgagcaacaaatattgctgtcttgtggtagtcacactaaatttgggctaattaaaggacagcagtcctatctgagcagaaagatctgcagtgtcggcctgtgctgc

SEQ ID NO: 37507 - DNA, 600 bp, Chicken  19866894267556_3
tcagatacatcataacctttcagttatagtgcagacatgtgctgactcagcaacattgccttggccctgggacttggttggtcaccttcagcaragtgccttttgtcagactgcagatacctagaaatgggtttagagatgttccatgttcttcattawgtcttgaacagtacagtgtcaagggtcatcttgtcctctcataatagccaaagtgatcaaataccccattatccaaactaagcagcagcagaataaccaagcacctcttgttgagagtagaatggtcccacacaaccactratctgcccagtatgtttcttccatactcccctcagtcccgcagtgctttatttcgagcaacaaatattgctgtcttgtggtagtcacactaaatttgggctaattaaaggacagcagtcctatctgagcagaaagatctgcagtgtcggcctgtgctgcctactgaggctgctgcctgccagagctcttccaagagttgggctgctccctggagctctctaaaaagcgttatgtatatatattgtcctacaggtatatgtgggtgcagaggaacatctgcgtttttaaagggaaggaaca

SEQ ID NO: 37508 - DNA, 600 bp, Chicken  19866894267556_4
atctgagcagaaagatctgcagtgtcggcctgtgctgcctactgaggctgctgcctgccagagctcttccaagagttgggctgctccctggagctctctaaaaagcgttatgtatatatattgtcctacaggtatatgtgggtgcagaggaacatctgcgtttttaaagggaaggaacacctgcatcatcatcatcaccacctataaaatggaaagtaacttcaaagcagctcagtctccccattttgcccttcagaaatgtgatgacacactcatttttaccagcctctatttgcctcrtttcctagaagggatggtgcaggctgtgagccgaacagagctgtgccagcttatggcagcagtcacctggcccacacactcctgtgagatgtcgtaagcttactaagccccgagtgctgcctcactctgctttgtgcattacagaccacctttccttgaatgtaacctttctggagatgcagaaaaggcaggatctgcctgagctgctcggatgagtcctaggcattaaatctatttcactcttacttgaaactaaatcaatttaaggattgtttgatggctttagttaattagccaggt

SEQ ID NO: 37509 - DNA, 600 bp, Chicken  19866894267560_1
gacttaaatcttgttagcaacccagagtttagggagcaacgcatgaagtcagcatctgctccatgattagttccttgctactagaagagaaccctggtgctgtcttctggctgccaagagcatgtttacttttctggggtggaacctccaagctgcacaaatatgctcatcaaagacaaaagtttgtgccatccccatcaatctgaaatcagttagatgtgtttttggaaagcgaagctgctcattatcatttccatgggtggaaactgacaatgtgtgacagtttgttatgattaagaratgcagtttggaaagaaagcaaggctgtacaatatttcaagttagcagtagaaatgtgaaaaaagcctgcaagcaattgtcaagaactaacattggagtgtctcaaactttcttctggatttcagcatctggagggcataacagcatgtatgtttctaggggaaactataaacttggtttctctgctactgtgctgaagataaatgttgaatacttcaagatatttagggtttctttagagcttaaagcttggtartagaacacatgatgttactcattgttttccttaagactatcctc

SEQ ID NO: 37510 - DNA, 600 bp, Chicken  19866894267560_2
tgggtggaaactgacaatgtgtgacagtttgttatgattaagaratgcagtttggaaagaaagcaaggctgtacaatatttcaagttagcagtagaaatgtgaaaaaagcctgcaagcaattgtcaagaactaacattggagtgtctcaaactttcttctggatttcagcatctggagggcataacagcatgtatgtttctaggggaaactataaacttggtttctctgctactgtgctgaagataaatgttgaatacttcaagatatttagggtttctttagagcttaaagcttggtartagaacacatgatgttactcattgttttccttaagactatcctctggggagaaatattgatgtgatttagtgctttgtgctgtaaaggagagcttctaaggttcctcagttctgccaatcctgtagaaaggattgagaaagtcttgtctgtgaacctgagagcacagagccttgttttttcttgacgctctgtatcaagatcatactgaattacaaaaacaagttatatgataatctattaatattaaaaaatattgcctctgtgatcagacatgggtattcctggggcttgctgtgcaa

SEQ ID NO: 37511 - DNA, 509 bp, Chicken  19866894267565_1
tgagaaacacatgaagccttttaatttttcctaagttatttctgaagagtgacttttatatagagatgacagctcatctcttctgagtttcgtttgcttttcaggcatctgtgaaatctttcaatatgtattagggtgcatagggtgcagtatgttgaatgaccgtgaatcctctaatagtattgaaatctttatttcttttcctggcagtgctgtaagaaaacactgcttaaagaattgatttatctgttttccattatctaattttgtattgtttaactgttaaagtgctcactaaartctaacctatgttaggtagccttttacaggaagtagatagtttaattcctattctgacatttccatggaaaattagtgaagtctagtgaatgagtctacttccctgaggttttaatgtatggttcagttcctgcaagatctcttagcttttttatttctgctgacaattctacaccttagttgcattttgatttaaaacgactgtgtag

SEQ ID NO: 37512 - DNA, 599 bp, Chicken  19866894267571_1
  misc_feature (1)..(3): n is any nucleotide
nnnttttctattcatttgtataatgacacatgctctgtacttttggaaggctaaagttttacactttccataagaatcctactgagatcacccatttgatggattcttccacttactgtcccaagtaaaacagactcgcctttgataatgagcttttctcctttggcatcagaagagaagctatctttccctatagttagatgtgagaacttgtttgcaaataaataaatttattggctgaagtcctcaagttgccagttttctgaaacgtgtgtacaggtatcactgaaggattggcayggagcttccacattttgtgccattccctgtaggttttttttcttcccaagcaggcagttcgttcattgcaggtcgtgtgtcttgtctgtgttatacaaaagctgcatctttgctgtcccctcttccattgaagtgcctgtagtgacaacaattgcttggccctctctggcctgggagctggtgagctcakcacacccataatcwagatctgttttgcttacctgcttttctcctctaatgtgttgctctcccccatgaaggcagctttacagaaagmaactgcctttggattgaaatga

SEQ ID NO: 37513 - DNA, 600 bp, Chicken  19866894267571_2
ctatagttagatgtgagaacttgtttgcaaataaataaatttattggctgaagtcctcaagttgccagttttctgaaacgtgtgtacaggtatcactgaaggattggcayggagcttccacattttgtgccattccctgtaggttttttttcttcccaagcaggcagttcgttcattgcaggtcgtgtgtcttgtctgtgttatacaaaagctgcatctttgctgtcccctcttccattgaagtgcctgtagtgacaacaattgcttggccctctctggcctgggagctggtgagctcakcacacccataatcwagatctgttttgcttacctgcttttctcctctaatgtgttgctctcccccatgaaggcagctttacagaaagmaactgcctttggattgaaatgagatcggaatgatttccagatggtaatttctgtatttgagggttttttgtttcttcttcctgaagcattcattggctgctttgcacagatcctcagtttatttacatatatactatggtaaatatgtcagtgatttttttttgttttgttgcattgcattattctgtctttaaaatatttatgcagcaattt

SEQ ID NO: 37514 - DNA, 600 bp, Chicken  19866894267571_3
gagaacttgtttgcaaataaataaatttattggctgaagtcctcaagttgccagttttctgaaacgtgtgtacaggtatcactgaaggattggcayggagcttccacattttgtgccattccctgtaggttttttttcttcccaagcaggcagttcgttcattgcaggtcgtgtgtcttgtctgtgttatacaaaagctgcatctttgctgtcccctcttccattgaagtgcctgtagtgacaacaattgcttggccctctctggcctgggagctggtgagctcakcacacccataatcwagatctgttttgcttacctgcttttctcctctaatgtgttgctctcccccatgaaggcagctttacagaaagmaactgcctttggattgaaatgagatcggaatgatttccagatggtaatttctgtatttgagggttttttgtttcttcttcctgaagcattcattggctgctttgcacagatcctcagtttatttacatatatactatggtaaatatgtcagtgatttttttttgttttgttgcattgcattattctgtctttaaaatatttatgcagcaatttgtctcaaataccaa

SEQ ID NO: 37515 - DNA, 600 bp, Chicken  19866894267571_4
aggtatcactgaaggattggcayggagcttccacattttgtgccattccctgtaggttttttttcttcccaagcaggcagttcgttcattgcaggtcgtgtgtcttgtctgtgttatacaaaagctgcatctttgctgtcccctcttccattgaagtgcctgtagtgacaacaattgcttggccctctctggcctgggagctggtgagctcakcacacccataatcwagatctgttttgcttacctgcttttctcctctaatgtgttgctctcccccatgaaggcagctttacagaaagmaactgcctttggattgaaatgagatcggaatgatttccagatggtaatttctgtatttgagggttttttgtttcttcttcctgaagcattcattggctgctttgcacagatcctcagtttatttacatatatactatggtaaatatgtcagtgatttttttttgttttgttgcattgcattattctgtctttaaaatatttatgcagcaatttgtctcaaataccaaaggaatcattgtttgtttcttttactacagcacagtgactaatccttccagtgtttaatttttgtttttcctt

SEQ ID NO: 37516 - DNA, 600 bp, Chicken  19866894267574_1
tgctacatttcccatgttagctgcatggttttggagcctgcagttgcagactctgggctgtgttctttcagcatactgccctgtgcagtgtgttacaggaaggcaaaaggacgccaaaaatgaagactcatacctgcctgctgtctgcccaacacatttgcccccatctttgtgacttatacagtttccttcatggtggggtctcggcacctgtgcaagctgaacactgaacatacttggcatgcgaatgtggaaacattgcccgctgccaggtttgtgcagttgccaagataaatatgrgttatatcctgctgctatttggtacacagggcttctctttggagtaattgagatttctgcgtaaaaatatcaatgcaaagatttgactccttttaaatggggtagtttgtggtataaaatgcacaatgttcgttatgcacagaagataaaacttttttttcctgactatccctttttgctaccatgccctttggaatgtgctttttttgctccactgtatctaactagcatctgaggtggttttccaaaagasgcccagcaaaaccatccagggtgggagtgcttggttggctttttgca

SEQ ID NO: 37517 - DNA, 600 bp, Chicken  19866894267574_2
aaacattgcccgctgccaggtttgtgcagttgccaagataaatatgrgttatatcctgctgctatttggtacacagggcttctctttggagtaattgagatttctgcgtaaaaatatcaatgcaaagatttgactccttttaaatggggtagtttgtggtataaaatgcacaatgttcgttatgcacagaagataaaacttttttttcctgactatccctttttgctaccatgccctttggaatgtgctttttttgctccactgtatctaactagcatctgaggtggttttccaaaagasgcccagcaaaaccatccagggtgggagtgcttggttggctttttgcacgcttttacatatgattgctatttatccaaatgtgagctctctgcatggtatacttctgatgatattagaaaaaaatcagaaataaaataaaggtgttattaaatgtgtagggataccatcgttatatctacaagtaaaaatcactgtctgaaatcacctcgaaggggtgcaggcagaaagaagctgctagtttggctggtggtttagtggatgttctaatgctgagctactaaataaatccccttttgccct

SEQ ID NO: 37518 - DNA, 558 bp, Chicken  19866894267574_3
tcctcgatttcctggtatggctttacaatgggcaagatttgagatgggagcgtacgattcgattcatgctttccccttgcacagctctctccagacatgttcgatgcaggaggagatcaaagcaagcaggctccagacaagtggctcaagtggcttgaaaaaactcaggggaataagggctggagcactagacatgagcctttggattttaaaatgagcactcctgccaaccgccatcctatggagagcaatgttaatggaaggctggtacattcccagtgacagtggctcgtgtgcatrcatttttttgcaggatgtctcagggctagttgaggaggggagaaaaatctcttctctctgaaatttgtcaggcaaaatctcaagctgggagcaaaccggtattgtttcaaacgacccaagcattgtttctctgatgtgcagagctaccaccattctattgttcttatttgtgctgcacattcacctttaggatttctctactcaatgcaaaagcaactcttcttttttgctaggaattaaaatggtgccagagttcaa

SEQ ID NO: 37519 - DNA, 600 bp, Chicken  19866894267577_1
aaccccatggttggaaaggggctgagttgggcagtgcatccccacactcagagcatcgctccttgggcaccatccatcctcggttcccagccggacacccccaaggaaccaatctccttttcctgggaggaacgatgggcagatttgagtgcagggttgaaatgcagtttataatgcaccagggaatatctgctctgtgaccttcatgcccaaggaggtgtgaaggagccctttggagacggccgtgctgcaggcagggtgccctatgggcacggcccctctccggggaccccatccatygcagctccatctggcaacaatccgaccctgcgaaggggatggatggggaggaaggcagagctttcccactgcacagcgtgtgctcagagctcagcccgcgcgggaggaaaaggggctcataaaaatatgattagatttattctgcctcatttcaacccagagcttgcttgtaattcaccgttaccgacaggggttcgccaggcagagaccccactgatcgactgctttccaggaggaatttcttggcgggttcccaactttgtgtcagatccttctgggttgtgttttggggtcggcttc

SEQ ID NO: 37520 - DNA, 600 bp, Chicken  19866894267579_1
gagcaataacccaactgtgagccacatcacagtcaggacatggggagcagcagtggggtttggagcagcccccagagtgggagatgggaacacaacactgagctctgctgaggtgatcgactgtgttggaaaacccatttgtccattggaaaaggacgagcccagcaaggcgagcgtgccgggctctgctcgtctgcacaaggcacacacagagggaaaagagaaattaattaaaaataaaagaaatggaaactaaaatgcatgctgaaccagcctgtctgagccccctgggctgccatygagatgcacgatgctcgccctgcgcacccgctcctcagccaataaatcctcctcttcgttaaacactgcaggtctcaattaattaaatgagcacaacaaccacagcccccctcagcaattagagaagtggctgggtaattagatggaatgttaatttaatttccaggagggagaagggaaggaaaaaaaaagaaagggaaagaagggaagcaggaaggggcaaatgggattacgtttgatgagaggggaattaaaagtcactcagtcatagagcaattaaagacaagtcctcagattgct

SEQ ID NO: 37521 - DNA, 600 bp, Chicken  19866894267579_2
ctctgctcgtctgcacaaggcacacacagagggaaaagagaaattaattaaaaataaaagaaatggaaactaaaatgcatgctgaaccagcctgtctgagccccctgggctgccatygagatgcacgatgctcgccctgcgcacccgctcctcagccaataaatcctcctcttcgttaaacactgcaggtctcaattaattaaatgagcacaacaaccacagcccccctcagcaattagagaagtggctgggtaattagatggaatgttaatttaatttccaggagggagaagggaaggyaaaaaaaagaaagggaaagaagggaagcaggaaggggcaaatgggattacgtttgatgagaggggaattaaaagtcactcagtcatagagcaattaaagacaagtcctcagattgctcctctggaaggatgggaccaccgggtggtgttgagcgatgctcaccccgatccctatgggacctcatggggacctcagggacaaaggacggcgatggggacacagctctgagctgagccgggtgtgcagcgcagctcagtgcatcccctccccatcactcagagctgaagggctgaaccctcc

SEQ ID NO: 37522 - DNA, 600 bp, Chicken  19866894267584_1
gattccccaaggtgtgaaaaagcagcagttgcagctgtgttcattagcactcctttaccacgttttagttactttctctggaggtgggtggtgagcagacagtaaaggagagcagcaagcaggctgggagggagaaatcccatggaataatttatatggcagcggtcagctgcatgaaatttgcattcaataagcaattacagacagatgataacgctgcagagagcacaagcgggcaaagagcttggagcagaatgtaattttacagcagcagaggttgcagacagcagcatgcatccygctgcagtctgggctttctggcaacaaacacccacacggtccaattatgtgggacctctgcttgccaaaaccatgggtgacacagcagatatcacttcagtccctcagtaagagagctgaaatgacacgaggaacagagaaacgtgccgaagaggtttcttccagcccttttctaccaggaagagcccccaaattacagtctgctcctgacagcttgggtggaaagcccttcagaccaattcctccttgctcagggaggagatctgtggatggttcccatggtgccakactgagcaactc

SEQ ID NO: 37523 - DNA, 600 bp, Chicken  19866894267584_2
agcatgcatccygctgcagtctgggctttctggcaacaaacacccacacggtccaattatgtgggacctctgcttgccaaaaccatgggtgacacagcagatatcacttcagtccctcagtaagagagctgaaatgacacgaggaacagagaaacgtgccgaagaggtttcttccagcccttttctaccaggaagagcccccaaattacagtctgctcctgacagcttgggtggaaagcccttcagaccaattcctccttgctcagggaggagatctgtggatggttcccatggtgccakactgagcaactcaaaccagycctcggtctgcatcttggaataacatccctcactccttaccagcttcttgctttaagtagaatacaacatggtttctgcttaaaagcttcctttgctcctcaaacagcaggcacttgtcctaaaggcgcatcattagatcagacttcttcagccagaggcgttgtaccctatgaacaaaacccttcttgagagtatattcaytacagctctgcacagtgcctaccctcagcacatcctgggctcgctttggaaatctgcaggctacagtaaaacaaacga

SEQ ID NO: 37524 - DNA, 600 bp, Chicken  19866894267584_3
ctgggctttctggcaacaaacacccacacggtccaattatgtgggacctctgcttgccaaaaccatgggtgacacagcagatatcacttcagtccctcagtaagagagctgaaatgacacgaggaacagagaaacgtgccgaagaggtttcttccagcccttttctaccaggaagagcccccaaattacagtctgctcctgacagcttgggtggaaagcccttcagaccaattcctccttgctcagggaggagatctgtggatggttcccatggtgccakactgagcaactcaaaccagycctcggtctgcatcttggaataacatccctcactccttaccagcttcttgctttaagtagaatacaacatggtttctgcttaaaagcttcctttgctcctcaaacagcaggcacttgtcctaaaggcgcatcattagatcagacttcttcagccagaggcgttgtaccctatgaacaaaacccttcttgagagtatattcaytacagctctgcacagtgcctaccctcagcacatcctgggctcgctttggaaatctgcaggctacagtaaaacaaacgaaagagacagaagaatagcaa

SEQ ID NO: 37525 - DNA, 600 bp, Chicken  19866894267584_4
cagcttgggtggaaagcccttcagaccaattcctccttgctcagggaggagatctgtggatggttcccatggtgccakactgagcaactcaaaccagycctcggtctgcatcttggaataacatccctcactccttaccagcttcttgctttaagtagaatacaacatggtttctgcttaaaagcttcctttgctcctcaaacagcaggcacttgtcctaaaggcgcatcattagatcagacttcttcagccagaggcgttgtaccctatgaacaaaacccttcttgagagtatattcaytacagctctgcacagtgcctaccctcagcacatcctgggctcgctttggaaatctgcaggctacagtaaaacaaacgaaagagacagaagaatagcaaattagttacgataatgactctgcctgcagtcaatggcttcccagaattactcttggaggcaaaattcattaaattctgacaacctgagagcctgactccattgctcccatgaaggtgctctatgctgtctgaggcaccttggtctaccagaagcctcagcccaggaccaacaggagacctctgtcctcccaacacagccacc

SEQ ID NO: 37526 - DNA, 600 bp, Chicken  19866894267585_1
ggctgacaaaaccaaaatgctcagtttaccattcctataaagattcaaccggccaccgtgaaaacctacaggatttcatcagctgtcagtttaatcacaaagaggaactctcaaagatcaattcatttggaggtgggggtgagcacataagtttgttcataattaaaagcttatttatttatttaaattataccaaatctgacattatccagagtgtatttgcaaataataccaggcatgctgctttgatagaacagtgtttctgcactgcttaagaataataatccagaaggaaagagygctgattcaagaatatattttaataattacagcagtaaaaacatattaagataagggtactgacaaatacattttcctggacaactaatgtacttctaaatgttccatttagaaacattacgtggggaataaaggacttaaattattcagttttccagttacctttcttcggtcctcttaacaagaaggagcaaaatgatctgaacaatgcacctcattaaaccaccctgtcagtaactgcaagatgtgatgcctcacgtatcagaaatcatactgccaagtctcacctgccttgcttga

SEQ ID NO: 37527 - DNA, 585 bp, Chicken  19866894267585_2
tcagttttccagttacctttcttcggtcctcttaacaagaaggagcaaaatgatctgaacaatgcacctcattaaaccaccctgtcagtaactgcaagatgtgatgcctcacgtatcagaaatcatactgccaagtctcacctgccttgcttgatacaaatttctaaaataaagaagtggacattgaatgttttcagtcacatcacagcgtatcaactttctagatgatgatcatttagaaaataatagcaacgtctaattcttaagtcacatttatacagcaaatgccaaaatattatytcatatatacacatggtcccctgaaactgatgctctttgtaggaactcctctctgggcgccccacagttatgccacacgagaaatgccacacaagaaataccatacaacgtggaggcagatataaccrtcagcttggtctcagctgcagtgaagtcacagagaaacccaggggatctacagggaacacgttgccaaacttcacagcgaggaaagatcctaaaacactattgaggagagcagagacaataaagccaattttgaacattcttcaagcaaacaagata

SEQ ID NO: 37528 - DNA, 457 bp, Chicken  19866894267585_3
tgccaagtctcacctgccttgcttgatacaaatttctaaaataaagaagtggacattgaatgttttcagtcacatcacagcgtatcaactttctagatgatgatcatttagaaaataatagcaacgtctaattcttaagtcacatttatacagcaaatgccaaaatattatytcatatatacacatggtcccctgaaactgatgctctttgtaggaactcctctctgggcgccccacagttatgccacacgagaaatgccacacaagaaataccatacaacgtggaggcagatataaccrtcagcttggtctcagctgcagtgaagtcacagagaaacccaggggatctacagggaacacgttgccaaacttcacagcgaggaaagatcctaaaacactattgaggagagcagagacaataaagccaattttgaacattcttcaagcaaacaagata

SEQ ID NO: 37529 - DNA, 600 bp, Chicken  19866894267587_1
gaattaaataaaacccaaaatgtagtaatatgatttttaggagctccatttgcctacgacaatcccaggatgcagaaggatgaggcatgggctggggggaagaaccaggcaggtctgcagggagaaggagctcctcacctctgacatatttatttgtcagaaatgtgggagttgttttttcctcagaagagttttttttttgtaggttaaaacttcagagaaagagagagagggtgggagagaacaacgcttggaaaggcagaattgccataaaaatgtcatggtttggcacagggacayccattttacctcaccttccccagtgkatggatttctttatccatgaaggatttcttctcgcagtttcactcttgaaatgaacgcggttgcagtgttcatctgtcacacacarcttcacttatcctgacaggacgttgactgcccgtgtgtgggagggatgcagcaggtgaagccctcctggaaaaggacagttttcccattgctcagttgtcacacatttcacaaactttaaattctaatcactgtttttaattacctgatatgagcttgatttcctgcatttgttatctttggaaattt

SEQ ID NO: 37530 - DNA, 600 bp, Chicken  19866894267587_2
aatatgatttttaggagctccatttgcctacgacaatcccaggatgcagaaggatgaggcatgggctggggggaagaaccaggcaggtctgcagggagaaggagctcctcacctctgacatatttatttgtcagaaatgtgggagttgttttttcctcagaagagttttttttttgtaggttaaaacttcagagaaagagagagagggtgggagagaacaacgcttggaaaggcagaattgccataaaaatgtcatggtttggcacagggacayccattttacctcaccttccccagtgkatggatttctttatccatgaaggatttcttctcgcagtttcactcttgaaatgaacgcggttgcagtgttcatctgtcacacacarcttcacttatcctgacaggacgttgactgcccgtgtgtgggagggatgcagcaggtgaagccctcctggaaaaggacagttttcccattgctcagttgtcacacatttcacaaactttaaattctaatcactgtttttaattacctgatatgagcttgatttcctgcatttgttatctttggaaatttgttttgaagaatagactgcataatag

SEQ ID NO: 37531 - DNA, 600 bp, Chicken  19866894267587_3
gtctgcagggagaaggagctcctcacctctgacatatttatttgtcagaaatgtgggagttgttttttcctcagaagagttttttttttgtaggttaaaacttcagagaaagagagagagggtgggagagaacaacgcttggaaaggcagaattgccataaaaatgtcatggtttggcacagggacayccattttacctcaccttccccagtgkatggatttctttatccatgaaggatttcttctcgcagtttcactcttgaaatgaacgcggttgcagtgttcatctgtcacacacarcttcacttatcctgacaggacgttgactgcccgtgtgtgggagggatgcagcaggtgaagccctcctggaaaaggacagttttcccattgctcagttgtcacacatttcacaaactttaaattctaatcactgtttttaattacctgatatgagcttgatttcctgcatttgttatctttggaaatttgttttgaagaatagactgcataatagagctttggttattctttacacttaaagaatacagtcatccagtgaacgttgcaaataacagtacaatttcccatatgaaacagttg

SEQ ID NO: 37532 - DNA, 600 bp, Chicken  19866894267590_1
tgattgataacttttgcctacctgcttcacacgggtcccacaattcagcttcttttctaagcagtttgcagtttagtctttttaaattcttttaattatacagaaaataaaaatattaaccatgataaaccatgaaatttgtctaagcttcattttctttgactgtcatgtataattttttgccaccacataagagtaatttgcaaagaagattaatgtggagctcagtgaatccatatgatttttgtacatacactcaattacactaaaatgaatcacacacaaactgcatgcagtacwgctackgagtgacaaaaaacgtatgggacttcttgaaaaagcgtgcttcagtcaaatcaggtcaaaaagactttgtatatccatgcttaataagctgaaaatggagtaataaactcartgcaaagccaggaggtattacaaaaagctcaaactggtaagcctacatgacttacaaatgagaagacatcaatcagattttgcacaacattttgttacaagtagtttacagagcagcaagctgctgcttctagcccaccaccctcagcagtaggaaaatgacagagatgtattctgacacac

SEQ ID NO: 37533 - DNA, 600 bp, Chicken  19866894267590_2
ataacttttgcctacctgcttcacacgggtcccacaattcagcttcttttctaagcagtttgcagtttagtctttttaaattcttttaattatacagaaaataaaaatattaaccatgataaaccatgaaatttgtctaagcttcattttctttgactgtcatgtataattttttgccaccacataagagtaatttgcaaagaagattaatgtggagctcagtgaatccatatgatttttgtacatacactcaattacactaaaatgaatcacacacaaactgcatgcagtacwgctackgagtgacaaaaaacgtatgggacttcttgaaaaagcgtgcttcagtcaaatcaggtcaaaaagactttgtatatccatgcttaataagctgaaaatggagtaataaactcartgcaaagccaggaggtattacaaaaagctcaaactggtaagcctacatgacttacaaatgagaagacatcaatcagattttgcacaacattttgttacaagtagtttacagagcagcaagctgctgcttctagcccaccaccctcagcagtaggaaaatgacagagatgtattctgacacacatttga

SEQ ID NO: 37534 - DNA, 600 bp, Chicken  19866894267590_3
accatgataaaccatgaaatttgtctaagcttcattttctttgactgtcatgtataattttttgccaccacataagagtaatttgcaaagaagattaatgtggagctcagtgaatccatatgatttttgtacatacactcaattacactaaaatgaatcacacacaaactgcatgcagtacwgctackgagtgacaaaaaacgtatgggacttcttgaaaaagcgtgcttcagtcaaatcaggtcaaaaagactttgtatatccatgcttaataagctgaaaatggagtaataaactcartgcaaagccaggaggtattacaaaaagctcaaactggtaagcctacatgacttacaaatgagaagacatcaatcagattttgcacaacattttgttacaagtagtttacagagcagcaagctgctgcttctagcccaccaccctcagcagtaggaaaatgacagagatgtattctgacacacatttgataacagcagagcgttagcaaaaatagacccttacagaccacttgcagcagccaggggaagatagaagcataagaagcttgctcagcaggcagtgtaattgggaaatgagggg

SEQ ID NO: 37535 - DNA, 599 bp, Chicken  19866894267594_1
  misc_feature (1)..(47): n is any nucleotide
nnnnnnnnnnnnnnnnnnnnnnnnnnnnnnnnnnnnnnnnnnnnnnntgccacccccacacagcctgcctggaacatggtgattctgcagggctgggcctgccctgtaatcagtgataaaaatctattctttatcactttcttattcagcataaaactggtggagctatttgtcttagcaatattggtttatccatcagcatggagtcatctccctttgcttttcgtcggcctgttgtcacagtactgttgtggttggtcttcctctctgtgatactgatggatttaataatgttttttwatcttaaatatactgtctttgtctctagtcacctgaataccaactaacagtgtcaagatacagtgaggtactgtatgtaggtcgaaagagaaagtttcttttctcttatgtaagtagcaaacaccaaattaaattaaagcctcttgagctgctgggtttttggtggcttttttggtgtgtttttttttcctcatccttgtgctttgtgctgatgtgagtgaatcttggtgtctgcacattctcatactgatggagttgggtgtctatgatcccctggcactgaagttctgtgccaaatg

SEQ ID NO: 37536 - DNA, 600 bp, Chicken  19866894267597_1
atttactgtgttacccctctggtatctccagagagcgttgtcttacacaaatacagtcagcccaggcactctgttattataatgaattttcctgaaagagacatacggcgctcagaaaatggccagcactgcttttagccagcacgtttccttgcaggtttaatagatgttcaaaataaaccacccaaaccatcctgccagagaggaattgtgtttatcccccagctgtaaggacccgcctgctctttagataatcaatttccttgaatttctaataacaactttaagagcaagcaaggytcccagaccctgcaattcaacagttggaaatcagctataatatgctttaaaaataaagctcgtcattccctatacgtcagacaccgcaagctgcaaaataagatacaccgactacctctgctcccgtggcatccaacgctccaattaaaagtgtgtcagcacttctttcataaaactccaatgctgagggctctctaacagctgcttaactttatgtagcataaatggtcgcagtacagcagcaaggatattatgtgcaaatggtccctgctgtgtagaaaatgagcctggaaagcccaa

SEQ ID NO: 37537 - DNA, 600 bp, Chicken  19866894267605_1
tgtttcaacatgctcatgctaggggcacgcagtacatcagcttccttcgttttggaagcctgtgcgatggtgctatgaatcaaaacttctccagttttacagtcttcagcaagttcctgcgttgagattgcgcagccttgtaccaacatcgggtcttggcctgatgcctcggccgggagctgcaaaggcagagagctggctgacttctacggcagcactgtagctattaaaatgtaaggaagtttgatcaagcatgatctcaatgcctttttcctgcaacaccccttcttgtgttcgcastgtgtttgttagtgtctcaaagcccttagtacagcaagatccagcagtcagaaagacaaagaaacacagcccagaaaagcaactccttggcatttgcctttgaagaaacatagagcatgaaaggattttttcttgcttcctcttgcctcgcttcccccaatctttgttattcccagcaacgactgcctttatttgtttgcctcttccccaaacgctggacagaccgaccggggcttcggtggggagcggtccagccctgctgctagagagggtgaaacaatggggctttaagtgggcttt

SEQ ID NO: 37538 - DNA, 600 bp, Chicken  19866894267610_1
tttgtctaagcttctgaaaagtgttgtgctgcttctgtcccagatggactaacttttccatgggactgagtggtgaggccctcacaaaatctagaggcacagatccaactgaaaaccaccacccccttttcatcagtgaagatactgaagcaaggacatcaacctgtttgtgagggatatcaagtattcatgcatgtcactgatctccacagagatggtaaatgccttcgcccaccttgtacaaccaatttgaaagagtatatgtaattcaaatggctctgattgtctcaccaatctgcrtggtttattaataactgttctcagatcctaagaaaacacaagtatgtgtcactcagtagtggaacagatgaaggcaaaatggagaggggggaaraaaagaagtgacagtacatacaactgtggtcagctctctggagtagttgtctttatcttaggaagactgtttgtttgtttgttttcctgaggcaacatccacaaattcttacaggtggcagcagcgaagccagccaggggcttgccttcctcttgtgttacttgactctgctggtagtcatagcattgcctcactggatactgatt

SEQ ID NO: 37539 - DNA, 576 bp, Chicken  19866894267610_2
aggcacagatccaactgaaaaccaccacccccttttcatcagtgaagatactgaagcaaggacatcaacctgtttgtgagggatatcaagtattcatgcatgtcactgatctccacagagatggtaaatgccttcgcccaccttgtacaaccaatttgaaagagtatatgtaattcaaatggctctgattgtctcaccaatctgcrtggtttattaataactgttctcagatcctaagaaaacacaagtatgtgtcactcagtagtggaacagatgaaggcaaaatggagaggggggaaraaaagaagtgacagtacatacaactgtggtcagctctctggagtagttgtctttatcttaggaagactgtttgtttgtttgttttcctgaggcaacatccacaaattcttacaggtggcagcagcgaagccagccaggggcttgccttcctcttgtgttacttgactctgctggtagtcatagcattgcctcactggatactgattcctcttcatgtaccctgtgttgatgatatgtgcaaaatcttctgacactgtcccccccaacattctcatg

SEQ ID NO: 37540 - DNA, 600 bp, Chicken  19866894267616_1
tcaccattctttcacagaattcctaaggaccaggtgtcttcaatgttcaagatctgtcaataagcataacctctgcatcttacaaatcatacttctgaaagactaaaaaaaaatatcacatgattccatcatattttttaaagcaattttagaatatgccaacagttataattcctaatatgaattaaagacagactaattcttctgtcacgctagcagccatttataacagtagtataaatgaaacaatatgtctttgttgaatattctttaaactgcaaaatttatttttgttattgktgtcctaataataggaatgtgtatatattgatcagttattttggtgctttttatagctgtgaaaaacttttcagaaaaatgatgacattctcttaatataaactaggagactaccagagtgtctatataaatcagaatatatatttcttactgagttaactacgttctgcctagcttttcagaaacatgatctaaaactctgaggtatcctaagtgataatttctgctttttacataagtttctaactacattgtaaaaaaagaaatggacggctatgtccattttctgtttccaagtaa

SEQ ID NO: 37541 - DNA, 600 bp, Chicken  19866894267625_1
ctctgtacctgcaactaagcccatctcccactattccctttgatgacttctcttcagctgctgcagaggagaaatgctcatatcagcaaacagatggcggctgaggcatgtagcataaaatatatttatcaaggcaaacagctgtagcccatttcatcccgaagatttctattaaaagttctctggagctacaagctgctccgacttgcagccggaataaagccgaggggacaaatggcttttgcagagtgtttctttccctcccttagctcttttctttgcagcccgaagaaagcccarccctggcttggaggagactgggcaccgtgagcagccctgggtggctgggatgtgaaagctgagagcaccactgcgtgtgtccctgagccaggggccgggcacgccatgcacggagctgcagactggatgggttttgcatccagcaatgcctctgctcgagcctgggtcactcccagaccccaaaggtgattttctgctccttctatttcaccgttggttttattttcattcttaagcaaccttggtgctacattgacaaaaaagagatttggaggaaatgcagcattttccctcaacttg

SEQ ID NO: 37542 - DNA, 600 bp, Chicken  19866894267627_1
ggattaaagaagaaatgcatcagaaaccaaaaaatagtcgctcaaggacacacgtgcctacatttatactcaaagaaggaactaaatgatcagagccaacatcacgcagttctttgcctcattgcagagcgctaccccataacatacctcggggctgtgctgaatgggtaggagcacgctctgatcccctcctgtgctgctggacgtgacatcaccgtggctttcgtgagggaggtctgcactggtggagctctgaaagaagccagacgttcccattcagctttgctgctccacctaaaygggaaaactccagtcctggagaaaaaaaatagtccacaaacccaagcaaacaagaactcttgaaataaccaaatcccaaaggcctgcaagagttaaaaatcaggaggaaaatttattggtagcttagtactccgggccaatgaaaacagctgtttggatgcagggattaccttccaaattaatgaaaaactagaagcacaatggacacttcttgttcaatggtcagaaatccagacagcaaacagcactcggagagaaggcactctgacataggacaaatagctccttactcacacagtg

SEQ ID NO: 37543 - DNA, 600 bp, Chicken  19866894267628_1
gaaaagaaacaaaactgatgatgaagcaggctcatgtatatagatattcgccagaatttaaaagatgcagtaatttcaacttgcagctcatctctagttaagtgtaatttacttttgtccaaattagatcttagtcttcagagctcagagtttctgttggtgtttttgtttttttcagctatgataatctctggcattggctgtgttcagatggttcatctgtgctacagctgagggaagacaggtttaagtggaggcaatgagatacagctgggatccttaaattacttttgaccagayrtgaattaggcccagtgacatctcatgactggcattttggcctctctgtatgaaaattctatcaagttttctatcaagtctatcaagaagcaaacaagtttatttgaggctttgaaccaaggccaacattcacagccttttctgaattgcagtacttccacagattacagagactataagtgaaaaagtgtgcttttttttactgaactcatttatcacagttgtgaacttgatttgaattcctgttgaagaccacagaagtgtggagaacgttcatatatttctacgtttcatttaatt

SEQ ID NO: 37544 - DNA, 600 bp, Chicken  19866894267628_2
aaaagaaacaaaactgatgatgaagcaggctcatgtatatagatattcgccagaatttaaaagatgcagtaatttcaacttgcagctcatctctagttaagtgtaatttacttttgtccaaattagatcttagtcttcagagctcagagtttctgttggtgtttttgtttttttcagctatgataatctctggcattggctgtgttcagatggttcatctgtgctacagctgagggaagacaggtttaagtggaggcaatgagatacagctgggatccttaaattacttttgaccagayrtgaattaggcccagtgacatctcatgactggcattttggcctctctgtatgaaaattctatcaagttttctatcaagtctatcaagaagcaaacaagtttatttgaggctttgaaccaaggccaacattcacagccttttctgaattgcagtacttccacagattacagagactataagtgaaaaagtgtgcttttttttactgaactcatttatcacagttgtgaacttgatttgaattcctgttgaagaccacagaagtgtggagaacgttcatatatttctacgtttcatttaattt

SEQ ID NO: 37545 - DNA, 600 bp, Chicken  19866894267629_1
gtgataagaaagtgaaaaacaaagttttgtgacttctttacccttaaaaaaaattctgttcatcccatggagcagtgtatgtatgctaaaaattcctgtatgcattctttgtcttccaaatagatgcagaaaatggtttgaaactttttagtctgaaaataacaaaaaagaacttgtgatttgtccagtgttaaggcattaggctttctaagaagtcaataattaggaaagcagaaggatgttttattttgtttcatttttcctgagaggtcacattcaactgagcaccaatattgttgytattcctccatcatcaygacaacagaccaaatttttagggtatgagaagtgtcttgctgaaatacctgatgttcccacttgttcttgaccacacactactgttatgccaaagcacacactagttcttcatcctccctcccacccggctcggcagtgcaataaatcatgtcaccacctccttgctagtgtcagtgtaatgtcagcccaattagttcaaactgctgacgaatgtagtttgagataaactggtcaactttgcacagcaacaaatacagcatcactcctgcagaagaggggagg

SEQ ID NO: 37546 - DNA, 600 bp, Chicken  19866894267629_2
aacaaagttttgtgacttctttacccttaaaaaaaattctgttcatcccatggagcagtgtatgtatgctaaaaattcctgtatgcattctttgtcttccaaatagatgcagaaaatggtttgaaactttttagtctgaaaataacaaaaaagaacttgtgatttgtccagtgttaaggcattaggctttctaagaagtcaataattaggaaagcagaaggatgttttattttgtttcatttttcctgagaggtcacattcaactgagcaccaatattgttgytattcctccatcatcaygacaacagaccaaatttttagggtatgagaagtgtcttgctgaaatacctgatgttcccacttgttcttgaccacacactactgttatgccaaagcacacactagttcttcatcctccctcccacccggctcggcagtgcaataaatcatgtcaccacctccttgctagtgtcagtgtaatgtcagcccaattagttcaaactgctgacgaatgtagtttgagataaactggtcaactttgcacagcaacaaatacagcatcactcctgcagaagaggggagggagcatctttctgccaa

SEQ ID NO: 37547 - DNA, 544 bp, Chicken  19866894267632_1
acttgtttctaagttgtcaaaaatctgtacagtctttgctgaataatgtgttactttcagtgcctcgtgcaccaggaatggttctggtacctttcctgctccctggtgtgagagtagcagtctatcagacagaaactgtttatctgggatattaatgatataattaaggaaaacaaattccttccaaaactgaagagggaatggttatatatgcattctattttgagcatacagcatacatacattgtctgagtaatcaggcaccaccaccatcaggagtgatgcaggataggagctatyggtggaaagccaaatgatgctgctttccttcatgtagcttacagctctgcattgcattaatatcctgataacctcagtaagttactaactgcygtaggctatttgcaatgtgaagccaggggatttaggagaacatcatgctcctggctgctgtgaggactggcatttcagaagagcatggttatgggctgctgccagaactgatgtgatttctgtgtgcgacactgcccaggagtaatggagg

SEQ ID NO: 37548 - DNA, 451 bp, Chicken  19866894267632_2
tcctgctccctggtgtgagagtagcagtctatcagacagaaactgtttatctgggatattaatgatataattaaggaaaacaaattccttccaaaactgaagagggaatggttatatatgcattctattttgagcatacagcatacatacattgtctgagtaatcaggcaccaccaccatcaggagtgatgcaggataggagctatyggtggaaagccaaatgatgctgctttccttcatgtagcttacagctctgcattgcattaatatcctgataacctcagtaagttactaactgcygtaggctatttgcaatgtgaagccaggggatttaggagaacatcatgctcctggctgctgtgaggactggcatttcagaagagcatggttatgggctgctgccagaactgatgtgatttctgtgtgcgacactgcccaggagtaatggagg

SEQ ID NO: 37549 - DNA, 599 bp, Chicken  19866894267634_1
  misc_feature (1)..(53): n is any nucleotide
nnnnnnnnnnnnnnnnnnnnnnnnnnnnnnnnnnnnnnnnnnnnnnnnnnnnngaaggtattatccagcatcttcctgaaaattcttaaagatggggatacagatatgtacttcattgtcagcaacatgcagatcatgttttccattcattttagctcaaaaaattgtgaaaacccaggggcaaaaaagtgtaccaagctcaactagtctcttcccaaagcagattctcaaagatccttctagaagactccacccagcacaagtgctttccatcttcagcttacatatttcacaaaattygcatgcttcctttaatgaagtatcagttcagaatgatgtgcttgaactttagaaggcacagaaatagctatgacaggtatccgtgttcacatcgttatctcagttgagacagctttgtatcagcacgtttcaatgcgtaatcggtacaaaaacagattttcttccttgaaatgccaccacatgctaaaacctaatatcaaaacacagaagttgttgctsttccaagataatgttttcacactaaaccagttctaaaaagtataagaacttttaatgctggaacagaagaacactgaagt

SEQ ID NO: 37550 - DNA, 600 bp, Chicken  19866894267634_2
gcagattctcaaagatccttctagaagactccacccagcacaagtgctttccatcttcagcttacatatttcacaaaattygcatgcttcctttaatgaagtatcagttcagaatgatgtgcttgaactttagaaggcacagaaatagctatgacaggtatccgtgttcacatcgttatctcagttgagacagctttgtatcagcacgtttcaatgcgtaatcggtacaaaaacagattttcttccttgaaatgccaccacatgctaaaacctaatatcaaaacacagaagttgttgctsttccaagataatgttttcacactaaaccagttctaaaaagtataagaacttttaatgctggaacagaagaacactgaagtagtttcatccctccttctttttaagttgtatccagacacattggacattccaattcacaatttcaaacacttatattccctaatgcaaatacctgaatggctgctatctgaaagtacagcagtagagctctggtacacaataaacaatcttaaacttatgaagaaacaaaatctttcagaaaaaaaaagcttgccattgaatttcttgagtgtctgctca

SEQ ID NO: 37551 - DNA, 599 bp, Chicken  19866894267639_1
  misc_feature (1)..(48): n is any nucleotide
nnnnnnnnnnnnnnnnnnnnnnnnnnnnnnnnnnnnnnnnnnnnnnnntgggtaacaggctcagttaagtttgctcattcagccagctaagagggagagttttctcatctgccctgctatgtttaattcatccacacatgccttccaattacagatggaacgataaatagaacaggatgctgggggtggggacagcctacagcccccaggactaaattccctgaaaacctgtgacttgcatgctgctgggggctgttgtcctggggagagcccactggcactgctgtctccgagctcttstacattttagcccaaactcaagcctctttcttttcagaaccacttttgcaggtggttctgaatgcacagagtgatgcttccacgccagcctctgagtcagaaaaagcgcccagcaaaaattaatgcagcattcctgccttcatcaggactcccagacttgcccccacatttttctggctcttaacctttgcaaaaatggcatcctcatgggaagcattgtgctacagaaccaaaggcaagwtggagagagctctccttctcagggtgagctcacagccatgtgcctgacttgttggaaa

SEQ ID NO: 37552 - DNA, 600 bp, Chicken  19866894267639_2
gctgctgggggctgttgtcctggggagagcccactggcactgctgtctccgagctcttstacattttagcccaaactcaagcctctttcttttcagaaccacttttgcaggtggttctgaatgcacagagtgatgcttccacgccagcctctgagtcagaaaaagcgcccagcaaaaattaatgcagcattcctgccttcatcaggactcccagacttgcccccacatttttctggctcttaacctttgcaaaaatggcatcctcatgggaagcattgtgctacagaaccaaaggcaagwtggagagagctctccttctcagggtgagctcacagccatgtgcctgacttgttggaaactcatagtgactctgatgaacgaggacaggaggacaaggaggccatgagtctgcactccaggagccagccggtccaagggcagcagattccattcaaagtggggaagtgaatgaaagtccctggttcaaaggagtttcagcatgagttttactttgtttaccctcttgtaaagctatttgttacttcgataatccataggaagtgggatcatttctctcccggcatgtcaaattaaataaac

SEQ ID NO: 37553 - DNA, 600 bp, Chicken  19866894267639_3
gacaactaagatcatctagtacaattgtgaacccatcaccaccatgcccaaaaaccacgcgtctcagtgctacatctacatggttcttgaacacgtccaggaacagtgactccaccacttctgtgggcaacctgttccagtgtttgaccactcgttctgagaataaatctttcctaatatccaacctgacctcccctgctataacctgaggccattacctcttgtcctacctgggagaagaggccgactcccaccttgatacaaacttatttgcctcacctgagagggggattggcaacmgggtwgttttacaggtacgatccctgtatcagacacagcaaaaccaatargaaagatgcccctgcaaaagtgtcattctccctttgcacagtgatgggtrtgttggtataaactgtgttatatttggttacagttatgcctacaactccgggcgtcacactgcatgcatttgggggactttcttaggaagtgctgttctgttggtagtctgttcactgacatgaaatatttggacaattagtgggctcactggatgacccagttcagacccatttgtttccttgtctcatctcgcttaga

SEQ ID NO: 37554 - DNA, 600 bp, Chicken  19866894267639_4
ctaagatcatctagtacaattgtgaacccatcaccaccatgcccaaaaaccacgcgtctcagtgctacatctacatggttcttgaacacgtccaggaacagtgactccaccacttctgtgggcaacctgttccagtgtttgaccactcgttctgagaataaatctttcctaatatccaacctgacctcccctgctataacctgaggccattacctcttgtcctacctgggagaagaggccgactcccaccttgatacaaacttatttgcctcacctgagagggggattggcaacmgggtwgttttacaggtacgatccctgtatcagacacagcaaaaccaatargaaagatgcccctgcaaaagtgtcattctccctttgcacagtgatgggtrtgttggtataaactgtgttatatttggttacagttatgcctacaactccgggcgtcacactgcatgcatttgggggactttcttaggaagtgctgttctgttggtagtctgttcactgacatgaaatatttggacaattagtgggctcactggatgacccagttcagacccatttgtttccttgtctcatctcgcttagagatgt

SEQ ID NO: 37555 - DNA, 600 bp, Chicken  19866894267639_5
aaaaccacgcgtctcagtgctacatctacatggttcttgaacacgtccaggaacagtgactccaccacttctgtgggcaacctgttccagtgtttgaccactcgttctgagaataaatctttcctaatatccaacctgacctcccctgctataacctgaggccattacctcttgtcctacctgggagaagaggccgactcccaccttgatacaaacttatttgcctcacctgagagggggattggcaacmgggtwgttttacaggtacgatccctgtatcagacacagcaaaaccaatargaaagatgcccctgcaaaagtgtcattctccctttgcacagtgatgggtrtgttggtataaactgtgttatatttggttacagttatgcctacaactccgggcgtcacactgcatgcatttgggggactttcttaggaagtgctgttctgttggtagtctgttcactgacatgaaatatttggacaattagtgggctcactggatgacccagttcagacccatttgtttccttgtctcatctcgcttagagatgtgtagttgtagagaccarcttgtatttggagaawgtcttacagtgt

SEQ ID NO: 37556 - DNA, 600 bp, Chicken  19866894267639_6
gaacagtgactccaccacttctgtgggcaacctgttccagtgtttgaccactcgttctgagaataaatctttcctaatatccaacctgacctcccctgctataacctgaggccattacctcttgtcctacctgggagaagaggccgactcccaccttgatacaaacttatttgcctcacctgagagggggattggcaacmgggtwgttttacaggtacgatccctgtatcagacacagcaaaaccaatargaaagatgcccctgcaaaagtgtcattctccctttgcacagtgatgggtrtgttggtataaactgtgttatatttggttacagttatgcctacaactccgggcgtcacactgcatgcatttgggggactttcttaggaagtgctgttctgttggtagtctgttcactgacatgaaatatttggacaattagtgggctcactggatgacccagttcagacccatttgtttccttgtctcatctcgcttagagatgtgtagttgtagagaccarcttgtatttggagaawgtcttacagtgtcactgagtatttcaggtggaagacagggtctttaagaaaaggttttatta

SEQ ID NO: 37557 - DNA, 516 bp, Chicken  19866894267639_7
cctgtatcagacacagcaaaaccaatargaaagatgcccctgcaaaagtgtcattctccctttgcacagtgatgggtrtgttggtataaactgtgttatatttggttacagttatgcctacaactccgggcgtcacactgcatgcatttgggggactttcttaggaagtgctgttctgttggtagtctgttcactgacatgaaatatttggacaattagtgggctcactggatgacccagttcagacccatttgtttccttgtctcatctcgcttagagatgtgtagttgtagagaccarcttgtatttggagaawgtcttacagtgtcactgagtatttcaggtggaagacagggtctttaagaaaaggttttattaactggaaactatccaatgcaataagcaaaaacttctgcttgagtaagaagctcagacaaatgccccagataaataccctttttttcctaagatcttattttcctggtcagaacttagcaacaattcttctacagttta

SEQ ID NO: 37558 - DNA, 500 bp, Chicken  19866894267639_8
caaaaccaatargaaagatgcccctgcaaaagtgtcattctccctttgcacagtgatgggtrtgttggtataaactgtgttatatttggttacagttatgcctacaactccgggcgtcacactgcatgcatttgggggactttcttaggaagtgctgttctgttggtagtctgttcactgacatgaaatatttggacaattagtgggctcactggatgacccagttcagacccatttgtttccttgtctcatctcgcttagagatgtgtagttgtagagaccarcttgtatttggagaawgtcttacagtgtcactgagtatttcaggtggaagacagggtctttaagaaaaggttttattaactggaaactatccaatgcaataagcaaaaacttctgcttgagtaagaagctcagacaaatgccccagataaataccctttttttcctaagatcttattttcctggtcagaacttagcaacaattcttctacagttta

SEQ ID NO: 37559 - DNA, 600 bp, Chicken  19866894267642_1
catgtggaaaaaatgacacccactgacgttcactgacttgctgaaagttgatggaggccaaacagtgactgtgagcactatgatatggtgggtggtgcatttcagcagtggcaacagcaacaatgaatcaccattgatggtacagatttgtatgaactcagtatgcaggctcttgctcattgctggtgaaagtccatagctcatggtggtgactgtgttgaaaaagtgttttgtagctgagaatttcaatattgttattgagctctttgtatctgttgcagtttccatggagataaatargaagcattactttcatagggaccctatgtatgttaagaaaccaagataaaattcacttaatttgtttaaagattgtaaaaagttttgttcagaattcctgtagcacagctctttacttgtagttgtgagagtgctagtctcagttcagtacagaaaatagtattaaacacaaatatgttgtggtaggtcaactatatgcgctctcttggtgaaatacaaagaaaaaagaatttaactcctacctagtgaatttgtttctgaattccaaactgcaggtggctcccttggtctgctggttaa

SEQ ID NO: 37560 - DNA, 436 bp, Chicken  19866894267648_1
tactttttatttttggttttggtttttgtggctttcaggaaaaatgtatcgtggccataacccctgtatatctatcttctaattaaaatagaatcagaagcagtgaacttattctctacaaactggattagaaattttgttcttcagtcgtgtcccaaacaagaagcaactgaaagagacaaaagcaatagctaaatttatgtatcctagaaaatatttctacttaataagaagtatctactgaattatactttcagaattcttagtattattttaatatgattagctattttttttttwaaaactaggttgctgtttaatccctggaagacattttcttcacatctacaccatattttaccctctggaaagcaatggcaaagatactgtaaaagcattttgcttttctcagcagcatggtcctccaattatctta

SEQ ID NO: 37561 - DNA, 600 bp, Chicken  19866894267651_1
atggacctggagattgagtcccttcctgagctacaccctaacttgctgacctgtcacccactcctgagctaatggtggatttcctggagtgacttcaggtcaggccagatgagccctggatgactgatagggcctgccgtggtaaccatactgccctgctcacctgcttcgggagcagtaggactgcatcccactgctggggtcacactggagtgccctcagctccccgttcacctgtgcacagggagcagtgctgcttctgctgctccctggtaccttgctcctgaattcaggctgccygaagctgcaggttcattctggaaaagcaatcttgcctagctactgttgctgttgattagcttttataaagggctacaaacacaggcatttcaaagcaaaattcaagtgcagtgttcattaagactgctttcgtctgcagtccccattcaaatcacctacaccgcgacgctaccaaggcctgccttaacaatggttatttagggtgctgtttcctgtcagagttacaccactttgcatttgcattgctgatgagaagaatcttgccctccttcatctgccacatgctgctgctccctcagc

SEQ ID NO: 37562 - DNA, 600 bp, Chicken  19866894267651_2
cttgccctccttcatctgccacatgctgctgctccctcagctcaccgatctcacagagggctcacggatagttgctgggtgatcagtgggcttacatgacttgcagtcatgcatctgtgtagatctggcacaagaaaggagacgggaacacctgagggtgtgagaaggtaacagcctgtagttggctggattaggtgaaattgtgctttggggtcaaattacatcacagagctaaatcagcttgtcaaaaggagatcttatttcctcttcccatctcactccttctaccctttctcatcygcaacttttcccctgcagtttacttctatggcctgccagattctactgtcttctatagattctgttcgctagtttggcagaaacacagccatatattccagccttctgttggaagggtgaactgatttggcttacagtaggatctagcacacaccagagacaaccaaaggtacataacaggaatgagagtgaagttttcatcttcagcattcattagtgttcaaaccaattgtggatgtctcttaccatttttgagaagcttcaggtaacaccaaactcctacctcctttccctgcattc

SEQ ID NO: 37563 - DNA, 600 bp, Chicken  19866894267651_3
ctctaagctggcacaacagaaacagtagtaaacagagtaagatgtggtgaacgtaggattaaaccttccagcagcagtgacccattctgttgactcagcctgtcgtgtcccactgcacctatatgaaagccaggatgggagcatatttttcatgcacagatccataacagttgtgtcacaccacctgtaggactatggcagttctgagaacaaaattaagcaaccaccttatttaacaataaggtgctctagagtgtcactgcagacagaaaacactaacagagaattgcagttatacayacaattaatacwcccaggacaactcaacacagctgcttaccatcttcctgtgacagcctttgctgtcatctagttactcattgggtggatctagaccatttgagcccgtggctgactaatcttacttcctcctcctgccctctttgcaatcttataataaatcttcctgctattacaaaactttcaaaacctagattcgttcttttacataaaaacacgttgatattttttgttacatcttgcagagtgtctgttcaacaggatactcagcaaaaaaaggatgtatgtacgctgaatgga

SEQ ID NO: 37564 - DNA, 600 bp, Chicken  19866894267651_4
acaacagaaacagtagtaaacagagtaagatgtggtgaacgtaggattaaaccttccagcagcagtgacccattctgttgactcagcctgtcgtgtcccactgcacctatatgaaagccaggatgggagcatatttttcatgcacagatccataacagttgtgtcacaccacctgtaggactatggcagttctgagaacaaaattaagcaaccaccttatttaacaataaggtgctctagagtgtcactgcagacagaaaacactaacagagaattgcagttatacayacaattaatacwcccaggacaactcaacacagctgcttaccatcttcctgtgacagcctttgctgtcatctagttactcattgggtggatctagaccatttgagcccgtggctgactaatcttacttcctcctcctgccctctttgcaatcttataataaatcttcctgctattacaaaactttcaaaacctagattcgttcttttacataaaaacacgttgatattttttgttacatcttgcagagtgtctgttcaacaggatactcagcaaaaaaaggatgtatgtacgctgaatggattcccacagtaa

SEQ ID NO: 37565 - DNA, 600 bp, Chicken  19866894267651_5
tggatctagaccatttgagcccgtggctgactaatcttacttcctcctcctgccctctttgcaatcttataataaatcttcctgctattacaaaactttcaaaacctagattcgttcttttacataaaaacacgttgatattttttgttacatcttgcagagtgtctgttcaacaggatactcagcaaaaaaaggatgtatgtacgctgaatggattcccacagtaacatctagactttacactggaaatatttatcagtaaatcccagggtactttaaaagaactgttcttatccttayacacaaatggggaaactgaggcacagaagtgcagttttgcacttagcagtagtcataacagccattgagcaaattcagaatgattttaacaggcagctctggctgaaaccatactgagaggagacaccacttggatgttttacctacaccagacatcagaatgggatgctgtaagcagaagccaaaactgtaggaaacacttttgattgtcattatttatttaagtgactgcttgaatataggcataatgttacctacttgaaaaacaataatcaacataagcacaaattatttaggttg

SEQ ID NO: 37566 - DNA, 600 bp, Chicken  19866894267655_1
tttttagaaatttcaccaggtgatacttaattaaaaaaaaaaattgaaaagaggaaaggaggataagggggaaggggaagaacgggggttaatttattggctagacagaagcaaaaaaacagaagaagaaaacaatcaatacaggaattattttttgcagattattaaatatccttgtagacatcagactaaattaaatgacaaaggggtcacattcagtggtgcatgtcactgttgtgatatatgcaccaagactttgatgacgacattcccctggcaagaaagatgacaaaaatatgyaaatggtctgaattttaaagaagattgcaattgaagtgctaaaatgtttcataataatgtgactgtaaatctctttgggttgactagatatagaaaggctatcatttctagaactgttttttctagaagaacctatgatttattagttaaccttggactgattcaaagcatttcatttattatcaaattatttgatatttcttcctttctatcagataaatttcattcacttgaacgcacatatcaagagattttatttccaaacaatcaaagtttcaaaaactctgcaataaaagatta

SEQ ID NO: 37567 - DNA, 600 bp, Chicken  19866894267655_2
agtttgacagccttttaaaaagccatcagtaatctaaactcttggatgcatagtctggaattggtcagccagcacaaattctcagtcaaatgtctctctcaatctgctgaatgtttcctgaggcttcaaccaagagaggaagggtaaggactaaaagcgttgttcaaggtcaaacattcttccctcattagaactggcatttggttagaaaccccaagtaacaaagaactaacaaaaaacttgaaaagccccagagaaatccagaatcttttaaagacttgactttaaaaggtaaagatytatctgcacccaaatgccaatgtaaaattaggtgatagctaacaacctccagttcttttttgaccacgttcctcctttgcttttttcagagtgctggggctataagctttatgcagtgatgagcagcctataggcagccagatcccactgctgcctttctaaaaactgtgtaaaccacacatgggataagaaatttgtttctccttaccccgcccccactaaagaacatttctacaatgaagtgaacatttcaaagcaaattataatgttgctgggatttcagtgggtgtgttgtacaag

SEQ ID NO: 37568 - DNA, 600 bp, Chicken  19866894267658_1
gagaaggcctcactgagagacaaagcataggaaaagcaccttcaggtatgagaggctgacaccactcttcccttgcaagaggaaggaaagattttcaagggttattgacatgaaagtggcttggaggtgaagatttttctttgcagctctcttcagagaaggggatctcttctgtggttcccttgacaaaggtttcagtggtgatgaagcagggatcaacagggctggatcccttcgcttggcaatgggaaatgatgcctctcttggtctcacacctgaagcttggccttgctgtatgakggctataaccagtggggtctattaaaaggctagtgagcttatcccttcctgcttgtttttaaacaaaaatggctacaggatgtatttcctgctgtatctatgcactgtgcatatctgtgatacagcaaatgagttgagactctcagggtgcttatttgaaaggggctctgggttctggactggcactgtgacacactcactgagatgctgggcactgtctcagtgtggtgctgtgcacagaagcagaaccacagacacaacaaaaattactctggtatacacccaacccctattcttact

SEQ ID NO: 37569 - DNA, 600 bp, Chicken  19866894267659_1
ctttctctaggtgctttcttttgttccatgggtcaaaagcagacaggaacaagttgtctgattagtgagaaccaaccaaagcgtgtcagcttgatttacagaaagctcttccagaaggcctgagctccaggctcttgtcatccagatggttaaggctatttccatcacaagtgatgatgctcctcttctcagggcagaaagtgttctttggagaccaaccacccttcaaggagtcattggcttaacaagcccttctggggcttaccaagaaagagtcctcctcatcctgagagcttctcwgcaggcttggagtcaactgaattcatccttcttaatgagccctgagagattcattagcrgggactaacaagaaagaaactttcttccttgttaacagcaaggagctcctctacagccactttctttgtcagacttggtccaaagacaatgagggtcactgtattgctatgtgacacggtcagggcaatcatttgggcatggctgataggagttggatgctaaggagtttggcacaagatgtgatttttccccaaatcaagcgcacggagtctttccacttgcttctatttatgatcaaaa

SEQ ID NO: 37570 - DNA, 600 bp, Chicken  19866894267659_2
gattagtgagaaccaaccaaagcgtgtcagcttgatttacagaaagctcttccagaaggcctgagctccaggctcttgtcatccagatggttaaggctatttccatcacaagtgatgatgctcctcttctcagggcagaaagtgttctttggagaccaaccacccttcaaggagtcattggcttaacaagcccttctggggcttaccaagaaagagtcctcctcatcctgagagcttctcwgcaggcttggagtcaactgaattcatccttcttaatgagccctgagagattcattagcrgggactaacaagaaagaaactttcttccttgttaacagcaaggagctcctctacagccactttctttgtcagacttggtccaaagacaatgagggtcactgtattgctatgtgacacggtcagggcaatcatttgggcatggctgataggagttggatgctaaggagtttggcacaagatgtgatttttccccaaatcaagcgcacggagtctttccacttgcttctatttatgatcaaaagttttcactgtgttcctacctcgtacataagtcacacctacctattacatattcatagc

SEQ ID NO: 37571 - DNA, 581 bp, Chicken  19866894267668_1
aagctcttccaagagtcacaaaaagggcagtaagcagacaaaccacctcaaacagtgccacaagggcatggcctgggttcaacatgccagcctaacaaaagatgcttttgcaaaatggtgatagaatcaatgaaaggaagaaaaacagccattctgcttaagagagacaacagatcatctagatccaactagactgagcagtgaaccatatctccagctgtaatccttgctggaagttgcatccctttctctaccgacataggggccctctcttatccgaggcactctgcaccaagctcwtcctctcatcttgatggaactgaatgaatgcagacacaaaatactagggtcagtatattctgacttgctgagaatttacagtatctggaaaatacattctcttataggcttagctagattaaaaagcaagatttctcataarctcatattgcaattatacatgcaacagtgtgttattagtcaatttatccttgagtactgcagaaatcctatgctgattgctgagcagcaccacaaactcatgttatggcagacttacataaacaacttcttgcctgcta

SEQ ID NO: 37572 - DNA, 439 bp, Chicken  19866894267668_2
aaacagccattctgcttaagagagacaacagatcatctagatccaactagactgagcagtgaaccatatctccagctgtaatccttgctggaagttgcatccctttctctaccgacataggggccctctcttatccgaggcactctgcaccaagctcwtcctctcatcttgatggaactgaatgaatgcagacacaaaatactagggtcagtatattctgacttgctgagaatttacagtatctggaaaatacattctcttataggcttagctagattaaaaagcaagatttctcataarctcatattgcaattatacatgcaacagtgtgttattagtcaatttatccttgagtactgcagaaatcctatgctgattgctgagcagcaccacaaactcatgttatggcagacttacataaacaacttcttgcctgcta

SEQ ID NO: 37573 - DNA, 600 bp, Chicken  19866894267669_1
tctgtctttgcatgttcaagttattagagcatcatctatgcactcaactgccaaggtttgagggttttcttttggtttgctttaatttctaacttttaatcaaagggatgtaagacattagctatattcacagagatccagattccacatgctatttttgcctcaaaactcatcttttatcaaatatatacgtattctctatatttatgaaataactgctctccatatactcttattagaaataatgctaccaatgcgaatacttttattcaagtagagtctgtatcaaaagaacagaamaaaaattaatccagaagggataattgctaaagaaaatgtgttagtttatcctctggtagagaaagaaacactgtgcatgttctctgtatatagacaactataatttgatgtacttggagcacaaactaaaagcatatttcagcaatacaatgtatatcagaagacccagatctacaggagattgcgctgacactgatataaatctaaagcacctccctcacttcagtcccgatccctccttatagtccttctgcattgatcaggtggtaaaaagtagccatatatctgatttaaacaagt

SEQ ID NO: 37574 - DNA, 486 bp, Chicken  19866894267671_1
gggttgctggtttcaccagctttgcaggaactcattgtcagcctccaaataaattgtattttcttgcactaacctttctgtgacactgttggtggttcaggcactcgaacctctgcacagcacacacccaaatgactgccttaaatcccagcgttttccgcacccgtatcaaagttgccttaattttacctgtctgtgttttcggggtggattgagtcatacatccaagctttctcttttgcaaacagatgagctggagctccattaaaatagaagctgggttctttcacagtttcaagrgggttaatagaaataggagggagagaggcttccaacacggggttggcaatcttgtgtccgcactccaaatagcttgtcctgtggctcatcccttactgttaaaactcacatgacttggctttggcgctgattatcttacctgctagctggtcttaaaaaaagagaaaaggcattcctgcatcaagg

SEQ ID NO: 37575 - DNA, 600 bp, Chicken  19866894267674_1
aagtttttcctaatacccaacttgaacctccctgacgtaaattgaggccattccctctagtcctatctctgggtatctgagagaaaaggctgacccccactttgctgcagcctcctttcaggtagctgtggagggcaatagggtcttccctaaacttcttcttctctagactaaacaatctcagttccttcctccccgtaagacttgtgctccagacccctcaccagctttattgcccttctctggacacactccagggcctttatgtcttgtagtgaggggtccaaaactgaacacagkactcaatgtacagcctcaccagtgctgagtactgaggaacaatcaccttcctagtgctgctggctgcactatttctgacacaaaccaggaagccgttggcctttgacactgcttggcacactgcttactcatgttcagccagctgtcaatcagcacccccggatcctttcctgctgcaaagccactctgctcaatcctgtagcaatgcatgggactgttgtaactgaagtacaggacccwggtcttcttgaatctcatatacaattggcctcagaccatcaatccagtctgtccagatcc

SEQ ID NO: 37576 - DNA, 600 bp, Chicken  19866894267674_2
ctctggacacactccagggcctttatgtcttgtagtgaggggtccaaaactgaacacagkactcaatgtacagcctcaccagtgctgagtactgaggaacaatcaccttcctagtgctgctggctgcactatttctgacacaaaccaggaagccgttggcctttgacactgcttggcacactgcttactcatgttcagccagctgtcaatcagcacccccggatcctttcctgctgcaaagccactctgctcaatcctgtagcaatgcatgggactgttgtaactgaagtacaggacccwggtcttcttgaatctcatatacaattggcctcagaccatcaatccagtctgtccagatccctcagttaggatctttctaccctcagacagactgacagttcctcccaacttggtctcatctgcaacttactgtggatgcgcttacttaatccccttgtccaggtcatcagtaaagatatgtaggtgctctaaaagtaatgccttctattaatttccatggaaactacagcagatatgaagcacatgataacactacttcatagagcaagttctcatgtataaaacactatttttcaacag

SEQ ID NO: 37577 - DNA, 600 bp, Chicken  19866894267674_3
cggttgccagctggatttaaccccattcctcagtattttctgggcgtgaccatccagacagttttctacctggcaatgagtgcacctgtccaatccatgggcttccagtttctccaggagaatgctgtgggagatagtatcaaaggctttactaaagtctaggtagactacatccacaacctttccctcatccactaggtgggtcacctggtcacagaaggagaataggttggtcaagcaggacctgcctttcatgaacccatgctggctgggcctgatcccctggttgtcctgtacatsctgtgtgaccacactcaagatgatccgctccataaccttccctgataccaaagttaggctgataggcctgcagttccccagatctaccttatgatccttcttgtagataggtagcatactggcaagtctccagtcacctgagagcagcccagttgaccagaactactaagaaattatggaaagtggcttggtgagcacttctgccagctccctcagtactcctgtgtggataccatctgactctatagacttctgctaagtctacgttgagtagcaggccacgctttcctcctaaattat

SEQ ID NO: 37578 - DNA, 599 bp, Chicken  19866894267677_1
  misc_feature (1)..(111): n is any nucleotide
nnnnnnnnnnnnnnnnnnnnnnnnnnnnnnnnnnnnnnnnnnnnnnnnnnnnnnnnnnnnnnnnnnnnnnnnnnnnnnnnnnnnnnnnnnnnnnnnnnnnnnnnnnnnnnntttttaatatctcttattgctttgcaactgctcccaccagtcagcaatcacaaacaggaagcggtgactcagcagagccacaactgtgcacggacagcggctggagagacggccaaaccctgcccagcccagcaggggctgagggccaggtggctgcaggctgcgagccccggcccatggcctggctgyggggacaccgggaccgagctcctaacgctgtgtgtccactgactcccagcatggggtgacgggaagggaaggggagggccccagggtcastcagggcctggagcagtggcagaggctgggaccggccccrggaaccacaagctctggtccgtgcccacaccgggcaaagaggacgctggtggcactgtgcgtggtcccctcggggccaaggcagtgtccagggggagctccgcagcrgcagtgctctattcccagcccgctccatccgtgctctaactgtatttagcagcgagtttact

SEQ ID NO: 37579 - DNA, 599 bp, Chicken  19866894267677_2
  misc_feature (1)..(21): n is any nucleotide
nnnnnnnnnnnnnnnnnnnnntttttaatatctcttattgctttgcaactgctcccaccagtcagcaatcacaaacaggaagcggtgactcagcagagccacaactgtgcacggacagcggctggagagacggccaaaccctgcccagcccagcaggggctgagggccaggtggctgcaggctgcgagccccggcccatggcctggctgyggggacaccgggaccgagctcctaacgctgtgtgtccactgactcccagcatggggtgacgggaagggaaggggagggccccagggtcastcagggcctggagcagtggcagaggctgggaccggccccrggaaccacaagctctggtccgtgcccacaccgggcaaagaggacgctggtggcactgtgcgtggtcccctcggggccaaggcagtgtccagggggagctccgcagcrgcagtgctctattcccagcccgctccatccgtgctctaactgtatttagcagcgagtttactccagactgagcctgcgtgagtgtgtatgagagggctgaggattggctgcggcaggcggagggctcgctgaaaggctcgttaaggaagcac

SEQ ID NO: 37580 - DNA, 600 bp, Chicken  19866894267677_3
ctttgcaactgctcccaccagtcagcaatcacaaacaggaagcggtgactcagcagagccacaactgtgcacggacagcggctggagagacggccaaaccctgcccagcccagcaggggctgagggccaggtggctgcaggctgcgagccccggcccatggcctggctgyggggacaccgggaccgagctcctaacgctgtgtgtccactgactcccagcatggggtgacgggaagggaaggggagggccccagggtcastcagggcctggagcagtggcagaggctgggaccggccccrggaaccacaagctctggtccgtgcccacaccgggcaaagaggacgctggtggcactgtgcgtggtcccctcggggccaaggcagtgtccagggggagctccgcagcrgcagtgctctattcccagcccgctccatccgtgctctaactgtatttagcagcgagtttactccagactgagcctgcgtgagtgtgtatgagagggctgaggattggctgcggcaggcggagggctcgctgaaaggctcgttaaggaagcactactgaccacgcaatccaattacataatgcttcaaaaaata

SEQ ID NO: 37581 - DNA, 600 bp, Chicken  19866894267677_4
gcccagcaggggctgagggccaggtggctgcaggctgcgagccccggcccatggcctggctgyggggacaccgggaccgagctcctaacgctgtgtgtccactgactcccagcatggggtgacgggaagggaaggggagggccccagggtcastcagggcctggagcagtggcagaggctgggaccggccccrggaaccacaagctctggtccgtgcccacaccgggcaaagaggacgctggtggcactgtgcgtggtcccctcggggccaaggcagtgtccagggggagctccgcagcrgcagtgctctattcccagcccgctccatccgtgctctaactgtatttagcagcgagtttactccagactgagcctgcgtgagtgtgtatgagagggctgaggattggctgcggcaggcggagggctcgctgaaaggctcgttaaggaagcactactgaccacgcaatccaattacataatgcttcaaaaaataactgtgctgggagccttgtctgggcagcacgtttcggcaacagaaagaggtatcagatatccacctcccaacccagggccgataggatatttgtgccacaatctgac

SEQ ID NO: 37582 - DNA, 599 bp, Chicken  19866894267678_1
  misc_feature (1)..(49): n is any nucleotide
nnnnnnnnnnnnnnnnnnnnnnnnnnnnnnnnnnnnnnnnnnnnnnnnnctgtactggacctgggcagactgcagcaaatatgagcacccgaagccatgtagacacatgccactagtgcctctgcttgttcctgctgagctcttgcttccaggagcaaaaaaacatttaaaaaatatttgagagcagcaacatcaaagaaagcctgtgttggacgtggcccagcaaggagaaagcaaataaagagggtagatttaaactagatattaggaagaagttctttactgtgagggtggtgacayactggaacaggctgcccagtgaggctgcggatgtgtggatgcccccttcttggaagcactgaaggccaggctggatggggctttgagcaacctggtctagaggcaagtgtccccgtctctagcaggggtggtggaactaggtgatcttaaaggtcccttccaacccaaatcattctgtgattctatgaatgaataaataaataaataaatcacagattagggaactgctgacaacctgagtactacaaagtttctaatgatccaaaagcyattattaagtccactttaaaagaaaacaa

SEQ ID NO: 37583 - DNA, 600 bp, Chicken  19866894267678_2
agaagttctttactgtgagggtggtgacayactggaacaggctgcccagtgaggctgcggatgtgtggatgcccccttcttggaagcactgaaggccaggctggatggggctttgagcaacctggtctagaggcaagtgtccccgtctctagcaggggtggtggaactaggtgatcttaaaggtcccttccaacccaaatcattctgtgattctatgaatgaataaataaataaataaatcacagattagggaactgctgacaacctgagtactacaaagtttctaatgatccaaaagcyattattaagtccactttaaaagaaaacaacagctatggttcttcagcttgaccaggcaaggaactgctgactcaatcatcctaaacagaacaggaatgcacctttttgccacgcatgaagttcaaagtaagaaaataagagtatacctttctcctctctgaaaatcagaaaacattttctctaatcattactgcagtgtaaagagcaactatgctcacgcgaagtcatttctaacccaccttttttttttttaatgatattttaagtccattgcaggagtatttcatggtttttaggttt

SEQ ID NO: 37584 - DNA, 600 bp, Chicken  19866894267680_1
gttgagaagcccatgaagtctccagaacttaggtcagtgagagtctcctggcccagctgtttctgaatcatagaatcatagaatggtttgagttggaagagaccttaaagtttatacagttccaacacctgacatgggctggggcctcttgcactaggtcaggttactcaaaaccccatccaatctagactagaacagtttcagagatggggcatcaggcccagggactgcagagctctctttatcctgctgccagtatagatcatgacccaccagcatgacctggggaacttctgtgtwtcccgttatttcctggctgctctttcagccccatgtatctgccagcagctgggcaattggcctgattccgtgcttggttgtgaatcagaagaattcaaaggacacctttgcagccctttctgccctgcataaactttcctagatgtaactaaatatcatgtcttgcatggtgatgcatagtctttcctacacaattccttaagtgtttgaagaaattttaataactaaatgctatgcgcttctgcaaagtaggagttacgataccacattgtataaagaaggaaatcatgctgtagtgtc

SEQ ID NO: 37585 - DNA, 600 bp, Chicken  19866894267681_1
aatatttagtgctgagcatgtttgtgatgctgcacccagcaagccaggccttaacaatttgtgatgcctcaagccaaagcttccactgatctcagttgcatgacctgcagcacaggacaggtctgcagaggtgtgggggactgcagagctgtgggtgaggcaattcacgcagggaagccaggctgggaccagcaggaagcagctctccttttccaaagctcggaaattgtttccttgagatctttctttcagctcgttctgaaataaagcggtagctccaaggcagcacatccaaatacygcttttcctgaatggctgaaatacaatatttcttccacattttaaaaaagaaaaatctcagcctgaacaaatactccagacatccctccctgcaggatgagaaggatttggtaacttgtaaattgtactttatgggtctagatttagccccgagtccaagtcccaaaataagctctttaacccatgtcctgctttatgatttcatatctataaatacttgctcagagctaagcaggtttctgcattaagatcaacatctgcttctcccagacagctgcatttcctctggctccgacacag

SEQ ID NO: 37586 - DNA, 600 bp, Chicken  19866894267681_2
acttgcaggtggctttggatagaacagatttcacagatgagcgctgcagagggctccttccagccataacttccacgaggagagctcagtgtccagcagcagctctgaccgcagcactgcagggctggcgctgtacagcggggagcacagctgtgggtgtacccaggtgtgtgcaccttcatcatgcgatgcagcttatgaagcaatgaatgaacgaatctgagtctccaacagactccagttgttaaaaaagctacatcttgggcttaaagggcaggttcccaaacaataatagccatmtcatgcgcctctgcagatacgtgcagtrtycacacgtcccaacgcagcacccaccctctgcacatggagggtctcacaatcacagcacagcagtgcctccctcccrttccgccattcctctgctttgggtgcttgcagaaatccgtgctaaagaactgaaggaataaaatgctaaagaaccaagagttgcattaactgagtaaactttaccttggctttgaatagtgcytttagcttagagggttattttcttctaaaaaacccaactgaatgcagtgagaacagtacacaaaccccggg

SEQ ID NO: 37587 - DNA, 600 bp, Chicken  19866894267681_3
tttcacagatgagcgctgcagagggctccttccagccataacttccacgaggagagctcagtgtccagcagcagctctgaccgcagcactgcagggctggcgctgtacagcggggagcacagctgtgggtgtacccaggtgtgtgcaccttcatcatgcgatgcagcttatgaagcaatgaatgaacgaatctgagtctccaacagactccagttgttaaaaaagctacatcttgggcttaaagggcaggttcccaaacaataatagccatmtcatgcgcctctgcagatacgtgcagtrtycacacgtcccaacgcagcacccaccctctgcacatggagggtctcacaatcacagcacagcagtgcctccctcccrttccgccattcctctgctttgggtgcttgcagaaatccgtgctaaagaactgaaggaataaaatgctaaagaaccaagagttgcattaactgagtaaactttaccttggctttgaatagtgcytttagcttagagggttattttcttctaaaaaacccaactgaatgcagtgagaacagtacacaaaccccggggcctcctgcggccgccgtgcagctgacc

SEQ ID NO: 37588 - DNA, 600 bp, Chicken  19866894267681_4
tcacagatgagcgctgcagagggctccttccagccataacttccacgaggagagctcagtgtccagcagcagctctgaccgcagcactgcagggctggcgctgtacagcggggagcacagctgtgggtgtacccaggtgtgtgcaccttcatcatgcgatgcagcttatgaagcaatgaatgaacgaatctgagtctccaacagactccagttgttaaaaaagctacatcttgggcttaaagggcaggttcccaaacaataatagccatmtcatgcgcctctgcagatacgtgcagtrtycacacgtcccaacgcagcacccaccctctgcacatggagggtctcacaatcacagcacagcagtgcctccctcccrttccgccattcctctgctttgggtgcttgcagaaatccgtgctaaagaactgaaggaataaaatgctaaagaaccaagagttgcattaactgagtaaactttaccttggctttgaatagtgcytttagcttagagggttattttcttctaaaaaacccaactgaatgcagtgagaacagtacacaaaccccggggcctcctgcggccgccgtgcagctgacccr

SEQ ID NO: 37589 - DNA, 600 bp, Chicken  19866894267681_5
gaccgcagcactgcagggctggcgctgtacagcggggagcacagctgtgggtgtacccaggtgtgtgcaccttcatcatgcgatgcagcttatgaagcaatgaatgaacgaatctgagtctccaacagactccagttgttaaaaaagctacatcttgggcttaaagggcaggttcccaaacaataatagccatmtcatgcgcctctgcagatacgtgcagtrtycacacgtcccaacgcagcacccaccctctgcacatggagggtctcacaatcacagcacagcagtgcctccctcccrttccgccattcctctgctttgggtgcttgcagaaatccgtgctaaagaactgaaggaataaaatgctaaagaaccaagagttgcattaactgagtaaactttaccttggctttgaatagtgcytttagcttagagggttattttcttctaaaaaacccaactgaatgcagtgagaacagtacacaaaccccggggcctcctgcggccgccgtgcagctgacccrgctccaggtcggcacgaggtgccagccatcgcactttatctttgtttcaagctttaactctccrtttagaattcaa

SEQ ID NO: 37590 - DNA, 600 bp, Chicken  19866894267681_6
aacagactccagttgttaaaaaagctacatcttgggcttaaagggcaggttcccaaacaataatagccatmtcatgcgcctctgcagatacgtgcagtrtycacacgtcccaacgcagcacccaccctctgcacatggagggtctcacaatcacagcacagcagtgcctccctcccrttccgccattcctctgctttgggtgcttgcagaaatccgtgctaaagaactgaaggaataaaatgctaaagaaccaagagttgcattaactgagtaaactttaccttggctttgaatagtgcytttagcttagagggttattttcttctaaaaaacccaactgaatgcagtgagaacagtacacaaaccccggggcctcctgcggccgccgtgcagctgacccrgctccaggtcggcacgaggtgccagccatcgcactttatctttgtttcaagctttaactctccrtttagaattcaatctaaacaacccccgtgccaagcagaatgccatcctgctcatgctgttttcatttcctcagaaagaatcccacaatgcgctaggcaagacatcaacaataattaaacccaacactgattgaaa

SEQ ID NO: 37591 - DNA, 600 bp, Chicken  19866894267681_7
cacacgtcccaacgcagcacccaccctctgcacatggagggtctcacaatcacagcacagcagtgcctccctcccrttccgccattcctctgctttgggtgcttgcagaaatccgtgctaaagaactgaaggaataaaatgctaaagaaccaagagttgcattaactgagtaaactttaccttggctttgaatagtgcytttagcttagagggttattttcttctaaaaaacccaactgaatgcagtgagaacagtacacaaaccccggggcctcctgcggccgccgtgcagctgacccrgctccaggtcggcacgaggtgccagccatcgcactttatctttgtttcaagctttaactctccrtttagaattcaatctaaacaacccccgtgccaagcagaatgccatcctgctcatgctgttttcatttcctcagaaagaatcccacaatgcgctaggcaagacatcaacaataattaaacccaacactgattgaaaatcaaattttcagggccctgcaacaagccctaatgagttccagacctgccttcccggcctgctcagaccggcggcgcggcgctgccaagccaaattaaaat

SEQ ID NO: 37592 - DNA, 600 bp, Chicken  19866894267681_8
gcctccctcccrttccgccattcctctgctttgggtgcttgcagaaatccgtgctaaagaactgaaggaataaaatgctaaagaaccaagagttgcattaactgagtaaactttaccttggctttgaatagtgcytttagcttagagggttattttcttctaaaaaacccaactgaatgcagtgagaacagtacacaaaccccggggcctcctgcggccgccgtgcagctgacccrgctccaggtcggcacgaggtgccagccatcgcactttatctttgtttcaagctttaactctccrtttagaattcaatctaaacaacccccgtgccaagcagaatgccatcctgctcatgctgttttcatttcctcagaaagaatcccacaatgcgctaggcaagacatcaacaataattaaacccaacactgattgaaaatcaaattttcagggccctgcaacaagccctaatgagttccagacctgccttcccggcctgctcagaccggcggcgcggcgctgccaagccaaattaaaatctgacaggattgcaccctgtgcccagaaaaattgcccttctcatgattcaggaaattaaacagc

SEQ ID NO: 37593 - DNA, 599 bp, Chicken  19866894267683_1
  misc_feature (1)..(166): n is any nucleotide
nnnnnnnnnnnnnnnnnnnnnnnnnnnnnnnnnnnnnnnnnnnnnnnnnnnnnnnnnnnnnnnnnnnnnnnnnnnnnnnnnnnnnnnnnnnnnnnnnnnnnnnnnnnnnnnnnnnnnnnnnnnnnnnnnnnnnnnnnnnnnnnnnnnnnnnnnnnnnnnnnnnnnncctctctcgattctctgtttaattacaactttcttccttcccatcttcaaagctgtgtgcaatttcaattaacctctttgatgaactagaaaataaacgctgtttttcagcaaggtaatccatattagtgcacmaaaaaaaaaaaaaaaaattaaaaaccacccagtaaactagtaatcaaatggaaaccagttaagaagcaaccttgtgtgcatcagatctactgcagagacctattgcagagatctatggcagagcctcccctttatactccttgctttyacaggactcagtatcttgtggcataaagagtttgagctaacaaccataacaaccaatatccaagcagctacccctttgtattaacaaggaaaaaaaacactgactgcaaaaatacatgggcagcaatgtaagcagaacaccaaggtgaaga

SEQ ID NO: 37594 - DNA, 599 bp, Chicken  19866894267683_2
  misc_feature (1)..(18): n is any nucleotide
nnnnnnnnnnnnnnnnnncctctctcgattctctgtttaattacaactttcttccttcccatcttcaaagctgtgtgcaatttcaattaacctctttgatgaactagaaaataaacgctgtttttcagcaaggtaatccatattagtgcacmaaaaaaaaaaaaaaaaattaaaaaccacccagtaaactagtaatcaaatggaaaccagttaagaagcaaccttgtgtgcatcagatctactgcagagacctattgcagagatctatggcagagcctcccctttatactccttgctttyacaggactcagtatcttgtggcataaagagtttgagctaacaaccataacaaccaatatccaagcagctacccctttgtattaacaaggaaaaaaaacactgactgcaaaaatacatgggcagcaatgtaagcagaacaccaaggtgaagatgaataatgaactcctgaatgtcaagttacagggggatattcataacatctcagcttcttccccacattgcaacaaaataaaatgtaggtggaaccaaagtcctgctgttattagaatgcaaagaaaataattctagccaaccattta

SEQ ID NO: 37595 - DNA, 497 bp, Chicken  19866894267683_3
aacaaccaatatccaagcagctacccctttgtattaacaaggaaaaaaaacactgactgcaaaaatacatgggcagcaatgtaagcagaacaccaaggtgaagatgaataatgaactcctgaatgtcaagttacagggggatattcataacatctcagcttcttccccacattgcaacaaaataaaatgtaggtggaaccaaagtcctgctgttattagaatgcaaagaaaataattctagccaaccatttatgcagaaacattttatatatacagtatgggccattctaaaacattctyaacatttagaatcatagaatgccctggattgaaaaagaccacaatgatcatcgagtttcaacccccctgctatgtgcagggtcgccaaccactagaccaggctgcccagaaccacatccagcctggccttgaatgcctccagggatgggggaccctcccctcacaacctccctcacaacctccttgggcaacctgtt

SEQ ID NO: 37596 - DNA, 600 bp, Chicken  19866894267693_1
ggatttttgaagtcctcacatcagcatcttctctgttgtagattctcagttataaactattctcctacctgctatctttttttcatctttatccaaatttagatttttttggagatatttaagtcttacaatccagattgaaattgttacatggaggtgaatctggggcagactgggaaaatctttgcaggtacaggggacatttctagtggtaccttctatagatgtttcctgacacttctgcttattagatccacttttcagtgacatagctttcccacacttaatagttagaaattyaggctaaatttcactaagttaccccacaacaatacagttgtttccaggaataaggctgtggaaaataaagtccattgttcaagtgagggggaaaaaaaaaaaaaacaacacaatacagagatgctgagaaggtgattaattttcatccttctcctctgtttttatgactatgacagaataatctacaaggaaaatcactatccttttttttagagttatgcagtaactgtgacagaggtcatttgcgaaaatgagtgtgatcaggtaattaaatgacttctcataaaatagatacccaga

SEQ ID NO: 37597 - DNA, 600 bp, Chicken  19866894267694_1
tgtatgacctcagtgcagattgcagtgcagttcagcatgctgggcagtttaggtgcctagctgcatccagcacaccgtttgaatgttttcctactccaggaaacaacagggttgtaggaaaacacaacatcggcttcaggttaaggaaacacaaccttgagaaaaacaggagtaacgggtggtgcagtgtctctgacaaaaacacaacgcattacacataatgggtttacgtatgaaatgtgaatgggagaaaatacatgtgtaaggaaaaaaaaaaaacaaaccttgtggagtatttgrtgtttaaraaattatttgcttctttgtaacgttaaatggatttatcgatagttctgtggcagacagtactcacaagtctttggcatccaaaccagattgtgtactggatgaatcccacaactggacgtgtgcactgacctctttatttccagctttttaaaataaaacttggtggcagcactttataaatgtataaagcaayggagagtggaaaccctgtttgcatcacagctgctacacagtttacaattggccccttctatccgcagccccttctgcgggaagctgctgtaacatggg

SEQ ID NO: 37598 - DNA, 600 bp, Chicken  19866894267694_2
ctcagtgcagattgcagtgcagttcagcatgctgggcagtttaggtgcctagctgcatccagcacaccgtttgaatgttttcctactccaggaaacaacagggttgtaggaaaacacaacatcggcttcaggttaaggaaacacaaccttgagaaaaacaggagtaacgggtggtgcagtgtctctgacaaaaacacaacgcattacacataatgggtttacgtatgaaatgtgaatgggagaaaatacatgtgtaaggaaaaaaaaaaaacaaaccttgtggagtatttgrtgtttaaraaattatttgcttctttgtaacgttaaatggatttatcgatagttctgtggcagacagtactcacaagtctttggcatccaaaccagattgtgtactggatgaatcccacaactggacgtgtgcactgacctctttatttccagctttttaaaataaaacttggtggcagcactttataaatgtataaagcaayggagagtggaaaccctgtttgcatcacagctgctacacagtttacaattggccccttctatccgcagccccttctgcgggaagctgctgtaacatgggcaaatcta

SEQ ID NO: 37599 - DNA, 600 bp, Chicken  19866894267694_3
cacaacgcattacacataatgggtttacgtatgaaatgtgaatgggagaaaatacatgtgtaaggaaaaaaaaaaaacaaaccttgtggagtatttgrtgtttaaraaattatttgcttctttgtaacgttaaatggatttatcgatagttctgtggcagacagtactcacaagtctttggcatccaaaccagattgtgtactggatgaatcccacaactggacgtgtgcactgacctctttatttccagctttttaaaataaaacttggtggcagcactttataaatgtataaagcaayggagagtggaaaccctgtttgcatcacagctgctacacagtttacaattggccccttctatccgcagccccttctgcgggaagctgctgtaacatgggcaaatctagcacaccaagtggcttggtttttctaattttaaggagttcccgttacccctttggcctttgcttgctgtgtaagcagcctctgtgctaagaggagctttccttgaagtcagcttagcaactgtgctgtaacttgattattttccccattttctatacccagtagcatagtgtcaggagctccttccctattgta

SEQ ID NO: 37600 - DNA, 600 bp, Chicken  19866894267697_1
tttaagaataaacaagtaaacagcagctggagttgttacaaatgacatgaaagtaccatgatgaggttgccagagtgatgtcattagcagagaaagatgggttaaaccacaggaatgaaaacaaaagaggaaaatctaatcagcatgaaaggcaccagtggcctttcaagtggccttgaaagcaagattaaaaaaaataaacagaaaggaaaatttacaaagcacagaattgtggtataaacacgtcactaacatgttttcttgtgttgtgctctgacattcccctgcttcttaacataygtcttctcagactggtccttctacccttatcctaagtaaaggaaaaggagagtgaraggagcagatgtgggggtatgttcactgcgtgggataatgaaaaagaggctgtgggtccctcctttctcacactgcttcagtgacacctgaagacttgtgcctcatgtcattcccacataatgtaaggcacaggtgatgaagagcagcctgatgtgggctgtggaagatccagtagtatatgtgcattttagtgcaggctatcaatattacctgtttaaatcttgcattaaaatccatcagtgt

SEQ ID NO: 37601 - DNA, 600 bp, Chicken  19866894267697_2
catgatgaggttgccagagtgatgtcattagcagagaaagatgggttaaaccacaggaatgaaaacaaaagaggaaaatctaatcagcatgaaaggcaccagtggcctttcaagtggccttgaaagcaagattaaaaaaaataaacagaaaggaaaatttacaaagcacagaattgtggtataaacacgtcactaacatgttttcttgtgttgtgctctgacattcccctgcttcttaacataygtcttctcagactggtccttctacccttatcctaagtaaaggaaaaggagagtgaraggagcagatgtgggggtatgttcactgcgtgggataatgaaaaagaggctgtgggtccctcctttctcacactgcttcagtgacacctgaagacttgtgcctcatgtcattcccacataatgtaaggcacaggtgatgaagagcagcctgatgtgggctgtggaagatccagtagtatatgtgcattttagtgcaggctatcaatattacctgtttaaatcttgcattaaaatccatcagtgtgttgtgttttattggatcaagaatgcaaagcaaacttaatacttcttattcaaaag

SEQ ID NO: 37602 - DNA, 600 bp, Chicken  19866894267699_1
tttcagaagatgaaatattatttcagtcagctttctttgttctatttgcaatgttttatagggtttaatttgagagagagcttagaattgagacagaacaaattgatttgcagttgcttgaggtacagtaagttacaggtacatccaagctgaacatcaacaaagcatcttgacacagactgcttctgaaactgcaccccagccatttcaggtacaacgtacaattgccatacatctttctttggcaaaactcataatcttcctcataatttccactaattcaaacagacctttaatctrctaaatgcaaagcaatactaaaaatttgtttggcatatggtaccccagaaggattctcttacagcaaacagctgctgttgacttggatgctgttttagctgctgtcaagagcatggacagcaactagcttgcattgcagcatgattgtsttacactggatttgtctcagtaaagacaccttacagatgcacttattctcacaggtccctagattactaaactcagtgcaatgcaaataggctattgttcatgtatggtcagctgctcatgccgaaagcagatgacagaagcctgccacag

SEQ ID NO: 37603 - DNA, 540 bp, Chicken  19866894267699_2
ctgaacatcaacaaagcatcttgacacagactgcttctgaaactgcaccccagccatttcaggtacaacgtacaattgccatacatctttctttggcaaaactcataatcttcctcataatttccactaattcaaacagacctttaatctrctaaatgcaaagcaatactaaaaatttgtttggcatatggtaccccagaaggattctcttacagcaaacagctgctgttgacttggatgctgttttagctgctgtcaagagcatggacagcaactagcttgcattgcagcatgattgtsttacactggatttgtctcagtaaagacaccttacagatgcacttattctcacaggtccctagattactaaactcagtgcaatgcaaataggctattgttcatgtatggtcagctgctcatgccgaaagcagatgacagaagcctgccacagtgagctgagctccagcagttctctgggcactgaataccaacaaccccagtttcttctgggcaggcagtctaaaagacaaatggaaaatg

SEQ ID NO: 37604 - DNA, 600 bp, Chicken  19866894267709_1
ggtttatcagtgacgatggtggtgccaatgccgacagcctggacggggatcacgtaggtgctgctgttctgaatgaagaggttcaggttgtcctggaatttcttggtgtcgttcaggttggctatgacagccagcgacacttcggtctcgggggggatgatgcccttattgggttcaaccctccagcgtgaatctttgccatcctgtaagaggagcaggatcaactcagggtgggagcaatggagatttgtgagtgcggggaaaggaaaggctgaaggtaaaagacacagtaaatttccwcaaaatctaagctatgctgtctgctgttaactatgcagggggtttgtgcaacctgtattttacctctctggtagaggacccccttcaccaacccaattttggccaatccaagggatgccaaacaatctggctttgaatgcctccagggatggggcatcagcagcttctctgggcaacctgttccaccgtcatgtggatgaacccccttcctgcccccacatcccttgccactgcgcttccaccagacagagaacacatccaaaccaaccagcaggtgtgagatcttcattgacattaagg

SEQ ID NO: 37605 - DNA, 600 bp, Chicken  19866894267710_1
ctcattttaagatggaagaatgtgttcccccaggtccagattgcagtgttttgtttacattttttgcctggttaggaacacgactgatttttcttcagtctgcttgattccggattcactctaagctaaacattttcctgtttactttcaaaggttttttgatttcatttttctttaaggaaatattagaatgtttgtaatttcaagtaggttattgcataagtgatttttaattctggagtgctaacctctcctagctaacttattttggaaagctgtgcaccccagcacagggacaamtactgaagtcttcagctttccttcaagctcgacttcaaaccaaataagagctttaggtttgcgtgctggtttagcacacaaactgttgatttatgggtggaagtctagccagttcaaacaaacaggcataaaatagtggctctcctaactcttgaattttccctactgtgggaacagagatttgagcttcttcagagtagtaccaaactgactgaggcaatctaccctatgtctcttaattcctcgatcattttcagttcagtaggtgctaggcaaaaaagcaaaggttcagaaccagtg

SEQ ID NO: 37606 - DNA, 600 bp, Chicken  19866894267718_1
caacgccgactaccgaggcagcggctttgaccgcggccacctggctgctgccgccaaccacaagtggagccagaaggccatgcgggacaccttctacctcagcaacgtcgcaccccaggtgaggctggcactgggcagacgtacgtcgctcccagcggtcgtgctgtggcacctgtgggttctgtgggttctctgcaaaccggtgcacggcttccagagtgggggtcggctcttctcacagcgccccgagcgccccgggggtgttatgggtgtgttagaatgggaagtctgagcaataargaagtgctgcagtgactgactttgctgtccaggtcaccacctttgtgttttaaggtgcctcacttaaaccaaaatgcctggaataaccttgagaaatacagcagaagcttggcaaggcgcaacaagaacgtctacgtctgcacaggacctctttacctgcccaggtaaacatgaggagccgggtgggaccgcagtgaaggatgtgttgtgctgggaaggtaaagcaggccgagggctgcgggtcccggctgccccaaaccagcagtgagcggcccagaccacaggtgagaccccctggtg

SEQ ID NO: 37607 - DNA, 600 bp, Chicken  19866894267720_1
gagcagatttccatctgcgatgcttccctaaaataagacaagatccatctttgaacagggcaaatttattttcattttctggtagttcattgtacggtgggggcctctttagcttgtgatacctcttctgctggtgatgttccaaactttttgtcttcaggtcagtccataatcacctctaggatccctggacagctgaggttcctcatctgagctcattgtgtattcagtacaattcacttactccaactggcatcagtagcatgatgggtggaggcaacctttcctctgaacattcarttcaacactggcagtcgaggagctagaaggagctgcgtttcagtactgattacttcagaagcagcccaaaccccctcatatgtggctaagatctcctttttcagttggagtgtagcactcttaagactctctgtactctcgactccagaatcccaggggttgaccttggatctctcctgaggctctttgccagaagctccaagtgagacctttatctccaacagcaatataaaggatgttctttacatcctgtcccgtctgtactggccccagggccacagcctgggctatctcctgctt

SEQ ID NO: 37608 - DNA, 600 bp, Chicken  19866894267720_2
aaaggatgttctttacatcctgtcccgtctgtactggccccagggccacagcctgggctatctcctgcttaatctgctcaaaagcctgctgctgctcaggcaaaatcgttctttttctgtgtcacctgataagaggagattacagtagggctgtgttacggacccccaaggattcaaaactggaatttagtccattcgctggccaagctgcatggggagtgatgacatgacccaatatgagtgcatcagagtctccatttattatccattacttacacatatatatagatagtgacaaaygtgcatcagtgtgtaatggttgaagcatagcgaaaagccccctgcctaagaatactattggttgtgcatgttttcataccattccactgtcttaatctcttcccaggctagctacccccttatcttaactgaagcctcagtttgtcttcctgctttgacagcttcaaggtctcatagcctgggttgtgcacatagcacctgagctcacagccattataacgagctagtacttttccatctgtatctcctgccgattgttaggtctgttctgctcgtacaactgttcaagagacccatgac

SEQ ID NO: 37609 - DNA, 599 bp, Chicken  19866894267721_1
  misc_feature (1)..(279): n is any nucleotide
nnnnnnnnnnnnnnnnnnnnnnnnnnnnnnnnnnnnnnnnnnnnnnnnnnnnnnnnnnnnnnnnnnnnnnnnnnnnnnnnnnnnnnnnnnnnnnnnnnnnnnnnnnnnnnnnnnnnnnnnnnnnnnnnnnnnnnnnnnnnnnnnnnnnnnnnnnnnnnnnnnnnnnnnnnnnnnnnnnnnnnnnnnnnnnnnnnnnnnnnnnnnnnnnnnnnnnnnnnnnnnnnnnnnnnnnnnnnnnnnnnnnnnnnnnnnnnnnnnnnnnnnnnnnnnnnnnnnnnnataatgtctgttgcttgtccyttacccactgactgtaattccatcataaaaggtctgaacaaagtctgtacaaaatatcccaaagtatttcaagtagagtagaagctagttctggggcatacaaatcacttgtatttgcatattaacataattataattttttgtttgttkgttggttggctggtattcctccataatgaaatgaataaagaggataagcatcttatgttcaaattcccacagattcaggatagttaaggaacagtgctctcctrtctgggggcccatgtcctagctattaaactatcacggagactttt

SEQ ID NO: 37610 - DNA, 599 bp, Chicken  19866894267721_2
  misc_feature (1)..(129): n is any nucleotide
nnnnnnnnnnnnnnnnnnnnnnnnnnnnnnnnnnnnnnnnnnnnnnnnnnnnnnnnnnnnnnnnnnnnnnnnnnnnnnnnnnnnnnnnnnnnnnnnnnnnnnnnnnnnnnnnnnnnnnnnnnnnnnnnnataatgtctgttgcttgtccyttacccactgactgtaattccatcataaaaggtctgaacaaagtctgtacaaaatatcccaaagtatttcaagtagagtagaagctagttctggggcatacaaatcacttgtatttgcatattaacataattataattttttgtttgttkgttggttggctggtattcctccataatgaaatgaataaagaggataagcatcttatgttcaaattcccacagattcaggatagttaaggaacagtgctctcctrtctgggggcccatgtcctagctattaaactatcacggagacttttcttcacaaatcattcagattattatgttcagcttccacaaaatytcttttttyrtggactttttgtggatcctgaggccaaactatatcttgtattagaccatttaaaatcagcctacaaaagaaggaggtagaatctgatctgtttttt

SEQ ID NO: 37611 - DNA, 599 bp, Chicken  19866894267721_3
  misc_feature (1)..(25): n is any nucleotide
nnnnnnnnnnnnnnnnnnnnnnnnnataatgtctgttgcttgtccyttacccactgactgtaattccatcataaaaggtctgaacaaagtctgtacaaaatatcccaaagtatttcaagtagagtagaagctagttctggggcatacaaatcacttgtatttgcatattaacataattataattttttgtttgttkgttggttggctggtattcctccataatgaaatgaataaagaggataagcatcttatgttcaaattcccacagattcaggatagttaaggaacagtgctctcctrtctgggggcccatgtcctagctattaaactatcacggagacttttcttcacaaatcattcagattattatgttcagcttccacaaaatytcttttttyrtggactttttgtggatcctgaggccaaactatatcttgtattagaccatttaaaatcagcctacaaaagaaggaggtagaatctgatctgttttttgaaaattaactctcatctgttctaacctctgggtgaatcatgtcagactagtatcttgccagaaaccaggccaacagttcgctaacattggcagtcatgccaag

SEQ ID NO: 37612 - DNA, 600 bp, Chicken  19866894267721_4
tctgtacaaaatatcccaaagtatttcaagtagagtagaagctagttctggggcatacaaatcacttgtatttgcatattaacataattataattttttgtttgttkgttggttggctggtattcctccataatgaaatgaataaagaggataagcatcttatgttcaaattcccacagattcaggatagttaaggaacagtgctctcctrtctgggggcccatgtcctagctattaaactatcacggagacttttcttcacaaatcattcagattattatgttcagcttccacaaaatytcttttttyrtggactttttgtggatcctgaggccaaactatatcttgtattagaccatttaaaatcagcctacaaaagaaggaggtagaatctgatctgttttttgaaaattaactctcatctgttctaacctctgggtgaatcatgtcagactagtatcttgccagaaaccaggccaacagttcgctaacattggcagtcatgccaagtctgtcctcctgcaccatatgatttaataaaataaatgtaaccattgaattttagacatctgctttgtgctgaagaacaggaagcctgga

SEQ ID NO: 37613 - DNA, 600 bp, Chicken  19866894267721_5
aatatcccaaagtatttcaagtagagtagaagctagttctggggcatacaaatcacttgtatttgcatattaacataattataattttttgtttgttkgttggttggctggtattcctccataatgaaatgaataaagaggataagcatcttatgttcaaattcccacagattcaggatagttaaggaacagtgctctcctrtctgggggcccatgtcctagctattaaactatcacggagacttttcttcacaaatcattcagattattatgttcagcttccacaaaatytcttttttyrtggactttttgtggatcctgaggccaaactatatcttgtattagaccatttaaaatcagcctacaaaagaaggaggtagaatctgatctgttttttgaaaattaactctcatctgttctaacctctgggtgaatcatgtcagactagtatcttgccagaaaccaggccaacagttcgctaacattggcagtcatgccaagtctgtcctcctgcaccatatgatttaataaaataaatgtaaccattgaattttagacatctgctttgtgctgaagaacaggaagcctggatgacccttt

SEQ ID NO: 37614 - DNA, 600 bp, Chicken  19866894267721_6
atatcccaaagtatttcaagtagagtagaagctagttctggggcatacaaatcacttgtatttgcatattaacataattataattttttgtttgttkgttggttggctggtattcctccataatgaaatgaataaagaggataagcatcttatgttcaaattcccacagattcaggatagttaaggaacagtgctctcctrtctgggggcccatgtcctagctattaaactatcacggagacttttcttcacaaatcattcagattattatgttcagcttccacaaaatytcttttttyrtggactttttgtggatcctgaggccaaactatatcttgtattagaccatttaaaatcagcctacaaaagaaggaggtagaatctgatctgttttttgaaaattaactctcatctgttctaacctctgggtgaatcatgtcagactagtatcttgccagaaaccaggccaacagttcgctaacattggcagtcatgccaagtctgtcctcctgcaccatatgatttaataaaataaatgtaaccattgaattttagacatctgctttgtgctgaagaacaggaagcctggatgaccctttg

SEQ ID NO: 37615 - DNA, 599 bp, Chicken  19866894267724_1
  misc_feature (1)..(233): n is any nucleotide
nnnnnnnnnnnnnnnnnnnnnnnnnnnnnnnnnnnnnnnnnnnnnnnnnnnnnnnnnnnnnnnnnnnnnnnnnnnnnnnnnnnnnnnnnnnnnnnnnnnnnnnnnnnnnnnnnnnnnnnnnnnnnnnnnnnnnnnnnnnnnnnnnnnnnnnnnnnnnnnnnnnnnnnnnnnnnnnnnnnnnnnnnnnnnnnnnnnnnnnnnnnnnnnnnnnnnnnnnnnnnnnnnnnnnnnnncttttgtacttttgcgtaggaacctctgtcagagagcagagggctgagcactggggctgtgtgttgytgtctgctgtgctcagggttgtgatggagaaatatgaggcgtcacacttcggttgatcggtctgagcttcagaaatctcccagcatttgggaaaaaaacagatgagcagccatcaggctccccctccactagctgcaaatgcacttttgcaagtgcaaaggtgctttgtgaagctgcttgctgcctcccaggctcctccatccacccagcatcatccagcatcacacttgggggggaatggagggaaagtgtgggttttgcatcaccacggagccctgctgcaatggctgagagcacag

SEQ ID NO: 37616 - DNA, 600 bp, Chicken  19866894267731_1
ttgcttgatttttctgctttgctgcatagggggtggggataaatgagtgagcctgaggtttgcatagcagcgagcagtcaggattttgggggagctgagcccattgccagctctggagcaaatgcttggggtgaaaggagcacagcctggatgagatgaggtgggacaggacttggggctgagctcctccgtgatttgggttcatctgctgcactctcagcagtggggcagatctgcaaaacattccaacacgacaatcccagaaaaatatatagtcagaagaagctttgcaagggcctyccagccttcttaattagttctccttcaaatccatttttttttctttttttttytcttttttttttttttttgcattatcattattacaatcattatcatttcatttgactgagacaaaacaggaaccccagggcagcaagaggaactttctgcaggcaatagtgtctaatctccttctttaagggttagtcaccacttgattggggctccttaatcactgtgatgtgctttcaatggggatttgcttggcccaggtttgactccgggggaaatgagggagctggagccttgcaggagtga

SEQ ID NO: 37617 - DNA, 600 bp, Chicken  19866894267731_2
tgaggtttgcatagcagcgagcagtcaggattttgggggagctgagcccattgccagctctggagcaaatgcttggggtgaaaggagcacagcctggatgagatgaggtgggacaggacttggggctgagctcctccgtgatttgggttcatctgctgcactctcagcagtggggcagatctgcaaaacattccaacacgacaatcccagaaaaatatatagtcagaagaagctttgcaagggcctyccagccttcttaattagttctccttcaaatccatttttttttctttttttttytcttttttttttttttttgcattatcattattacaatcattatcatttcatttgactgagacaaaacaggaaccccagggcagcaagaggaactttctgcaggcaatagtgtctaatctccttctttaagggttagtcaccacttgattggggctccttaatcactgtgatgtgctttcaatggggatttgcttggcccaggtttgactccgggggaaatgagggagctggagccttgcaggagtgaatgattcctttgccacactgattatttccactttcacattcaatttcttgctg

SEQ ID NO: 37618 - DNA, 600 bp, Chicken  19866894267731_3
aggtttgcatagcagcgagcagtcaggattttgggggagctgagcccattgccagctctggagcaaatgcttggggtgaaaggagcacagcctggatgagatgaggtgggacaggacttggggctgagctcctccgtgatttgggttcatctgctgcactctcagcagtggggcagatctgcaaaacattccaacacgacaatcccagaaaaatatatagtcagaagaagctttgcaagggcctyccagccttcttaattagttctccttcaaatccatttttttttctttttttttytyttttttttttttttttgcattatcattattacaatcattatcatttcatttgactgagacaaaacaggaaccccagggcagcaagaggaactttctgcaggcaatagtgtctaatctccttctttaagggttagtcaccacttgattggggctccttaatcactgtgatgtgctttcaatggggatttgcttggcccaggtttgactccgggggaaatgagggagctggagccttgcaggagtgaatgattcctttgccacactgattatttccactttcacattcaatttcttgctgtg

SEQ ID NO: 37619 - DNA, 600 bp, Chicken  19866894267736_1
tgtctttcacaattttcttgcaatcaaatgaccagaattttttttagatttcattctttagataaaagaaagataatattctgccttcttacttctaaaatggttatgatttgtgtactggacaccttgattactgtataggagaatgtactacagccaatactgttgagcgcgtagcagatgtaatttgtgtatccgtttcctttagctttaggaaaaggatgtcagacatgttaatgttgaagggttagatctcctaagtcacttagtatttgtttgtgggagggttgttttacttgkgcagtgacagctgttaggaactgcaagatagctgccaactattttaagcaaacacttgtatttcgcattctgctctaaatgtttgaaattccaatccctgtagactaagcctatgaagttaagtcagaatgtgaaccatattaaatttgaggaaacaataaacaacaaagtaatttgtacactaaataggtcagaaaggaccttctgaagtctctggtccaacctctgactcaaaaaaggttcagttttgaccatttgatcctgattgttcatgttcctcacctacataacttactgatt

SEQ ID NO: 37620 - DNA, 600 bp, Chicken  19866894267737_1
aatcttgactgtatggaccccattttgccatttttttggcaattaatgagagtcatctaagcacatggcagtaggagggagtgcacttggcttcagcgttctgccaaaaactgctagaaaccacctgtctcctatactgccaatctgccaggtttagtacagaagagtctcgaaaaaagagctctctgcagccctttccaaaaccaacatcgcatctgaaattttctggtccacgatgggcctgtgaacactgaagctaataaaggaaaataaaacttttccctactgccatcaagctcratgtttcacatagcagggggctgctaaggacttctacaaacagatcctttccagcagacctgaaacttcattatgttatttgaatatctggctaaaatttctgggctttgccaactctgactttctcttgggcttttttctttgttcaaatcttgtctataccgccatgtcctatccttcttctgtgctcctcgtagctatttgggaacataagggcaaaatgaggtattgcatcctgggggtttgtgcttgttcttctgccctctttctgaaacgagagaatctggttgcacaaaggtt

SEQ ID NO: 37621 - DNA, 599 bp, Chicken  19866894267745_1
  misc_feature (1)..(224): n is any nucleotide
nnnnnnnnnnnnnnnnnnnnnnnnnnnnnnnnnnnnnnnnnnnnnnnnnnnnnnnnnnnnnnnnnnnnnnnnnnnnnnnnnnnnnnnnnnnnnnnnnnnnnnnnnnnnnnnnnnnnnnnnnnnnnnnnnnnnnnnnnnnnnnnnnnnnnnnnnnnnnnnnnnnnnnnnnnnnnnnnnnnnnnnnnnnnnnnnnnnnnnnnnnnnnnnnnnnnnnnnnnnnnnnntctatgatgcaggctttcctaaattctgttataaggatgctcaaagaacgctcacatctctgtactggcataaggrctgacagagacctaagtttcttttgtccacttgttacagagggaatgccttcattttctcccccgtattctgttagatacagcaacctgacagagacaaatctacttaaaggtatwtggggaaaagatgatttatcttccctgtctaccttgaagacagaatctcaacttaggagttttaggacaaagactcttttatcaagaatctcacgcacaaagtggcctacctcttcgctgctgtcagttccttgaaagttatcgtcagtttgggtttccccctggacacggttaccgtcctgc

SEQ ID NO: 37622 - DNA, 599 bp, Chicken  19866894267745_2
  misc_feature (1)..(108): n is any nucleotide
nnnnnnnnnnnnnnnnnnnnnnnnnnnnnnnnnnnnnnnnnnnnnnnnnnnnnnnnnnnnnnnnnnnnnnnnnnnnnnnnnnnnnnnnnnnnnnnnnnnnnnnnnnnntctatgatgcaggctttcctaaattctgttataaggatgctcaaagaacgctcacatctctgtactggcataaggrctgacagagacctaagtttcttttgtccacttgttacagagggaatgccttcattttctcccccgtattctgttagatacagcaacctgacagagacaaatctacttaaaggtatwtggggaaaagatgatttatcttccctgtctaccttgaagacagaatctcaacttaggagttttaggacaaagactcttttatcaagaatctcacgcacaaagtggcctacctcttcgctgctgtcagttccttgaaagttatcgtcagtttgggtttccccctggacacggttaccgtcctgcttcaaatccagagggaaaacacagtrttctggtgatgtatttggggacttcccatgaggagctgagcgaggtcttgatgaaaatgtgaatatctccttctgatccatgttgtgatc

SEQ ID NO: 37623 - DNA, 600 bp, Chicken  19866894267745_3
tccacttgttacagagggaatgccttcattttctcccccgtattctgttagatacagcaacctgacagagacaaatctacttaaaggtatwtggggaaaagatgatttatcttccctgtctaccttgaagacagaatctcaacttaggagttttaggacaaagactcttttatcaagaatctcacgcacaaagtggcctacctcttcgctgctgtcagttccttgaaagttatcgtcagtttgggtttccccctggacacggttaccgtcctgcttcaaatccagagggaaaacacagtrttctggtgatgtatttggggacttcccatgaggagctgagcgaggtcttgatgaaaatgtgaatatctccttctgatccatgttgtgatcacccgtttcatcgtgctgacgttcagtagaggtgatctctggtgaggtcaaatcacagcaggctgaatcttgagtggctgcatgctgctcgctcccatccaactgaacctcctcagtgaaaccttctggaaacacccattcatctgaaatgcaaaatatttactgcagtgtaaagcatataaactatactttatactgatcactctcttt

SEQ ID NO: 37624 - DNA, 600 bp, Chicken  19866894267747_1
gactggactgaagggacaccatactgtcttttacttctactctatgcatccaccttttttaaccatctcagttaaaaggaaaaagaaatgcagaaagagcagagctagagctgagaattttggaagaaagcaagcagaacaagatctaacatgcactacacgttttaaacagcaacaaaacaactggaagtgactaacaaagcttgtaagcttcaagttatcactgcctggctgactgaggaggcagcgtacctttcagccacacctcctaggtgaataacgaggatttacgtgctcccrgttctgtccaacgttcccagctggtagcagtggaatctgaacttggccacacagacaacatcctgccttcagaatgactcttgaaggtcacaaatgagttcctacagctatggtcccaggcaacacgacatccagccagaacagcactttcccacatgaacagatctgagcaaggaaacctaccatctcttgctatatttattggtgtgactatttccttaaaagygtatcaaggagcaaatctgagaactggattttctgtacagaagtccagaagtcattttctgtgcttgggtcact

SEQ ID NO: 37625 - DNA, 600 bp, Chicken  19866894267747_2
cctggctgactgaggaggcagcgtacctttcagccacacctcctaggtgaataacgaggatttacgtgctcccrgttctgtccaacgttcccagctggtagcagtggaatctgaacttggccacacagacaacatcctgccttcagaatgactcttgaaggtcacaaatgagttcctacagctatggtcccaggcaacacgacatccagccagaacagcactttcccacatgaacagatctgagcaaggaaacctaccatctcttgctatatttattggtgtgactatttccttaaaagygtatcaaggagcaaatctgagaactggattttctgtacagaagtccagaagtcattttctgtgcttgggtcactcagccacygtgccaagataagaactgcctatggcagagtcactgctcacatatgaggagaattcaccaaatgaaactcctccaagctgtgaggtttagcgctggagagccgtagtgacttggcccaccactgctccatctggaaatgatttgggcatgctccaatggagcctccacagtccaggcaaaggaacaaaaaagcagtatggacttaaatcttaagggga

SEQ ID NO: 37626 - DNA, 600 bp, Chicken  19866894267747_3
caacgttcccagctggtagcagtggaatctgaacttggccacacagacaacatcctgccttcagaatgactcttgaaggtcacaaatgagttcctacagctatggtcccaggcaacacgacatccagccagaacagcactttcccacatgaacagatctgagcaaggaaacctaccatctcttgctatatttattggtgtgactatttccttaaaagygtatcaaggagcaaatctgagaactggattttctgtacagaagtccagaagtcattttctgtgcttgggtcactcagccacygtgccaagataagaactgcctatggcagagtcactgctcacatatgaggagaattcaccaaatgaaactcctccaagctgtgaggtttagcgctggagagccgtagtgacttggcccaccactgctccatctggaaatgatttgggcatgctccaatggagcctccacagtccaggcaaaggaacaaaaaagcagtatggacttaaatcttaaggggataagaaacacctcaaccttaaggcagcattaaccattaactggtttactaatcacacwggctagaaaaacctgcaagcaaag

SEQ ID NO: 37627 - DNA, 600 bp, Chicken  19866894267747_4
ctgtgcttgggtcactcagccacygtgccaagataagaactgcctatggcagagtcactgctcacatatgaggagaattcaccaaatgaaactcctccaagctgtgaggtttagcgctggagagccgtagtgacttggcccaccactgctccatctggaaatgatttgggcatgctccaatggagcctccacagtccaggcaaaggaacaaaaaagcagtatggacttaaatcttaaggggataagaaacacctcaaccttaaggcagcattaaccattaactggtttactaatcacacwggctagaaaaacctgcaagcaaagtatatctgtagtaaatgactctaaatccatggagtcctatttaacaaataaatgagcctgtgctaatacgccatcctgtcagattttcctgcgtcctctccactgcctcccaaagggtcttacttgaaggagaaaagaaatacaaagattaacgatagactgcatatcacatttttatcacgaggcacagatttatacaccacgggatttctagaggctttttctgtgatcacagataattcactttctacgcaaatagttctacaaattctgagg

SEQ ID NO: 37628 - DNA, 600 bp, Chicken  19866894267751_1
ttattgtccagagagggagagctgggtgtgctaaattaatttccgtggtgagaccaataaattcagttctcctgctgtaaaagatacattaattctgctacattcccttttttaataggcacaaagccacctggataaatacaggttgcacacaaagagcagccatgggcctgggcatggactgtcagctgaaataaagaagtcagagctaagagcagagtatctgctgagggttttcactttatttggctttggtttttcatatgtttaggtgaggtgagggagaatggtaggctgtartaatctcstctaccttaaagatatgaaaaggaggaggagagtattccccgcgtttaaaatattctgtgttttgatgcttaatgtcaaatatgttgattttgataaatgyagcaaaggaactgctattcctgccatgaactcacactcggggcttttccatcattggtccttcaccagcagcaggcagtcctgtggtccggaccatttttagtgaacttcasaaggatggcacttgcacggaggatcagaatgaagaggcagttctgtggatgaatatcagcctttagtgggctcacagga

SEQ ID NO: 37629 - DNA, 600 bp, Chicken  19866894267751_2
cagagagggagagctgggtgtgctaaattaatttccgtggtgagaccaataaattcagttctcctgctgtaaaagatacattaattctgctacattcccttttttaataggcacaaagccacctggataaatacaggttgcacacaaagagcagccatgggcctgggcatggactgtcagctgaaataaagaagtcagagctaagagcagagtatctgctgagggttttcactttatttggctttggtttttcatatgtttaggtgaggtgagggagaatggtaggctgtartaatctcstctaccttaaagatatgaaaaggaggaggagagtattccccgcgtttaaaatattctgtgttttgatgcttaatgtcaaatatgttgattttgataaatgyagcaaaggaactgctattcctgccatgaactcacactcggggcttttccatcattggtccttcaccagcagcaggcagtcctgtggtccggaccatttttagtgaacttcasaaggatggcacttgcacggaggatcagaatgaagaggcagttctgtggatgaatatcagcctttagtgggctcacaggaaaatcctc

SEQ ID NO: 37630 - DNA, 505 bp, Chicken  19866894267751_3
ttttaataggcacaaagccacctggataaatacaggttgcacacaaagagcagccatgggcctgggcatggactgtcagctgaaataaagaagtcagagctaagagcagagtatctgctgagggttttcactttatttggctttggtttttcatatgtttaggtgaggtgagggagaatggtaggctgtartaatctcstctaccttaaagatatgaaaaggaggaggagagtattccccgcgtttaaaatattctgtgttttgatgcttaatgtcaaatatgttgattttgataaatgyagcaaaggaactgctattcctgccatgaactcacactcggggcttttccatcattggtccttcaccagcagcaggcagtcctgtggtccggaccatttttagtgaacttcasaaggatggcacttgcacggaggatcagaatgaagaggcagttctgtggatgaatatcagcctttagtgggctcacaggaaaatcctccttctg

SEQ ID NO: 37631 - DNA, 393 bp, Chicken  19866894267751_4
atctgctgagggttttcactttatttggctttggtttttcatatgtttaggtgaggtgagggagaatggtaggctgtartaatctcstctaccttaaagatatgaaaaggaggaggagagtattccccgcgtttaaaatattctgtgttttgatgcttaatgtcaaatatgttgattttgataaatgyagcaaaggaactgctattcctgccatgaactcacactcggggcttttccatcattggtccttcaccagcagcaggcagtcctgtggtccggaccatttttagtgaacttcasaaggatggcacttgcacggaggatcagaatgaagaggcagttctgtggatgaatatcagcctttagtgggctcacaggaaaatcctccttctg

SEQ ID NO: 37632 - DNA, 600 bp, Chicken  19866894267755_1
gggtggggggacgccctgccagcccgcggcacagcacgatggacccctgggagaggcactttagggccttagaagacagctcgcaacacagcagcccttctcctgcccagatgagctgcgcagcctggtactcagcagccagccccgctcgctggctgaggcagcgggaacgtagcagtgccagcttctgcctggtccctgcccctccgggcatcacctcgagcagcccctgcttccctttagtgccaggcaggtctctgtggggacaggcagctcctcgggggctctgtgagcggacaygctccatggcacagcttgactgcagaggacagtaactgcatctccttaaactgcagtttcacaaggttcacacaaaccagcagccacatccatcagccctctgactgcccacacagctccacagcactgcattctactccctgccctggcacgttccccacagctcaggcaggcaggaacatcaccccatctcacccaaatgcacattctaattttttcctattttctgaaaagaaggatttagaagggcagcggcagatgcccgacaacgagacaatccctgctgcctcagaggctgaa

SEQ ID NO: 37633 - DNA, 599 bp, Chicken  19866894267757_1
  misc_feature (1)..(66): n is any nucleotide
nnnnnnnnnnnnnnnnnnnnnnnnnnnnnnnnnnnnnnnnnnnnnnnnnnnnnnnnnnnnnnnnnntgccttaaaaggcagatggttagcttcttaaatagtcattgaggagaaaatgaaaccattctcaaattttgtggttaattctaaacttccacaatatgcaaaatgagttttaaggactaatattgtttattgcagcagaaaaaaagattattttatctatctattgccttagaatttgctcgttagtggcttctgatgatataacttaatatgtagattcattttaggaacacratgtattctttgaaacaaaacacctcttatattattctgtgttttaatgataamaaagaaaatattgaaattgtagtacagttgtaatccaaataaccttcaggtagaaattacttcagaagtatatacttacttgagggggyaagtgtccttcagggatattaatattgcaaagaattaaatatattttttacaggtccttaatctgtttgtaagtcttcagaacaatacttggtgcatagcgtattatttgatttaaataccttctgtgatttagttgttagaaaaacatttggaca

SEQ ID NO: 37634 - DNA, 599 bp, Chicken  19866894267757_2
  misc_feature (1)..(12): n is any nucleotide
nnnnnnnnnnnntgccttaaaaggcagatggttagcttcttaaatagtcattgaggagaaaatgaaaccattctcaaattttgtggttaattctaaacttccacaatatgcaaaatgagttttaaggactaatattgtttattgcagcagaaaaaaagattattttatctatctattgccttagaatttgctcgttagtggcttctgatgatataacttaatatgtagattcattttaggaacacratgtattctttgaaacaaaacacctcttatattattctgtgttttaatgataamaaagaaaatattgaaattgtagtacagttgtaatccaaataaccttcaggtagaaattacttcagaagtatatacttacttgagggggyaagtgtccttcagggatattaatattgcaaagaattaaatatattttttacaggtccttaatctgtttgtaagtcttcagaacaatacttggtgcatagcgtattatttgatttaaataccttctgtgatttagttgttagaaaaacatttggacagtaatttacrtagcatacacagtttcttagtgttctcagttatgaaattagata

SEQ ID NO: 37635 - DNA, 600 bp, Chicken  19866894267757_3
attctaaacttccacaatatgcaaaatgagttttaaggactaatattgtttattgcagcagaaaaaaagattattttatctatctattgccttagaatttgctcgttagtggcttctgatgatataacttaatatgtagattcattttaggaacacratgtattctttgaaacaaaacacctcttatattattctgtgttttaatgataamaaagaaaatattgaaattgtagtacagttgtaatccaaataaccttcaggtagaaattacttcagaagtatatacttacttgagggggyaagtgtccttcagggatattaatattgcaaagaattaaatatattttttacaggtccttaatctgtttgtaagtcttcagaacaatacttggtgcatagcgtattatttgatttaaataccttctgtgatttagttgttagaaaaacatttggacagtaatttacrtagcatacacagtttcttagtgttctcagttatgaaattagataatcacaggctatcaaagttgctatgttttttaaaattgtttactgataaattgatctgaaagagcaattaaatgatgtgataattcactc

SEQ ID NO: 37636 - DNA, 600 bp, Chicken  19866894267757_4
ttgaaacaaaacacctcttatattattctgtgttttaatgataamaaagaaaatattgaaattgtagtacagttgtaatccaaataaccttcaggtagaaattacttcagaagtatatacttacttgagggggyaagtgtccttcagggatattaatattgcaaagaattaaatatattttttacaggtccttaatctgtttgtaagtcttcagaacaatacttggtgcatagcgtattatttgatttaaataccttctgtgatttagttgttagaaaaacatttggacagtaatttacrtagcatacacagtttcttagtgttctcagttatgaaattagataatcacaggctatcaaagttgctatgttttttaaaattgtttactgataaattgatctgaaagagcaattaaatgatgtgataattcactcacagttagttttatttgaattgctcttttcttcagttcgaagtatttattgcaaacccttttgtatcaagctatggaactgatctttgaggagtacttgtcaagtttataatttcagtataaaacaaaattggcttttaaaggaaaatatgactcattaaaagaaa

SEQ ID NO: 37637 - DNA, 600 bp, Chicken  19866894267761_1
tgcatgcaaatgggcttgggagaaaggtgggggtggcttttggtgctggtgggaggatggaagggaaaggaggatgtaaacttgggaaaaggtcaggcgtgctataaataagtggcatccagcaaaaaaatgtcagcatgcagcagcagcgacacaccagccttgagatggagagggaggctgttatgtgagagattgtctgtgggttatgggatctcgggtggcagggcataaagggaggatctccctctgctcaccagctggggaaggggaatgaaccagggcatgcatctgctgcaygttgtcccatggtgcaggctcctggggctgtcctgctgctgtctaatggggaaaatccaaggttggaggcacatcttcgttgtgtcctctcccaggaccgtgctcagctcattcagggttaagttgggaaggtgggaggcttctggccattcagccagagttgtggctcatgaatccagaggatgatgcagtgataggcggggcggacagcacacctggagcctcacagcatccttggggctgttctggggctgggggctgccagcacatggggtgcggtgctgtagagctgctcagccc

SEQ ID NO: 37638 - DNA, 600 bp, Chicken  19866894267766_1
gacttgcaggaatccttcctgtattacgtctgattcacacagcaaatacctcaaggcactaacatacttttcaaattctcagcaaagcacaatgcatatatattatatcacggctaatttcatactactactaaacacaatagctacaccaattgtaactgtagctattgcccctttccacaaagactttactggagtatattggttcggatccaaaaagaggattcccctacgggctcctggcaaagagtacatagctagtaataacctcagtgagatcacagtcattagtcagtagaraagaagaggtgtcagtggtgcttgaggcacttgttggaatcaattaacatagaatctgggttaaaggaacaggcagaggtgccaaaccattttattttcccttgccagtcagcggtaacaatacttcatgggaggtctacagctacacttggaaatacacaccttatcttcctgcggtattttcagttgttgatgatgttatcgctttgaccaacttgagcagaatatttctggggaaagaataaattctggagctataggtcaaggtctctgaaaccagagaacagtaatacaaaaatc

SEQ ID NO: 37639 - DNA, 548 bp, Chicken  19866894267767_1
ccaaggtgaccagagcgtttccttccatttaattcatcttttgcatcgaacttccctggcagcagctgctgtgccaaatggctccgggctgtaaatctccagcgctggggccgtggcacggccagggctgtgcatacgtgtgtgtgtgtgtgtgtgtgcgcgtcctgcatgggtgtgcatgcgtgtgcttattgcacggctgcgcatcctgcatgggcgtgcatccatgtgcacccccgcgtacacgtgtgagcccgcacaaagccacgcgctcgctgcgtctgtgcgcgccacgggtgygcgcgtgtcccgcgtggccgtcaccagatgtcgctgtccccacggccaccaccgccgccgtgctgggcccgaccccgcgctgccaccccggggagggctgaagggagaagggggcggcggtggggctgagccgagggggtccgcggtgtgatgtgatgaaggcggcagcgcgcagctggggctcacatcccgcatccccgtgttctgcgtccccccatcctcgtgttctgcaccccacatccccgtgt

SEQ ID NO: 37640 - DNA, 600 bp, Chicken  19866894267769_1
aggcaaactgaatctgcacaggtttttcaggaactgctatacaatgagtaggttcaatcatcactcttatctgtgtcttttcaggaaggtgaaatagcactaaatattatgagggagttatctgtacttggatgggagatctgtgctccaaacaagctgacagcttgtagactggctctgtggatgagctggttttgattcagacaaggaggacctgacccaagtgccaagaaagagctctcaagttgtgtaacctaaaagaattatgaacaagttaaaagatttgtttatagaaacacrgaggggaggggcaaaacaaattttcctcctctcatctgaggctgcctaatatgggcacatttctctggacagtttctctacccccgtgtttactgacttttttttttttaaacaaagggaaattattaataaactaaatttgacaaagttagtcagaacagataagagaaaccactgatccctgtgggagcacagggctgcattgcagaggcagtgctgcaatagcagtctgatgatgcacacatagtatccaaggaggtttgcattatagctttaggaaagctacacgttaaataaaac

SEQ ID NO: 37641 - DNA, 600 bp, Chicken  19866894267781_1
ttatttgtgtatgagtgtcagtatcttgcagtgggcccctaaaagtccttgttcaagacgttatgctgttctctctaaggcaagtcctgccttcttttgcattgtgcgttcctatgccatcaagctgtattttagtgaaataccgtgattagcaagactgttttgcttagccttgtgatgtaagaaagcaaatccagatatgattttaacatcaggaaagaatgatcttaatatgtctttataggagtacaatgttgtgttgctctgcagtatatactgttcacctcttcccctcccacrttcctgctgctactggggtggagtcaagtcacttctgatgccagaggaatcaagcagcagctctgcatttctgccagaagccctgttttctgaatttcacacattgttccatacaaaaacaatggaagcatcacagcagcgagtcgagctgcactctgcagaaatctgtactgagttgggcttgagggaagctgtgaaataagcaattgaaagggttaaaacactgcattatgtgcagcatgccraatctgaatgctgttctactgtgagcatggaaggcgttgtaccttcgtttgctgc

SEQ ID NO: 37642 - DNA, 600 bp, Chicken  19866894267781_2
agtacaatgttgtgttgctctgcagtatatactgttcacctcttcccctcccacrttcctgctgctactggggtggagtcaagtcacttctgatgccagaggaatcaagcagcagctctgcatttctgccagaagccctgttttctgaatttcacacattgttccatacaaaaacaatggaagcatcacagcagcgagtcgagctgcactctgcagaaatctgtactgagttgggcttgagggaagctgtgaaataagcaattgaaagggttaaaacactgcattatgtgcagcatgccraatctgaatgctgttctactgtgagcatggaaggcgttgtaccttcgtttgctgctgtgatctgttcccagcttcggctgtgctgtgcctgtcttctgcattccaagtcctgcagggcactcatttttttatatatataaaataaatgtttaaacaagaggcctcaaccctagtgaggcctttggcgcrtgcaggaatgaaaataacacgtaatttcagaaggctgtgttcagatctcccttttatttygygctgacctagatttgggctctgctgacttgttacagctatgcaagtgtt

SEQ ID NO: 37643 - DNA, 600 bp, Chicken  19866894267781_3
agcagcgagtcgagctgcactctgcagaaatctgtactgagttgggcttgagggaagctgtgaaataagcaattgaaagggttaaaacactgcattatgtgcagcatgccraatctgaatgctgttctactgtgagcatggaaggcgttgtaccttcgtttgctgctgtgatctgttcccagcttcggctgtgctgtgcctgtcttctgcattccaagtcctgcagggcactcatttttttatatatataaaataaatgtttaaacaagaggcctcaaccctagtgaggcctttggcgcrtgcaggaatgaaaataacacgtaatttcagaaggctgtgttcagatctcccttttatttygygctgacctagatttgggctctgctgacttgttacagctatgcaagtgtttattgctgtgtattcctgctaagtgtcttccattccattttgatgtaaaatgcacagagtaagtacagcgtgggcttttatgacactattagagcctgaccagtgtcagaaatgagtgatgtgtgtgtgaagctcagcaaatagtgtttaattagtgaccattccaccagcctgaaagcaagaacaacc

SEQ ID NO: 37644 - DNA, 600 bp, Chicken  19866894267781_4
tgaaataagcaattgaaagggttaaaacactgcattatgtgcagcatgccraatctgaatgctgttctactgtgagcatggaaggcgttgtaccttcgtttgctgctgtgatctgttcccagcttcggctgtgctgtgcctgtcttctgcattccaagtcctgcagggcactcatttttttatatatataaaataaatgtttaaacaagaggcctcaaccctagtgaggcctttggcgcrtgcaggaatgaaaataacacgtaatttcagaaggctgtgttcagatctcccttttatttygygctgacctagatttgggctctgctgacttgttacagctatgcaagtgtttattgctgtgtattcctgctaagtgtcttccattccattttgatgtaaaatgcacagagtaagtacagcgtgggcttttatgacactattagagcctgaccagtgtcagaaatgagtgatgtgtgtgtgaagctcagcaaatagtgtttaattagtgaccattccaccagcctgaaagcaagaacaacccagaggagatgagggaaataataaactgtccctgaagtactgccaagttattagcattca

SEQ ID NO: 37645 - DNA, 600 bp, Chicken  19866894267781_5
aaataagcaattgaaagggttaaaacactgcattatgtgcagcatgccraatctgaatgctgttctactgtgagcatggaaggcgttgtaccttcgtttgctgctgtgatctgttcccagcttcggctgtgctgtgcctgtcttctgcattccaagtcctgcagggcactcatttttttatatatataaaataaatgtttaaacaagaggcctcaaccctagtgaggcctttggcgcrtgcaggaatgaaaataacacgtaatttcagaaggctgtgttcagatctcccttttatttygygctgacctagatttgggctctgctgacttgttacagctatgcaagtgtttattgctgtgtattcctgctaagtgtcttccattccattttgatgtaaaatgcacagagtaagtacagcgtgggcttttatgacactattagagcctgaccagtgtcagaaatgagtgatgtgtgtgtgaagctcagcaaatagtgtttaattagtgaccattccaccagcctgaaagcaagaacaacccagaggagatgagggaaataataaactgtccctgaagtactgccaagttattagcattcatt

SEQ ID NO: 37646 - DNA, 599 bp, Chicken  19866894267784_1
  misc_feature (1)..(56): n is any nucleotide
nnnnnnnnnnnnnnnnnnnnnnnnnnnnnnnnnnnnnnnnnnnnnnnnnnnnnnnntggggcagagtgaactgtgagctgaaaaggtgatagagtttgggcaaatgttatatctgtatgcttctcaaactaagactcataattgcttgaaatctgcatgatctttcagttaatattttagtctccttcaagtcaaccaggtttagacagcaaaattttaagcaattaataatataacttctaatgccttctttggaagaaaacatgtacaaggagaggatgagttgtttgtcatgatagyttttgtttwaagaaagtggatttatatcttgtaaatctattctagaaaataractaktttgtatagatttcattttatgtagtagattttatagtagaacatgaagtaatgcaatataaaaagaactaatatctgyacttaatttgtccaaacaaacatttttctataaggaaggccttgtcagtctctgggatgatgtgggaaaacctcattctgttagtaaagagccatcattgacacctaaacttcaagatcacttcatagagaaattgtggcaacgtgttgtgggtgacaacttg

SEQ ID NO: 37647 - DNA, 599 bp, Chicken  19866894267784_2
  misc_feature (1)..(47): n is any nucleotide
nnnnnnnnnnnnnnnnnnnnnnnnnnnnnnnnnnnnnnnnnnnnnnntggggcagagtgaactgtgagctgaaaaggtgatagagtttgggcaaatgttatatctgtatgcttctcaaactaagactcataattgcttgaaatctgcatgatctttcagttaatattttagtctccttcaagtcaaccaggtttagacagcaaaattttaagcaattaataatataacttctaatgccttctttggaagaaaacatgtacaaggagaggatgagttgtttgtcatgatagyttttgtttwaagaaagtggatttatatcttgtaaatctattctagaaaataractaktttgtatagatttcattttatgtagtagattttatagtagaacatgaagtaatgcaatataaaaagaactaatatctgyacttaatttgtccaaacaaacatttttctataaggaaggccttgtcagtctctgggatgatgtgggaaaacctcattctgttagtaaagagccatcattgacacctaaacttcaagatcacttcatagagaaattgtggcaacgtgttgtgggtgacaacttggtagttgga

SEQ ID NO: 37648 - DNA, 599 bp, Chicken  19866894267784_3
  misc_feature (1)..(4): n is any nucleotide
nnnntggggcagagtgaactgtgagctgaaaaggtgatagagtttgggcaaatgttatatctgtatgcttctcaaactaagactcataattgcttgaaatctgcatgatctttcagttaatattttagtctccttcaagtcaaccaggtttagacagcaaaattttaagcaattaataatataacttctaatgccttctttggaagaaaacatgtacaaggagaggatgagttgtttgtcatgatagyttttgtttwaagaaagtggatttatatcttgtaaatctattctagaaaataractaktttgtatagatttcattttatgtagtagattttatagtagaacatgaagtaatgcaatataaaaagaactaatatctgyacttaatttgtccaaacaaacatttttctataaggaaggccttgtcagtctctgggatgatgtgggaaaacctcattctgttagtaaagagccatcattgacacctaaacttcaagatcacttcatagagaaattgtggcaacgtgttgtgggtgacaacttggtagttggagtaaaactaactgaatcattttgtttgtaagtatataaataat

SEQ ID NO: 37649 - DNA, 600 bp, Chicken  19866894267784_4
ggggcagagtgaactgtgagctgaaaaggtgatagagtttgggcaaatgttatatctgtatgcttctcaaactaagactcataattgcttgaaatctgcatgatctttcagttaatattttagtctccttcaagtcaaccaggtttagacagcaaaattttaagcaattaataatataacttctaatgccttctttggaagaaaacatgtacaaggagaggatgagttgtttgtcatgatagyttttgtttwaagaaagtggatttatatcttgtaaatctattctagaaaataractaktttgtatagatttcattttatgtagtagattttatagtagaacatgaagtaatgcaatataaaaagaactaatatctgyacttaatttgtccaaacaaacatttttctataaggaaggccttgtcagtctctgggatgatgtgggaaaacctcattctgttagtaaagagccatcattgacacctaaacttcaagatcacttcatagagaaattgtggcaacgtgttgtgggtgacaacttggtagttggagtaaaactaactgaatcattttgtttgtaagtatataaataatttcatt

SEQ ID NO: 37650 - DNA, 600 bp, Chicken  19866894267784_5
cataattgcttgaaatctgcatgatctttcagttaatattttagtctccttcaagtcaaccaggtttagacagcaaaattttaagcaattaataatataacttctaatgccttctttggaagaaaacatgtacaaggagaggatgagttgtttgtcatgatagyttttgtttwaagaaagtggatttatatcttgtaaatctattctagaaaataractaktttgtatagatttcattttatgtagtagattttatagtagaacatgaagtaatgcaatataaaaagaactaatatctgyacttaatttgtccaaacaaacatttttctataaggaaggccttgtcagtctctgggatgatgtgggaaaacctcattctgttagtaaagagccatcattgacacctaaacttcaagatcacttcatagagaaattgtggcaacgtgttgtgggtgacaacttggtagttggagtaaaactaactgaatcattttgtttgtaagtatataaataatttcattttgtagtttaatagaaattgagattgcaagtaaagccgtgctgtaggaagagtggatttttgagatttgacttttctca

SEQ ID NO: 37651 - DNA, 600 bp, Chicken  19866894267788_1
tctcctacgtaatagtacagatctatctctaatgagtcatttttgaaatttgtcccaactgtggggaatccaagacattttaatatattaaactggtagtccaaatgacatatatttttggtaatttggtctagccttactacatggacaaatttcaaaagaaatataatgtaattctagaaacaccatccacaagaccccacatcgtaatctttcatgagaggaagtaccatattttatttgcattctgaatatcagactgagattattagtcaattatgatggttctgtttctccacyatattgataaattttaaaaggtgaaaaggacataaactaatctgggaaattacttttaaattcactcaggatatcaggagtaatgggaataaattctctacgaacatatttggactggcaattaacaggcttctgctcaacttatccatttgatataacctacagctcagagtagcaaaagactagagatacactttgaaggaagctgaagacctggacaggcttgagaggtgtgcccatgccaacctcatgaagtccaacaaggccatgtgcaaggtccttgatctgggttgggacagt

SEQ ID NO: 37652 - DNA, 600 bp, Chicken  19866894267788_2
ggaaattacttttaaattcactcaggatatcaggagtaatgggaataaattctctacgaacatatttggactggcaattaacaggcttctgctcaacttatccatttgatataacctacagctcagagtagcaaaagactagagatacactttgaaggaagctgaagacctggacaggcttgagaggtgtgcccatgccaacctcatgaagtccaacaaggccatgtgcaaggtccttgatctgggttgggacagtctcaaacacagatacaggttgagaggagaatggcttgagagcasccctgaggagaaggacatgggggggttgattgatgaaaggttcaatatggattggcagtttgtgcttgcagcccagaaggccaactgtatcctgggttgcatgaagaaaagtgtgaccagcaggccaagggaggtgatcctacctctctacttgtgagaccccacctggagtactgtgtccagttctggacctcccagcacaagaatgacatggagttgttggagcaggtccagaggagggccaggaagatgttcagagggctagagcacctcccctatgaagacaggctgggacagctg

SEQ ID NO: 37653 - DNA, 600 bp, Chicken  19866894267794_1
tattattacattttaagtttgctgggttttggcatactgtcaaatggctgagggaagttagcccccaaagccagagctttcagatatataattattttactttaaaagacagaattataatgcctatgaagttattatttcgactatcttctccaacacacttcaccccctcccccttgcatcctctattgtagggtgtccactgtgagtggaagtggtggcactatggcgccttagctaagttattattaaagcagtccttgtcctttggtcccatgggcctgcgtggctcagagtgcrgtgataaaccccctaattcagaaactgctgcagaggtactgcttcattcaatgtgctaagccacaaatcaacacatacaggatgttctttggaagatcgagtggcagcttgtgccagcatggttttgtctttgaaacagacagaaaacagatcagtcgtattcactgtaggctggtatgaagaatgaatctaacaagtagaagaagactaattagctgtttaaaaaaaagcatctcttcaagtaactttttcataattagctataacaagtgtttgggaaagtttcccggtcagytgtgt

SEQ ID NO: 37654 - DNA, 387 bp, Chicken  19866894267794_2
gtgcrgtgataaaccccctaattcagaaactgctgcagaggtactgcttcattcaatgtgctaagccacaaatcaacacatacaggatgttctttggaagatcgagtggcagcttgtgccagcatggttttgtctttgaaacagacagaaaacagatcagtcgtattcactgtaggctggtatgaagaatgaatctaacaagtagaagaagactaattagctgtttaaaaaaaagcatctcttcaagtaactttttcataattagctataacaagtgtttgggaaagtttcccggtcagytgtgtagcttatttttctcaagaggcagcagcttcttggaggaggcttcttgtagatgggtttgggtgttttgagaggaggtggttg

SEQ ID NO: 37655 - DNA, 600 bp, Chicken  19866894267814_1
ttaacaaagccttgcttcataatatttaattccttggttttacgtaccttaagagaaaatctcaggctaagttcctctctggtgtgccaggatgtatatgcaagctaaatttttttttatttcatgtttctctttttcgtactctggaagcgtaagcactttaaattactgcttaaatcattctttaacacctgccggtgttaaagtgaattagctattttcaagttgttattagaatatatgagaaggaatctaactttcttaggcaaaatagtggaatctctggatatttgccattastatgatgttttgctgctccatttgagcaaatctgtacattgagggtgaggggtattaaacaacagcagagcagttgaaaaagacattgatgctgttagaagtactagatctggattaaatgtactcttgtactcttgtgtcactcttttaaagtgccttgtgtgaaaaagcctttctttagatgccaggtttgtgtgtgtactttgcacagaaaacaagttgttgtggttttaatttttggttgttttgtttgtttgttttaaaatgaggactgctctgctttttctattcctaataaag

SEQ ID NO: 37656 - DNA, 593 bp, Chicken  19866894267822_1
actaagcagatttaaagacctcactaataccttcaagctgcataacactgatgaagaattgactcagaatcgacatgatgcactgtactagccctgacaaggtagataaaaatagcaaggaaacaatggtgatgtcaatcaaagactaagaattttgcaaatactcccacgtgcaatgagtcagagatggagtcaagagtttgagaaacccaaggcaagcaaaatctctttaaaacaagcttcactgtgtgctcagaagcgttacacaagttgcatttaaatcaacagagattcagagastttttttttttttttttaagaggggaaaaagagtcttgaagacgtttcagtccattagcatggtggcaggttctttaaaatacttttctcaaaccaagttactaataaaacaccacatgaggtatataaggctggtttactagagggtaaaaacctcccagtagaagttttggcagtgagaaacttgatccctgtgtctaaaggtgaggatgtgatcagcactaagcaggaccagaatactggtcagagacaaggacaagctcagcagctgttgaacagagcgtggcacacca

SEQ ID NO: 37657 - DNA, 592 bp, Chicken  19866894267822_2
ctaagcagatttaaagacctcactaataccttcaagctgcataacactgatgaagaattgactcagaatcgacatgatgcactgtactagccctgacaaggtagataaaaatagcaaggaaacaatggtgatgtcaatcaaagactaagaattttgcaaatactcccacgtgcaatgagtcagagatggagtcaagagtttgagaaacccaaggcaagcaaaatctctttaaaacaagcttcactgtgtgctcagaagcgttacacaagttgcatttaaatcaacagagattcagagatsttttttttttttttttaagaggggaaaaagagtcttgaagacgtttcagtccattagcatggtggcaggttctttaaaatacttttctcaaaccaagttactaataaaacaccacatgaggtatataaggctggtttactagagggtaaaaacctcccagtagaagttttggcagtgagaaacttgatccctgtgtctaaaggtgaggatgtgatcagcactaagcaggaccagaatactggtcagagacaaggacaagctcagcagctgttgaacagagcgtggcacacca

SEQ ID NO: 37658 - DNA, 591 bp, Chicken  19866894267822_3
taagcagatttaaagacctcactaataccttcaagctgcataacactgatgaagaattgactcagaatcgacatgatgcactgtactagccctgacaaggtagataaaaatagcaaggaaacaatggtgatgtcaatcaaagactaagaattttgcaaatactcccacgtgcaatgagtcagagatggagtcaagagtttgagaaacccaaggcaagcaaaatctctttaaaacaagcttcactgtgtgctcagaagcgttacacaagttgcatttaaatcaacagagattcagagattstttttttttttttttaagaggggaaaaagagtcttgaagacgtttcagtccattagcatggtggcaggttctttaaaatacttttctcaaaccaagttactaataaaacaccacatgaggtatataaggctggtttactagagggtaaaaacctcccagtagaagttttggcagtgagaaacttgatccctgtgtctaaaggtgaggatgtgatcagcactaagcaggaccagaatactggtcagagacaaggacaagctcagcagctgttgaacagagcgtggcacacca

SEQ ID NO: 37659 - DNA, 600 bp, Chicken  19866894267824_1
agattaattgtatttaatagtgtgaaagttgagaaataaaacatttaaattccttcaacaattttcttacagtatctcttttcattattaacctccaaggaacaaattcatgtctattttcttagtattttatgctccttgtaatatagcacagaaaacacaaaacacagcaatggaggtattatgctgctgtttgccattagaagaagatctgatgcacacactgtttattcactcttactacagtagaatttgagatttcctgacctaaggtgaatgattgaacaaatggttctttcwcccctcttctcccatatccgttcttactctctctccccttttctccactggttgtttttgtgcagtttcacagactcttttcttccttgctggaactataaggaaaagaaagaaaaatgcttataagaatagaacagtatgacagaaaactacagctacaggagagatttggagcagatgttatgtctgaaccaacttacaagcctgtctgcaaaaactagcattagtttatgttagtaatgcccagttaagaaaataagcatacctacaattgtatcaacttctcaaatcaaagttgta

SEQ ID NO: 37660 - DNA, 600 bp, Chicken  19866894267830_1
aaacagtgcccatcttccttcggcacagcatgctttggtgcagacacctgaaatggccggaggctatagagcaaatagctccacgcttacagtgctcagttaataaagcatacactcatcaaaattcagcaggttttacagccataagcaaagggaatcgagtgaaattggaagacagaggcagaagcagtggagggcatctttacatgtggtatctaaaaaggaatgcaatctctgaagcagcaagactataaataaagggcatcccaagaagacagagctttcaaaaccattctcacmtccgatggaaagttccccagcatatcagcagtttcttaacagtaaggtatttcatcgttcctgcatacattattcataggctattgtcaacacaatttttaaacgctccattaaacaacccagctacacaattcactcacaaaaggacatcagaaagctgctaagtttcttgtattacaccgtgagtcctctacttaggttgtctaaattaatcaccgtttacctccccttgtctggatttcttggaagaactctggcagtaagtaacaactgaactagaaataaaagtcacaaaatccc

SEQ ID NO: 37661 - DNA, 600 bp, Chicken  19866894267830_2
tttgagcagttaccattacaatcacagcttgccctcccctgtgtgcacacatgacgagacaggttttaattacatttgtcattttccccaggaaccttgccttactgaatgtgagatatgcagttgtgcagaaagattatgtttgcttggtaaccttgaaattatcattttctactatctgaatttgaattttccaagcccaaccagcattattttaaaataatagtttgcattatttccaccccaggaacaactgaggaattcttcaggcgtaaggggtgagattccaatctcagttgytcacccataactctggaatttaggagttagagtcctcacttaagaaaaacctcatagacctagaaggcttctcatcattaactctttattcccttgcaccttttctacaagtatacttcaaatgagttatttcaaaacatgcccttgcctattactctgtgctacggctcagctgagctcctgtgctggctctgaccaaaaagagcgctccatgagggacacttcacagagacagaggttcccacatagctaagatccaggcacccatcctgctgggatggtgcggcaccagatatgttt

SEQ ID NO: 37662 - DNA, 600 bp, Chicken  19866894267830_3
agcacagaaaatatcttgaatgcaatgacaaaacaacgtttgcaagcttggaattgagcataattcagggcattttttcatctcctatgtttaccgagtcatttagagtcttcaaaaactagttcaagttgctgtaaagacactatgtctgtatttgtagagttctaatggaaatatgcatatttattaaattgtctgcattcagacagagccagtgaaaccctccagagcttagatagaccatggggaagttgtgtcctggctctcaccaagagatgtacacccatgatctttaaacasaacctggtactgacacasagagctctttggaggctcatagcttggatatccacctccctgccagggattcataggtgtacagtattcctctttgttttgtctgttcttgttctgctccagcttggaatattgctcatttccttgttgttgttgagcagtgacagatgatrctatcacacaagtactccaaacatgctgtggtttggtattggtgtaagacttcttgagaggctaggcttgcccatgaggaaacacagctacgggaggagaagtaatgcagggcaataaagactgagaaaa

SEQ ID NO: 37663 - DNA, 600 bp, Chicken  19866894267830_4
aatgcaatgacaaaacaacgtttgcaagcttggaattgagcataattcagggcattttttcatctcctatgtttaccgagtcatttagagtcttcaaaaactagttcaagttgctgtaaagacactatgtctgtatttgtagagttctaatggaaatatgcatatttattaaattgtctgcattcagacagagccagtgaaaccctccagagcttagatagaccatggggaagttgtgtcctggctctcaccaagagatgtacacccatgatctttaaacasaacctggtactgacacasagagctctttggaggctcatagcttggatatccacctccctgccagggattcataggtgtacagtattcctctttgttttgtctgttcttgttctgctccagcttggaatattgctcatttccttgttgttgttgagcagtgacagatgatrctatcacacaagtactccaaacatgctgtggtttggtattggtgtaagacttcttgagaggctaggcttgcccatgaggaaacacagctacgggaggagaagtaatgcagggcaataaagactgagaaaaggtacccaatgcacaaaa

SEQ ID NO: 37664 - DNA, 600 bp, Chicken  19866894267830_5
gaaatatgcatatttattaaattgtctgcattcagacagagccagtgaaaccctccagagcttagatagaccatggggaagttgtgtcctggctctcaccaagagatgtacacccatgatctttaaacasaacctggtactgacacasagagctctttggaggctcatagcttggatatccacctccctgccagggattcataggtgtacagtattcctctttgttttgtctgttcttgttctgctccagcttggaatattgctcatttccttgttgttgttgagcagtgacagatgatrctatcacacaagtactccaaacatgctgtggtttggtattggtgtaagacttcttgagaggctaggcttgcccatgaggaaacacagctacgggaggagaagtaatgcagggcaataaagactgagaaaaggtacccaatgcacaaaatatatgctggacctagcatgcagaaatgaccaaaagcttcatacaatagcccctaagctacatcctcaaattagtcattgatgactagccaagagcccagaggtctctaatgaccccaggaagcaatgtgggatatcaagtaatgtttctct

SEQ ID NO: 37665 - DNA, 600 bp, Chicken  19866894267831_1
tacccttagcataaagaactttttctttatatcaaatctaaatttcccatcttttagtgtgaaaccatttcctcttgtcctgtcacaacagacctcgctaaagagtctgtccccttcttccttagaaccgtagaatcattaacgttgggaaagatctccaagatccccaggtccaaccccagcccaccccaccgtgcccactgaccacgtccctcagtgccacatctccacagttcttgaacatctcccgggatggtgactcctccacttctctgggcagctgtgctggtgcatcaccaytgattcagagaagaaatgttccctaatatccaacctgaacctcacctgaagcaacatgaggccgtcgcctctcatgctattacagttaccygggagcaaaggccagtccccacctcactcagacctcctctcatggaggtgtagagaacggtgaggtctcccctgagcctgaggaygccgcagggcagggctcccctcacaagtgccrgggcatcggggaggggaagcacacgtgtgggagcatccccacactgcccagtgctgcaaccagcagccacgtgtgtgtgccacataggcatg

SEQ ID NO: 37666 - DNA, 600 bp, Chicken  19866894267831_2
acctcgctaaagagtctgtccccttcttccttagaaccgtagaatcattaacgttgggaaagatctccaagatccccaggtccaaccccagcccaccccaccgtgcccactgaccacgtccctcagtgccacatctccacagttcttgaacatctcccgggatggtgactcctccacttctctgggcagctgtgctggtgcatcaccaytgattcagagaagaaatgttccctaatatccaacctgaacctcacctgaagcaacatgaggccgtcgcctctcatgctattacagttaccygggagcaaaggccagtccccacctcactcagacctcctctcatggaggtgtagagaacggtgaggtctcccctgagcctgaggaygccgcagggcagggctcccctcacaagtgccrgggcatcggggaggggaagcacacgtgtgggagcatccccacactgcccagtgctgcaaccagcagccacgtgtgtgtgccacataggcatgaaccacagagcatgggcacggtgcatgcagacaccgtgtgtgtgtgtgtgtgtgtgcctgcttcaccatcagaagtgtgtgaatgtgtgtc

SEQ ID NO: 37667 - DNA, 600 bp, Chicken  19866894267831_3
ccccagcccaccccaccgtgcccactgaccacgtccctcagtgccacatctccacagttcttgaacatctcccgggatggtgactcctccacttctctgggcagctgtgctggtgcatcaccaytgattcagagaagaaatgttccctaatatccaacctgaacctcacctgaagcaacatgaggccgtcgcctctcatgctattacagttaccygggagcaaaggccagtccccacctcactcagacctcctctcatggaggtgtagagaacggtgaggtctcccctgagcctgaggaygccgcagggcagggctcccctcacaagtgccrgggcatcggggaggggaagcacacgtgtgggagcatccccacactgcccagtgctgcaaccagcagccacgtgtgtgtgccacataggcatgaaccacagagcatgggcacggtgcatgcagacaccgtgtgtgtgtgtgtgtgtgtgcctgcttcaccatcagaagtgtgtgaatgtgtgtccatgtccctgcaacagggcagtgagtcacacagagctctcaccatgtctgtgcagatgtgacattgagtgccacagtgctgctgc

SEQ ID NO: 37668 - DNA, 597 bp, Chicken  19866894267831_4
gtccctcagtgccacatctccacagttcttgaacatctcccgggatggtgactcctccacttctctgggcagctgtgctggtgcatcaccaytgattcagagaagaaatgttccctaatatccaacctgaacctcacctgaagcaacatgaggccgtcgcctctcatgctattacagttaccygggagcaaaggccagtccccacctcactcagacctcctctcatggaggtgtagagaacggtgaggtctcccctgagcctgaggaygccgcagggcagggctcccctcacaagtgccrgggcatcggggaggggaagcacacgtgtgggagcatccccacactgcccagtgctgcaaccagcagccacgtgtgtgtgccacataggcatgaaccacagagcatgggcacggtgcatgcagacaccgtgtgtgtgtgtgtgtgtgtgcctgcttcaccatcagaagtgtgtgaatgtgtgtccatgtccctgcaacagggcagtgagtcacacagagctctcaccatgtctgtgcagatgtgacattgagtgccacagtgctgctgccccctgatggcacagcgggcctcagctgg

SEQ ID NO: 37669 - DNA, 600 bp, Chicken  19866894267834_1
tcttttcagcagaactcatttgtttccagcagatttagggaaagcaaacagcccccgacgactgcaaatgccagcctcgcttcagggagagccctggctgagacctgtggataagtgtatcaaataatataaatataaacgaatataaggtaacggagtgttgccaggcaactgtcggaggcactctggttccctcatctcacgtttgctggaatgacctcttacattttaggcaccgtgcctgcccacatacgagatggctgctctgggctttgcaggtgcacctctcaggcagcagcrtaactggcaaatgctgccggttgtgtctggtgtgatgctgccaggccctcctgggcatatgtgctatattaaagaaaataaattaagaaatcaaagagtaagggtaaagattacctgggtccaattctcagcagtatagcaggctgaatatgtggttcagctgtgttggtagaattgacatgaaagcaggcagagggtagaactcgtgacttctgtttttaatgactgcagtacacggcaaggtaagctgggttttacctctgattttgctgccttaaaatcaattctggcaggctgtgg

SEQ ID NO: 37670 - DNA, 600 bp, Chicken  19866894267834_2
aaataaattaagaaatcaaagagtaagggtaaagattacctgggtccaattctcagcagtatagcaggctgaatatgtggttcagctgtgttggtagaattgacatgaaagcaggcagagggtagaactcgtgacttctgtttttaatgactgcagtacacggcaaggtaagctgggttttacctctgattttgctgccttaaaatcaattctggcaggctgtggccaggctttggggcaggtcagtgcagcctggggaccgtcctcaggttgccacgctgccctggcagctcactgggwgctgaggggctgtgctcgccaatagcctgatctgtgtgcagcaaaggatgaggttaaccttttctgtttgctgaaataaccttttcaaaagctgtgtttatcagggtgaacataacttgtacattgtaaatgttggtgacatgactagattttgggcagctgtttcattacttgaatagtattcctgtttggagcgtgttaggtgttgcagtccatccccaccatgagaaagctgctgtctgaaaatcaacagcatacagcagggtgaaaagggctccatgtaggaattagttaagctgc

SEQ ID NO: 37671 - DNA, 600 bp, Chicken  19866894267851_1
cagcaggaatggctgtgttgggtcagagcaggatgctgaacttatctctgcctcaccatcacggacctggaaaaacaataaggttgtccaggtaaatgcttgcttagttgtctttgaatatctgtgtggtaatggctgctcgtgcaagtgttactgcatgttcaatctatcttttgtgtctactgcaccatgtctcagacaccaacaccagggggatcttagatcccagccctggcacctggcaattgcccctgagctgactgaatgcagcagagccagagttcaacctagctggttttrtctgtgctgtgcatcacactgagatgatggtggcatacgaagctctaagaggaatgtagtcctgttactcatttatgtaggtgctatgaaaaatatagttagccagcttgcctgccttccatccacgccaagctgtgattagtgagacactttacacccacattttatctcatgtattttggtcagggaaacaaaatataataggctgaggctcctttaactgcttcactttattaaaaacaacaaaaatgcacctcatgcatgagtatagagatgcaagtgtgcctttctgtctgtgtg

SEQ ID NO: 37672 - DNA, 599 bp, Chicken  19866894267854_1
  misc_feature (1)..(202): n is any nucleotide
nnnnnnnnnnnnnnnnnnnnnnnnnnnnnnnnnnnnnnnnnnnnnnnnnnnnnnnnnnnnnnnnnnnnnnnnnnnnnnnnnnnnnnnnnnnnnnnnnnnnnnnnnnnnnnnnnnnnnnnnnnnnnnnnnnnnnnnnnnnnnnnnnnnnnnnnnnnnnnnnnnnnnnnnnnnnnnnnnnnnnnnnnnnnnnnnnnnnnnnnnncccccgggcctaggtctttccctgtgtgtaggattactcacctaggaaacttaactgtttgcttgtatgggcccttctcaatcatctctttgttagasgggggtaggcagggagtcataggatttggggtgatgctggaaagagagttctaggcactggaagtaggtattkaagcttagggaattcagacacaccagacattcagttacagatacaccataacgtctgccatctctccttaacctctggtgaacttgagatttccttcatacagcactgcctgcatctccatgaggatatctgcattctcagcaggagctggtcatctcccctaagccacctgtgttaccctacaaagcagactgaccagagctggctctccgtagggaacaacagc

SEQ ID NO: 37673 - DNA, 599 bp, Chicken  19866894267854_2
  misc_feature (1)..(129): n is any nucleotide
nnnnnnnnnnnnnnnnnnnnnnnnnnnnnnnnnnnnnnnnnnnnnnnnnnnnnnnnnnnnnnnnnnnnnnnnnnnnnnnnnnnnnnnnnnnnnnnnnnnnnnnnnnnnnnnnnnnnnnnnnnnnnnnnncccccgggcctaggtctttccctgtgtgtaggattactcacctaggaaacttaactgtttgcttgtatgggcccttctcaatcatctctttgttagasgggggtaggcagggagtcataggatttggggtgatgctggaaagagagttctaggcactggaagtaggtattkaagcttagggaattcagacacaccagacattcagttacagatacaccataacgtctgccatctctccttaacctctggtgaacttgagatttccttcatacagcactgcctgcatctccatgaggatatctgcattctcagcaggagctggtcatctcccctaagccacctgtgttaccctacaaagcagactgaccagagctggctctccgtagggaacaacagctgattcataaatgaccaagcctgaaaggagcacagcaaacaccatgtctcacctccagtgtcaaacagggcca

SEQ ID NO: 37674 - DNA, 599 bp, Chicken  19866894267855_1
  misc_feature (1)..(195): n is any nucleotide
nnnnnnnnnnnnnnnnnnnnnnnnnnnnnnnnnnnnnnnnnnnnnnnnnnnnnnnnnnnnnnnnnnnnnnnnnnnnnnnnnnnnnnnnnnnnnnnnnnnnnnnnnnnnnnnnnnnnnnnnnnnnnnnnnnnnnnnnnnnnnnnnnnnnnnnnnnnnnnnnnnnnnnnnnnnnnnnnnnnnnnnnnnnnnnnnnnnatttctaactgagaacgcaaaggaaagtaagaaatagagtttgccttcatcattttgtttaatttatccttattagttttcatttgttcacaactgaactaaaaygatagccatccattttgtcaatacaggttcctcaaaccaataacttaaaaaggtataattattatttctaaagtcttatttgtaggttgtcaagattagcatgctgttctgcttcgtttttctgtttaacttttcagtagccttacttcagaggctttttaatacttctatttatctaacattttgccagcattttgcttcttcatcttcccaytcttgtgactctccacattccagttcatttccatcccagaagagaaggggttctgcttctttcttcattttctttactaattatg

SEQ ID NO: 37675 - DNA, 600 bp, Chicken  19866894267855_2
aaggaaagtaagaaatagagtttgccttcatcattttgtttaatttatccttattagttttcatttgttcacaactgaactaaaaygatagccatccattttgtcaatacaggttcctcaaaccaataacttaaaaaggtataattattatttctaaagtcttatttgtaggttgtcaagattagcatgctgttctgcttcgtttttctgtttaacttttcagtagccttacttcagaggctttttaatacttctatttatctaacattttgccagcattttgcttcttcatcttcccaytcttgtgactctccacattccagttcatttccatcccagaagagaaggggttctgcttctttcttcattttctttactaattatgacttgaaatcatcatagaatcacagaaccatagaatggcctgggttgaaaaggacctcaaagatcatctagtttcaactcccctgccatgggcagggttgtcaaccactagaccagggtgcccagagccacatccaacctggatgtgatgggaagagaagaggctttggtatgtccaggtgtttacctgagaagctcataacgctggtggaatca

SEQ ID NO: 37676 - DNA, 600 bp, Chicken  19866894267864_1
atagcagagaaggatgccctggagctttggcccacaaggcatgcgggaacacagtttttttcagaaatcaaacattttgtgtttccagttgcagcaatttcagctttcacgttacgtctcgtgttgctgaaaactcaaagctttcagtgaaaccttttctctttcaattttgaccagctctgctcacaagctggtaagaatggtgcaatattttcagtctgttgggaaaatcagaagcgctcctaaacacttttccccaagtgattttttcccccacccagaaaaaaaataggaaataaygacactatcagatctctgtactccagatctggctctgagttcttattttgatgtctacatgaagaatcctgggtgtttcagtttgtttcttgattttaaagactgtctagaaaacattggttggtgagcacatgcgtagatgcttaaatatggattgggattcctggctggggactcacagctgcaaatgctcaatggtgcctgtgtaacatttcatgtctttccacctacagccatttctggtaccatttgatcaagttaagggagtaggaaaaatataagtgagatgatttgatagga

SEQ ID NO: 37677 - DNA, 600 bp, Chicken  19866894267873_1
aggatgtaggtgagtattagatgagtttaatctcagcctgcaacatttaatattggatttcatatataaaaaatacatgaataccagtaattttcagaagagctaaattccatgaagtttcaaatgaatttgatgattattgtttgataatatttaagcaacattaaaaacaatcaactatgatattaatgttttaacataatgaagaaaacctgtccttgcattaaaaaataaaaaataaaaaatctgtgacattggactgagttaagcactaaagaaggagtctgttcaagatttctsaaatcttggtccatcattgctgaaatatgcccatttctgtttaaatacattaagttagtcttcaaaaacaacttcaagaactttttaggatctaggtgtttaatcatcattttggcttacaagatttatttgacaccttgagataaaattattcagcctgtcagcacactggtaaaaacttatttactgcctttttcaaatcacttcagaaagaggtaagcatgatcggctgaacatcaacatgtgagaattcactgtcttccagtacaaatatagtgctcagtctgtaagatgacaaca

SEQ ID NO: 37678 - DNA, 600 bp, Chicken  19866894267874_1
ggtagcatgaggagaaaatacttgaaatattctgtttatttaaaagattttaacttaaaaatgtttatctgttgtatggtgttacaagattacaaatggataagtgtattttattcatttacgtgggaactctatgaatttctacacctcaagtggttatttttgaatgctggtaaggaatggcttgggaaaactgacagcattatattctttacccacaagtatgagatgcaactcagtcataattcctttcctctgttggatttgattctattttttatttattattattattttttwattattattattattttaacacagatgtttgcagaatttgaatgtgcaggacaagtattgggaagttggagtatgcaagtgggaaatgctgtacagattttctgtttatttttaattgtgaaatgcacagtaggaaggatagggactgatgtcattctgcactatgaaaataaaaggaggaggaggtgggtgagtcaccttgtggtcaacatgttagcttctactaagttctacaggaatctctgcacagataataaaagtggtaggacagatgcccatctgccattgtactgtcatttg

SEQ ID NO: 37679 - DNA, 600 bp, Chicken  19866894267874_2
tatctagaaagagatcattctagatgtaacttattcaatataaatactgtgttttaaacttcatttaattctcagaagagagattttattacttttaacactgttgagcaaagagtcctggcaaaatggattttagatctattagataatatagctttagaggtaatcactgagactagtgcatttggtctttatagaaaatttatgcaaatgtaggtgtgttcatggttaaatctccctccaaaagtcatttttatttccttgacactgtactactcctatactggcccggccccatcrtcattatggtgtgcagtgaaataagtgtggacatttgttaaatatgtgttgcattatttcctaagaagttgtttgaaatgaatgacctcacttttgcttcttggagcataagaaatatatttgggcagtactgacattctaaataatgcaaatcatttttctaccctgttttttgaactttagaaagtggaagaagtcatattcacggttctccttaaacaattattttatgaattgctttttttgcttctttagaatgcacagcccaatatgcttctacagtttctagattgatattta

SEQ ID NO: 37680 - DNA, 600 bp, Chicken  19866894267874_3
ttctccttaaacaattattttatgaattgctttttttgcttctttagaatgcacagcccaatatgcttctacagtttctagattgatatttaagactgctgaactcattccatgtcctctctatttaagatgactttctgaatatttcagcaaaataggaagaaaaagtgttacatatgagttaatgaagaattatcagccaccttttcatgacaatcaagtatttctatccttaataaagctagatagagaattctggaaaaaagctctttctgatagtctcttcaacattgctgcagrtggtaggccatacattaaaagagtgaatgttgtaaggtgctttatgtgcaggacttttcccactttgtatttgaactatttattatcagtttgttttagagccagccacacagtgcagactgattgctctgtgcgctgcccctcagtatgtatggagggaatacgaagtactatgtttaaatggttttaacagtgttattgaacccaagctcagatgaagcagggtaatcaatccaggtgaaaggtaaaacaccccatttcttttttgatgacattttctattcctatcattttaaaatg

SEQ ID NO: 37681 - DNA, 599 bp, Chicken  19866894267879_1
  misc_feature (1)..(203): n is any nucleotide
nnnnnnnnnnnnnnnnnnnnnnnnnnnnnnnnnnnnnnnnnnnnnnnnnnnnnnnnnnnnnnnnnnnnnnnnnnnnnnnnnnnnnnnnnnnnnnnnnnnnnnnnnnnnnnnnnnnnnnnnnnnnnnnnnnnnnnnnnnnnnnnnnnnnnnnnnnnnnnnnnnnnnnnnnnnnnnnnnnnnnnnnnnnnnnnnnnnnnnnnnnntgaaacagtttgtgtcccatggcagagaggccctggtggcaatgctgtctttgggatctgtaaatcacagcccgtatccaacagctgtatccaactwmctttgtcctattatcccctctcctgacaaaaaaggcacacggtaaaaaaacctacttattatattcctcatatttagtgctacttatactgcatagcatgtttttccactctttgtctgcatttgtctattyaatggttgtcacaggttgactgggactgaaattctgctctttccaaggaggggtgactctaaataaggacacgtgaaaattttgtgatatattctagtgcatctctagaaaatgtggattatgaaaccaaggaatgtaatttgtctcacttttgctgtcccaaata

SEQ ID NO: 37682 - DNA, 599 bp, Chicken  19866894267879_2
  misc_feature (1)..(202): n is any nucleotide
nnnnnnnnnnnnnnnnnnnnnnnnnnnnnnnnnnnnnnnnnnnnnnnnnnnnnnnnnnnnnnnnnnnnnnnnnnnnnnnnnnnnnnnnnnnnnnnnnnnnnnnnnnnnnnnnnnnnnnnnnnnnnnnnnnnnnnnnnnnnnnnnnnnnnnnnnnnnnnnnnnnnnnnnnnnnnnnnnnnnnnnnnnnnnnnnnnnnnnnnnntgaaacagtttgtgtcccatggcagagaggccctggtggcaatgctgtctttgggatctgtaaatcacagcccgtatccaacagctgtatccaactwmctttgtcctattatcccctctcctgacaaaaaaggcacacggtaaaaaaacctacttattatattcctcatatttagtgctacttatactgcatagcatgtttttccactctttgtctgcatttgtctattyaatggttgtcacaggttgactgggactgaaattctgctctttccaaggaggggtgactctaaataaggacacgtgaaaattttgtgatatattctagtgcatctctagaaaatgtggattatgaaaccaaggaatgtaatttgtctcacttttgctgtcccaaatag

SEQ ID NO: 37683 - DNA, 599 bp, Chicken  19866894267879_3
  misc_feature (1)..(70): n is any nucleotide
nnnnnnnnnnnnnnnnnnnnnnnnnnnnnnnnnnnnnnnnnnnnnnnnnnnnnnnnnnnnnnnnnnnnnntgaaacagtttgtgtcccatggcagagaggccctggtggcaatgctgtctttgggatctgtaaatcacagcccgtatccaacagctgtatccaactwmctttgtcctattatcccctctcctgacaaaaaaggcacacggtaaaaaaacctacttattatattcctcatatttagtgctacttatactgcatagcatgtttttccactctttgtctgcatttgtctattyaatggttgtcacaggttgactgggactgaaattctgctctttccaaggaggggtgactctaaataaggacacgtgaaaattttgtgatatattctagtgcatctctagaaaatgtggattatgaaaccaaggaatgtaatttgtctcacttttgctgtcccaaatagatgaatcagaacagccatatcatcttgtgtggacagatttctcagtataacaaagatgtgccttatcctcctccattgcctcctggtacagaaaaaatacagaaagaaagaaacatcacaaggtacgtttct

SEQ ID NO: 37684 - DNA, 600 bp, Chicken  19866894267879_4
gactctaaataaggacacgtgaaaattttgtgatatattctagtgcatctctagaaaatgtggattatgaaaccaaggaatgtaatttgtctcacttttgctgtcccaaatagatgaatcagaacagccatatcatcttgtgtggacagatttctcagtataacaaagatgtgccttatcctcctccattgcctcctggtacagaaaaaatacagaaagaaagaaacatcacaaggtacgtttctcctttggaacttgtgaccaggttctaggtggattgcttacagattttgtgagtcygatgttcagaagatagtctgtacatccacaccaggcatgtgtaattgcaacagaatgttgcaatactaaaaaaactaaaatccacaatatttagtagaaggcagtgggagattttgatcagtacattgctacaatgatcaattttaatgatcagttttggtttctctggattgctgtaggcagctgtgacagcaccatatgcaaaatttttgggagctaaaaagtgaattggtacttatgatctagttttcaggtccattggttagtccattacagaaaaaaaaaaatctgtctgcattt

SEQ ID NO: 37685 - DNA, 599 bp, Chicken  19866894267880_1
  misc_feature (1)..(112): n is any nucleotide
nnnnnnnnnnnnnnnnnnnnnnnnnnnnnnnnnnnnnnnnnnnnnnnnnnnnnnnnnnnnnnnnnnnnnnnnnnnnnnnnnnnnnnnnnnnnnnnnnnnnnnnnnnnnnnnnccacacgcctggagaaatcactgcagagccaacggcagacccgtccctcacctcctgcccaaaggcactgtttgaagtaagcaacaaagcaaataaaaatcactgataccattaaaacgtatctctaggaaaacacatccatgtgcttatgaacttattaaatagagcttgattcaggtagcaccagygaaggttttcctgaaccgaaaggaccccgtgcagaactttgtaccctgcaggggaagatgacacagttccacattaccctggtgatgaattaaatgttccaggctggactgcaaggacaggcattgacatatrggcacacatccagcagaggccagcgggctgctcagggcacagggtgggaaggggggctggrggacacggccttcaccccagagaagrggagagtatggggatctgcagctccctcatggggttatagggaaggctgagctaaaggatgacattctatctgaatata

SEQ ID NO: 37686 - DNA, 600 bp, Chicken  19866894267880_2
tgcagagccaacggcagacccgtccctcacctcctgcccaaaggcactgtttgaagtaagcaacaaagcaaataaaaatcactgataccattaaaacgtatctctaggaaaacacatccatgtgcttatgaacttattaaatagagcttgattcaggtagcaccagygaaggttttcctgaaccgaaaggaccccgtgcagaactttgtaccctgcaggggaagatgacacagttccacattaccctggtgatgaattaaatgttccaggctggactgcaaggacaggcattgacatatrggcacacatccagcagaggccagcgggctgctcagggcacagggtgggaaggggggctggrggacacggccttcaccccagagaagrggagagtatggggatctgcagctccctcatggggttatagggaaggctgagctaaaggatgacattctatctgaatataagggaatattcctctccatgagtggcacgggaagcagagtggctgtgaatctcctccattggtggcacagataatcaggaaggcacacagcatcctgagccatctttgaacctggccttgcttcgagcagtagt

SEQ ID NO: 37687 - DNA, 541 bp, Chicken  19866894267880_3
aacaaagcaaataaaaatcactgataccattaaaacgtatctctaggaaaacacatccatgtgcttatgaacttattaaatagagcttgattcaggtagcaccagygaaggttttcctgaaccgaaaggaccccgtgcagaactttgtaccctgcaggggaagatgacacagttccacattaccctggtgatgaattaaatgttccaggctggactgcaaggacaggcattgacatatrggcacacatccagcagaggccagcgggctgctcagggcacagggtgggaaggggggctggrggacacggccttcaccccagagaagrggagagtatggggatctgcagctccctcatggggttatagggaaggctgagctaaaggatgacattctatctgaatataagggaatattcctctccatgagtggcacgggaagcagagtggctgtgaatctcctccattggtggcacagataatcaggaaggcacacagcatcctgagccatctttgaacctggccttgcttcgagcagtagtca

SEQ ID NO: 37688 - DNA, 515 bp, Chicken  19866894267880_4
ccattaaaacgtatctctaggaaaacacatccatgtgcttatgaacttattaaatagagcttgattcaggtagcaccagygaaggttttcctgaaccgaaaggaccccgtgcagaactttgtaccctgcaggggaagatgacacagttccacattaccctggtgatgaattaaatgttccaggctggactgcaaggacaggcattgacatatrggcacacatccagcagaggccagcgggctgctcagggcacagggtgggaaggggggctggrggacacggccttcaccccagagaagrggagagtatggggatctgcagctccctcatggggttatagggaaggctgagctaaaggatgacattctatctgaatataagggaatattcctctccatgagtggcacgggaagcagagtggctgtgaatctcctccattggtggcacagataatcaggaaggcacacagcatcctgagccatctttgaacctggccttgcttcgagcagtagtca

SEQ ID NO: 37689 - DNA, 600 bp, Chicken  19866894267885_1
ggtacatggggtcctgttcatggcgtggggagctattctcttttcctgcggtgcttgtttggaggcaaagctggggaggctgccctgcatctctcagcccctccacagcttcagccagggaaggatggaagagttcagccaagtttgtgcaggaaaggagatctcacaggggtggtgctgggttttcccaggcattagcatttgcaggccacaaccaacagtagccaagaaactgcgggtgacgaaggaacacctccacacaaagggaacatcgttgtcaaaggaaagctgctggcttgmaggggctgtccacttctgagggctgagggggcagcgagragaggayagcrtctttccaaaagatgaggctgtttcacccagggaacttcctactctgtactaattagcaaagcagacatgcctctgtaggaggaagctgttggaaagggtagcgtaacctcctggcaagagccaggatttgggtctctgctccaaactgctggcaagcatcacgggccatggggggaccatggaggcagaggagagtgtgcagaaacaacagagggattagggagtcagccctgggaacagcttgtttcc

SEQ ID NO: 37690 - DNA, 600 bp, Chicken  19866894267885_2
cttttcctgcggtgcttgtttggaggcaaagctggggaggctgccctgcatctctcagcccctccacagcttcagccagggaaggatggaagagttcagccaagtttgtgcaggaaaggagatctcacaggggtggtgctgggttttcccaggcattagcatttgcaggccacaaccaacagtagccaagaaactgcgggtgacgaaggaacacctccacacaaagggaacatcgttgtcaaaggaaagctgctggcttgmaggggctgtccacttctgagggctgagggggcagcgagragaggayagcrtctttccaaaagatgaggctgtttcacccagggaacttcctactctgtactaattagcaaagcagacatgcctctgtaggaggaagctgttggaaagggtagcgtaacctcctggcaagagccaggatttgggtctctgctccaaactgctggcaagcatcacgggccatggggggaccatggaggcagaggagagtgtgcagaaacaacagagggattagggagtcagccctgggaacagcttgtttccaagaccccgaggcaaacctttcagttcataattgggtaa

SEQ ID NO: 37691 - DNA, 600 bp, Chicken  19866894267885_3
tgcggtgcttgtttggaggcaaagctggggaggctgccctgcatctctcagcccctccacagcttcagccagggaaggatggaagagttcagccaagtttgtgcaggaaaggagatctcacaggggtggtgctgggttttcccaggcattagcatttgcaggccacaaccaacagtagccaagaaactgcgggtgacgaaggaacacctccacacaaagggaacatcgttgtcaaaggaaagctgctggcttgmaggggctgtccacttctgagggctgagggggcagcgagragaggayagcrtctttccaaaagatgaggctgtttcacccagggaacttcctactctgtactaattagcaaagcagacatgcctctgtaggaggaagctgttggaaagggtagcgtaacctcctggcaagagccaggatttgggtctctgctccaaactgctggcaagcatcacgggccatggggggaccatggaggcagaggagagtgtgcagaaacaacagagggattagggagtcagccctgggaacagcttgtttccaagaccccgaggcaaacctttcagttcataattgggtaaaattcag

SEQ ID NO: 37692 - DNA, 600 bp, Chicken  19866894267885_4
gtgcttgtttggaggcaaagctggggaggctgccctgcatctctcagcccctccacagcttcagccagggaaggatggaagagttcagccaagtttgtgcaggaaaggagatctcacaggggtggtgctgggttttcccaggcattagcatttgcaggccacaaccaacagtagccaagaaactgcgggtgacgaaggaacacctccacacaaagggaacatcgttgtcaaaggaaagctgctggcttgmaggggctgtccacttctgagggctgagggggcagcgagragaggayagcrtctttccaaaagatgaggctgtttcacccagggaacttcctactctgtactaattagcaaagcagacatgcctctgtaggaggaagctgttggaaagggtagcgtaacctcctggcaagagccaggatttgggtctctgctccaaactgctggcaagcatcacgggccatggggggaccatggaggcagaggagagtgtgcagaaacaacagagggattagggagtcagccctgggaacagcttgtttccaagaccccgaggcaaacctttcagttcataattgggtaaaattcagttga

SEQ ID NO: 37693 - DNA, 600 bp, Chicken  19866894267887_1
aatctttttgtattccccaagattgatgagccaatttgtagctaaggttgccttatatttccccaaatttctttcagttgtggataaagtattcagactaactgtttaggctgaaatctcccatgttagggattttcttgatgggaccactttcagaaagtttctgcgggaagatttcacctaacacttttcttagactaaagctaagaaagccatggaatctggctactggaaaataatttctgtagttatgttgttgagaagttccttagtgctggctggtcagcgcttgtaacttgraaagggatgtggcccattccagtgaagcgtccattgctattcaatgaaaaacagcatgartgtggccaatttcattacactttaatttattcttattctgcaaactggttgtgattctttggtctgtggtaattacagaatcgttgctcccataaattcagaacataaaatatttgccgtggcattagcgaaaccatttagaaacaagaagtctacacactgcatatctacctcccaggtggtaattgtcaaaaacagatttggaaaatgtctgaacgctgtgtgcaacattatccacct

SEQ ID NO: 37694 - DNA, 600 bp, Chicken  19866894267887_2
ccccaaatttctttcagttgtggataaagtattcagactaactgtttaggctgaaatctcccatgttagggattttcttgatgggaccactttcagaaagtttctgcgggaagatttcacctaacacttttcttagactaaagctaagaaagccatggaatctggctactggaaaataatttctgtagttatgttgttgagaagttccttagtgctggctggtcagcgcttgtaacttgraaagggatgtggcccattccagtgaagcgtccattgctattcaatgaaaaacagcatgartgtggccaatttcattacactttaatttattcttattctgcaaactggttgtgattctttggtctgtggtaattacagaatcgttgctcccataaattcagaacataaaatatttgccgtggcattagcgaaaccatttagaaacaagaagtctacacactgcatatctacctcccaggtggtaattgtcaaaaacagatttggaaaatgtctgaacgctgtgtgcaacattatccacctggcaaataaatgaaactcccctgcggcagatgacttgatagaagctgaaaaagcatttca

SEQ ID NO: 37695 - DNA, 599 bp, Chicken  19866894267894_1
  misc_feature (1)..(118): n is any nucleotide
nnnnnnnnnnnnnnnnnnnnnnnnnnnnnnnnnnnnnnnnnnnnnnnnnnnnnnnnnnnnnnnnnnnnnnnnnnnnnnnnnnnnnnnnnnnnnnnnnnnnnnnnnnnnnnnnnnnnnnaaccctctcttggcctttgttttgccagttaaatatcagcctttacaatttctttcatgacagcaaagtttgcactacttaataagatttcactgcacttgtttccatcagaattctttttttttttttcttgtgcctgagtgagcatatcacaccaccacggataatattgacagtgatgycttgccattgactcatgcagtggtaataacaattccctaagcacccttagttacacacagagatcaacattgccttttttatacctatatcacactggtatctcaattttttccaggtccttttcctccaagtcatagcaaaaagaagaagaraatatatatatctttcatttgagttggaagggacccttaaagtccatctggtcycactccccagcaatgaacagagacacccacagctccatcaggtgctcagagccctgacccctgatcctggatgtctccagggacaacgaggc

SEQ ID NO: 37696 - DNA, 600 bp, Chicken  19866894267894_2
tcagcctttacaatttctttcatgacagcaaagtttgcactacttaataagatttcactgcacttgtttccatcagaattctttttttttttttcttgtgcctgagtgagcatatcacaccaccacggataatattgacagtgatgycttgccattgactcatgcagtggtaataacaattccctaagcacccttagttacacacagagatcaacattgccttttttatacctatatcacactggtatctcaattttttccaggtccttttcctccaagtcatagcaaaaagaagaagaraatatatatatctttcatttgagttggaagggacccttaaagtccatctggtcycactccccagcaatgaacagagacacccacagctccatcaggtgctcagagccctgacccctgatcctggatgtctccagggacaacgaggcaccaccacctctctgggagccctatgccagtgcttcattgccctgatcataacagggcacactgcacagcatggtgttatcagcaaacttgctgaaaatgcatttgatcctgctgtcgatgtcactgatgaggattttggccagattcacttaa

SEQ ID NO: 37697 - DNA, 600 bp, Chicken  19866894267894_3
tcactgcacttgtttccatcagaattctttttttttttttcttgtgcctgagtgagcatatcacaccaccacggataatattgacagtgatgycttgccattgactcatgcagtggtaataacaattccctaagcacccttagttacacacagagatcaacattgccttttttatacctatatcacactggtatctcaattttttccaggtccttttcctccaagtcatagcaaaaagaagaagaraatatatatatctttcatttgagttggaagggacccttaaagtccatctggtcycactccccagcaatgaacagagacacccacagctccatcaggtgctcagagccctgacccctgatcctggatgtctccagggacaacgaggcaccaccacctctctgggagccctatgccagtgcttcattgccctgatcataacagggcacactgcacagcatggtgttatcagcaaacttgctgaaaatgcatttgatcctgctgtcgatgtcactgatgaggattttggccagattcacttaaaaagtatcctgttaccttttcaattgagagtaactaatgaaaattccctgttaa

SEQ ID NO: 37698 - DNA, 599 bp, Chicken  19866894267902_1
  misc_feature (1)..(80): n is any nucleotide
nnnnnnnnnnnnnnnnnnnnnnnnnnnnnnnnnnnnnnnnnnnnnnnnnnnnnnnnnnnnnnnnnnnnnnnnnnnnnnnnatgtgtgtgccactatgacaaaacatatctctcaaagttgtgttttattatattgtctttgaatgctacttcggtttttatattactattcatttcccttgactaagagaaaaagtttattggctttatatatgtgtaagctagaggtgaaaactttatatttttttccttgcaatagagcatcaaatggagcaccagattccactactattacacagcrggatatgaaagtcttgattgaagccctgttcattgccatacagtcacagatwgsgccagtgggcagtagtggggccatttccacagtatgtatgaatttacacatgttcttttttcttaaaaaaaaatacacgtccattcttttatttgagtttgtttaaccttttgattccactcagcagcttcaggataaatcaatagctgatataccaaactgagagcagaaaacttctacattttgccatatttcacttcaaaacaataacactgcagtcacttagagtacaatgaacttaactg

SEQ ID NO: 37699 - DNA, 599 bp, Chicken  19866894267902_2
  misc_feature (1)..(28): n is any nucleotide
nnnnnnnnnnnnnnnnnnnnnnnnnnnnatgtgtgtgccactatgacaaaacatatctctcaaagttgtgttttattatattgtctttgaatgctacttcggtttttatattactattcatttcccttgactaagagaaaaagtttattggctttatatatgtgtaagctagaggtgaaaactttatatttttttccttgcaatagagcatcaaatggagcaccagattccactactattacacagcrggatatgaaagtcttgattgaagccctgttcattgccatacagtcacagatwgsgccagtgggcagtagtggggccatttccacagtatgtatgaatttacacatgttcttttttcttaaaaaaaaatacacgtccattcttttatttgagtttgtttaaccttttgattccactcagcagcttcaggataaatcaatagctgatataccaaactgagagcagaaaacttctacattttgccatatttcacttcaaaacaataacactgcagtcacttagagtacaatgaacttaactgcagatagaatgtgttcccagagttggccccaattttaatttcttatgaatag

SEQ ID NO: 37700 - DNA, 599 bp, Chicken  19866894267902_3
  misc_feature (1)..(26): n is any nucleotide
nnnnnnnnnnnnnnnnnnnnnnnnnnatgtgtgtgccactatgacaaaacatatctctcaaagttgtgttttattatattgtctttgaatgctacttcggtttttatattactattcatttcccttgactaagagaaaaagtttattggctttatatatgtgtaagctagaggtgaaaactttatatttttttccttgcaatagagcatcaaatggagcaccagattccactactattacacagcrggatatgaaagtcttgattgaagccctgttcattgccatacagtcacagatwgsgccagtgggcagtagtggggccatttccacagtatgtatgaatttacacatgttcttttttcttaaaaaaaaatacacgtccattcttttatttgagtttgtttaaccttttgattccactcagcagcttcaggataaatcaatagctgatataccaaactgagagcagaaaacttctacattttgccatatttcacttcaaaacaataacactgcagtcacttagagtacaatgaacttaactgcagatagaatgtgttcccagagttggccccaattttaatttcttatgaatagta

SEQ ID NO: 37701 - DNA, 600 bp, Chicken  19866894267906_1
aaatggtctttgggtaactggaacttcagttacccgccttgtttggtaaacatggatagtctttcaaattttctgaaatccattgccagctctaaagggaagcagcagcacccatatttcacagcaaccatcaaggcaaaacatatcgactgcagagcaaagaggccacactgaccaggatctttgaaactttctacctttataagcaatctgtatgtaacagaatccatccttaatgagtacccaaatctttgctatatattttgtatgcaaagaatactagcattatggatagctgtsctttccagatctataatttcattctcttgcaaaaaaaaamccaaacaaaaaacaacaacaaaakgaccctctccctgtcagagtctctccaatactgcccaggagttctccaaagtctcttttaagaattggcaaatgaactcagttctctacattagagggtggaaactggatggcagcaggactgagtcacttagtagccaagagcaggaggctgagtttcctcccaacacagcccggcaaaacttactcagttcattaaatgttgtttctccttgtagactgactcagtttgtgtct

SEQ ID NO: 37702 - DNA, 600 bp, Chicken  19866894267906_2
gtttggtaaacatggatagtctttcaaattttctgaaatccattgccagctctaaagggaagcagcagcacccatatttcacagcaaccatcaaggcaaaacatatcgactgcagagcaaagaggccacactgaccaggatctttgaaactttctacctttataagcaatctgtatgtaacagaatccatccttaatgagtacccaaatctttgctatatattttgtatgcaaagaatactagcattatggatagctgtsctttccagatctataatttcattctcttgcaaaaaaaaamccaaacaaaaaacaacaacaaaakgaccctctccctgtcagagtctctccaatactgcccaggagttctccaaagtctcttttaagaattggcaaatgaactcagttctctacattagagggtggaaactggatggcagcaggactgagtcacttagtagccaagagcaggaggctgagtttcctcccaacacagcccggcaaaacttactcagttcattaaatgttgtttctccttgtagactgactcagtttgtgtctcctctttatctatccatttttgacagctcaccagaacgtg

SEQ ID NO: 37703 - DNA, 600 bp, Chicken  19866894267906_3
caaattttctgaaatccattgccagctctaaagggaagcagcagcacccatatttcacagcaaccatcaaggcaaaacatatcgactgcagagcaaagaggccacactgaccaggatctttgaaactttctacctttataagcaatctgtatgtaacagaatccatccttaatgagtacccaaatctttgctatatattttgtatgcaaagaatactagcattatggatagctgtsctttccagatctataatttcattctcttgcaaaaaaaaamccaaacaaaaaacaacaacaaaakgaccctctccctgtcagagtctctccaatactgcccaggagttctccaaagtctcttttaagaattggcaaatgaactcagttctctacattagagggtggaaactggatggcagcaggactgagtcacttagtagccaagagcaggaggctgagtttcctcccaacacagcccggcaaaacttactcagttcattaaatgttgtttctccttgtagactgactcagtttgtgtctcctctttatctatccatttttgacagctcaccagaacgtgggagccccctgaccacagctagga

SEQ ID NO: 37704 - DNA, 600 bp, Chicken  19866894267910_1
gtcacttgggccctcctctcccattcagcacgcttcagcatccttggaaaaaaaaagccttgatcctggccttgctcttctctccgagttcaataggctttgccagctgaaaggccgctttcaaagggggaaggggggcttttcagagctggggggaaatcaaagggaatcatcacaaatggctgcttaaaataaccgaccttttcccgcgtctctcctctgctttgcattcctgtgcggaatgtgggtgcgatggtggagcctttgttgctgctcattttgtgccctctgtctctcaaygtctgcgtgccctgtctttcccctttggggtttggagcagatcccatctgtgagcccaccactgtctcagagggcaccttttgggatgagatgtgcagcaccccatacgtcctcatagaatcatttgagttggaagggacccttaaaggccatctggtccaaatcccctgcactgagcagggacactcacagttccatcagtgctcagagcctcatccagcctgaccttgrgtgtctgcaggggcacccgccatctctttgggcaacctgtgccagtgcctcaccactcttattggaaaa

SEQ ID NO: 37705 - DNA, 600 bp, Chicken  19866894267910_2
cctgtgcggaatgtgggtgcgatggtggagcctttgttgctgctcattttgtgccctctgtctctcaaygtctgcgtgccctgtctttcccctttggggtttggagcagatcccatctgtgagcccaccactgtctcagagggcaccttttgggatgagatgtgcagcaccccatacgtcctcatagaatcatttgagttggaagggacccttaaaggccatctggtccaaatcccctgcactgagcagggacactcacagttccatcagtgctcagagcctcatccagcctgaccttgrgtgtctgcaggggcacccgccatctctttgggcaacctgtgccagtgcctcaccactcttattggaaaaaacttcttccttttttggtctaaatcttccgccttttagtttgaagccatttctccatgtcctatagcaacagacagaaactgcagtgcctggcttcctgtgtggcttcacttttactttgtgctgtatggcatcctgagcaaagaaacttccactcttgataacgaaacaggtgacgtttctagtttatttgcccacccaaatgcaggatgtaatagaatggaattaatc

SEQ ID NO: 37706 - DNA, 600 bp, Chicken  19866894267911_1
aggaagaaaattctgcacgtttatttcagtgcttgaagttttcttgttgcagtaaccgctccttctccagagatgtacccctttgccttttacatagagtacttctatttctgattccaatatattgagattggcatgaaaaataaccacatccatgctctggggatgtacaaaattccgtgagaaagcaaggaattgggacagctggtccaaggatgccatgaaactaaagatggcattgctctgcagtgtagtacaaggccaaaggaaagtgtgggggagggaaagcacgtttactawacaaggtcaaggtgaacaaagatccaagaacaacgagctgtgagtgcaggaggtggggggctgctgctgaccagctgggctctctggggagaggggagggcacagtggtggccctgcgggactgaaccagcagctctgtcctccacactgctcagatctgcagtttatcctatggctcttcatttagaaaaagcacttttcatacaggagaccctgcaggtgtgcaagtcagttatgtctgaaatattcttttaaaccttcctctccagccatgcttagtggtaatactttgtatgtttc

SEQ ID NO: 37707 - DNA, 600 bp, Chicken  19866894267911_2
gggagggcacagtggtggccctgcgggactgaaccagcagctctgtcctccacactgctcagatctgcagtttatcctatggctcttcatttagaaaaagcacttttcatacaggagaccctgcaggtgtgcaagtcagttatgtctgaaatattcttttaaaccttcctctccagccatgcttagtggtaatactttgtatgtttcagagctgctgcttgtaaggtgtgtgggtgctgcttatgcctgtgtattcactgaagctttccaacaggaacatgaagggtttgttaaagcacytaagcgcagtccaaaacttctattcctagtgtgggaatacttgagggcaggggtgaatttgcccgttcccatatgcaggaccccttttgctctctgccatctccctgaacgtgccactcacagcactctcccacactgcctgcaggacggggcgctttgctcggctcctccaacctctgccttcagccctcacgctgcattaccataataggtgacaggacatcagcccctgctctgccctcataaaccgcacgataacttcattgccatttgaagcagaaagttttatttcgctgagct

SEQ ID NO: 37708 - DNA, 599 bp, Chicken  19866894267912_1
  misc_feature (1)..(91): n is any nucleotide
nnnnnnnnnnnnnnnnnnnnnnnnnnnnnnnnnnnnnnnnnnnnnnnnnnnnnnnnnnnnnnnnnnnnnnnnnnnnnnnnnnnnnnnnnnnggagacctcattgtggccttccagtacttgaagggagcgtataaacaggaaggggagtggctgtttacaagggtggatagtgactggacaagggggaatggttttaaactgagacaggggaggtttaggttggatattaggaggaagtttttcacacagagggtggtgaagcactggaacaggttgcccaaggaggttgtggatgcccyatccctggaggcattcaatgccaggctggatgtggctctgggcagcctggtctggtggttggcgaccctgcacatagcaggggggttgaaactcgatgatcattgtgggccttttcaacccaggccattctrtgattctattctatgattctctcccgtgcttcagctcctttctccytggcaggatctgaccttgagctgaaacaccagtttatttgttgtggtcaatttaggcagaaaccttcagccccatcatgtggttattatcttccagctgccatctggtttgaaaaagtctg

SEQ ID NO: 37709 - DNA, 600 bp, Chicken  19866894267912_2
taaacaggaaggggagtggctgtttacaagggtggatagtgactggacaagggggaatggttttaaactgagacaggggaggtttaggttggatattaggaggaagtttttcacacagagggtggtgaagcactggaacaggttgcccaaggaggttgtggatgcccyatccctggaggcattcaatgccaggctggatgtggctctgggcagcctggtctggtggttggcgaccctgcacatagcaggggggttgaaactcgatgatcattgtgggccttttcaacccaggccattctrtgattctattctatgattctctcccgtgcttcagctcctttctccytggcaggatctgaccttgagctgaaacaccagtttatttgttgtggtcaatttaggcagaaaccttcagccccatcatgtggttattatcttccagctgccatctggtttgaaaaagtctgtaaagacatgtggaaatgagaacatttctcataaagaggacaagcagttaaaatcttcagtgaaattcagatgtgaagttttgtgcctcccaaggacacatacattagtcctgttcctgctttggtatttctg

SEQ ID NO: 37710 - DNA, 600 bp, Chicken  19866894267912_3
acaagggggaatggttttaaactgagacaggggaggtttaggttggatattaggaggaagtttttcacacagagggtggtgaagcactggaacaggttgcccaaggaggttgtggatgcccyatccctggaggcattcaatgccaggctggatgtggctctgggcagcctggtctggtggttggcgaccctgcacatagcaggggggttgaaactcgatgatcattgtgggccttttcaacccaggccattctrtgattctattctatgattctctcccgtgcttcagctcctttctccytggcaggatctgaccttgagctgaaacaccagtttatttgttgtggtcaatttaggcagaaaccttcagccccatcatgtggttattatcttccagctgccatctggtttgaaaaagtctgtaaagacatgtggaaatgagaacatttctcataaagaggacaagcagttaaaatcttcagtgaaattcagatgtgaagttttgtgcctcccaaggacacatacattagtcctgttcctgctttggtatttctgttcatttccggctccagtacactctgaaactctacatatacaaggt

SEQ ID NO: 37711 - DNA, 599 bp, Chicken  19866894267922_1
  misc_feature (1)..(118): n is any nucleotide
nnnnnnnnnnnnnnnnnnnnnnnnnnnnnnnnnnnnnnnnnnnnnnnnnnnnnnnnnnnnnnnnnnnnnnnnnnnnnnnnnnnnnnnnnnnnnnnnnnnnnnnnnnnnnnnnnnnnnnataattggttcttcacaagtgagtaggttaaaataatcagaggaataaagtttttgagtagttgtatgtaatttttagctccccattctccctgctatctcctcatttgcatttgtgagtttttgcagcaggctcgaagttctgctctaacgctgtgtgcaggaagctgtttgcaggcaggrgtgactggaaactccttgctttttgcacccaaggtttttaaaccaatttgacaaaatgcagtgcatttgcataggatactgaggtttgatggaaaccaagagcatctcaggatgctttacctaaagtgttttagaacaaaatgagattcacataaaggcaaacgtgttgtactgaatgtgatacttagaacccatggactggtgagatgctgctgtgtttcacttttgcttttcccaggagaggaatgaattaatttaagaatcgttgagcctgagcttctcacctgtctttgaaagat

SEQ ID NO: 37712 - DNA, 600 bp, Chicken  19866894267924_1
tccagcacatgagcagtgaccttcatctggcagccagcaagactttgtttgaggcactgcagcagatgctgaacatgaatgtgcattgtcaggaccagcgtttggagatgaagtgattcctctcacggtgcttgtatgtacaaatctctcacaggcttctgagctacaggggatgtaaacctgagcttgaaaggagcggtaagcagagcacacagtctgtggttatcttgacactgctaatgctcgtttcctttacaacagtgaaaagagagcagaatgtttccacctcctcagtgcaaygyggaggaattgttacaagtccgagatctatccattttagctactrgaaggctgaaatgaaatactgtaagtctatacaagcacagattgttttataagcaagaaggaaattaagataaaaattcatctcagtaaattcagaaggaatacggaagtgttacgtagttatgtaagtataggcttacaaactaaatcataaagaaatgctgcaagtacttgctgcaaaaatcatactggaataaaactcctgatttcaacgtacagctcaacttcagcagtattcttggcttcacttcattt

SEQ ID NO: 37713 - DNA, 600 bp, Chicken  19866894267924_2
cagcacatgagcagtgaccttcatctggcagccagcaagactttgtttgaggcactgcagcagatgctgaacatgaatgtgcattgtcaggaccagcgtttggagatgaagtgattcctctcacggtgcttgtatgtacaaatctctcacaggcttctgagctacaggggatgtaaacctgagcttgaaaggagcggtaagcagagcacacagtctgtggttatcttgacactgctaatgctcgtttcctttacaacagtgaaaagagagcagaatgtttccacctcctcagtgcaaygyggaggaattgttacaagtccgagatctatccattttagctactrgaaggctgaaatgaaatactgtaagtctatacaagcacagattgttttataagcaagaaggaaattaagataaaaattcatctcagtaaattcagaaggaatacggaagtgttacgtagttatgtaagtataggcttacaaactaaatcataaagaaatgctgcaagtacttgctgcaaaaatcatactggaataaaactcctgatttcaacgtacagctcaacttcagcagtattcttggcttcacttcatttgt

SEQ ID NO: 37714 - DNA, 600 bp, Chicken  19866894267924_3
gtttgaggcactgcagcagatgctgaacatgaatgtgcattgtcaggaccagcgtttggagatgaagtgattcctctcacggtgcttgtatgtacaaatctctcacaggcttctgagctacaggggatgtaaacctgagcttgaaaggagcggtaagcagagcacacagtctgtggttatcttgacactgctaatgctcgtttcctttacaacagtgaaaagagagcagaatgtttccacctcctcagtgcaaygyggaggaattgttacaagtccgagatctatccattttagctactrgaaggctgaaatgaaatactgtaagtctatacaagcacagattgttttataagcaagaaggaaattaagataaaaattcatctcagtaaattcagaaggaatacggaagtgttacgtagttatgtaagtataggcttacaaactaaatcataaagaaatgctgcaagtacttgctgcaaaaatcatactggaataaaactcctgatttcaacgtacagctcaacttcagcagtattcttggcttcacttcatttgttttcagattttggaagaggaaaaagtgtttcctcagtaatttct

SEQ ID NO: 37715 - DNA, 600 bp, Chicken  19866894267927_1
agtccagcttctcagtgtggactgttcttttgtgtgtttccagctgttttacttgttctacaggtaaaatgttcagtgcctcctattttgttatgttggcccatgacatcagaggcgggtgttggtgataaaaatataataagtttttaagaaaagtatatgcaaatatgtagatgtataagtacataaatatacttaatatgacttcctacatttttaaatctaattattttgcttcctcgcttatcactactaattctgatacagattctcagagaccctggagttgatctacatacmcagttayatctgtcaaactgctgagatccactcttttcatcagaagtaatcagattattctgcatgagatcttcagcaaccataatttagataaactagcagtccatcctgtctgtcctctgcatgtatcaggagccataagttaaactgcaaaaatatgatttcagatcattattcctcctgtggctctgccttctactgcagctttgcacaggagctcctgcacagcgctgtgtgtaagctatgcttattactcataggtacccaaagattagtttaatatacaaactgtattgcatt

SEQ ID NO: 37716 - DNA, 600 bp, Chicken  19866894267927_2
cttctcagtgtggactgttcttttgtgtgtttccagctgttttacttgttctacaggtaaaatgttcagtgcctcctattttgttatgttggcccatgacatcagaggcgggtgttggtgataaaaatataataagtttttaagaaaagtatatgcaaatatgtagatgtataagtacataaatatacttaatatgacttcctacatttttaaatctaattattttgcttcctcgcttatcactactaattctgatacagattctcagagaccctggagttgatctacatacmcagttayatctgtcaaactgctgagatccactcttttcatcagaagtaatcagattattctgcatgagatcttcagcaaccataatttagataaactagcagtccatcctgtctgtcctctgcatgtatcaggagccataagttaaactgcaaaaatatgatttcagatcattattcctcctgtggctctgccttctactgcagctttgcacaggagctcctgcacagcgctgtgtgtaagctatgcttattactcataggtacccaaagattagtttaatatacaaactgtattgcattaaaagca

SEQ ID NO: 37717 - DNA, 600 bp, Chicken  19866894267929_1
caaaaactgtactctccgtttacggagagaacagaagtatgacgtgtgccaaagacagttaagttgatacctactggccaggagttgatatctctgcccaacttcatctactttcacattaatgtgaaaaacaaaggtttgcacagactgtgcaactggcctcacatagtgaagtgacacatggagatgtgatatggttctatttgatttagcatataccactctgtagcccaggtttctgtgcagtaccagtttattgttgtaaatgctatgcatccatttggaatcctcctctgttcrtatttaaaacttgattgtattgttaaagcaatgagaacgtcttcgtggtgagggtttttgtactgactagctttgctttgatgtgcctgccaaacatctgtgagctttctatatatttttccccttgccttcagaaaaaaggctggttacgtttatttgtggatgaaatactttgctaggaatggctgtaaatctgaagggctgaaaattgtcaagtgaactcatagacaatagtaacagagaataaggaattaagcctggtatgcaatctggaaaataattaaaatcgataggtttctt

SEQ ID NO: 37718 - DNA, 600 bp, Chicken  19866894267929_2
ggtttgcacagactgtgcaactggcctcacatagtgaagtgacacatggagatgtgatatggttctatttgatttagcatataccactctgtagcccaggtttctgtgcagtaccagtttattgttgtaaatgctatgcatccatttggaatcctcctctgttcrtatttaaaacttgattgtattgttaaagcaatgagaacgtcttcgtggtgagggtttttgtactgactagctttgctttgatgtgcctgccaaacatctgtgagctttctatatatttttccccttgccttcagraaaaaggctggttacgtttatttgtggatgaaatactttgctaggaatggctgtaaatctgaagggctgaaaattgtcaagtgaactcatagacaatagtaacagagaataaggaattaagcctggtatgcaatctggaaaataattaaaatcgataggtttctttccttgctggaatagggatatgtagaaattggaaatccagcaatgcttctgatttgggaactttaaaccattgtaaagtgtgaacgctggggtgagactactggggagggcttgaaagtgctggaatccttgttg

SEQ ID NO: 37719 - DNA, 600 bp, Chicken  19866894267929_3; identical to SEQ ID NO: 37718

SEQ ID NO: 37720 - DNA, 599 bp, Chicken  19866894267935_1
  misc_feature (1)..(49): n is any nucleotide
nnnnnnnnnnnnnnnnnnnnnnnnnnnnnnnnnnnnnnnnnnnnnnnnntttgattggcttaactcatgttcccgtgataaattaggcccgtgcttccgtcctccctgtttaaaggaatgcacagtgagacttgctctgctccagaagtcagcacagagatacaaactgtaaaattactcttcaaggatggcagcagaggtcaagctgaaggtgcaggggcataggcagtaatggctctatgtgcattagcaattagcatggcctggtgggaagggatttgtacagcagaacggttggtrccggggatctgacacccatatttttggcctcwggggggaggctgttttggactagatcttgtccaatgggtgaatatctgttaacactctgatgastgctctgcagtatgagcacgcaacaagcggagcaaaagagcagtttgtctcgaatgggctcaaactgaagcactgatgtagatgaactcaatcttgttacttccttacattttcagtgagccttataataagagctyttcagagctcttcctttgagcagtcccttgggcatcccctgcctaaagagtgatgccctggggagc

SEQ ID NO: 37721 - DNA, 599 bp, Chicken  19866894267935_2
  misc_feature (1)..(17): n is any nucleotide
nnnnnnnnnnnnnnnnntttgattggcttaactcatgttcccgtgataaattaggcccgtgcttccgtcctccctgtttaaaggaatgcacagtgagacttgctctgctccagaagtcagcacagagatacaaactgtaaaattactcttcaaggatggcagcagaggtcaagctgaaggtgcaggggcataggcagtaatggctctatgtgcattagcaattagcatggcctggtgggaagggatttgtacagcagaacggttggtrccggggatctgacacccatatttttggcctcwggggggaggctgttttggactagatcttgtccaatgggtgaatatctgttaacactctgatgastgctctgcagtatgagcacgcaacaagcggagcaaaagagcagtttgtctcgaatgggctcaaactgaagcactgatgtagatgaactcaatcttgttacttccttacattttcagtgagccttataataagagctyttcagagctcttcctttgagcagtcccttgggcatcccctgcctaaagagtgatgccctggggagccaggagctgcccccaaggacacctcttggtgc

SEQ ID NO: 37722 - DNA, 600 bp, Chicken  19866894267935_3
ccgtcctccctgtttaaaggaatgcacagtgagacttgctctgctccagaagtcagcacagagatacaaactgtaaaattactcttcaaggatggcagcagaggtcaagctgaaggtgcaggggcataggcagtaatggctctatgtgcattagcaattagcatggcctggtgggaagggatttgtacagcagaacggttggtrccggggatctgacacccatatttttggcctcwggggggaggctgttttggactagatcttgtccaatgggtgaatatctgttaacactctgatgastgctctgcagtatgagcacgcaacaagcggagcaaaagagcagtttgtctcgaatgggctcaaactgaagcactgatgtagatgaactcaatcttgttacttccttacattttcagtgagccttataataagagctyttcagagctcttcctttgagcagtcccttgggcatcccctgcctaaagagtgatgccctggggagccaggagctgcccccaaggacacctcttggtgcacaagcacccgcagcattttggttcctcraacttagcagcacactgtgcagcaagaaattaggaa

SEQ ID NO: 37723 - DNA, 600 bp, Chicken  19866894267935_4
ggctctatgtgcattagcaattagcatggcctggtgggaagggatttgtacagcagaacggttggtrccggggatctgacacccatatttttggcctcwggggggaggctgttttggactagatcttgtccaatgggtgaatatctgttaacactctgatgastgctctgcagtatgagcacgcaacaagcggagcaaaagagcagtttgtctcgaatgggctcaaactgaagcactgatgtagatgaactcaatcttgttacttccttacattttcagtgagccttataataagagctyttcagagctcttcctttgagcagtcccttgggcatcccctgcctaaagagtgatgccctggggagccaggagctgcccccaaggacacctcttggtgcacaagcacccgcagcattttggttcctcraacttagcagcacactgtgcagcaagaaattaggaacacratggctcctgtgtcaggatgggcagccggatgcagagttgtaccctggggcaggaaggaagctggtgcctgctctgatctttccctcagagctccttgctctcaggtgcagagtaccaagccagccctccctg

SEQ ID NO: 37724 - DNA, 600 bp, Chicken  19866894267935_5
gtccaatgggtgaatatctgttaacactctgatgastgctctgcagtatgagcacgcaacaagcggagcaaaagagcagtttgtctcgaatgggctcaaactgaagcactgatgtagatgaactcaatcttgttacttccttacattttcagtgagccttataataagagctyttcagagctcttcctttgagcagtcccttgggcatcccctgcctaaagagtgatgccctggggagccaggagctgcccccaaggacacctcttggtgcacaagcacccgcagcattttggttcctcraacttagcagcacactgtgcagcaagaaattaggaacacratggctcctgtgtcaggatgggcagccggatgcagagttgtaccctggggcaggaaggaagctggtgcctgctctgatctttccctcagagctccttgctctcaggtgcagagtaccaagccagccctccctgccagcacgcccacgcgcttcgttgtgctgctggaggcttgtctgtagtaagagggtgttgtggagatcaaagcaagaaaacacagaacacaccagtaccagggagacgcagcaagtgcaaaactgcc

SEQ ID NO: 37725 - DNA, 600 bp, Chicken  19866894267935_6
ctgcagtatgagcacgcaacaagcggagcaaaagagcagtttgtctcgaatgggctcaaactgaagcactgatgtagatgaactcaatcttgttacttccttacattttcagtgagccttataataagagctyttcagagctcttcctttgagcagtcccttgggcatcccctgcctaaagagtgatgccctggggagccaggagctgcccccaaggacacctcttggtgcacaagcacccgcagcattttggttcctcraacttagcagcacactgtgcagcaagaaattaggaacacratggctcctgtgtcaggatgggcagccggatgcagagttgtaccctggggcaggaaggaagctggtgcctgctctgatctttccctcagagctccttgctctcaggtgcagagtaccaagccagccctccctgccagcacgcccacgcgcttcgttgtgctgctggaggcttgtctgtagtaagagggtgttgtggagatcaaagcaagaaaacacagaacacaccagtaccagggagacgcagcaagtgcaaaactgcccctctttgcaagccggctagagaggagggatttcaataaa

SEQ ID NO: 37726 - DNA, 599 bp, Chicken  19866894267944_1
  misc_feature (1)..(56): n is any nucleotide
nnnnnnnnnnnnnnnnnnnnnnnnnnnnnnnnnnnnnnnnnnnnnnnnnnnnnnnncttacggagcagctgcatgattttgggatgtgatggattgttttcttttaatttcctccgaaagaaaaaagatatggcatgaagcgctaataatctgttcctttttgctaccaccttttgagtatgtacagaactgatagatgatgaccacctgtaattctatcccaattaaatgctggaagtcagcagttcagtttttgcactggtggattgcttgcagccctcccattccccacaggacctrttccctgcactattagcrgcttctttaaattggaagtgttatgaaggcaatttcctgccaccagcaatgttcacctcccttcctcagggccctgcagcctgagaacaactcctgtgtctgcatccagctgcaaaggaggactggatggaatgattcagatttaaaaagtcaagatgctcaagaagtgttctacaagaaatgcttttcctttactttctgctgttggtttcaaaagccatttttggcaaggaagggtgagagtgccaaggagttgtaaccatgtgcttggtcaacgtctg

SEQ ID NO: 37727 - DNA, 599 bp, Chicken  19866894267944_2
  misc_feature (1)..(38): n is any nucleotide
nnnnnnnnnnnnnnnnnnnnnnnnnnnnnnnnnnnnnncttacggagcagctgcatgattttgggatgtgatggattgttttcttttaatttcctccgaaagaaaaaagatatggcatgaagcgctaataatctgttcctttttgctaccaccttttgagtatgtacagaactgatagatgatgaccacctgtaattctatcccaattaaatgctggaagtcagcagttcagtttttgcactggtggattgcttgcagccctcccattccccacaggacctrttccctgcactattagcrgcttctttaaattggaagtgttatgaaggcaatttcctgccaccagcaatgttcacctcccttcctcagggccctgcagcctgagaacaactcctgtgtctgcatccagctgcaaaggaggactggatggaatgattcagatttaaaaagtcaagatgctcaagaagtgttctacaagaaatgcttttcctttactttctgctgttggtttcaaaagccatttttggcaaggaagggtgagagtgccaaggagttgtaaccatgtgcttggtcaacgtctgctggagaccatcaggttc

SEQ ID NO: 37728 - DNA, 577 bp, Chicken  19866894267944_3
tctgcatccagctgcaaaggaggactggatggaatgattcagatttaaaaagtcaagatgctcaagaagtgttctacaagaaatgcttttcctttactttctgctgttggtttcaaaagccatttttggcaaggaagggtgagagtgccaaggagttgtaaccatgtgcttggtcaacgtctgctggagaccatcaggttccaggtccacttgtactcttaccagctccccacaaggcttgaagaagagtcatgtactgtatgggatagctctgtgaggtctgcatggcttacagttgarctgtaacatcagccacaatagtggatgtagcaactgaccaaagagcgcaaggaaatgcagaattgctgtaggacctcagattttgttttttcttcaaaataagaaactggaacagtttcatgagggaggaccaggctggttgctgcacagggaatatgtttacaatgcagtgcctttgctttcagcttgtatcaagtaaaaacccctttcagagctcgtttgtcagactcagaggctacaagagacctgtggccaccctgtgggaagccaaggacag

SEQ ID NO: 37729 - DNA, 600 bp, Chicken  19866894267956_1
agaaatggccacaaatgttggcggcattatctgtgggaatcactttgacaagtgatttttttctaagggtaaattcagcactgttaaggtggtcatttgcaaatggcaaaccttcacagtcaatgatatcctattgctatatccttttccactgtaaatgcgcaccaacaagagtggaagtaaagaagcacagcttgcaaaccaatccctatagtttagtccaagcatctaggatgcatctttaaggctacgttagaaatccaaagcagaatgtgcagagccctggtagatacaggaggraaaagtggctgtgtgttcgttggatagctcagtgccagtgtggactcccagtgcgaggtattggggaatgttacagggtaggaatgctggctccaaaacacaactggtccatggttagtgggttaaaattctgccaggcctgttagaagtttgtctattwtgtctgtatgttgcttaaattgccatttgtatgaatctgaaaaatgtaaagagaatacttgaagccttactgagatgggtgtaaagggaactaccactgtaatagtcatatttcattgtttaaattagtaacaaaaatac

SEQ ID NO: 37730 - DNA, 600 bp, Chicken  19866894267956_2
cgcaccaacaagagtggaagtaaagaagcacagcttgcaaaccaatccctatagtttagtccaagcatctaggatgcatctttaaggctacgttagaaatccaaagcagaatgtgcagagccctggtagatacaggaggraaaagtggctgtgtgttcgttggatagctcagtgccagtgtggactcccagtgcgaggtattggggaatgttacagggtaggaatgctggctccaaaacacaactggtccatggttagtgggttaaaattctgccaggcctgttagaagtttgtctattwtgtctgtatgttgcttaaattgccatttgtatgaatctgaaaaatgtaaagagaatacttgaagccttactgagatgggtgtaaagggaactaccactgtaatagtcatatttcattgtttaaattagtaacaaaaataccatttattttagcaaatacgaacacattttgcacacacaaataggtatttgtaaagaagcagacttctcaggaagatattagaaagagaacttctgttttgaagtacagaattgaaaatggtagcaaacagtaaaacacactgccttacattatgattaa

SEQ ID NO: 37731 - DNA, 600 bp, Chicken  19866894267956_3
gtggactcccagtgcgaggtattggggaatgttacagggtaggaatgctggctccaaaacacaactggtccatggttagtgggttaaaattctgccaggcctgttagaagtttgtctattwtgtctgtatgttgcttaaattgccatttgtatgaatctgaaaaatgtaaagagaatacttgaagccttactgagatgggtgtaaagggaactaccactgtaatagtcatatttcattgtttaaattagtaacaaaaataccatttattttagcaaatacgaacacattttgcacacacwaataggtatttgtaaagaagcagacttctcaggaagatattagaaagagaacttctgttttgaagtacagaattgaaaatggtagcaaacagtaaaacacactgccttacattatgattaatccatagataactatctgaatgtagtatttggttattttaacttaaccagtacaatcaaatgtgctttattcattttgcttgatgctgttcttgtattgtaacacagcagactaagtacaatgatttatacaaagtactatgcttggaatactttaacagtgacttaataggatataag

SEQ ID NO: 37732 - DNA, 600 bp, Chicken  19866894267956_4
tggactcccagtgcgaggtattggggaatgttacagggtaggaatgctggctccaaaacacaactggtccatggttagtgggttaaaattctgccaggcctgttagaagtttgtctattwtgtctgtatgttgcttaaattgccatttgtatgaatctgaaaaatgtaaagagaatacttgaagccttactgagatgggtgtaaagggaactaccactgtaatagtcatatttcattgtttaaattagtaacaaaaataccatttattttagcaaatacgaacacattttgcacacacawataggtatttgtaaagaagcagacttctcaggaagatattagaaagagaacttctgttttgaagtacagaattgaaaatggtagcaaacagtaaaacacactgccttacattatgattaatccatagataactatctgaatgtagtatttggttattttaacttaaccagtacaatcaaatgtgctttattcattttgcttgatgctgttcttgtattgtaacacagcagactaagtacaatgatttatacaaagtactatgcttggaatactttaacagtgacttaataggatataaga

SEQ ID NO: 37733 - DNA, 600 bp, Chicken  19866894267956_5
acagtaaaacacactgccttacattatgattaatccatagataactatctgaatgtagtatttggttattttaacttaaccagtacaatcaaatgtgctttattcattttgcttgatgctgttcttgtattgtaacacagcagactaagtacaatgatttatacaaagtactatgcttggaatactttaacagtgacttaataggatataagatcaaatggtgtatatctcaccactttcacttatgcatcatgtaaattgaatagctgagtgtatacaagaaaacaaaattggcataargcatgttgctgttctaacagaacagaacgtatctacaaataggtggaaaacccaatctcttcggtaaaacaagaggatgctcagcaggtctggaaaggctcctgtcattccagtgcctgaacatctgatgaagtacctgctgttagactcccaggtttcacaattgtctcataaatgtatatgggacaatgcctctctaccaaatgagtaaaataatagaattgataaggtatatgagttcatacagaaaaactcaaaatgatgatgatgatgagtgaccttgtgcttacactcttgaaa

SEQ ID NO: 37734 - DNA, 600 bp, Chicken  19866894267976_1
ttgtgtatttagtaaccctggacaggtgaatttccaactgcttacataccatataatttatgttttaaattccggagtgttagctgcggatgaaaattggactgtgataataaaatatataaaattaagggccaaattttcactcctgcacagtgcgttccactgtttgcttactatttgttgatgatatctattttctctagagattctgaaaacatgcccaaaaatctcagatctggcaagaccaccttgaaaagtccaaaaacctcagcaaagaaacagagaggtgaaaaagccaarcgagcctcaaaaggaaaacaaaaacaacctggtgcgtaaagtattgcagatatgaagaatgtaataacctggtctacccacacacctgtyrgctctgctaccatacaacatcagtgagctttgtccatttctcacctctgcacataacatgatttgcatgttaattgtcctaagcaggtgtgagcaggtaatggtaaggggaagytttcggtgcacggaatcttgcagcgtacacaagatgacagattccttayggcttctctccaatgcagagcacctgttcaaaataaaaacaagttt

SEQ ID NO: 37735 - DNA, 600 bp, Chicken  19866894267976_2
tgaaaattggactgtgataataaaatatataaaattaagggccaaattttcactcctgcacagtgcgttccactgtttgcttactatttgttgatgatatctattttctctagagattctgaaaacatgcccaaaaatctcagatctggcaagaccaccttgaaaagtccaaaaacctcagcaaagaaacagagaggtgaaaaagccaarcgagcctcaaaaggaaaacaaaaacaacctggtgcgtaaagtattgcagatatgaagaatgtaataacctggtctacccacacacctgtyrgctctgctaccatacaacatcagtgagctttgtccatttctcacctctgcacataacatgatttgcatgttaattgtcctaagcaggtgtgagcaggtaatggtaaggggaagytttcggtgcacggaatcttgcagcgtacacaagatgacagattccttayggcttctctccaatgcagagcacctgttcaaaataaaaacaagttttaaatctccaaagtctcaaaaaatgctgacagctccttaagatacagatctattttaaaaggcttccttcatttcttgtgatgggtttga

SEQ ID NO: 37736 - DNA, 600 bp, Chicken  19866894267976_3
gaaaattggactgtgataataaaatatataaaattaagggccaaattttcactcctgcacagtgcgttccactgtttgcttactatttgttgatgatatctattttctctagagattctgaaaacatgcccaaaaatctcagatctggcaagaccaccttgaaaagtccaaaaacctcagcaaagaaacagagaggtgaaaaagccaarcgagcctcaaaaggaaaacaaaaacaacctggtgcgtaaagtattgcagatatgaagaatgtaataacctggtctacccacacacctgtyrgctctgctaccatacaacatcagtgagctttgtccatttctcacctctgcacataacatgatttgcatgttaattgtcctaagcaggtgtgagcaggtaatggtaaggggaagytttcggtgcacggaatcttgcagcgtacacaagatgacagattccttayggcttctctccaatgcagagcacctgttcaaaataaaaacaagttttaaatctccaaagtctcaaaaaatgctgacagctccttaagatacagatctattttaaaaggcttccttcatttcttgtgatgggtttgag

SEQ ID NO: 37737 - DNA, 600 bp, Chicken  19866894267976_4
attctgaaaacatgcccaaaaatctcagatctggcaagaccaccttgaaaagtccaaaaacctcagcaaagaaacagagaggtgaaaaagccaarcgagcctcaaaaggaaaacaaaaacaacctggtgcgtaaagtattgcagatatgaagaatgtaataacctggtctacccacacacctgtyrgctctgctaccatacaacatcagtgagctttgtccatttctcacctctgcacataacatgatttgcatgttaattgtcctaagcaggtgtgagcaggtaatggtaaggggaagytttcggtgcacggaatcttgcagcgtacacaagatgacagattccttayggcttctctccaatgcagagcacctgttcaaaataaaaacaagttttaaatctccaaagtctcaaaaaatgctgacagctccttaagatacagatctattttaaaaggcttccttcatttcttgtgatgggtttgagctgtgtgcaatttattttgtgtttcctcttcgcagtttagttttaaatgtatacataaattttaaacatcgccttagcaaggaaggaactgtatgttcataggtactttgttag

SEQ ID NO: 37738 - DNA, 600 bp, Chicken  19866894267976_5
aagtccaaaaacctcagcaaagaaacagagaggtgaaaaagccaarcgagcctcaaaaggaaaacaaaaacaacctggtgcgtaaagtattgcagatatgaagaatgtaataacctggtctacccacacacctgtyrgctctgctaccatacaacatcagtgagctttgtccatttctcacctctgcacataacatgatttgcatgttaattgtcctaagcaggtgtgagcaggtaatggtaaggggaagytttcggtgcacggaatcttgcagcgtacacaagatgacagattccttayggcttctctccaatgcagagcacctgttcaaaataaaaacaagttttaaatctccaaagtctcaaaaaatgctgacagctccttaagatacagatctattttaaaaggcttccttcatttcttgtgatgggtttgagctgtgtgcaatttattttgtgtttcctcttcgcagtttagttttaaatgtatacataaattttaaacatcgccttagcaaggaaggaactgtatgttcataggtactttgttaggaaaacaaattctcataacatcttgttatatttcagaggaaaaggatga

SEQ ID NO: 37739 - DNA, 599 bp, Chicken  19866894267977_1
  misc_feature (1)..(127): n is any nucleotide
nnnnnnnnnnnnnnnnnnnnnnnnnnnnnnnnnnnnnnnnnnnnnnnnnnnnnnnnnnnnnnnnnnnnnnnnnnnnnnnnnnnnnnnnnnnnnnnnnnnnnnnnnnnnnnnnnnnnnnnnnnnnnnncatcagtagctgaacccttgatgctttactagaccttaaaaattaattaaagtatgactaatgagagtgtgtccttcaatttaatttgttccatgaatgagtagaagtgaaaaccagtaaaccagagctaaagatcaggtctgggagggagcacataaagccttctctacacrttcaggctcatcaactatatttgatacacttaagtggtaygtacaccttttcaggcacttaacagagtatatctgagataaactgaacaatagaagacagagcatatttgagataaactaagcagtagtcttcactgtactgaaactgctgaaaatgtgtcaaacagtaacagcaaactcacgaaaagaattagtcaaattagtaacatttcaatttatttcaagaagcaaaaacatcatctagaatgtcarmatttgcccsaatatttggagtccttttgtttccagcacagaaaagt

SEQ ID NO: 37740 - DNA, 599 bp, Chicken  19866894267977_2
  misc_feature (1)..(87): n is any nucleotide
nnnnnnnnnnnnnnnnnnnnnnnnnnnnnnnnnnnnnnnnnnnnnnnnnnnnnnnnnnnnnnnnnnnnnnnnnnnnnnnnnnnnnnncatcagtagctgaacccttgatgctttactagaccttaaaaattaattaaagtatgactaatgagagtgtgtccttcaatttaatttgttccatgaatgagtagaagtgaaaaccagtaaaccagagctaaagatcaggtctgggagggagcacataaagccttctctacacrttcaggctcatcaactatatttgatacacttaagtggtaygtacaccttttcaggcacttaacagagtatatctgagataaactgaacaatagaagacagagcatatttgagataaactaagcagtagtcttcactgtactgaaactgctgaaaatgtgtcaaacagtaacagcaaactcacgaaaagaattagtcaaattagtaacatttcaatttatttcaagaagcaaaaacatcatctagaatgtcarmatttgcccsaatatttggagtccttttgtttccagcacagaaaagtaaggactacctgctgtcctacatgaggcaggaaggagatg

SEQ ID NO: 37741 - DNA, 590 bp, Chicken  19866894267977_3
agctaaagatcaggtctgggagggagcacataaagccttctctacacrttcaggctcatcaactatatttgatacacttaagtggtaygtacaccttttcaggcacttaacagagtatatctgagataaactgaacaatagaagacagagcatatttgagataaactaagcagtagtcttcactgtactgaaactgctgaaaatgtgtcaaacagtaacagcaaactcacgaaaagaattagtcaaattagtaacatttcaatttatttcaagaagcaaaaacatcatctagaatgtcarmatttgcccsaatatttggagtccttttgtttccagcacagaaaagtaaggactacctgctgtcctacatgaggcaggaaggagatggtggtggtctggtctaacctttctgatgtggtcagaaaatgtaaagagcctcatggatcagtgggttgggctgcatcccagagttggagagagggaagcagactgtgccaagaaaaagggtggtgcaaactgcttcccctctcaaacgaggagaacacgtgacactgagtcagagttcccagggtggttcagctacagttctc

SEQ ID NO: 37742 - DNA, 589 bp, Chicken  19866894267977_4
gctaaagatcaggtctgggagggagcacataaagccttctctacacrttcaggctcatcaactatatttgatacacttaagtggtaygtacaccttttcaggcacttaacagagtatatctgagataaactgaacaatagaagacagagcatatttgagataaactaagcagtagtcttcactgtactgaaactgctgaaaatgtgtcaaacagtaacagcaaactcacgaaaagaattagtcaaattagtaacatttcaatttatttcaagaagcaaaaacatcatctagaatgtcarmatttgcccsaatatttggagtccttttgtttccagcacagaaaagtaaggactacctgctgtcctacatgaggcaggaaggagatggtggtggtctggtctaacctttctgatgtggtcagaaaatgtaaagagcctcatggatcagtgggttgggctgcatcccagagttggagagagggaagcagactgtgccaagaaaaagggtggtgcaaactgcttcccctctcaaacgaggagaacacgtgacactgagtcagagttcccagggtggttcagctacagttctc

SEQ ID NO: 37743 - DNA, 580 bp, Chicken  19866894267977_5
caggtctgggagggagcacataaagccttctctacacrttcaggctcatcaactatatttgatacacttaagtggtaygtacaccttttcaggcacttaacagagtatatctgagataaactgaacaatagaagacagagcatatttgagataaactaagcagtagtcttcactgtactgaaactgctgaaaatgtgtcaaacagtaacagcaaactcacgaaaagaattagtcaaattagtaacatttcaatttatttcaagaagcaaaaacatcatctagaatgtcarmatttgcccsaatatttggagtccttttgtttccagcacagaaaagtaaggactacctgctgtcctacatgaggcaggaaggagatggtggtggtctggtctaacctttctgatgtggtcagaaaatgtaaagagcctcatggatcagtgggttgggctgcatcccagagttggagagagggaagcagactgtgccaagaaaaagggtggtgcaaactgcttcccctctcaaacgaggagaacacgtgacactgagtcagagttcccagggtggttcagctacagttctc

SEQ ID NO: 37744 - DNA, 600 bp, Chicken  19866894267989_1
gacaagggggaagagaggcatggctgagaccttgtatgctgattcagtgttgcttctcttgcttacagacaactcctccattattaaagtttccctaaagcacaacaataaagcactggcactggccctcaatgcggagaaagctaacgcacagcggcttgccaaggagaaggtcgtcttgcagatggagttggagcagtgccacttccagaatgcttttctgcgaaacaagctctgcttcctggtatggcactaacagagttgtctctggggtgggcagcgctagcacctccgccttgrgagaggtgcgtgggctgtcactgattgtccatatcttctgcatctgaaatgagtctctgtttacatgtatattccttcctttaagctatgttctccccagagaactatgcttttttatggctgacagtatctttgtcggaacagatgttttgaattaatgcccttattgtttctctgtgtttcttcaacatagaataacgtcttgaaagagcttgaaaaccttgtggagtcagtcaagatggctcgactttctgaggtaagcagtgggaaatgtgaacatgctgctggttgtactggaaa

SEQ ID NO: 37745 - DNA, 599 bp, Chicken  19866894267990_1
  misc_feature (1)..(56): n is any nucleotide
nnnnnnnnnnnnnnnnnnnnnnnnnnnnnnnnnnnnnnnnnnnnnnnnnnnnnnnntcctcacccccaaactgaagccctccgtgcccaaaagttcacctaaatgcaaagatcagatcaaaaagggaggggcaggaaagaaaagcagtggaatagcaccacccatacaatgctgacccaatggctggcagcactgaacaatccatagggcaatccatacaagcaaagatgaacaaaagcaggcctgaagggggaaaagggaataacttcctacaaacctaattttcatgtaaatagctayagatgaagcatgagattaagtccaacccaaattcagaaggttatttaccctcacgctgtggctcgggagctgtttttgtgacactcctgctctgaacacagctgatagggaggaygcagccaccaccaccatgctgtcaccctgcagccacgggtgcccactatcagctccctgcagaaggctcgtgtttaaaacatgtcccacctagacaagctgtacccagagtgtgcaagataacctggtygtggggcacacctactgcacagagcacagaaaggctgggtgaggctgctgctgtg

SEQ ID NO: 37746 - DNA, 600 bp, Chicken  19866894267990_2
atcaaaaagggaggggcaggaaagaaaagcagtggaatagcaccacccatacaatgctgacccaatggctggcagcactgaacaatccatagggcaatccatacaagcaaagatgaacaaaagcaggcctgaagggggaaaagggaataacttcctacaaacctaattttcatgtaaatagctayagatgaagcatgagattaagtccaacccaaattcagaaggttatttaccctcacgctgtggctcgggagctgtttttgtgacactcctgctctgaacacagctgatagggaggaygcagccaccaccaccatgctgtcaccctgcagccacgggtgcccactatcagctccctgcagaaggctcgtgtttaaaacatgtcccacctagacaagctgtacccagagtgtgcaagataacctggtygtggggcacacctactgcacagagcacagaaaggctgggtgaggctgctgctgtgcagggacagccataaggagaaggacatgaaaggcatgttgagaaccttcaggttcctttcctggggctgctctcttaattggacaagaaaaagaaatagcaacgaagttgagcacg

SEQ ID NO: 37747 - DNA, 600 bp, Chicken  19866894267990_3
tgaagggggaaaagggaataacttcctacaaacctaattttcatgtaaatagctayagatgaagcatgagattaagtccaacccaaattcagaaggttatttaccctcacgctgtggctcgggagctgtttttgtgacactcctgctctgaacacagctgatagggaggaygcagccaccaccaccatgctgtcaccctgcagccacgggtgcccactatcagctccctgcagaaggctcgtgtttaaaacatgtcccacctagacaagctgtacccagagtgtgcaagataacctggtygtggggcacacctactgcacagagcacagaaaggctgggtgaggctgctgctgtgcagggacagccataaggagaaggacatgaaaggcatgttgagaaccttcaggttcctttcctggggctgctctcttaattggacaagaaaaagaaatagcaacgaagttgagcacgttaacatatgtatatatacatatatatgtgtgtgtatatacatatatatgtgtgtatgtatatacatatataatatatatatacacacacatatattttaaagagcaagataataataaagacacagtt

SEQ ID NO: 37748 - DNA, 600 bp, Chicken  19866894267991_1
ttgtacaatgcatgcaataggacttctttagctctcaaaatagaacatcaaaaaacatctagctgcacatttatatattgcctgagtaaacggtagaccactgaacacctgtagaacaacccatggaatgcctgtgtgtagaatggctctcatgtatgcaagtaagactaaaaatgccaactctgtcctgaagatgtaccagaaaacaacatcaagacaatatggaaaccttcttccctttcagcagacagctccaactgccttcacagctccaagacattatctgtacattttgacaaktgtaactgacaagcctgatgccaaagtagaaaagcaaccaagaaaaatcaaaaggagaaactctcagtctctagaatgccacttccctcaggagaccaacccaagaaccttttcatcagacagtcattgctgccagccactgacactgtgccacagacatacaaagggagactaccaacattcctctcttagctctaaacatactaaagcctgggaagatttcaacaatctggatagtatctgagacttatctgaaagctataggaaactcatcttcttctcagaactacattttaayac

SEQ ID NO: 37749 - DNA, 516 bp, Chicken  19866894267991_2
aktgtaactgacaagcctgatgccaaagtagaaaagcaaccaagaaaaatcaaaaggagaaactctcagtctctagaatgccacttccctcaggagaccaacccaagaaccttttcatcagacagtcattgctgccagccactgacactgtgccacagacatacaaagggagactaccaacattcctctcttagctctaaacatactaaagcctgggaagatttcaacaatctggatagtatctgagacttatctgaaagctataggaaactcatcttcttctcagaactacattttaayacactcaattcttggaactttccagtgttggggtgtgtgctattattacacaccataggcatttcaggatgtaccactgaagctaagaaattttttggatgtgttctttacctactgaaatgaccaggtattccagaggcaaaattataaaacaaagtaaaaacagcaaattggggtcagtgcacatattaataatggctattaaatgattaatag

SEQ ID NO: 37750 - DNA, 600 bp, Chicken  19866894267995_1
aactgagttttctggtattttgttaacagttgtccagcagagtagtaagtagtttcttaactagtagtaataaaaggggcagaggttgcaattctggcacatgtgcctattcaaaaagcagagacaaatccaagcacgcttagaatcatagaacaaaaccatagaatcacagaatagcctgggatgaagaggaccacagtgatcatctagtttcaaccccactgccacaagcagggtcaccaaccactagactagactgcccagagccacttgatatcttaggcttctctaaagcaaacyataaaggccagaaaactgtaaaaccaaaatagctcaatcaactgccaccacaggctaaggtaagtgcgggacggaagctggagtttcttttaaaaaacagagaccaaatcattctgccataactctttttaaatggaagaggttttttcccagaataaagaaaagtattgtatgaaaacccaaattcaccaagttcccctttgtaggtgttaaggatttggattggayttattttgaattaaaaacagcatgcaacaattcamctctagccagcttcaagaagccaaggattaaaccatg

SEQ ID NO: 37751 - DNA, 600 bp, Chicken  19866894267995_2
aagcagggtcaccaaccactagactagactgcccagagccacttgatatcttaggcttctctaaagcaaacyataaaggccagaaaactgtaaaaccaaaatagctcaatcaactgccaccacaggctaaggtaagtgcgggacggaagctggagtttcttttaaaaaacagagaccaaatcattctgccataactctttttaaatggaagaggttttttcccagaataaagaaaagtattgtatgaaaacccaaattcaccaagttcccctttgtaggtgttaaggatttggattggayttattttgaattaaaaacagcatgcaacaattcamctctagccagcttcaagaagccaaggattaaaccatgtcccttcctaccacatctaaacatttcttaaacacctccagggacagtgactccaccatctccctgggcagcccaattcagcgcctgaccactctttcggagaataaattatttctaatatccaacctgaacttcccttgatgcaacttgaggcrattccccctagtcctattgctagttacctgggagaasagactgaatccaacctcaccacaatctcccttcagg

SEQ ID NO: 37752 - DNA, 600 bp, Chicken  19866894267995_3
gagccacttgatatcttaggcttctctaaagcaaacyataaaggccagaaaactgtaaaaccaaaatagctcaatcaactgccaccacaggctaaggtaagtgcgggacggaagctggagtttcttttaaaaaacagagaccaaatcattctgccataactctttttaaatggaagaggttttttcccagaataaagaaaagtattgtatgaaaacccaaattcaccaagttcccctttgtaggtgttaaggatttggattggayttattttgaattaaaaacagcatgcaacaattcamctctagccagcttcaagaagccaaggattaaaccatgtcccttcctaccacatctaaacatttcttaaacacctccagggacagtgactccaccatctccctgggcagcccaattcagcgcctgaccactctttcggagaataaattatttctaatatccaacctgaacttcccttgatgcaacttgaggcrattccccctagtcctattgctagttacctgggagaasagactgaatccaacctcaccacaatctcccttcagggagttgtagagagcaataatgtctcctatcctgat

SEQ ID NO: 37753 - DNA, 600 bp, Chicken  19866894267995_4
taaagaaaagtattgtatgaaaacccaaattcaccaagttcccctttgtaggtgttaaggatttggattggayttattttgaattaaaaacagcatgcaacaattcamctctagccagcttcaagaagccaaggattaaaccatgtcccttcctaccacatctaaacatttcttaaacacctccagggacagtgactccaccatctccctgggcagcccaattcagcgcctgaccactctttcggagaataaattatttctaatatccaacctgaacttcccttgatgcaacttgaggcrattccccctagtcctattgctagttacctgggagaasagactgaatccaacctcaccacaatctcccttcagggagttgtagagagcaataatgtctcctatcctgataagcctcctcttctccagattagataatcccagttccttcattagactagtgctccagacccctcaccagcttcattgcccttctctggacacactccagggcctcagtgtctttgttgtagtgaggggtccaaaactgaccacagtactcaagatgcggcctcaccagagctgagtagagggaaacaatca

SEQ ID NO: 37754 - DNA, 600 bp, Chicken  19866894267995_5
gttcccctttgtaggtgttaaggatttggattggayttattttgaattaaaaacagcatgcaacaattcamctctagccagcttcaagaagccaaggattaaaccatgtcccttcctaccacatctaaacatttcttaaacacctccagggacagtgactccaccatctccctgggcagcccaattcagcgcctgaccactctttcggagaataaattatttctaatatccaacctgaacttcccttgatgcaacttgaggcrattccccctagtcctattgctagttacctgggagaasagactgaatccaacctcaccacaatctcccttcagggagttgtagagagcaataatgtctcctatcctgataagcctcctcttctccagattagataatcccagttccttcattagactagtgctccagacccctcaccagcttcattgcccttctctggacacactccagggcctcagtgtctttgttgtagtgaggggtccaaaactgaccacagtactcaagatgcggcctcaccagagctgagtagagggaaacaatcacctccctgctcctgctggtggcactatttctgataca

SEQ ID NO: 37755 - DNA, 600 bp, Chicken  19866894268005_1
aaaagctgcaggcatgcagatattctaatatcttgctccagaggagagggaaaaaaaaatgaaagaagtgggggatatttcaaagcttcaagcttccagctctgagcagagcctgcagatcactgagttgatgcgctgtaggaagagagtgagccagattcagtgacagactgcaggctctcgctacagaaaggtcaccccaataaaaaaattatgagcaatgtctaaaattatccaagcagttcctccccccctgggccccactcgactaacaaaagctacttcgcgtgagctgcaagygtgcatgaaatcaaagagctcccgcggcacgcctgccacaaacttgagaagtgctctgctgtgtggtaatggaagtccccactgtgtgccgacccacagcattgctgggagcagagctgggacctgctggggatgggggcattgtgctgaggactgccctggggcagactgctggtggcaagatgtccagcagacagggcagcatctcccagctcccactgccagcacagcagccagtctgcaggctctgctgatagctgctcttctctcacaccaagtgtagcagctgcaggaggtact

SEQ ID NO: 37756 - DNA, 600 bp, Chicken  19866894268016_1
aatgtagcaaacatattttttgttatgagggatacacagcagctccctgtttccagtagccggtgctggcacattagtattaagcaagttaaataaacactagaccagaaaattcaccatattatgttgtcatttactacaatagagataaaagcaaacaggttctaaactcaggcagtaagtctggccattaattttctcttgagaagaagaacacaggcatttttaagtggaaagattaaaatattaatcaaaacctaaatgactcagtagtgtatcagccatttctcacacacacawtctgaaaaaggattttatacacaaaccattagggttaatcttgaggtcaaaggcagccagccctgaccaggtgggttacactatccacccggcgcagtatcccatatacaaatcttccataagtccttgggaaccacaaggagaggcaacttatgctccctgcaccacatctacgtgtgtcttcaggacttttcccctcagcatctgcaggcaggaacaagaagtcactatccagacacccagaccatcagtcaacactgctgcagcatctccacacactctgttcacttggagtggcag

SEQ ID NO: 37757 - DNA, 600 bp, Chicken  19866894268021_1
cacagctacaatactataaccagctggtattggctgcaatacgcctctgaagcatgttaccatatttctttccaccactttcatgtgtaatagaaaagtattataaaacaattaattccctttcctgtctgtccatcttccttcccccaccctacccccccccccctcccttttttctttccctccaacaaagttggtgaggcactggcacaggtcgcccagagaggcagtagatgccccatccatgcagacatccaaggtcaggctggaggggactgagcaacttggtctagctgtagrtgtccctgttcattgcagaggaattggggtagatagtttttaggggacccttcccaactcaaacgattcatgattctatgaataaatactcaagaatcaaraaatagccaggctagagatccacagttctgtaacgaattaagctatggctaagagatggaggctaacagatgcagcagtgtctacacaagcaggaatttgaactggtttttcttttgaagaaataaataactaacaagaaattggcacaaccagttattcattttgtggcacagcagtacagtaaagcagcaacagata

SEQ ID NO: 37758 - DNA, 600 bp, Chicken  19866894268021_2
tataaaacaattaattccctttcctgtctgtccatcttccttcccccaccctacccccccccccctcccttttttctttccctccaacaaagttggtgaggcactggcacaggtcgcccagagaggcagtagatgccccatccatgcagacatccaaggtcaggctggaggggactgagcaacttggtctagctgtagrtgtccctgttcattgcagaggaattggggtagatagtttttaggggacccttcccaactcaaacgattcatgattctatgaataaatactcaagaatcaaraaatagccaggctagagatccacagttctgtaacgaattaagctatggctaagagatggaggctaacagatgcagcagtgtctacacaagcaggaatttgaactggtttttcttttgaagaaataaataactaacaagaaattggcacaaccagttattcattttgtggcacagcagtacagtaaagcagcaacagataagaaarttatcggctttccaaattcttggaatgctatactaaaatatctatctatctatataccctctaagaaaccacaagagatgaatgaatagtaaccc

SEQ ID NO: 37759 - DNA, 600 bp, Chicken  19866894268021_3
tgttcattgcagaggaattggggtagatagtttttaggggacccttcccaactcaaacgattcatgattctatgaataaatactcaagaatcaaraaatagccaggctagagatccacagttctgtaacgaattaagctatggctaagagatggaggctaacagatgcagcagtgtctacacaagcaggaatttgaactggtttttcttttgaagaaataaataactaacaagaaattggcacaaccagttattcattttgtggcacagcagtacagtaaagcagcaacagataagaaarttatcggctttccaaattcttggaatgctatactaaaatatctatctatctatataccctctaagaaaccacaagagatgaatgaatagtaacccagaacccaacagctagccttgcaagtgccagtctctcagcaaatgaacatggatggaatacagggctctaaaacaacaaggagctgttgcaagcactgtgaagatgacatgaggcatgctctctttccactgtacttcagtctgtgcagctatggctaagctggaaaggaacacatcatgagatctgcttcaccttacttctctg

SEQ ID NO: 37760 - DNA, 600 bp, Chicken  19866894268037_1
atgattacttttcttgttttatgacacaacctgactacataaaaaagttgactaaattcctcctgattaaacaattattcatcttatgcgtgcctttaccttaagcaagaaattagaaatcagagaatgcaagtccaaaatataaagtattaataatacatctataacggtaattatgcttttctgtctttcactctcaaaacatatatccaaaattatttgtatttttccagtcagtttaaaaagtcataagccacagtcaagtttgtatgtatatacacacagtgagttttcagtccygtttacccttattagcactaaatctgcacaaactcaagatcagccagtggatgaaaagagaaagacttttgccttccaggctgcagtagatgctcatcaacactttctacttcaaaaaggaagccttttggggggagccgttttgcaatttattggatgcatttaatctagatatgattgtgactcagctagtaaaatacagctgagttcctacgtatagcctgaggatgctcaaaccttctgattttgtttttttctgaagagaatcagacttctagcccttattgatctagactagcc

SEQ ID NO: 37761 - DNA, 600 bp, Chicken  19866894268037_2
tagatgctcatcaacactttctacttcaaaaaggaagccttttggggggagccgttttgcaatttattggatgcatttaatctagatatgattgtgactcagctagtaaaatacagctgagttcctacgtatagcctgaggatgctcaaaccttctgattttgtttttttctgaagagaatcagacttctagcccttattgatctagactagccgagtcctgggcatgcctgactcagtgagcacaattgtattctgaccatcatgtagtcaggcacaggacaactcaagctgactctaytactgctgcaaattctggcactaaagctttcatagaaacatttattgtgctgatagctctgggactagtctgtttgagctttgattcttctctgccttcctgrctacagatgtgactggggtcacaaagcaaaatgataggcagtatgtagatcaccttcagtgcaaggctctcttgctgtcattgttaataatgataaatgattgtgaattgaattcactgttctctgtctagtagctcattaatgtcaagtgagtatgttgcagaacagccgtgggagcacaggtgcacaatagaaca

SEQ ID NO: 37762 - DNA, 600 bp, Chicken  19866894268037_3
tagtaaaatacagctgagttcctacgtatagcctgaggatgctcaaaccttctgattttgtttttttctgaagagaatcagacttctagcccttattgatctagactagccgagtcctgggcatgcctgactcagtgagcacaattgtattctgaccatcatgtagtcaggcacaggacaactcaagctgactctaytactgctgcaaattctggcactaaagctttcatagaaacatttattgtgctgatagctctgggactagtctgtttgagctttgattcttctctgccttcctgrctacagatgtgactggggtcacaaagcaaaatgataggcagtatgtagatcaccttcagtgcaaggctctcttgctgtcattgttaataatgataaatgattgtgaattgaattcactgttctctgtctagtagctcattaatgtcaagtgagtatgttgcagaacagccgtgggagcacaggtgcacaatagaacagtagttctaacattagcagcaaagttgccctggctgggtaataaccactgactgaaattcgtatagcaagagaataaagatagaatcacacattacaacactg

SEQ ID NO: 37763 - DNA, 600 bp, Chicken  19866894268039_1
aggcagagagcattcttcaatttctcattcctgttaatcatgtttggcattttcctgtctacaaactcggagcttggcacactctctgttctttactcactccaaacacagcagaagattttgcacagctggacaccagctctagtcactgggttccacatcagcatccactgaagtccacagaaatttggccgctgtgtttaatgagaaccagttgaggcccttttttgacaggtgaagccccttcaaaggaagtcaaggtactactggcagcaggagacccagtttgcattaccaagyaccccatcgcctatcagtatgtgaaaggtgctttccaggagctccaaacayataataacttgcaaatggggactacagtagacctaagtgctcaggcaggagttccacttggatggtactctggaacaggattgcctcagtgatcattcagaaaagcccaactacatcctggtttaagaactatgtactggaaaagatccccactaaaaaattctccccatgcataatttaaagatgttgtggggaattctgcacaaggaatttgttctgaattaaaaatgatacagggacaacctcaac

SEQ ID NO: 37764 - DNA, 600 bp, Chicken  19866894268039_2
ttcctgtctacaaactcggagcttggcacactctctgttctttactcactccaaacacagcagaagattttgcacagctggacaccagctctagtcactgggttccacatcagcatccactgaagtccacagaaatttggccgctgtgtttaatgagaaccagttgaggcccttttttgacaggtgaagccccttcaaaggaagtcaaggtactactggcagcaggagacccagtttgcattaccaagyaccccatcgcctatcagtatgtgaaaggtgctttccaggagctccaaacayataataacttgcaaatggggactacagtagacctaagtgctcaggcaggagttccacttggatggtactctggaacaggattgcctcagtgatcattcagaaaagcccaactacatcctggtttaagaactatgtactggaaaagatccccactaaaaaattctccccatgcataatttaaagatgttgtggggaattctgcacaaggaatttgttctgaattaaaaatgatacagggacaacctcaaccgcagtacaggacccaagattttttcatctatatttcactccaagcaacgt

SEQ ID NO: 37765 - DNA, 600 bp, Chicken  19866894268042_1
aattgttgtatagtatattaactagtatattctcagtttgctcccagtacaacctgatattaaacaaaaatcagagaaaacaactaaccaaaggatggagctgctgcatgtggtaaattggccagagatagatggtcttatgtaagacaccatcatttttagggggactggttacttaagtgctaggtattggcttccggcagttcttggaaagataatgaattataaaagtgcatctgctcctattggtaatatttaaaaacacaagtagcaagaaagtacttataaggtcatcatagyaaatttctaataaccttttgtgtgggaaagcaccaggaattaaaatttgtgacatttttgaggtggtgkttttgttttccttcctacaaacttcagattaattgaagaaatatttgctgctgatcatgaaagcaaagcatgctttgtgatcacctcctggaacaaaaaactaaagcagttaccttaytgtacttagaacagtgcaaggctgctctgtagcatctttgaaatgtttttccttgctattacaagtccatgtgcttgatctttacttccctgagctctaaccacaaattggat

SEQ ID NO: 37766 - DNA, 600 bp, Chicken  19866894268042_2
atcagagaaaacaactaaccaaaggatggagctgctgcatgtggtaaattggccagagatagatggtcttatgtaagacaccatcatttttagggggactggttacttaagtgctaggtattggcttccggcagttcttggaaagataatgaattataaaagtgcatctgctcctattggtaatatttaaaaacacaagtagcaagaaagtacttataaggtcatcatagyaaatttctaataaccttttgtgtgggaaagcaccaggaattaaaatttgtgacatttttgaggtggtgkttttgttttccttcctacaaacttcagattaattgaagaaatatttgctgctgatcatgaaagcaaagcatgctttgtgatcacctcctggaacaaaaaactaaagcagttaccttaytgtacttagaacagtgcaaggctgctctgtagcatctttgaaatgtttttccttgctattacaagtccatgtgcttgatctttacttccctgagctctaaccacaaattggatgagaatgttgtgatttggtacacagaatcttaatactgcaatgtatatcgcagaaggaaataatttcag

SEQ ID NO: 37767 - DNA, 596 bp, Chicken  19866894268042_3
tattggcttccggcagttcttggaaagataatgaattataaaagtgcatctgctcctattggtaatatttaaaaacacaagtagcaagaaagtacttataaggtcatcatagyaaatttctaataaccttttgtgtgggaaagcaccaggaattaaaatttgtgacatttttgaggtggtgkttttgttttccttcctacaaacttcagattaattgaagaaatatttgctgctgatcatgaaagcaaagcatgctttgtgatcacctcctggaacaaaaaactaaagcagttaccttaytgtacttagaacagtgcaaggctgctctgtagcatctttgaaatgtttttccttgctattacaagtccatgtgcttgatctttacttccctgagctctaaccacaaattggatgagaatgttgtgatttggtacacagaatcttaatactgcaatgtatatcgcagaaggaaataatttcagacactttaagcttgagtattatgtaagtaccaatattttctgatacagcaggagccaaacctgtcagggagctggtgccttaatgtagatgaacaatacagtctgtttcttgaa

SEQ ID NO: 37768 - DNA, 600 bp, Chicken  19866894268050_1
aagcagggtaagggaaaaggagggagaatggactgctggtgtctgcactgcatgctgtctcctactccatgcaactgtcacctgctttcttacactagattggaaaatgcctgaagactgcctgtccccagaccttagctgggcactctgcccttcccctccaccctgaatgcatcgggtatgtgctacagatggggatttaagggcatccacctgccagaaacttcctagagatttattgcacttcaccctaaagtggcttgaaaagcctgcctaaaattgcagcaggagcaaatgtgyttttatcactgtcaaaccatcaattaggccagccttagcacaaatgacagcttgagatgggsctgatgcaaaagaagagagctggccccaggcatctgctcttgtgggatgcagctcaggcactgctggtggatgaagcatagctgtgcccatgcyratgtcctcctcctacttgggatgcaacagtccaggatatctcaarttcctaatgaagcccacttcacagtgkggcagcgggcatcgtgctaaaaacagtgaatttaagcaccatttccaaaacatgttgggcacaagtgctat

SEQ ID NO: 37769 - DNA, 600 bp, Chicken  19866894268050_2
tactccatgcaactgtcacctgctttcttacactagattggaaaatgcctgaagactgcctgtccccagaccttagctgggcactctgcccttcccctccaccctgaatgcatcgggtatgtgctacagatggggatttaagggcatccacctgccagaaacttcctagagatttattgcacttcaccctaaagtggcttgaaaagcctgcctaaaattgcagcaggagcaaatgtgyttttatcactgtcaaaccatcaattaggccagccttagcacaaatgacagcttgagatgggsctgatgcaaaagaagagagctggccccaggcatctgctcttgtgggatgcagctcaggcactgctggtggatgaagcatagctgtgcccatgcyratgtcctcctcctacttgggatgcaacagtccaggatatctcaarttcctaatgaagcccacttcacagtgkggcagcgggcatcgtgctaaaaacagtgaatttaagcaccatttccaaaacatgttgggcacaagtgctatttgtttctcactgatgctgacaccaagcacagcacagcactgtggtccacactgagctgggg

SEQ ID NO: 37770 - DNA, 600 bp, Chicken  19866894268050_3
ccctccaccctgaatgcatcgggtatgtgctacagatggggatttaagggcatccacctgccagaaacttcctagagatttattgcacttcaccctaaagtggcttgaaaagcctgcctaaaattgcagcaggagcaaatgtgyttttatcactgtcaaaccatcaattaggccagccttagcacaaatgacagcttgagatgggsctgatgcaaaagaagagagctggccccaggcatctgctcttgtgggatgcagctcaggcactgctggtggatgaagcatagctgtgcccatgcyratgtcctcctcctacttgggatgcaacagtccaggatatctcaarttcctaatgaagcccacttcacagtgkggcagcgggcatcgtgctaaaaacagtgaatttaagcaccatttccaaaacatgttgggcacaagtgctatttgtttctcactgatgctgacaccaagcacagcacagcactgtggtccacactgagctggggcacaaagaaacatattcaaatccatgttaaatgtcatgaaaatgcaggctttcccagkggggatgctgaactctgcaacaaatctgtttgcaaa

SEQ ID NO: 37771 - DNA, 600 bp, Chicken  19866894268050_4
cctccaccctgaatgcatcgggtatgtgctacagatggggatttaagggcatccacctgccagaaacttcctagagatttattgcacttcaccctaaagtggcttgaaaagcctgcctaaaattgcagcaggagcaaatgtgyttttatcactgtcaaaccatcaattaggccagccttagcacaaatgacagcttgagatgggsctgatgcaaaagaagagagctggccccaggcatctgctcttgtgggatgcagctcaggcactgctggtggatgaagcatagctgtgcccatgcyratgtcctcctcctacttgggatgcaacagtccaggatatctcaarttcctaatgaagcccacttcacagtgkggcagcgggcatcgtgctaaaaacagtgaatttaagcaccatttccaaaacatgttgggcacaagtgctatttgtttctcactgatgctgacaccaagcacagcacagcactgtggtccacactgagctggggcacaaagaaacatattcaaatccatgttaaatgtcatgaaaatgcaggctttcccagkggggatgctgaactctgcaacaaatctgtttgcaaac

SEQ ID NO: 37772 - DNA, 600 bp, Chicken  19866894268050_5
agggcatccacctgccagaaacttcctagagatttattgcacttcaccctaaagtggcttgaaaagcctgcctaaaattgcagcaggagcaaatgtgyttttatcactgtcaaaccatcaattaggccagccttagcacaaatgacagcttgagatgggsctgatgcaaaagaagagagctggccccaggcatctgctcttgtgggatgcagctcaggcactgctggtggatgaagcatagctgtgcccatgcyratgtcctcctcctacttgggatgcaacagtccaggatatctcaarttcctaatgaagcccacttcacagtgkggcagcgggcatcgtgctaaaaacagtgaatttaagcaccatttccaaaacatgttgggcacaagtgctatttgtttctcactgatgctgacaccaagcacagcacagcactgtggtccacactgagctggggcacaaagaaacatattcaaatccatgttaaatgtcatgaaaatgcaggctttcccagkggggatgctgaactctgcaacaaatctgtttgcaaacctcatcccatacagccatagtgcaattaagttttcagtttactta

SEQ ID NO: 37773 - DNA, 600 bp, Chicken  19866894268050_6
agagatttattgcacttcaccctaaagtggcttgaaaagcctgcctaaaattgcagcaggagcaaatgtgyttttatcactgtcaaaccatcaattaggccagccttagcacaaatgacagcttgagatgggsctgatgcaaaagaagagagctggccccaggcatctgctcttgtgggatgcagctcaggcactgctggtggatgaagcatagctgtgcccatgcyratgtcctcctcctacttgggatgcaacagtccaggatatctcaarttcctaatgaagcccacttcacagtgkggcagcgggcatcgtgctaaaaacagtgaatttaagcaccatttccaaaacatgttgggcacaagtgctatttgtttctcactgatgctgacaccaagcacagcacagcactgtggtccacactgagctggggcacaaagaaacatattcaaatccatgttaaatgtcatgaaaatgcaggctttcccagkggggatgctgaactctgcaacaaatctgtttgcaaacctcatcccatacagccatagtgcaattaagttttcagtttacttatgtgcaaggaggatgtcagtcttttct

SEQ ID NO: 37774 - DNA, 595 bp, Chicken  19866894268050_7
cactgctggtggatgaagcatagctgtgcccatgcyratgtcctcctcctacttgggatgcaacagtccaggatatctcaarttcctaatgaagcccacttcacagtgkggcagcgggcatcgtgctaaaaacagtgaatttaagcaccatttccaaaacatgttgggcacaagtgctatttgtttctcactgatgctgacaccaagcacagcacagcactgtggtccacactgagctggggcacaaagaaacatattcaaatccatgttaaatgtcatgaaaatgcaggctttcccagkggggatgctgaactctgcaacaaatctgtttgcaaacctcatcccatacagccatagtgcaattaagttttcagtttacttatgtgcaaggaggatgtcagtcttttctcaatgctgactttgtacaagggcaacatcactaggctgtttaataatttatgtccttaaaatcaggggtgatgtttgggaaagttcctactgctgccagcaggatattaagcatccttccaagagagctggtctgattgcagcaagctcttacagcattcatgaagcacaccaaggtgcatttgca

SEQ ID NO: 37775 - DNA, 599 bp, Chicken  19866894268058_1
  misc_feature (1)..(2): n is any nucleotide
nnaataaaataaagagtttttttctgggtttatattcagtctgagagctgaaaggtatgaaaacagaaccctaattaatacattaattcctggaaatgcatttaaaggttgctatgattttacatacagtcttcagtgatggaatgtatggcaaggacagtgtaatcctcaagtaggaaaaggccttcttgaaaactccaatgatgaactaaaatccagttctctcaaattttaactaataccatttgtatttttcagaacttaactgttaagggtatgtgtcaagttcataccacctgstgaaaaaatttaaattctaaagttaatgagtcctgcgctaaragacaatcagactggaattaagaactctttatcatcctttcattctctcttcttgctttttgagttggaggaattgttgtcaactgattcttacctgtcacagattattattttattgttatacattggattttgcatccggaagtcatctttctgtctgcttgttcttatgtctgcccaggatgaatgacagtgccgaggaaaatattgttcttttgcacttctgataaagagagaaagtaaagactgagggagag

SEQ ID NO: 37776 - DNA, 600 bp, Chicken  19866894268058_2
gagagctgaaaggtatgaaaacagaaccctaattaatacattaattcctggaaatgcatttaaaggttgctatgattttacatacagtcttcagtgatggaatgtatggcaaggacagtgtaatcctcaagtaggaaaaggccttcttgaaaactccaatgatgaactaaaatccagttctctcaaattttaactaataccatttgtatttttcagaacttaactgttaagggtatgtgtcaagttcataccacctgstgaaaaaatttaaattctaaagttaatgagtcctgcgctaaragacaatcagactggaattaagaactctttatcatcctttcattctctcttcttgctttttgagttggaggaattgttgtcaactgattcttacctgtcacagattattattttattgttatacattggattttgcatccggaagtcatctttctgtctgcttgttcttatgtctgcccaggatgaatgacagtgccgaggaaaatattgttcttttgcacttctgataaagagagaaagtaaagactgagggagagatttactaaattggaggcagccagaaagaactttaattcagca

SEQ ID NO: 37777 - DNA, 599 bp, Chicken  19866894268062_1
  misc_feature (1)..(59): n is any nucleotide
nnnnnnnnnnnnnnnnnnnnnnnnnnnnnnnnnnnnnnnnnnnnnnnnnnnnnnnnnnnttgtttttctcctgtcttgtaaatggcaattgttaccaaaatacttaacgttccttaatttcaaatacataatgcagtacaccaggaaacaatgaactttcttctgttttatctcaagacagtagagaagccactgtttaggagataagaagagaggacgtgacctaacggcccacgtctgactcactgggaagagcagcgcaaaacatctcccctgaacttcacagggcccataaagagygmcacttgctttgaagacttttctttttgagccttgtcaaatggcatgtggtaattaacactgatgtaaaaatgcactgaaaggccaatgcagccacagaayaggacacgtgtgatacccacgcagcacctggctgtgscagcacccagtcactgcccaagaactccaccacaagraatctgtcccagaaagaaggaggacacaagtagggcataccatgggtggtacacatagcatcatgcttttgcaaggcaacatacaacatctggaacatatccagctatggtgatatcccttat

SEQ ID NO: 37778 - DNA, 599 bp, Chicken  19866894268062_2
  misc_feature (1)..(57): n is any nucleotide
nnnnnnnnnnnnnnnnnnnnnnnnnnnnnnnnnnnnnnnnnnnnnnnnnnnnnnnnnttgtttttctcctgtcttgtaaatggcaattgttaccaaaatacttaacgttccttaatttcaaatacataatgcagtacaccaggaaacaatgaactttcttctgttttatctcaagacagtagagaagccactgtttaggagataagaagagaggacgtgacctaacggcccacgtctgactcactgggaagagcagcgcaaaacatctcccctgaacttcacagggcccataaagagygmcacttgctttgaagacttttctttttgagccttgtcaaatggcatgtggtaattaacactgatgtaaaaatgcactgaaaggccaatgcagccacagaayaggacacgtgtgatacccacgcagcacctggctgtgscagcacccagtcactgcccaagaactccaccacaagraatctgtcccagaaagaaggaggacacaagtagggcataccatgggtggtacacatagcatcatgcttttgcaaggcaacatacaacatctggaacatatccagctatggtgatatcccttattt

SEQ ID NO: 37779 - DNA, 600 bp, Chicken  19866894268062_3
cttaacgttccttaatttcaaatacataatgcagtacaccaggaaacaatgaactttcttctgttttatctcaagacagtagagaagccactgtttaggagataagaagagaggacgtgacctaacggcccacgtctgactcactgggaagagcagcgcaaaacatctcccctgaacttcacagggcccataaagagygmcacttgctttgaagacttttctttttgagccttgtcaaatggcatgtggtaattaacactgatgtaaaaatgcactgaaaggccaatgcagccacagaayaggacacgtgtgatacccacgcagcacctggctgtgscagcacccagtcactgcccaagaactccaccacaagraatctgtcccagaaagaaggaggacacaagtagggcataccatgggtggtacacatagcatcatgcttttgcaaggcaacatacaacatctggaacatatccagctatggtgatatcccttattttcagccacacatgtatgagggtatggctgcagctccctttctcctagctcactagaagactggagaaaaaaataagcagctgtgaaaaacacagctaatgg

SEQ ID NO: 37780 - DNA, 600 bp, Chicken  19866894268062_4
accaggaaacaatgaactttcttctgttttatctcaagacagtagagaagccactgtttaggagataagaagagaggacgtgacctaacggcccacgtctgactcactgggaagagcagcgcaaaacatctcccctgaacttcacagggcccataaagagygmcacttgctttgaagacttttctttttgagccttgtcaaatggcatgtggtaattaacactgatgtaaaaatgcactgaaaggccaatgcagccacagaayaggacacgtgtgatacccacgcagcacctggctgtgscagcacccagtcactgcccaagaactccaccacaagraatctgtcccagaaagaaggaggacacaagtagggcataccatgggtggtacacatagcatcatgcttttgcaaggcaacatacaacatctggaacatatccagctatggtgatatcccttattttcagccacacatgtatgagggtatggctgcagctccctttctcctagctcactagaagactggagaaaaaaataagcagctgtgaaaaacacagctaatggataccagtgaggatgcaacataacatataataacact

SEQ ID NO: 37781 - DNA, 600 bp, Chicken  19866894268062_5
gacagtagagaagccactgtttaggagataagaagagaggacgtgacctaacggcccacgtctgactcactgggaagagcagcgcaaaacatctcccctgaacttcacagggcccataaagagygmcacttgctttgaagacttttctttttgagccttgtcaaatggcatgtggtaattaacactgatgtaaaaatgcactgaaaggccaatgcagccacagaayaggacacgtgtgatacccacgcagcacctggctgtgscagcacccagtcactgcccaagaactccaccacaagraatctgtcccagaaagaaggaggacacaagtagggcataccatgggtggtacacatagcatcatgcttttgcaaggcaacatacaacatctggaacatatccagctatggtgatatcccttattttcagccacacatgtatgagggtatggctgcagctccctttctcctagctcactagaagactggagaaaaaaataagcagctgtgaaaaacacagctaatggataccagtgaggatgcaacataacatataataacactcatcggcagtgacaagccaggtcctattaaaaaaaaa

SEQ ID NO: 37782 - DNA, 600 bp, Chicken  19866894268062_6
ccacaagraatctgtcccagaaagaaggaggacacaagtagggcataccatgggtggtacacatagcatcatgcttttgcaaggcaacatacaacatctggaacatatccagctatggtgatatcccttattttcagccacacatgtatgagggtatggctgcagctccctttctcctagctcactagaagactggagaaaaaaataagcagctgtgaaaaacacagctaatggataccagtgaggatgcaacataacatataataacactcatcggcagtgacaagccaggtcctattraaaaaaaaataaataaatccttttccctgtaagactttatttgatagcatctcaaagacatcaacctctttgttcattaatcaaaactcatcacattcttcaaccactcacatagcagcaacaagagaggcgaacaagaggtaactgtactgcaatgctctgctgctatggcctctacagtgggatgtgctgcaacctcagtgacaaggcaagccctgccacaaacactgctttcatgcagcagagttgccccaagcagtgcatccatcgttggtgccaggcctcctgcttcaaggccct

SEQ ID NO: 37783 - DNA, 600 bp, Chicken  19866894268065_1
gctatagtgactttgataaactgttaatggagctctaaacttctatttaggttaaactaacttaaaattaactggctcaagccagaaacattatactgaacttgtgagtgatctatacagaatagatcctttggggtttttcactgttcccttgagaactgcagaatttcagaggaaataacagcttgataactgaagcaatcatttagtagtaaatattttcatgcaagaaaaataatcctgcttttttcctaaagacaggcccatttgtatggtggtatcaatggctttagaatcacyrcagcccgtagtgaacttccagagcagaggatctctgtagttaattcttygtgctctgacagctgaaggttaatgcttgacagtggcatagaaaagtattaatctgacaatgatgtgctcccaaccctttcagtctttaggtttttatctgaaacaagcttataygattatttaatgaactattgagttcatggggttgtaaagaaagatttaaactgcctctgtacagagcaaaaaaggcatgttttcaaattcagcagttgtgattggtttccagtaaaaatatttttgtgttcagtt

SEQ ID NO: 37784 - DNA, 600 bp, Chicken  19866894268065_2
ctatagtgactttgataaactgttaatggagctctaaacttctatttaggttaaactaacttaaaattaactggctcaagccagaaacattatactgaacttgtgagtgatctatacagaatagatcctttggggtttttcactgttcccttgagaactgcagaatttcagaggaaataacagcttgataactgaagcaatcatttagtagtaaatattttcatgcaagaaaaataatcctgcttttttcctaaagacaggcccatttgtatggtggtatcaatggctttagaatcacyrcagcccgtagtgaacttccagagcagaggatctctgtagttaattcttygtgctctgacagctgaaggttaatgcttgacagtggcatagaaaagtattaatctgacaatgatgtgctcccaaccctttcagtctttaggtttttatctgaaacaagcttataygattatttaatgaactattgagttcatggggttgtaaagaaagatttaaactgcctctgtacagagcaaaaaaggcatgttttcaaattcagcagttgtgattggtttccagtaaaaatatttttgtgttcagtta

SEQ ID NO: 37785 - DNA, 600 bp, Chicken  19866894268065_3
gttaaactaacttaaaattaactggctcaagccagaaacattatactgaacttgtgagtgatctatacagaatagatcctttggggtttttcactgttcccttgagaactgcagaatttcagaggaaataacagcttgataactgaagcaatcatttagtagtaaatattttcatgcaagaaaaataatcctgcttttttcctaaagacaggcccatttgtatggtggtatcaatggctttagaatcacyrcagcccgtagtgaacttccagagcagaggatctctgtagttaattcttygtgctctgacagctgaaggttaatgcttgacagtggcatagaaaagtattaatctgacaatgatgtgctcccaaccctttcagtctttaggtttttatctgaaacaagcttataygattatttaatgaactattgagttcatggggttgtaaagaaagatttaaactgcctctgtacagagcaaaaaaggcatgttttcaaattcagcagttgtgattggtttccagtaaaaatatttttgtgttcagttactgaatgttgtcctatgcaggtggatccaaacagcattgctgccagaga

SEQ ID NO: 37786 - DNA, 600 bp, Chicken  19866894268065_4
atttcagaggaaataacagcttgataactgaagcaatcatttagtagtaaatattttcatgcaagaaaaataatcctgcttttttcctaaagacaggcccatttgtatggtggtatcaatggctttagaatcacyrcagcccgtagtgaacttccagagcagaggatctctgtagttaattcttygtgctctgacagctgaaggttaatgcttgacagtggcatagaaaagtattaatctgacaatgatgtgctcccaaccctttcagtctttaggtttttatctgaaacaagcttataygattatttaatgaactattgagttcatggggttgtaaagaaagatttaaactgcctctgtacagagcaaaaaaggcatgttttcaaattcagcagttgtgattggtttccagtaaaaatatttttgtgttcagttactgaatgttgtcctatgcaggtggatccaaacagcattgctgccagagatggacggatccgtgaaggagaccgcattttgcaagtatgtgacaatagcctcttaaactctttcttcaaacatacagagctgtcttctccatggactgttaatgagggaaggtag

SEQ ID NO: 37787 - DNA, 600 bp, Chicken  19866894268070_1
acaaaataaagcttttttcctaatctgaccagctatgctacttcagtaaggaccccgccaggagaaggacagctggaatacaagtttactcatgtcttttacctcattgatgacatcttccatactgcataaggaatatttcaccttttgatcagctttggttttggccatcccacaagaagcagtgaaatcaagttccctacatggcttcttggcttgtggtttctggtgccaatacctgcagtgaggttagcctgtgggtcagctttaggatgtcctctgcattcattccaccgtcaycgtcaatagggatcacctttatttgtaaagggctttaagatctccctatggaagagtgaggttctgcattaagacaccaaagccttacgactgttctctctgcttttggaaggataaagccacatcctgtccaaatgacaaccatgccatctagtggctgccacaaaacgccatccctgatcatgatccagcaaggatgggatgtgaaaacaatcaaactgttgtataaatgttttgctaaaacatcctatctgatattctcactttcctctctccctcccagtttcccaactgcagtat

SEQ ID NO: 37788 - DNA, 432 bp, Chicken  19866894268070_2
tagtggctgccacaaaacgccatccctgatcatgatccagcaaggatgggatgtgaaaacaatcaaactgttgtataaatgttttgctaaaacatcctatctgatattctcactttcctctctccctcccagtttcccaactgcagtatatcatgccagcagcaattcacattaggattgcagaatcacagaatcacaggatgatttgggttggaaaggaccttaaagttcatctagtgacactccctgccttgggctgattgttccccaccagatcaggctgcccagggccccatccakcctggccttgaatgcctccagggatgtggcacccacgggttctctgggcagctgtgccagggcctcaccgccctctaagaatttcctccttacatctaactcaaatctcccctcttttagtttaaaaccatt

SEQ ID NO: 37789 - DNA, 599 bp, Chicken  19866894268076_1
  misc_feature (1)..(139): n is any nucleotide
nnnnnnnnnnnnnnnnnnnnnnnnnnnnnnnnnnnnnnnnnnnnnnnnnnnnnnnnnnnnnnnnnnnnnnnnnnnnnnnnnnnnnnnnnnnnnnnnnnnnnnnnnnnnnnnnnnnnnnnnnnnnnnnnnnnnnnnnnnntggccttgaatactcccagggagcgggcatccacaacttcggtggacaacctgttctggtgtctcaccaccctcacattaaagaatttcttcctaatatcaagtctaaatctaccctcttccagtttgaaactgtttcaccttgtcctgttgctacctacycttataagaagtccctccacagctttcctgtaggcccccttcaggtactggaaagccactataagttctcctcagagtcccaggctsagagaccccctcgtacgggaggtgctccagccctctgaaataacawatractctcagacactggctttgctctggagtattctttactcatagcagtacttgtaccccagagatgggtcataaacratttactttgcatctgcttcctctcttccttccctttcctgtacagcctgctcctcaggatgggagagcagrgccagagctgcatt

SEQ ID NO: 37790 - DNA, 599 bp, Chicken  19866894268076_2
  misc_feature (1)..(52): n is any nucleotide
nnnnnnnnnnnnnnnnnnnnnnnnnnnnnnnnnnnnnnnnnnnnnnnnnnnntggccttgaatactcccagggagcgggcatccacaacttcggtggacaacctgttctggtgtctcaccaccctcacattaaagaatttcttcctaatatcaagtctaaatctaccctcttccagtttgaaactgtttcaccttgtcctgttgctacctacycttataagaagtccctccacagctttcctgtaggcccccttcaggtactggaaagccactataagttctcctcagagtcccaggctsagagaccccctcgtacgggaggtgctccagccctctgaaataacawatractctcagacactggctttgctctggagtattctttactcatagcagtacttgtaccccagagatgggtcataaacratttactttgcatctgcttcctctcttccttccctttcctgtacagcctgctcctcaggatgggagagcagrgccagagctgcatttcaacacactgcaggatcttctgctcatgcaaacagcagcaagagcactgggtagcctttgcaagacggcagggggagctgagggta

SEQ ID NO: 37791 - DNA, 599 bp, Chicken  19866894268076_3
  misc_feature (1)..(6): n is any nucleotide
nnnnnntggccttgaatactcccagggagcgggcatccacaacttcggtggacaacctgttctggtgtctcaccaccctcacattaaagaatttcttcctaatatcaagtctaaatctaccctcttccagtttgaaactgtttcaccttgtcctgttgctacctacycttataagaagtccctccacagctttcctgtaggcccccttcaggtactggaaagccactataagttctcctcagagtcccaggctsagagaccccctcgtacgggaggtgctccagccctctgaaataacawatractctcagacactggctttgctctggagtattctttactcatagcagtacttgtaccccagagatgggtcataaacratttactttgcatctgcttcctctcttccttccctttcctgtacagcctgctcctcaggatgggagagcagrgccagagctgcatttcaacacactgcaggatcttctgctcatgcaaacagcagcaagagcactgggtagcctttgcaagacggcagggggagctgagggtaactttcctttaggaagcactgtagagggaaaatgtaatctagccca

SEQ ID NO: 37792 - DNA, 599 bp, Chicken  19866894268076_4
  misc_feature (1)..(3): n is any nucleotide
nnntggccttgaatactcccagggagcgggcatccacaacttcggtggacaacctgttctggtgtctcaccaccctcacattaaagaatttcttcctaatatcaagtctaaatctaccctcttccagtttgaaactgtttcaccttgtcctgttgctacctacycttataagaagtccctccacagctttcctgtaggcccccttcaggtactggaaagccactataagttctcctcagagtcccaggctsagagaccccctcgtacgggaggtgctccagccctctgaaataacawatractctcagacactggctttgctctggagtattctttactcatagcagtacttgtaccccagagatgggtcataaacratttactttgcatctgcttcctctcttccttccctttcctgtacagcctgctcctcaggatgggagagcagrgccagagctgcatttcaacacactgcaggatcttctgctcatgcaaacagcagcaagagcactgggtagcctttgcaagacggcagggggagctgagggtaactttcctttaggaagcactgtagagggaaaatgtaatctagcccaaat

SEQ ID NO: 37793 - DNA, 600 bp, Chicken  19866894268076_5
acattaaagaatttcttcctaatatcaagtctaaatctaccctcttccagtttgaaactgtttcaccttgtcctgttgctacctacycttataagaagtccctccacagctttcctgtaggcccccttcaggtactggaaagccactataagttctcctcagagtcccaggctsagagaccccctcgtacgggaggtgctccagccctctgaaataacawatractctcagacactggctttgctctggagtattctttactcatagcagtacttgtaccccagagatgggtcataaacratttactttgcatctgcttcctctcttccttccctttcctgtacagcctgctcctcaggatgggagagcagrgccagagctgcatttcaacacactgcaggatcttctgctcatgcaaacagcagcaagagcactgggtagcctttgcaagacggcagggggagctgagggtaactttcctttaggaagcactgtagagggaaaatgtaatctagcccaaattttctacataaaacagtagggcttagtgctgaagtcagtcttgtcataaagcttggaaagtttaattagcttctgaat

SEQ ID NO: 37794 - DNA, 600 bp, Chicken  19866894268076_6
ctgttgctacctacycttataagaagtccctccacagctttcctgtaggcccccttcaggtactggaaagccactataagttctcctcagagtcccaggctsagagaccccctcgtacgggaggtgctccagccctctgaaataacawatractctcagacactggctttgctctggagtattctttactcatagcagtacttgtaccccagagatgggtcataaacratttactttgcatctgcttcctctcttccttccctttcctgtacagcctgctcctcaggatgggagagcagrgccagagctgcatttcaacacactgcaggatcttctgctcatgcaaacagcagcaagagcactgggtagcctttgcaagacggcagggggagctgagggtaactttcctttaggaagcactgtagagggaaaatgtaatctagcccaaattttctacataaaacagtagggcttagtgctgaagtcagtcttgtcataaagcttggaaagtttaattagcttctgaataacaatctctgaagatctggtgaaggtctctgcctgacagggacaagtaacatgccatagccctgtgtttta

SEQ ID NO: 37795 - DNA, 599 bp, Chicken  19866894268080_1
  misc_feature (1)..(42): n is any nucleotide
nnnnnnnnnnnnnnnnnnnnnnnnnnnnnnnnnnnnnnnnnntactggatgatcttttccatccttgatgattctacaatgtttcattgtcatggatgataagctgtgtggtgtggctgacttgctggagggaagggatgccatccagagggaccgtggtgggcttaggaagtgggcccctcatgaagttcatccattgcagtgtctcacaccaaagtcctaagggttactttgcatttattaaatctgaatataatctattgttttgtagcccattcactcagttataggaatttctcytagcaacacctgttacccttttttttcattcattttgtaagtcagacatactgaaatccttgctgttcatcatgtcccatcgcagttaaatttttaggagcctctggtgatgagaatcttctagaaatctgaatagtctgtcatgcagatcgctgttgtccatgggtataggtaacctttctatgaagagtaaaacatgtgaggcatagcttttctgcgcaggcccaaatggatagcagtcattttaacatactagttagtacatctgctgaatctcttaatacactttctacttcttt

SEQ ID NO: 37796 - DNA, 514 bp, Chicken  19866894268080_2
ttttttttcattcattttgtaagtcagacatactgaaatccttgctgttcatcatgtcccatcgcagttaaatttttaggagcctctggtgatgagaatcttctagaaatctgaatagtctgtcatgcagatcgctgttgtccatgggtataggtaacctttctatgaagagtaaaacatgtgaggcatagcttttctgcgcaggcccaaatggatagcagtcattttaacatactagttagtacatctgctgaatctcttaatacactttctacttctttggttaatttagacattaartttacagatctgaaatactgaargttcataatgaatatatatcttttttttactattgttttcttcctctttttctccttaccaccttcagatcttccttccacaaacatcactttgctcaaacagctgtcaaaatatcatatgaatggatagttctatatcacagatactgttttagcaattgcctctggagtctaagataattaccgtctag

SEQ ID NO: 37797 - DNA, 491 bp, Chicken  19866894268080_3
tcagacatactgaaatccttgctgttcatcatgtcccatcgcagttaaatttttaggagcctctggtgatgagaatcttctagaaatctgaatagtctgtcatgcagatcgctgttgtccatgggtataggtaacctttctatgaagagtaaaacatgtgaggcatagcttttctgcgcaggcccaaatggatagcagtcattttaacatactagttagtacatctgctgaatctcttaatacactttctacttctttggttaatttagacattaartttacagatctgaaatactgaargttcataatgaatatatatcttttttttactattgttttcttcctctttttctccttaccaccttcagatcttccttccacaaacatcactttgctcaaacagctgtcaaaatatcatatgaatggatagttctatatcacagatactgttttagcaattgcctctggagtctaagataattaccgtctag

SEQ ID NO: 37798 - DNA, 600 bp, Chicken  19866894268086_1
ctctgcacagtcttccagccactctgccccaagcctgcagcattgcatggcattgttgtagcgaaagtgcaggacctggcacttggtcatagaatcatagaatcaccaggattggaaaagacctacaagatcatctggtccaaccatccacccatcaccaatagttctagctaaaccatgtccctcaacacaatgtctaaatgttccttgaacacctccagtgtcagtgacttcaccacctccctgggcagcccattccagtacctgaccactctttcagagaagtagtatttcctcacrtccagcctgaatctcccctggtgcaacttgagtccattccctctagycctatcactagttacatgagagaagaggccgatccccagctcactacaacctccctttaggtagttatagagacttatattagtttcccctgagccttctcgtctccagactgaacaatcccagctccctcaaccactcctcatacgacctgtgctccagacccctcacctgtttcgttgcccttctttgaatgtgctccaggacctcaatgtctttcttgcattgaggggcccaaaactgaacacagaactc

SEQ ID NO: 37799 - DNA, 600 bp, Chicken  19866894268086_2
tggcattgttgtagcgaaagtgcaggacctggcacttggtcatagaatcatagaatcaccaggattggaaaagacctacaagatcatctggtccaaccatccacccatcaccaatagttctagctaaaccatgtccctcaacacaatgtctaaatgttccttgaacacctccagtgtcagtgacttcaccacctccctgggcagcccattccagtacctgaccactctttcagagaagtagtatttcctcacrtccagcctgaatctcccctggtgcaacttgagtccattccctctagycctatcactagttacatgagagaagaggccgatccccagctcactacaacctccctttaggtagttatagagacttatattagtttcccctgagccttctcgtctccagactgaacaatcccagctccctcaaccactcctcatacgacctgtgctccagacccctcacctgtttcgttgcccttctttgaatgtgctccaggacctcaatgtctttcttgcattgaggggcccaaaactgaacacagaactcaaggtgcagtctcatcagagctgggtacatagggataattacttgct

SEQ ID NO: 37800 - DNA, 599 bp, Chicken  19866894268088_1
  misc_feature (1)..(55): n is any nucleotide
nnnnnnnnnnnnnnnnnnnnnnnnnnnnnnnnnnnnnnnnnnnnnnnnnnnnnnnctttcatcactgtgtgcttaggctactgcgggtttttatgcttttagacatctcttgccttctctcctgtgagcatggtcatcctgctcaaatcatcagcccgctatgctgcctctggctctgggagcattagacaaatgaggtcgatactctcctccttgtaggctctgtctgatcataagcccacagacaagattcaacatccctctaacaagttctagcattggttctactgtagttggatrtttttatatcctccagataactactctcctagagatgtaaatatagagtagcctctttagtccttcattaacctagtgtagtctaattgccagttggactacaatggtgccctggttcacaggccagaaccagctggctccctttgcctgctccctgagtgatttatctgttgcttaagtggcataagctgtactaacagccaggtgctctccctgcacctgcgggtggcccagcaaccagcaatccggcctctggggcagccacagcgtgggaagtgggtggagtgtggcagggagaa

SEQ ID NO: 37801 - DNA, 600 bp, Chicken  19866894268088_2
ggggcaaccgctgtgccataattgtctgtaattgataactgtagttatctttaattatcgaggttccgcccaccacctaatctgcatatcaggagcacagctgacacatctgcatgagctgagtatcaggtagacatgttaattccttggcagaaaataatttatttgttatgctaacaacaaaggcttgctgtataatgccaaaataactctttgtgaagagagagggctaaagttacagtctacaaagatcagatatgggaagtcttgtccttctgtgatagtactgacttggactcrggggtcttttcaaggtaaacagaactttccagcatgtrccacccctgacattctgctctgcagatgttcctatctgtgacagaagtgtccttccctsctgaaggtcactgcagtgccattgggctccgaaataaactccctgtgtctcctcaggaaaatggcactgtaacagtaactgacccttggactgccccattaaaaactactagaaacttcacaaatttatgtcatactttgatttctgcccatgtgcactattgtcctttggcggcggttctgagcactgtaagccacagtgac

SEQ ID NO: 37802 - DNA, 600 bp, Chicken  19866894268088_3
ctgtagttatctttaattatcgaggttccgcccaccacctaatctgcatatcaggagcacagctgacacatctgcatgagctgagtatcaggtagacatgttaattccttggcagaaaataatttatttgttatgctaacaacaaaggcttgctgtataatgccaaaataactctttgtgaagagagagggctaaagttacagtctacaaagatcagatatgggaagtcttgtccttctgtgatagtactgacttggactcrggggtcttttcaaggtaaacagaactttccagcatgtrccacccctgacattctgctctgcagatgttcctatctgtgacagaagtgtccttccctsctgaaggtcactgcagtgccattgggctccgaaataaactccctgtgtctcctcaggaaaatggcactgtaacagtaactgacccttggactgccccattaaaaactactagaaacttcacaaatttatgtcatactttgatttctgcccatgtgcactattgtcctttggcggcggttctgagcactgtaagccacagtgacacgaagggcttcatcgggcacttctgagtgcatcagct

SEQ ID NO: 37803 - DNA, 600 bp, Chicken  19866894268088_4
cagctgacacatctgcatgagctgagtatcaggtagacatgttaattccttggcagaaaataatttatttgttatgctaacaacaaaggcttgctgtataatgccaaaataactctttgtgaagagagagggctaaagttacagtctacaaagatcagatatgggaagtcttgtccttctgtgatagtactgacttggactcrggggtcttttcaaggtaaacagaactttccagcatgtrccacccctgacattctgctctgcagatgttcctatctgtgacagaagtgtccttccctsctgaaggtcactgcagtgccattgggctccgaaataaactccctgtgtctcctcaggaaaatggcactgtaacagtaactgacccttggactgccccattaaaaactactagaaacttcacaaatttatgtcatactttgatttctgcccatgtgcactattgtcctttggcggcggttctgagcactgtaagccacagtgacacgaagggcttcatcgggcacttctgagtgcatcagctgcctgccactctactcctggaactctttcccacagtcccaaactggaaagcaattcgga

SEQ ID NO: 37804 - DNA, 432 bp, Chicken  19866894268088_5
aagcaattcggagaggcagtgctaaaaaagcaacaaaccaccatgtaatgcttcctccttctgtgagcagagagcatgcagattcccaggcacctctccatccttccaacacccacagagaggcacgtctgggctcagggctgggagaaggggactgccagtaagtaaaggacatgccccatttgcagagagagccagtgctcatttcttgacatgggaaaccactgagatatctgaacttgcaagtacaggtctagattgaggaaaacgctgtaggttattttcagacatttttatttytcctcagctgtatgaaggctgatttaaatgaactatcactcttctgggttagcaaactgattccgcaaatgaatatggcaactttttttagttatgatataagaaagcccgagagtacaagaacccagaaac

SEQ ID NO: 37805 - DNA, 599 bp, Chicken  19866894268099_1
  misc_feature (1)..(41): n is any nucleotide
nnnnnnnnnnnnnnnnnnnnnnnnnnnnnnnnnnnnnnnnnaaatgcctgtttcttagcagtgattatacagaaagtctggatgagcagctcatctgctgccatctgaagaagaaaggattggctgcatgacttggaaagcagaaaaagcaggctgtatttcctgctggtttcccatttcgggtggcactccaaagctacagagtgaacaaaggcagagcggcatcctgactctgtgcctgggaggaggtttgtttcctgctctcagagcccaggtttgaagggctgcacaaggcataasgctgtgaaaaatcaaactcaagagcctccttccaaatcgcattcctcctgggctccagccagcgctatccatccaaaacattaaagacccccaagggcaccctacacaaaggaattcgagatgttttccagggaagctgtccaagaataccaacagttataaaacacagtttgtcatttattaagcgggagacgttttggcacttaatgcaatacagcaacttcatcactaacacgagcacacagctctgatgggtcacattagtcttggaaaaatctcagtcctccagtcgtgctgcc

SEQ ID NO: 37806 - DNA, 600 bp, Chicken  19866894268109_1
gttggcctgaatacttgagagctaaaccacccattcagagatgccacaggaaacacaagaagctatagctatgtaaatgcactctgcttgcatctgagattgcctggcttcaaattcatcacaacgaaggtatctactgcaggcctgtcttctgacaggatcctcttacatttggaacctgacaaaaaagctcaaaattatttttacagaagacagtgcaatgattttttcagttgccattatgtataggtttctaagtcaaaaccacatgatgtggggacctaagaagaaaatgaaatsaatttccatgtaaactccattccagttgcattcacaatgcttttcagctgggaaaattaccaggcttatagaaggcaactgctcaagcactatacagttcctttttccacaagtacttacagtgctggtttataaactctctactttcagcacactgggatgcagagcttactgatggcatttgccaactgcacgttgtatatataggaagaaatgagaaccagattcttataaaggtctgatgtgaatggacctattgtacccagtggaagagtcattcctgcttcatcctccattcct

SEQ ID NO: 37807 - DNA, 599 bp, Chicken  19866894268110_1
  misc_feature (1)..(155): n is any nucleotide
nnnnnnnnnnnnnnnnnnnnnnnnnnnnnnnnnnnnnnnnnnnnnnnnnnnnnnnnnnnnnnnnnnnnnnnnnnnnnnnnnnnnnnnnnnnnnnnnnnnnnnnnnnnnnnnnnnnnnnnnnnnnnnnnnnnnnnnnnnnnnnnnnnnnnnnnnnncatgagcgtttgttaaaaaaaaaaagaatactggtgtttacgtaggaaggggtctctggttcagcctctcactcacaaatagctcaggaagggtgagcatcttgaaaccccactacagcagaactagtgtgtgctgctttgggcraaagggagccttttgttggaaagcggtaaaactgcacgtgcccatcatgccgtgttctcattcagcacatcacctattcccactaacaccctcagggagttggctatgtgggagatgttttcaggatggagttgtatatttgccccattgctctttggttatttgcagagtaaatgacagggaagaggctgggtgtgggggacaggggcattcccacgtttagaaaaaggagaagtgacattcataatcttttccctcttctctctgtctgctgagtggctctcggtcaagaattaaac

SEQ ID NO: 37808 - DNA, 599 bp, Chicken  19866894268115_1
  misc_feature (1)..(134): n is any nucleotide
nnnnnnnnnnnnnnnnnnnnnnnnnnnnnnnnnnnnnnnnnnnnnnnnnnnnnnnnnnnnnnnnnnnnnnnnnnnnnnnnnnnnnnnnnnnnnnnnnnnnnnnnnnnnnnnnnnnnnnnnnnnnnnnnnnnnnntgtttaaaaacctttggatgtggtgctcagggacatgattgagcggagggttgttggagttaggtagtacagttgagttgtggttggactcgatgatcttaaaggtcttttccaacctgagcaattttccagcttcccaagatctgcgcattcacagagaaagcakgttggccaaggcaaccaaggcggtagatctgggataaatatctatatatatttttaaacgacatgtcagaaccctgattcagcacctgtagacaatcagtgtttcacactgaaatccattcggagcaaattcaaagtcgtcgccctcaacagccttttaaaacagagggggaaaagagcaacaaagcaagaaggcgtgccataaataattaattcaggttgcactttccattacaatccttaraatgcacttcttgagtgcattcttcaccttycatccacgctgaaaatgtcactctg

SEQ ID NO: 37809 - DNA, 600 bp, Chicken  19866894268115_2
ttccaacctgagcaattttccagcttcccaagatctgcgcattcacagagaaagcakgttggccaaggcaaccaaggcggtagatctgggataaatatctatatatatttttaaacgacatgtcagaaccctgattcagcacctgtagacaatcagtgtttcacactgaaatccattcggagcaaattcaaagtcgtcgccctcaacagccttttaaaacagagggggaaaagagcaacaaagcaagaaggcgtgccataaataattaattcaggttgcactttccattacaatccttaraatgcacttcttgagtgcattcttcaccttycatccacgctgaaaatgtcactctgctactaggcacggaccaagaggttactttaagggagaaattataattcaagcatctcaacrtgtattaaaatgaaaacaaaagaccgaagttgtatgcctgtacaaaaactttgcaaaacagaaccgagatggggagggtttgtttcctccgcacacagaagctgacggaatacgcacagcaacatttggctctcagaaggaaggcagcatccacgcgttcctcaggacttggcaaggaacgta

SEQ ID NO: 37810 - DNA, 600 bp, Chicken  19866894268115_3
gatctgcgcattcacagagaaagcakgttggccaaggcaaccaaggcggtagatctgggataaatatctatatatatttttaaacgacatgtcagaaccctgattcagcacctgtagacaatcagtgtttcacactgaaatccattcggagcaaattcaaagtcgtcgccctcaacagccttttaaaacagagggggaaaagagcaacaaagcaagaaggcgtgccataaataattaattcaggttgcactttccattacaatccttaraatgcacttcttgagtgcattcttcaccttycatccacgctgaaaatgtcactctgctactaggcacggaccaagaggttactttaagggagaaattataattcaagcatctcaacrtgtattaaaatgaaaacaaaagaccgaagttgtatgcctgtacaaaaactttgcaaaacagaaccgagatggggagggtttgtttcctccgcacacagaagctgacggaatacgcacagcaacatttggctctcagaaggaaggcagcatccacgcgttcctcaggacttggcaaggaacgtaggaatcttctcaccaaagcataaatgcaaat

SEQ ID NO: 37811 - DNA, 600 bp, Chicken  19866894268115_4
acatgtcagaaccctgattcagcacctgtagacaatcagtgtttcacactgaaatccattcggagcaaattcaaagtcgtcgccctcaacagccttttaaaacagagggggaaaagagcaacaaagcaagaaggcgtgccataaataattaattcaggttgcactttccattacaatccttaraatgcacttcttgagtgcattcttcaccttycatccacgctgaaaatgtcactctgctactaggcacggaccaagaggttactttaagggagaaattataattcaagcatctcaacrtgtattaaaatgaaaacaaaagaccgaagttgtatgcctgtacaaaaactttgcaaaacagaaccgagatggggagggtttgtttcctccgcacacagaagctgacggaatacgcacagcaacatttggctctcagaaggaaggcagcatccacgcgttcctcaggacttggcaaggaacgtaggaatcttctcaccaaagcataaatgcaaatgaaatactgtggaactacagaacaaacagtagaagtgatccatatgaatatgttttcaattcgagactattattcttttttttttt

SEQ ID NO: 37812 - DNA, 600 bp, Chicken  19866894268115_5
caacccaaaccattctatgattctgcgatgtacaattcctacccagacaatgaaaaatgagagaaaaatcactctattatgaaaagattattagttgtaatgcatgaggtaaaatgctgcaggttgaatgactgaaaatgaaaaaaagactcccaataaaagcattgtcagtacagcacatgtgagttctgaagcaagaaaacatgagccagcaatgtgccctcacagcccagaaagccaactgtattctgggctccatcacaagaagtgtggccagcagtcaaagggaggtgatcctgyccctctgctccgtgctggtgagacctcacctggaatactgcatccagatgtggagttctcagtacaggagagacatggagctgctaagagtgtatccagaggagggccatgtataaaaataatgtaaggcatggaaaacctctcctacaaggacaggctgagagaactgggggcgttcagcctggagaagagaaggctgcaaggtgacctgacagcagccttcaatatctaaaggggagctacaagaaagagaggaataaactcttcagcaaggtctgtggtgacagaacaaggggaaat

SEQ ID NO: 37813 - DNA, 600 bp, Chicken  19866894268115_6
agacctcacctggaatactgcatccagatgtggagttctcagtacaggagagacatggagctgctaagagtgtatccagaggagggccatgtataaaaataatgtaaggcatggaaaacctctcctacaaggacaggctgagagaactgggggcgttcagcctggagaagagaaggctgcaaggtgacctgacagcagccttcaatatctaaaggggagctacaagaaagagaggaataaactcttcagcaaggtctgtggtgacagaacaaggggaaatggttacaagctcaaagaggrtagatttaggttagataaaatcttttacagtgaaggtggtgaggcactggaacaggttgcctagagatgtggtcgatgccccatccctggagactttcaaagccaggctagataaggccctgggcaatctgatctagctgtaggtgtccctgttcattgcaggggagttagactagatggccttcagaggtcccttccaactctaaagattctatgattctatggtaaatgggataacaaatgctttaccatattcctgcctagtcgctgggttgaaattacagttgcagatttgtgaaa

SEQ ID NO: 37814 - DNA, 600 bp, Chicken  19866894268117_1
ggcccaaccttagcaccaaaaaccacctgggtgtaccctataatgcaaaagggcctgtatttagaatcatggaattaggattggaaaaaaacactaagatcatctagtccaactatcaacccatcccactatgcccactaatcatgtccccaagtgccacatctccatggctcttgaacgcctcctgggacagtgactccaccatttcaaccctaaatcccgtgctgtgtactaaaggcagccctctgtttcctgtttggacctgctgtgccatgtagacctccttctgctctgagctcrtgttgcagcttggccccgcgctcccatctcaggagtttcctgatggatccctccccgaagcttcaaaccagaactagagttaagaggagccaacactccttatggggatgtgctgcaaggccagagggaccccaagcatcccactgcatctccgaggatgctctgcctttcgctgctcagttattccgcagcccatccagactcatacaatgccctttggcagaagtttaattatgcaaaattgttacgaaaaagcatttcttttgcctggttcacacgtcctccttcctgccagccgct

SEQ ID NO: 37815 - DNA, 600 bp, Chicken  19866894268119_1
gggctttgacctctctcggaaactcttgggagcaacagtgtatgtcaggaactcagcattcattttcccagtgtctgagcatacccttgtctcttcagctgtttcagtcaaaggcagaaattggggctggcggatggagggcagaaggcatctgccttcatctcttagtgatggaagagtggcaaggttttggagtctgctgtgaactcctttagaatagagtcaacctagaatcatctagtttggaaaaaaaaccattcgatcatcaagtccaaacatgacccaatactttcaagtccwccactagaccacgtgcctaagcaccacatccacacatcttttaaatatctccagggatggtgactctaccgcttctgtggacagtttgttccaatgcccagccagtctttccatgaagaaactcttcctaacctctaatctaaacctctcttgacacaacttgaggctattccttcatatccttcattctcacttatcacgtgagaaaagagactgactgtacctcacagaaacctcctttcaggttgctgtagagaataatgaaatcacagaattacagaatagcttacgttggaagag

SEQ ID NO: 37816 - DNA, 600 bp, Chicken  19866894268123_1
aggacaggctattaaaatcaagcagtgagtcaagcaaagaaaaatgatttttttctttttcccttagatttgtttacagttaagacatttgacctcagctgttgaaacagcgttcctagagggaaagaacaccagggtgctgttagaagttctaaggaacttcacgccacttctgtgaataatcccattatctctgcgatgcagtatgtttctttaacctgactgttactcatcatttccactgtgacatcagaattcagcacttatttcacaacagctctcacacacacacacacacamaaagcaggctgctgtgaaataaatgtctgctgccacctctgaagtccttgagcataactctgttctctcctgcctggcccaagtagcctgctggggggtactcactgtgaccttccaggccccataggagtaggccaatccaactaaatgtgctttggacttcagcatacggtctgagatctgccccttccactccagttcatgcaaaactccttttcagatactcaaaggggacagaggtgtatctgtgatggtctagccaaggctgtgcgtagaggtgcagtagtgcataatggggac

SEQ ID NO: 37817 - DNA, 600 bp, Chicken  19866894268134_1
gagtctttattatgtttgccattaaaataaagtagaaatcagacttctcgtgatcactaatcgatacgtttctcaaatgtgcatctacaccgatttgttaatcaaacactattcatgagcctgctgttacttctggccagtttcgtgcagtagggctgctcgtgtcttatcactgaagcactgaacttaaggaaaaaggaaaagcaagcaattttgcagcaagaaattcaaaaacaggtactgcaaacaagagaagaacgagcaaaatcattcagtgtttccaaacttcaggagctttgygctgccacagccaccaaaatcacagcagtctgagcaatttaagaatcaagtcacggcccagcaaatcgttgcaattaaggaaatcaacacatcctaaacagtggtaataaatgaaaatgagtatagcaaaacaaactccttttctttcaaacactcgttctcaagacaaaatctgtgaggtacactttggttacaggacaatgttgtttgggttatggcactctactatttacgtcctgctctgctactaaaactcaaatccagccttaaagctttgctgcttcccaccttggcctctgc

SEQ ID NO: 37818 - DNA, 600 bp, Chicken  19866894268138_1
tctcaatttaaaagcatccccaattgtcctaccactattaacccatgtaaacagtcattcccgctcctgtttctatgctcccttcaagtactggaaggtcacattgaggtctccctggagccttctcttttccaagccaaacaatcccagttccctcaacctttcttcataggagaggtgatccaagccctctgatcatcttagtggccctcctctggacccactccaagaactccacatctttctcgagctgggagccccaggcctggacgcagtactccggatgggtcctcacaagakctgagtagaggggcacaatcacctccctctccctgctggctgccccttttttaacatagcccagaacacagttggccttccaggctgcaagagcacactgctggctcatgtgcagcttctcgtctaccaggacccccaagtccttctctgcagggctgctctcaaggagatcttccaccagtttgtataaatacctgggattgccccgacccaagtgcatcaccctgcacttggccttgttgaacctcattaggtttccatgggtccacttctccagcctgtccaggtccctctggatgg

SEQ ID NO: 37819 - DNA, 600 bp, Chicken  19866894268138_2
attaggtttccatgggtccacttctccagcctgtccaggtccctctggatggcttcctttccctccagtctatcaacgacactgctcagcttggtgtcatccgcaaacttgctgagggtgcactcgatgccatcgtctgtgtcattgatgaaggtgctgaagagcactagtcccaagaccgacccctgagggacaccacttgcgactggcctccaccctgacacagaaccattaatcacaaccctttggctgcatccagccagccaattcctaatccactgaacagcccatccttcaaayccacacttctccgatttagagagaaggatgtggtgagggaccatgtcaaaggctttgcagaagtccaggcagatgacatccatcaccctttccccgtccaccaaaatgtcattctgtcatagaaggccaccagattggtcaggcacgatctgcccttggtgaagcccttttttaatgcagcccagaacacagttggccttctgagctgcaagcacacattgctggctcatgtccagcttctcatccaccagggcgcccaagtcattcttttcagggctgctctcaaggagatcttctccc

SEQ ID NO: 37820 - DNA, 532 bp, Chicken  19866894268139_1
tttccaaatgcaccattttctctgcacagcaaatatatgaaataacaagtatttggtagtttatagcaactatattactgcataacaacatacaataacaaatatagattagcatgactatttgatattaaaattaatgatatttttttctcaacatggctctgcatggtacaaaatcactatgtcaccaggtagctgaatcacagaaagagatgggaggaaggaagtcaccctccatgttctgaagccgaggcctacaggtgagtgcaggagtttattctttcccagtgccttccaggrgcacaaattcctcagcgtttcttatacctcattgctttccctattgcaagaagcctaattgttgcatcatttgggttgtgcagcaggctggacaaatgcgtccttctttcttaacatctggtctggatagataccccagggaccatgaggagatatagaatgttggttttttttccccctctctcctctctctttttttttcctccagctattacataatagctgatttttg

SEQ ID NO: 37821 - DNA, 582 bp, Chicken  19866894268140_1
atttccccattatttcttacacaaattatgtgattcttggcagttaattgtctaatgaaaaatcatgacatctgcaatgaataacaggatattttctgaactgtcaaaagtacggttgaccatgagaagttattggtcatatgcagcttaaaggaagacgtgaagatttcaacaacataacaaaaatatttttaaatatttttatatttatttttctgtataaatgtttgaaatttacagtattctttaaattctagaagatgaaatttttagtgtataataacccatgagaacaacacrtgagaacatctgagttacatagtaattacacaaaagaacatattttgtgtaaaaaaayttaacctctaaatattaagctacaaactcatacctcaattaagagctaagtaaaacagatatatacttttacagctctaaagtgtttttaaacaaaattacattgtactggaaataattgcctaggaaatggaattttgaagtaacaaacacgtcattcagtgtctaggtacagactgtaaaacagtgaaacttggaaaatctgtattttacacgagaaattat

SEQ ID NO: 37822 - DNA, 524 bp, Chicken  19866894268140_2
aaaatcatgacatctgcaatgaataacaggatattttctgaactgtcaaaagtacggttgaccatgagaagttattggtcatatgcagcttaaaggaagacgtgaagatttcaacaacataacaaaaatatttttaaatatttttatatttatttttctgtataaatgtttgaaatttacagtattctttaaattctagaagatgaaatttttagtgtataataacccatgagaacaacacrtgagaacatctgagttacatagtaattacacaaaagaacatattttgtgtaaaaaaayttaacctctaaatattaagctacaaactcatacctcaattaagagctaagtaaaacagatatatacttttacagctctaaagtgtttttaaacaaaattacattgtactggaaataattgcctaggaaatggaattttgaagtaacaaacacgtcattcagtgtctaggtacagactgtaaaacagtgaaacttggaaaatctgtattttacacgagaaattat

SEQ ID NO: 37823 - DNA, 578 bp, Chicken  19866894268142_1
tgctttgaaaagaaacacagaccctgtctgtatcagctgaagataagaatcagagcaatagaaacagagatttttgatgcttgaagtcaaaattcaaaactcttttagcatccacagtaactactacgcatcctgacaggcagttttgatgtgtctttgttattttctagtatcaggtgtaacatgatctggagaatgccattcacctgtccatctgtaataatcccaggggagacttttcccctgaatgttttggacccagcaacttaaactgtgtctctagatgagaatcctctctgwgcctacagaggtagctctgcatatcttattgtccctctagcattgaccaaatcagatgcattctttggaagcaatgcaaactctttccaagaastgcctggattttcttcctaacatgaactatccgtcaggttcctgataagtgagtgcttaatgagagctagaagtgctttcaaatatgatcttagtagaatgttactgaaaactagttatatcactaatgacatcagtaagagtaatcttccataatttctgttataaattttctgacatatgtt

SEQ ID NO: 37824 - DNA, 484 bp, Chicken  19866894268142_2
caaaactcttttagcatccacagtaactactacgcatcctgacaggcagttttgatgtgtctttgttattttctagtatcaggtgtaacatgatctggagaatgccattcacctgtccatctgtaataatcccaggggagacttttcccctgaatgttttggacccagcaacttaaactgtgtctctagatgagaatcctctctgwgcctacagaggtagctctgcatatcttattgtccctctagcattgaccaaatcagatgcattctttggaagcaatgcaaactctttccaagaastgcctggattttcttcctaacatgaactatccgtcaggttcctgataagtgagtgcttaatgagagctagaagtgctttcaaatatgatcttagtagaatgttactgaaaactagttatatcactaatgacatcagtaagagtaatcttccataatttctgttataaattttctgacatatgtt

SEQ ID NO: 37825 - DNA, 600 bp, Chicken  19866894268143_1
atcatcactttagtaggtcaaaaggctgatcaatgtttagcctgtgttagcaataaccagagctcaccttagcaggaggggtgctgagggttctattagcagctttgtgagctactgaggatgtgctaagaaaattacatcttggttttccccacacaaaaagggaaacaaagactctctgtacataacacactgagctacttgggctctaagtgcttattactgcttacctttaagtgattttcataaaggtgagccatgctgtatattgtaaaataagtaaaatcttgtaaactgtcwctttcttgacagcgttaccacagtcattcccagctacctccaggtgatgcaaaaacatatgcttgaactgtctctgctgggacttattaaacaaacagtatgtwctgtagattaaaccataattaagtatgatgtcggtattgcaaaagctcagtaattatgcccccatttgttctaatttctgytgcacaaaaatatgaatactcacaagttagcatgaacctggtggtttacagttcagaagtctcctttcgtctgacaggcaaaaagacttctgaaaaattagtgaagacagcaggc

SEQ ID NO: 37826 - DNA, 551 bp, Chicken  19866894268143_2
ttgtgagctactgaggatgtgctaagaaaattacatcttggttttccccacacaaaaagggaaacaaagactctctgtacataacacactgagctacttgggctctaagtgcttattactgcttacctttaagtgattttcataaaggtgagccatgctgtatattgtaaaataagtaaaatcttgtaaactgtcwctttcttgacagcgttaccacagtcattcccagctacctccaggtgatgcaaaaacatatgcttgaactgtctctgctgggacttattaaacaaacagtatgtwctgtagattaaaccataattaagtatgatgtcggtattgcaaaagctcagtaattatgcccccatttgttctaatttctgytgcacaaaaatatgaatactcacaagttagcatgaacctggtggtttacagttcagaagtctcctttcgtctgacaggcaaaaagacttctgaaaaattagtgaagacagcaggctgctccaagtactttttgcttcaagaattcagtggactttagatcagaccataaa

SEQ ID NO: 37827 - DNA, 470 bp, Chicken  19866894268143_3
taacacactgagctacttgggctctaagtgcttattactgcttacctttaagtgattttcataaaggtgagccatgctgtatattgtaaaataagtaaaatcttgtaaactgtcwctttcttgacagcgttaccacagtcattcccagctacctccaggtgatgcaaaaacatatgcttgaactgtctctgctgggacttattaaacaaacagtatgtwctgtagattaaaccataattaagtatgatgtcggtattgcaaaagctcagtaattatgcccccatttgttctaatttctgytgcacaaaaatatgaatactcacaagttagcatgaacctggtggtttacagttcagaagtctcctttcgtctgacaggcaaaaagacttctgaaaaattagtgaagacagcaggctgctccaagtactttttgcttcaagaattcagtggactttagatcagaccataaa

SEQ ID NO: 37828 - DNA, 599 bp, Chicken  19866894268144_1
  misc_feature (1)..(120): n is any nucleotide
nnnnnnnnnnnnnnnnnnnnnnnnnnnnnnnnnnnnnnnnnnnnnnnnnnnnnnnnnnnnnnnnnnnnnnnnnnnnnnnnnnnnnnnnnnnnnnnnnnnnnnnnnnnnnnnnnnnnnnnntacagctttttgcccaggtttctgccaacagcttctactgcagtgcccgagttctgcaagtgctcctgtagcacctgtcactgagatgcattaaccacagtgccattcaggctgccaggccgtggatttacctcccttcaaacccctgcaggaatgtttgcctgtttcttttcttacacrttcagtaatgctttgcactttcagaaaacaatgtggcagtgccaaggtgtacwgtggttctttgtaggtggctctgtgacatggcattgtcccagccagcaaggctcttccctgcatgtgttttgaattagacctactgaatttttgctttgatgtctcaaatgtctgctggcttgtttggtccctggagtgaacaatgagagcgagcagatcggggtctgtacagcaaccagggaacaacttcatctctgagtccttagttgtaggccatggtgtgaaggtggaaagaatccagccca

SEQ ID NO: 37829 - DNA, 599 bp, Chicken  19866894268144_2
  misc_feature (1)..(67): n is any nucleotide
nnnnnnnnnnnnnnnnnnnnnnnnnnnnnnnnnnnnnnnnnnnnnnnnnnnnnnnnnnnnnnnnnnntacagctttttgcccaggtttctgccaacagcttctactgcagtgcccgagttctgcaagtgctcctgtagcacctgtcactgagatgcattaaccacagtgccattcaggctgccaggccgtggatttacctcccttcaaacccctgcaggaatgtttgcctgtttcttttcttacacrttcagtaatgctttgcactttcagaaaacaatgtggcagtgccaaggtgtacwgtggttctttgtaggtggctctgtgacatggcattgtcccagccagcaaggctcttccctgcatgtgttttgaattagacctactgaatttttgctttgatgtctcaaatgtctgctggcttgtttggtccctggagtgaacaatgagagcgagcagatcggggtctgtacagcaaccagggaacaacttcatctctgagtccttagttgtaggccatggtgtgaaggtggaaagaatccagcccagctctcagtcccyaggtgtggcaggagggaccacgagacatgggtcscatggg

SEQ ID NO: 37830 - DNA, 600 bp, Chicken  19866894268144_3
ttgcactttcagaaaacaatgtggcagtgccaaggtgtacwgtggttctttgtaggtggctctgtgacatggcattgtcccagccagcaaggctcttccctgcatgtgttttgaattagacctactgaatttttgctttgatgtctcaaatgtctgctggcttgtttggtccctggagtgaacaatgagagcgagcagatcggggtctgtacagcaaccagggaacaacttcatctctgagtccttagttgtaggccatggtgtgaaggtggaaagaatccagcccagctctcagtcccyaggtgtggcaggagggaccacgagacatgggtcscatggggatggagagtgttggggtgagggctgaggtcggcgtgaggctgcgaggtacccggggcaagcacacggccatggctgtgttgagcaagttttggctgcagctgcataaatgtggcagctcctggggcacatcagtcccacttcctccacagggtgctgagcagcagcagggagatggggtttggtgggcaggaagacctgctgggctccaactgtgtgcaaattgtatgagaagggtgtagttctgacgggaagaattcc

SEQ ID NO: 37831 - DNA, 600 bp, Chicken  19866894268144_4
gtgtacwgtggttctttgtaggtggctctgtgacatggcattgtcccagccagcaaggctcttccctgcatgtgttttgaattagacctactgaatttttgctttgatgtctcaaatgtctgctggcttgtttggtccctggagtgaacaatgagagcgagcagatcggggtctgtacagcaaccagggaacaacttcatctctgagtccttagttgtaggccatggtgtgaaggtggaaagaatccagcccagctctcagtcccyaggtgtggcaggagggaccacgagacatgggtcscatggggatggagagtgttggggtgagggctgaggtcggcgtgaggctgcgaggtacccggggcaagcacacggccatggctgtgttgagcaagttttggctgcagctgcataaatgtggcagctcctggggcacatcagtcccacttcctccacagggtgctgagcagcagcagggagatggggtttggtgggcaggaagacctgctgggctccaactgtgtgcaaattgtatgagaagggtgtagttctgacgggaagaattccttataatactgttacaaataaagtacatttctgc

SEQ ID NO: 37832 - DNA, 599 bp, Chicken  19866894268146_1
  misc_feature (1)..(157): n is any nucleotide
nnnnnnnnnnnnnnnnnnnnnnnnnnnnnnnnnnnnnnnnnnnnnnnnnnnnnnnnnnnnnnnnnnnnnnnnnnnnnnnnnnnnnnnnnnnnnnnnnnnnnnnnnnnnnnnnnnnnnnnnnnnnnnnnnnnnnnnnnnnnnnnnnnnnnnnnnnnnnctacttaattgatggcagcacaggaatgattaataggctttaccggcgtagatgtgtagaagtatgtgcatgctgtgcatgtgacttgtgtggtgctgaactttggtatgggcagccatccatagtaggggtaatatggagcrccacacrttaccaaaccactgggcatgcagctggaaatggagtaagttaaggtaaagagaggcagcccagyttagtagcttggagagcaagtagaaaaatccagaagtctttgagctgtcaggatgaaagccatagtaaaataatgggggttgaaattagagttcttttggattaataaatataagggaagccttcatgcaaaatattaccataataacaagctcrtgttctgmctgccttaccagaggcatcctcaatggaatcattgtttgttttacaatggggaaagataggaaat

SEQ ID NO: 37833 - DNA, 599 bp, Chicken  19866894268146_2
  misc_feature (1)..(150): n is any nucleotide
nnnnnnnnnnnnnnnnnnnnnnnnnnnnnnnnnnnnnnnnnnnnnnnnnnnnnnnnnnnnnnnnnnnnnnnnnnnnnnnnnnnnnnnnnnnnnnnnnnnnnnnnnnnnnnnnnnnnnnnnnnnnnnnnnnnnnnnnnnnnnnnnnnnnnnctacttaattgatggcagcacaggaatgattaataggctttaccggcgtagatgtgtagaagtatgtgcatgctgtgcatgtgacttgtgtggtgctgaactttggtatgggcagccatccatagtaggggtaatatggagcrccacacrttaccaaaccactgggcatgcagctggaaatggagtaagttaaggtaaagagaggcagcccagyttagtagcttggagagcaagtagaaaaatccagaagtctttgagctgtcaggatgaaagccatagtaaaataatgggggttgaaattagagttcttttggattaataaatataagggaagccttcatgcaaaatattaccataataacaagctcrtgttctgmctgccttaccagaggcatcctcaatggaatcattgtttgttttacaatggggaaagataggaaataagcaat

SEQ ID NO: 37834 - DNA, 599 bp, Chicken  19866894268146_3
  misc_feature (1)..(86): n is any nucleotide
nnnnnnnnnnnnnnnnnnnnnnnnnnnnnnnnnnnnnnnnnnnnnnnnnnnnnnnnnnnnnnnnnnnnnnnnnnnnnnnnnnnnnnctacttaattgatggcagcacaggaatgattaataggctttaccggcgtagatgtgtagaagtatgtgcatgctgtgcatgtgacttgtgtggtgctgaactttggtatgggcagccatccatagtaggggtaatatggagcrccacacrttaccaaaccactgggcatgcagctggaaatggagtaagttaaggtaaagagaggcagcccagyttagtagcttggagagcaagtagaaaaatccagaagtctttgagctgtcaggatgaaagccatagtaaaataatgggggttgaaattagagttcttttggattaataaatataagggaagccttcatgcaaaatattaccataataacaagctcrtgttctgmctgccttaccagaggcatcctcaatggaatcattgtttgttttacaatggggaaagataggaaataagcaattaaagcagacgtatttaagtgtatggctattctgatgccacacatctgagctttcagcttttgg

SEQ ID NO: 37835 - DNA, 600 bp, Chicken  19866894268146_4
atgctgtgcatgtgacttgtgtggtgctgaactttggtatgggcagccatccatagtaggggtaatatggagcrccacacrttaccaaaccactgggcatgcagctggaaatggagtaagttaaggtaaagagaggcagcccagyttagtagcttggagagcaagtagaaaaatccagaagtctttgagctgtcaggatgaaagccatagtaaaataatgggggttgaaattagagttcttttggattaataaatataagggaagccttcatgcaaaatattaccataataacaagctcrtgttctgmctgccttaccagaggcatcctcaatggaatcattgtttgttttacaatggggaaagataggaaataagcaattaaagcagacgtatttaagtgtatggctattctgatgccacacatctgagctttcagcttttggttctaagatkgttgcttagttyttctgctaaaatgccccaatttattgctgctgtgtctgcttgctttgtagtgtggccaaactactgacaagaaataaatcctctctttttgtttcagctgtgatcctcttttctctctccatgtttctcatcct

SEQ ID NO: 37836 - DNA, 600 bp, Chicken  19866894268146_5
catgtgacttgtgtggtgctgaactttggtatgggcagccatccatagtaggggtaatatggagcrccacacrttaccaaaccactgggcatgcagctggaaatggagtaagttaaggtaaagagaggcagcccagyttagtagcttggagagcaagtagaaaaatccagaagtctttgagctgtcaggatgaaagccatagtaaaataatgggggttgaaattagagttcttttggattaataaatataagggaagccttcatgcaaaatattaccataataacaagctcrtgttctgmctgccttaccagaggcatcctcaatggaatcattgtttgttttacaatggggaaagataggaaataagcaattaaagcagacgtatttaagtgtatggctattctgatgccacacatctgagctttcagcttttggttctaagatkgttgcttagttyttctgctaaaatgccccaatttattgctgctgtgtctgcttgctttgtagtgtggccaaactactgacaagaaataaatcctctctttttgtttcagctgtgatcctcttttctctctccatgtttctcatcctaaagcagc

SEQ ID NO: 37837 - DNA, 600 bp, Chicken  19866894268146_6
tggagagcaagtagaaaaatccagaagtctttgagctgtcaggatgaaagccatagtaaaataatgggggttgaaattagagttcttttggattaataaatataagggaagccttcatgcaaaatattaccataataacaagctcrtgttctgmctgccttaccagaggcatcctcaatggaatcattgtttgttttacaatggggaaagataggaaataagcaattaaagcagacgtatttaagtgtatggctattctgatgccacacatctgagctttcagcttttggttctaagatkgttgcttagttyttctgctaaaatgccccaatttattgctgctgtgtctgcttgctttgtagtgtggccaaactactgacaagaaataaatcctctctttttgtttcagctgtgatcctcttttctctctccatgtttctcatcctaaagcagcctcccatgaatgtgaacacaaaaatggaaggttaattacttccattatgttcttgggatcctcgttatactggtgaatcctgtaaagaaacactacaaaatctgctactggtctgttcaaaaatagatggactttgctctgcttgt

SEQ ID NO: 37838 - DNA, 600 bp, Chicken  19866894268146_7
agaaaaatccagaagtctttgagctgtcaggatgaaagccatagtaaaataatgggggttgaaattagagttcttttggattaataaatataagggaagccttcatgcaaaatattaccataataacaagctcrtgttctgmctgccttaccagaggcatcctcaatggaatcattgtttgttttacaatggggaaagataggaaataagcaattaaagcagacgtatttaagtgtatggctattctgatgccacacatctgagctttcagcttttggttctaagatkgttgcttagttyttctgctaaaatgccccaatttattgctgctgtgtctgcttgctttgtagtgtggccaaactactgacaagaaataaatcctctctttttgtttcagctgtgatcctcttttctctctccatgtttctcatcctaaagcagcctcccatgaatgtgaacacaaaaatggaaggttaattacttccattatgttcttgggatcctcgttatactggtgaatcctgtaaagaaacactacaaaatctgctactggtctgttcaaaaatagatggactttgctctgcttgtatatcacttgtc

SEQ ID NO: 37839 - DNA, 600 bp, Chicken  19866894268146_8
tagatggactttgctctgcttgtatatcacttgtcattcttggagtgaacagtgtatttattgagctttatgaaaatgaaaaacaacccccttgttccctagcttgtggtctcagtgccagctaggcacaattaagtccaccactaaattcctatctcccaggaacataagaaacctcaggggaaatcttttatatagagataaagagatacattttcaaaaggaaaatctgatttttttcttgtaatacctactcatacagcagtcaaatattggtgtaagatttacattattcagatrccagatctttatggcaaaccggcatagattttgagtacaatctcaggcacttgctttctcattgtgtgatgttgtttaatctctctggccaggataggggaagtggtgatctcctcactgaagacgtcacactgagaagattgtagtagagaaataaatagaacaagtgttgggaagccaagcagctcatctaggctgaactaaaatgcactctgcgcagacaggtggaattccccatggctttgtttctgttaactccaagtaaggtccagtcacccttttgcagtgtgtgtagctagt

SEQ ID NO: 37840 - DNA, 599 bp, Chicken  19866894268154_1
  misc_feature (1)..(44): n is any nucleotide
nnnnnnnnnnnnnnnnnnnnnnnnnnnnnnnnnnnnnnnnnnnnatgtgtttattcatatgggaaaggcaacctctaaacgatacgcaaatacggctcagtgcatttatttgcaattaaagcacgtgcatacatctccatgaagatgaggtgcaccctactgattagcgagcccgttgtcagcagtgcctcgtcaggaagaaatgcacagaattgcagcgagggagcactggagcatcaagacgaatattccataagaaaattcagcaggaggctgcccagccagcaacagagaacaggmccccctggatgctccagcagggatgcaggatgctcgggcacrgcagcccaacaccatcgctccattaaacaaagaatgctgtctcgaaagcactttaatccagttaagttcaagccctccgttttacagtttgacggtaatgctatatttttattcagtgcaggatcagaggtctgatgaaacctcatgttgccaacatgaaagtgaaaggagctttagctaatcccaatgaaaaccaagtccacttctttctccccacacccctcctgaaaagaaataaaatgaaaaccccacatttg

SEQ ID NO: 37841 - DNA, 599 bp, Chicken  19866894268154_2
  misc_feature (1)..(2): n is any nucleotide
nnatgtgtttattcatatgggaaaggcaacctctaaacgatacgcaaatacggctcagtgcatttatttgcaattaaagcacgtgcatacatctccatgaagatgaggtgcaccctactgattagcgagcccgttgtcagcagtgcctcgtcaggaagaaatgcacagaattgcagcgagggagcactggagcatcaagacgaatattccataagaaaattcagcaggaggctgcccagccagcaacagagaacaggmccccctggatgctccagcagggatgcaggatgctcgggcacrgcagcccaacaccatcgctccattaaacaaagaatgctgtctcgaaagcactttaatccagttaagttcaagccctccgttttacagtttgacggtaatgctatatttttattcagtgcaggatcagaggtctgatgaaacctcatgttgccaacatgaaagtgaaaggagctttagctaatcccaatgaaaaccaagtccacttctttctccccacacccctcctgaaaagaaataaaatgaaaaccccacatttgactctcttggaagggaaaattccctgctgtcctcagatggtt

SEQ ID NO: 37842 - DNA, 600 bp, Chicken  19866894268156_1
ggcatagtggtagtaagagagtggtaaaatcagtcacatttggcctgattgaatcagagcagtcagcatctagctcctcccagtgatgttgtgaataaatggtcaacagacagtgcctcacaaaagtgttgcctgcaggttgccaatggcacatatggcaaactccagtttcattatctaggaaaaatactgtatttactgcttatatatggctgtttcatcagtaatgtacattagctgtcccagctgcatttttttcatcttgacattctgtcagatccccaacagataaaacctgcrtgaaggtcctctgcttcrtttcagagaggatgcactactaagaactgctgcckaaaatgggacggagattttatgtttttctgtgagcgtgagcttctgagtgtctgagctgaccatctaatgacctttaaaaatgcagcctttggagagatgaagagggatttgttagttgacagatttgtgctagcaagccccaggttatttacggaagtctggaattttgtgctcttggatttraagaacaccgtgtaattcagcataaacgcaaagcattagaaccttaatttcactgagagaaat

SEQ ID NO: 37843 - DNA, 600 bp, Chicken  19866894268156_2
gagtggtaaaatcagtcacatttggcctgattgaatcagagcagtcagcatctagctcctcccagtgatgttgtgaataaatggtcaacagacagtgcctcacaaaagtgttgcctgcaggttgccaatggcacatatggcaaactccagtttcattatctaggaaaaatactgtatttactgcttatatatggctgtttcatcagtaatgtacattagctgtcccagctgcatttttttcatcttgacattctgtcagatccccaacagataaaacctgcrtgaaggtcctctgcttcrtttcagagaggatgcactactaagaactgctgcckaaaatgggacggagattttatgtttttctgtgagcgtgagcttctgagtgtctgagctgaccatctaatgacctttaaaaatgcagcctttggagagatgaagagggatttgttagttgacagatttgtgctagcaagccccaggttatttacggaagtctggaattttgtgctcttggatttraagaacaccgtgtaattcagcataaacgcaaagcattagaaccttaatttcactgagagaaatatgtctctgagaatgtca

SEQ ID NO: 37844 - DNA, 600 bp, Chicken  19866894268156_3
tcagagcagtcagcatctagctcctcccagtgatgttgtgaataaatggtcaacagacagtgcctcacaaaagtgttgcctgcaggttgccaatggcacatatggcaaactccagtttcattatctaggaaaaatactgtatttactgcttatatatggctgtttcatcagtaatgtacattagctgtcccagctgcatttttttcatcttgacattctgtcagatccccaacagataaaacctgcrtgaaggtcctctgcttcrtttcagagaggatgcactactaagaactgctgcckaaaatgggacggagattttatgtttttctgtgagcgtgagcttctgagtgtctgagctgaccatctaatgacctttaaaaatgcagcctttggagagatgaagagggatttgttagttgacagatttgtgctagcaagccccaggttatttacggaagtctggaattttgtgctcttggatttraagaacaccgtgtaattcagcataaacgcaaagcattagaaccttaatttcactgagagaaatatgtctctgagaatgtcaaaatgaattattcttagtttatgttatcagtgaat

SEQ ID NO: 37845 - DNA, 600 bp, Chicken  19866894268156_4
ctgtcccagctgcatttttttcatcttgacattctgtcagatccccaacagataaaacctgcrtgaaggtcctctgcttcrtttcagagaggatgcactactaagaactgctgcckaaaatgggacggagattttatgtttttctgtgagcgtgagcttctgagtgtctgagctgaccatctaatgacctttaaaaatgcagcctttggagagatgaagagggatttgttagttgacagatttgtgctagcaagccccaggttatttacggaagtctggaattttgtgctcttggatttraagaacaccgtgtaattcagcataaacgcaaagcattagaaccttaatttcactgagagaaatatgtctctgagaatgtcaaaatgaattattcttagtttatgttatcagtgaatcttataaatgagaaaaaaattaatgtttcctcttaattttggactaatttagcgtgtaaccatttttctttcacagcagggctgtatagtagtctgccaaagcttattcatcattttaaacagtgaatctctgttctgatattaagtcattaaaaaaatagtgtttgcagccaggtatatattt

SEQ ID NO: 37846 - DNA, 600 bp, Chicken  19866894268156_5
tctctgtttcaggctatttgctgtccttggcctgtgggaaaaatgccagatagcagtaataagtgttgtgtgtggtccaaaagcactgtgtgtccctcacaaattaaattgttgacctatttatgtgcttccaaagctacacaactgacactggcagcttaataaagcaaaacagtgttgtagtgtgggttgtaaccttgtccacagaaattgtttctctgtcagcaaattaactagatatgatattaaaaacaacttgattctgttctcattaagatcagtaaggaaaattgccttgarcagaagagggaaaatgcatcagagggattttaaggactttaatattaacagatrtaaatattaaatgtaaaacattatcagtgaaatctttggagtgagggatctcaggtacagttagatgatttaagtgatttcatgaagtgcatccttatgtacctggacaccttgacactttaagagtaggagagaagttacagaaggcattgctgcgttttcaaacaaccatgttttctccatggaatgctgtaggtctttaaaatcaaatcatgcctgcagaactcccagtgaagttggtgtggg

SEQ ID NO: 37847 - DNA, 565 bp, Chicken  19866894268156_6
agtaataagtgttgtgtgtggtccaaaagcactgtgtgtccctcacaaattaaattgttgacctatttatgtgcttccaaagctacacaactgacactggcagcttaataaagcaaaacagtgttgtagtgtgggttgtaaccttgtccacagaaattgtttctctgtcagcaaattaactagatatgatattaaaaacaacttgattctgttctcattaagatcagtaaggaaaattgccttgarcagaagagggaaaatgcatcagagggattttaaggactttaatattaacagatrtaaatattaaatgtaaaacattatcagtgaaatctttggagtgagggatctcaggtacagttagatgatttaagtgatttcatgaagtgcatccttatgtacctggacaccttgacactttaagagtaggagagaagttacagaaggcattgctgcgttttcaaacaaccatgttttctccatggaatgctgtaggtctttaaaatcaaatcatgcctgcagaactcccagtgaagttggtgtgggtttctgaacacacaatatt

SEQ ID NO: 37848 - DNA, 600 bp, Chicken  19866894268159_1
atagcacatctttcatctactattagtgcactgaatctgatatacatttgttgcaccataactacatttaaaggttatgagaaatatgtaatggaaatgtgaaatttaagaaaacggtcataatcaaagttccaaatactaaagaagaattataatcagttctactctctgcacacaattccagaacaatcctttttaatctttacctttttaatctaatttgggaagatgaaacaggagttccatactcatatattacttttttaaattaatgctgtaaaattcatttttataagtgcrttttaaaccacacactgaaagagcctgttcattaatcaaagaaggaccaaagtgtatgaatttgatattcagactccctctcattgaaggggaaaaataataacccctggttaccatgctaagctaaaacaaattttagagttgctaaggctaacatttaaaaataacaacttgagggactgtttcaaacagcaacattgactttgtgtaaatcaaggacaaaccatactacagctcttactgaggagctcctctttttttgctatgtctgactttaaacagaaagcagcagagaagaaa

SEQ ID NO: 37849 - DNA, 600 bp, Chicken  19866894268163_1
gaggagcgtggccttacaatatgcctcagaactacatgcagcagggaaatgccagctatccaccgaacaaacctttctaccctcaaggtactagaactagtgtgtgaatcaacagctcatgcaacatgtctctttactgtctcaaaggctttacaagccaaggaatcgtgtttcacttcctagtctccctggaaccataatgaatccaagagtcaaatctacacttattggcttcctgtatggattaaaatctttgggggagggaaggggttaaatcaaattctgaattctgcatcagcktgcactcttgcacttccagcctttttcctcsactgctggtctcgctgtagagccacctctgctttgctaggggttaagatgatttgcccgtgagcttgttaagaatttgaagaaaatcctgtgctgattcattttatttgtcttttgtacgatgcttgtggaatgccttgcatacatgaaagcatacaagactgtagaataattcaagttggaaggagccactggaggttatgtagtccagctgcaatcaaagcagtgctgtcagcaaagttgtatcagcttcaggactgactttatctc

SEQ ID NO: 37850 - DNA, 600 bp, Chicken  19866894268163_2
ctacatgcagcagggaaatgccagctatccaccgaacaaacctttctaccctcaaggtactagaactagtgtgtgaatcaacagctcatgcaacatgtctctttactgtctcaaaggctttacaagccaaggaatcgtgtttcacttcctagtctccctggaaccataatgaatccaagagtcaaatctacacttattggcttcctgtatggattaaaatctttgggggagggaaggggttaaatcaaattctgaattctgcatcagcktgcactcttgcacttccagcctttttcctcsactgctggtctcgctgtagagccacctctgctttgctaggggttaagatgatttgcccgtgagcttgttaagaatttgaagaaaatcctgtgctgattcattttatttgtcttttgtacgatgcttgtggaatgccttgcatacatgaaagcatacaagactgtagaataattcaagttggaaggagccactggaggttatgtagtccagctgcaatcaaagcagtgctgtcagcaaagttgtatcagcttcaggactgactttatctcaactcttcctaatgctagtgaggtaaaggtg

SEQ ID NO: 37851 - DNA, 600 bp, Chicken  19866894268164_1
caagaaaatcatcccataagcgatattttttctcttctttctagacaactccaaacatggcaatcctgactctgtagggagtgttttcaatcatgcctgacaatttcgattttacaaatgatctattaacagagccatgcaaatgagcacaaaaagcttattcaccagaagacagaaaaatgcacttaaaatactgggagccatacaagtcagaatatactgcagtttgaggtacccttttcagtccacagatttctctgatgttatgtaaacccagaaatttgttgtactgtctttgartgaggaggtacgataagagaatgggagagtctctactctcttctggaagagatttaggtatgtttatccatacaagccctytttattgagaggttacaggctggcttccagtcacaccattttcttttccctgagaatgaaaacgctaagacatgcctgaagttccctgtcattccatattgtaactatgcccttagataacacacagttgaggctaagttctacaaacatgtttatgaaatcaacagcgatttggaaaggcaagcaaagaaagcaagggtagattsaattcttycctta

SEQ ID NO: 37852 - DNA, 600 bp, Chicken  19866894268164_2
ttttttctcttctttctagacaactccaaacatggcaatcctgactctgtagggagtgttttcaatcatgcctgacaatttcgattttacaaatgatctattaacagagccatgcaaatgagcacaaaaagcttattcaccagaagacagaaaaatgcacttaaaatactgggagccatacaagtcagaatatactgcagtttgaggtacccttttcagtccacagatttctctgatgttatgtaaacccagaaatttgttgtactgtctttgartgaggaggtacgataagagaatggragagtctctactctcttctggaagagatttaggtatgtttatccatacaagccctytttattgagaggttacaggctggcttccagtcacaccattttcttttccctgagaatgaaaacgctaagacatgcctgaagttccctgtcattccatattgtaactatgcccttagataacacacagttgaggctaagttctacaaacatgtttatgaaatcaacagcgatttggaaaggcaagcaaagaaagcaagggtagattsaattcttyccttagacaagacttcctccctctcttcat

SEQ ID NO: 37853 - DNA, 600 bp, Chicken  19866894268164_3
tttttctcttctttctagacaactccaaacatggcaatcctgactctgtagggagtgttttcaatcatgcctgacaatttcgattttacaaatgatctattaacagagccatgcaaatgagcacaaaaagcttattcaccagaagacagaaaaatgcacttaaaatactgggagccatacaagtcagaatatactgcagtttgaggtacccttttcagtccacagatttctctgatgttatgtaaacccagaaatttgttgtactgtctttgartgaggaggtacgataagagaatgggrgagtctctactctcttctggaagagatttaggtatgtttatccatacaagccctytttattgagaggttacaggctggcttccagtcacaccattttcttttccctgagaatgaaaacgctaagacatgcctgaagttccctgtcattccatattgtaactatgcccttagataacacacagttgaggctaagttctacaaacatgtttatgaaatcaacagcgatttggaaaggcaagcaaagaaagcaagggtagattsaattcttyccttagacaagacttcctccctctcttcata

SEQ ID NO: 37854 - DNA, 600 bp, Chicken  19866894268164_4
tgttttcaatcatgcctgacaatttcgattttacaaatgatctattaacagagccatgcaaatgagcacaaaaagcttattcaccagaagacagaaaaatgcacttaaaatactgggagccatacaagtcagaatatactgcagtttgaggtacccttttcagtccacagatttctctgatgttatgtaaacccagaaatttgttgtactgtctttgartgaggaggtacgataagagaatgggagagtctctactctcttctggaagagatttaggtatgtttatccatacaagccctytttattgagaggttacaggctggcttccagtcacaccattttcttttccctgagaatgaaaacgctaagacatgcctgaagttccctgtcattccatattgtaactatgcccttagataacacacagttgaggctaagttctacaaacatgtttatgaaatcaacagcgatttggaaaggcaagcaaagaaagcaagggtagattsaattcttyccttagacaagacttcctccctctcttcatatatgtcacttcacacctctaattctaggatgaaagaaaaaatatgccgtgcaaca

SEQ ID NO: 37855 - DNA, 465 bp, Chicken  19866894268164_5
tactgtctttgartgaggaggtacgataagagaatgggagagtctctactctcttctggaagagatttaggtatgtttatccatacaagccctytttattgagaggttacaggctggcttccagtcacaccattttcttttccctgagaatgaaaacgctaagacatgcctgaagttccctgtcattccatattgtaactatgcccttagataacacacagttgaggctaagttctacaaacatgtttatgaaatcaacagcgatttggaaaggcaagcaaagaaagcaagggtagattsaattcttyccttagacaagacttcctccctctcttcatatatgtcacttcacacctctaattctaggatgaaagaaaaaatatgccgtgcaacagaagatcagtcagcaaaaccttggtgctaaggattcgtgttttgcaggttttaccttgaacctgctgtttc

SEQ ID NO: 37856 - DNA, 457 bp, Chicken  19866894268164_6
ttgartgaggaggtacgataagagaatgggagagtctctactctcttctggaagagatttaggtatgtttatccatacaagccctytttattgagaggttacaggctggcttccagtcacaccattttcttttccctgagaatgaaaacgctaagacatgcctgaagttccctgtcattccatattgtaactatgcccttagataacacacagttgaggctaagttctacaaacatgtttatgaaatcaacagcgatttggaaaggcaagcaaagaaagcaagggtagattsaattcttyccttagacaagacttcctccctctcttcatatatgtcacttcacacctctaattctaggatgaaagaaaaaatatgccgtgcaacagaagatcagtcagcaaaaccttggtgctaaggattcgtgttttgcaggttttaccttgaacctgctgtttc

SEQ ID NO: 37857 - DNA, 600 bp, Chicken  19866894268165_1
tgtggaattgtacacgtagcggatttggtcacctgggagctgtttttctcactatatccaagataagatgagtggaataaattggcacatttctaagaggaaaataagttttagaatttgctatcagaacatgttactggtcaatgagttgacttggaagtgcatgccatatttcctttgagctgtaataatacagtgaaatctttgagactataatttttcccagatcttttagcagagcacaggactatcaccctgccttccagttcactggaggctaaagactccttagtcagccaygtgttgcatacagaatgatcataaggacattttcaatcccagaagaggtrtagtatagctcctatgccatgtagttcctattgaaaatgaatctcaatagggcacatagttccctayttgccttcaaaactcttcgtaataygtacactaggtaagcaaacgtgtgcatatgtgtgtgtgtatatacatatatatatgtatatatatatatatatatatatatgaagtacatatattagaatcataggatcctcagagctggaagggaccttcaaaggtcgtctagtccaactcccctgc

SEQ ID NO: 37858 - DNA, 600 bp, Chicken  19866894268165_2
actatatccaagataagatgagtggaataaattggcacatttctaagaggaaaataagttttagaatttgctatcagaacatgttactggtcaatgagttgacttggaagtgcatgccatatttcctttgagctgtaataatacagtgaaatctttgagactataatttttcccagatcttttagcagagcacaggactatcaccctgccttccagttcactggaggctaaagactccttagtcagccaygtgttgcatacagaatgatcataaggacattttcaatcccagaagaggtrtagtatagctcctatgccatgtagttcctattgaaaatgaatctcaatagggcacatagttccctayttgccttcaaaactcttcgtaataygtacactaggtaagcaaacgtgtgcatatgtgtgtgtgtatatacatatatatatgtatatatatatatatatatatatatgaagtacatatattagaatcataggatcctcagagctggaagggaccttcaaaggtcgtctagtccaactcccctgcagtggacatccactgctagatcagagctgttcctggattatgttgctctg

SEQ ID NO: 37859 - DNA, 600 bp, Chicken  19866894268165_3
ttgctatcagaacatgttactggtcaatgagttgacttggaagtgcatgccatatttcctttgagctgtaataatacagtgaaatctttgagactataatttttcccagatcttttagcagagcacaggactatcaccctgccttccagttcactggaggctaaagactccttagtcagccaygtgttgcatacagaatgatcataaggacattttcaatcccagaagaggtrtagtatagctcctatgccatgtagttcctattgaaaatgaatctcaatagggcacatagttccctayttgccttcaaaactcttcgtaataygtacactaggtaagcaaacgtgtgcatatgtgtgtgtgtatatacatatatatatgtatatatatatatatatatatatatgaagtacatatattagaatcataggatcctcagagctggaagggaccttcaaaggtcgtctagtccaactcccctgcagtggacatccactgctagatcagagctgttcctggattatgttgctctgttgttacagtgaaatcacaattcatcttcaagttaaattttaaattaagaaattggttatttaaaat

SEQ ID NO: 37860 - DNA, 600 bp, Chicken  19866894268165_4
aatgagttgacttggaagtgcatgccatatttcctttgagctgtaataatacagtgaaatctttgagactataatttttcccagatcttttagcagagcacaggactatcaccctgccttccagttcactggaggctaaagactccttagtcagccaygtgttgcatacagaatgatcataaggacattttcaatcccagaagaggtrtagtatagctcctatgccatgtagttcctattgaaaatgaatctcaatagggcacatagttccctayttgccttcaaaactcttcgtaataygtacactaggtaagcaaacgtgtgcatatgtgtgtgtgtatatacatatatatatgtatatatatatatatatatatatatgaagtacatatattagaatcataggatcctcagagctggaagggaccttcaaaggtcgtctagtccaactcccctgcagtggacatccactgctagatcagagctgttcctggattatgttgctctgttgttacagtgaaatcacaattcatcttcaagttaaattttaaattaagaaattggttatttaaaatcatgcagcagagcactttcagagtg

SEQ ID NO: 37861 - DNA, 600 bp, Chicken  19866894268172_1
tacattttcttttttagtctgtgatctgaaacagcagaggtactttttgaactagacctgaactattaatccaaggaacaccacaggccatacatatatatatatacatttttttcagtgcaaaccactggggatgagaggattttaaccagttgaaaaccattttgactgaaaagacagaatactctggaaagaaattctagctgcatgaagggcaaaatatatattttagtttttgtaatctctgaattcgaaattatattgaagaaagggaataggaactgaagaatatttgcataktctgcaaagatattgatgctagtggagataatggatatctgggggagaggtttcaggtctcctgtttatgcaaacttggctgtaaaacaaatttctgccaaagaggtatgatgacttttgtagagagttgagatagtggtaggacaagggggaatggttttaaactaagatggaatgtttaggttagatattaggaggaagtttttcacacagagggtggtgatatactggaacaggttgcccaaggaggtcatggatgccccatccctggaggcattcaaggccaggctggatgtggct

SEQ ID NO: 37862 - DNA, 599 bp, Chicken  19866894268175_1
  misc_feature (1)..(140): n is any nucleotide
nnnnnnnnnnnnnnnnnnnnnnnnnnnnnnnnnnnnnnnnnnnnnnnnnnnnnnnnnnnnnnnnnnnnnnnnnnnnnnnnnnnnnnnnnnnnnnnnnnnnnnnnnnnnnnnnnnnnnnnnnnnnnnnnnnnnnnnnnnnnccgtgttgccccagcaaacaaatgtcccaggatgcagacaataatgtttttatgagcctctaaattctagcctcaaacgctctttgtagtggactaatagccaacacgtggcccttcgtctcatgctgaacttttgtggtcctgcaggggaagaaaaggycctggtgagcatttacactgagcactttgttctcacagatttgtagagcagagagaataatgtattgagactctcaacccgtgccagtttggcttcattcgtccttctgaacttgccctgagagataatgtttccttctaatctgctgccgtccacctacagcagggacccagcgaataattctcccaaacaagcctttattcttaaggctctatctggccctaaccctttctcccccttacagagtaattgttgtgttcattacatgataatggcccgagctgtattccagcccacac

SEQ ID NO: 37863 - DNA, 600 bp, Chicken  19866894268177_1
aaagaacttgcaagagcacgagcaatgtcaaaaagctgaactatagaaccacagtgtgggattattatcttcatttcaataaccttccagtaagccatttatcccacagctgttgttatgtgggtgtatgggattaaaaaaaaaaaaaactggtttctgaagaagctgtcagtttgtggggtgcagtgtggtgcttggagtttaatactgggcagcacagtgtccttaatctgactttgtaccacgaggtctcaataatagtaactgtacaataaatcagcatcatctgtggcccaaatwgtgcgtggaattccagtgaggaactaagcaagtttgacaaaggttgtgatgttgaggtagctgataagcccacgttctgctggacagttcagctgctttcttttatcaattcattaagaataggggcagtttgatttaatgtattagacatcaattctacaaacctcgtaagccttaattttgtattgktctcctcttagattatgcttgcagtgcccagagcagtgatcttaacctcagtggtggtatctttgtttcctagtgggtcttcttaaatactggaaacagaattgctctgct

SEQ ID NO: 37864 - DNA, 600 bp, Chicken  19866894268177_2
ggtgcttggagtttaatactgggcagcacagtgtccttaatctgactttgtaccacgaggtctcaataatagtaactgtacaataaatcagcatcatctgtggcccaaatwgtgcgtggaattccagtgaggaactaagcaagtttgacaaaggttgtgatgttgaggtagctgataagcccacgttctgctggacagttcagctgctttcttttatcaattcattaagaataggggcagtttgatttaatgtattagacatcaattctacaaacctcgtaagccttaattttgtattgktctcctcttagattatgcttgcagtgcccagagcagtgatcttaacctcagtggtggtatctttgtttcctagtgggtcttcttaaatactggaaacagaattgctctgctgccttagggttgctgttggtgcrctgaggtcaggttgagctcacctgttgtgtctgtgagctctggaagtgacactttggcaggataactgaattgcaggaatgcagtgtgtttaaaacaaaagaaaaaagaatttctgttgaaaggttgcaaactattgaattcctcagtctattttaggcagagtct

SEQ ID NO: 37865 - DNA, 600 bp, Chicken  19866894268177_3
ctaagcaagtttgacaaaggttgtgatgttgaggtagctgataagcccacgttctgctggacagttcagctgctttcttttatcaattcattaagaataggggcagtttgatttaatgtattagacatcaattctacaaacctcgtaagccttaattttgtattgktctcctcttagattatgcttgcagtgcccagagcagtgatcttaacctcagtggtggtatctttgtttcctagtgggtcttcttaaatactggaaacagaattgctctgctgccttagggttgctgttggtgcrctgaggtcaggttgagctcacctgttgtgtctgtgagctctggaagtgacactttggcaggataactgaattgcaggaatgcagtgtgtttaaaacaaaagaaaaaagaatttctgttgaaaggttgcaaactattgaattcctcagtctattttaggcagagtctgtagcaggaaaacgaatctaaagaagagctaaaaatacctatcttcttacccacagaatatcattaaaaaagtgaatggtaagaagtttgtgtacaagtttgtttcttatccggagatcttaaaaatggatcca

SEQ ID NO: 37866 - DNA, 599 bp, Chicken  19866894268181_1
  misc_feature (1)..(61): n is any nucleotide
nnnnnnnnnnnnnnnnnnnnnnnnnnnnnnnnnnnnnnnnnnnnnnnnnnnnnnnnnnnnncattaatctcaagtattgtcaggcactggactacaaagtaaaatccagagaaaaactgccaggaaaatctatatgccattgatttatttctgtgataatctgaaatccaaagtctgtttggttttttttaggaaagaatgtgaagttccagccagcagttcaatatcattcagcaagagtgcttaggcaaatgattaagcaaattctccagtttcattgtttcatctcagttcattcasrtgaactcagaatcaaaactgaataaacagggatggatttaaacatatatgtggaagctgtggtgcacagaaatgctaagataccttatagatccctcactgtctgtgtttctgtcagattcttttggtttctaccagtctgaaagaataagcaaagtcttcaggcttttaggataggaatcagtacgtgctgaagtgtggagagtttgacagaacagcacataggaagaacaaatatcaaaatagaatgactgaaaaatgattcagaaacatgaaacccaacagtttgccctatatag

SEQ ID NO: 37867 - DNA, 599 bp, Chicken  19866894268181_2
  misc_feature (1)..(60): n is any nucleotide
nnnnnnnnnnnnnnnnnnnnnnnnnnnnnnnnnnnnnnnnnnnnnnnnnnnnnnnnnnnncattaatctcaagtattgtcaggcactggactacaaagtaaaatccagagaaaaactgccaggaaaatctatatgccattgatttatttctgtgataatctgaaatccaaagtctgtttggttttttttaggaaagaatgtgaagttccagccagcagttcaatatcattcagcaagagtgcttaggcaaatgattaagcaaattctccagtttcattgtttcatctcagttcattcasrtgaactcagaatcaaaactgaataaacagggatggatttaaacatatatgtggaagctgtggtgcacagaaatgctaagataccttatagatccctcactgtctgtgtttctgtcagattcttttggtttctaccagtctgaaagaataagcaaagtcttcaggcttttaggataggaatcagtacgtgctgaagtgtggagagtttgacagaacagcacataggaagaacaaatatcaaaatagaatgactgaaaaatgattcagaaacatgaaacccaacagtttgccctatataga

SEQ ID NO: 37868 - DNA, 600 bp, Chicken  19866894268181_3
aatcaaaactgaataaacagggatggatttaaacatatatgtggaagctgtggtgcacagaaatgctaagataccttatagatccctcactgtctgtgtttctgtcagattcttttggtttctaccagtctgaaagaataagcaaagtcttcaggcttttaggataggaatcagtacgtgctgaagtgtggagagtttgacagaacagcacataggaagaacaaatatcaaaatagaatgactgaaaaatgattcagaaacatgaaacccaacagtttgccctatatagaaatttagcayrtaggatgagtagccatgctggagacctgaaagtgaaaaagaggattagtgctgtagccaggtgtctggaggaaaacgtctccagcagctattgaggactctagtgtcaagtcatacaaccagtgacaaaaatattgctctctgtagatgtcatctacaccctgcagatgtcaggtcagcacctcaggaaggcttcttttatctttgttctcataaaagattcttttgaacagcagtgattttgcttctgaaattctccagatgcgttttccctctgagcactccctgcacagtgttcac

SEQ ID NO: 37869 - DNA, 600 bp, Chicken  19866894268181_4
atcaaaactgaataaacagggatggatttaaacatatatgtggaagctgtggtgcacagaaatgctaagataccttatagatccctcactgtctgtgtttctgtcagattcttttggtttctaccagtctgaaagaataagcaaagtcttcaggcttttaggataggaatcagtacgtgctgaagtgtggagagtttgacagaacagcacataggaagaacaaatatcaaaatagaatgactgaaaaatgattcagaaacatgaaacccaacagtttgccctatatagaaatttagcayrtaggatgagtagccatgctggagacctgaaagtgaaaaagaggattagtgctgtagccaggtgtctggaggaaaacgtctccagcagctattgaggactctagtgtcaagtcatacaaccagtgacaaaaatattgctctctgtagatgtcatctacaccctgcagatgtcaggtcagcacctcaggaaggcttcttttatctttgttctcataaaagattcttttgaacagcagtgattttgcttctgaaattctccagatgcgttttccctctgagcactccctgcacagtgttcact

SEQ ID NO: 37870 - DNA, 600 bp, Chicken  19866894268181_5
agtgtcaagtcatacaaccagtgacaaaaatattgctctctgtagatgtcatctacaccctgcagatgtcaggtcagcacctcaggaaggcttcttttatctttgttctcataaaagattcttttgaacagcagtgattttgcttctgaaattctccagatgcgttttccctctgagcactccctgcacagtgttcactgcccactgccaacacgggcagtgtaacccatgctgtatgtataaaactgcaccctttgtggagccctaggaaaggcagcatagcatgcctctcacagggargggagaaaacttgggaaagaagcctgatcctagggggcagtgcagcagaaaaatggctcctgagcttcactcagatgagctgaagggatactctagcttgcacatgctggcacagctcccatttgattatcagacagtaaggtaaaaatccccagacgcacatcctcaggagatgggatgagatggatgctgtgatttgaggcagtaccaccagcaggagaaagggtggtgtgggactaactgtgctgctgtcctgttgagaacctgtgaatcttagcatatgtttgcaggtctccgtgc

SEQ ID NO: 37871 - DNA, 600 bp, Chicken  19866894268190_1
cagccttatagaaagtatgtgatgggatcagagaggggagttaatgcatgaatcacgagcatgttggcagctggggctgcccagtaaatcagcgcattcttggctgccctctgagcttggaggggacctcatagtctctcacctctgccagttgtgtgtctcctccctctcatgtgcccagggcttgggaaaggaatgaggaacatgttcacactttgaaacaaacctgtgatttaggaaggcaacaatcctgtgccaggactccaggaaagaaggatcctctgggcatccatcttttcrtgaagaactcaccgttacatttcccatgcatggcttctttcccctgagctgtagaagaaaagacttcacctagagtaggtctttgcagcgtgactatgaccaaagcaacagctttctagattaaaataaatgtccttatgagcctaacagtgtgagcactgagttggaatgggttgaggccaatgtgattggagcagcaggatccccaaatggggatcattactactcacatcttgggcttaccattttagatgggtggcgttagggattgtctagcaggggaaaagaatcccttgcaac

SEQ ID NO: 37872 - DNA, 600 bp, Chicken  19866894268195_1
ctgatgtggatattatcatctgtacaaatcattatgtgagtatgtgtttaatgcctgtaataataaagtatgtttgtaaaacataccagcaacaacaacaaagccctggattttatatgtaaactttgacctggagctagtgtttgctggcagtccaatttcttttttctaaactgaaaactcttacttcctatggttgtttgagaacatattcaatacagatacaggaacaaaattattgcaccagggaaggatacttttgaagtgtagaagcatttcttagaaggtccagcctgtccwcattctgtgaggacattgtttaggttagattgtccatttcttcccttccagtcacaggtggaaaagaactctctactaattgcttcccaagataatattttaccatgccaaatgtttgacaaaggccatatgtggtaggatgaagtggactcgttactcttatcacagtcaacaggaattttgccattttcctgactacatagagtattttattaagaggtttgagggattgttttttcctgatatcttgttaaacaacaaagctcgattccaagcttctttctgtgtgaagtcacacat

SEQ ID NO: 37873 - DNA, 600 bp, Chicken  19866894268197_1
tatttgtattttcaatgaactattaaaatctgtacccaactaccagtgaattcctggctccacgtgttccccttgtttgcctttgacgaagaaggcagttaaatttaataagagttcacaaaaatcttgcaaagactgtgttcatagttgtctaagtaactgaaaatacctattttttaggcctaagaatggtgcactgtgtaatacaggaccaaatcctcctgaaataattatcgcttctttaacaactttcagggaatgcgtttgaaagtgagttatggagttaatgacatacatcaycgagtcctctccttgtctgttgtgaatgttttggacaagcacaagggcatgttcagcttccccatcaacacttcacatctcaacactttttacccatttgctttcactccttctcttttctgcagctctggcaatatgaggcactaatggagtgcatggagaagttaaattgtacaatacagttgcaaaagtaactttagctattmrtttgtttaaaatactttgcatagagaaagttgtgtgtttagtatatgatacctgaacctttgggttaaaacatcatcttctaattcatacaca

SEQ ID NO: 37874 - DNA, 600 bp, Chicken  19866894268197_2
caggaccaaatcctcctgaaataattatcgcttctttaacaactttcagggaatgcgtttgaaagtgagttatggagttaatgacatacatcaycgagtcctctccttgtctgttgtgaatgttttggacaagcacaagggcatgttcagcttccccatcaacacttcacatctcaacactttttacccatttgctttcactccttctcttttctgcagctctggcaatatgaggcactaatggagtgcatggagaagttaaattgtacaatacagttgcaaaagtaactttagctattmrtttgtttaaaatactttgcatagagaaagttgtgtgtttagtatatgatacctgaacctttgggttaaaacatcatcttctaattcatacacatttgtgtttgacatcagtcattgtagagactatatcccttagacaatgtacctgaggaaagtatgaactctacagacatcrtaagtttgggaaggtgatgaaaggcacaggaactgatcactctaagttttgacatagtcacgcatttgttaacaactagattttggtgagaccgttttgtttgagtctgagacaaggcatcaaca

SEQ ID NO: 37875 - DNA, 600 bp, Chicken  19866894268197_3
aggaccaaatcctcctgaaataattatcgcttctttaacaactttcagggaatgcgtttgaaagtgagttatggagttaatgacatacatcaycgagtcctctccttgtctgttgtgaatgttttggacaagcacaagggcatgttcagcttccccatcaacacttcacatctcaacactttttacccatttgctttcactccttctcttttctgcagctctggcaatatgaggcactaatggagtgcatggagaagttaaattgtacaatacagttgcaaaagtaactttagctattmrtttgtttaaaatactttgcatagagaaagttgtgtgtttagtatatgatacctgaacctttgggttaaaacatcatcttctaattcatacacatttgtgtttgacatcagtcattgtagagactatatcccttagacaatgtacctgaggaaagtatgaactctacagacatcrtaagtttgggaaggtgatgaaaggcacaggaactgatcactctaagttttgacatagtcacgcatttgttaacaactagattttggtgagaccgttttgtttgagtctgagacaaggcatcaacac

SEQ ID NO: 37876 - DNA, 506 bp, Chicken  19866894268197_4
aacactttttacccatttgctttcactccttctcttttctgcagctctggcaatatgaggcactaatggagtgcatggagaagttaaattgtacaatacagttgcaaaagtaactttagctattmrtttgtttaaaatactttgcatagagaaagttgtgtgtttagtatatgatacctgaacctttgggttaaaacatcatcttctaattcatacacatttgtgtttgacatcagtcattgtagagactatatcccttagacaatgtacctgaggaaagtatgaactctacagacatcrtaagtttgggaaggtgatgaaaggcacaggaactgatcactctaagttttgacatagtcacgcatttgttaacaactagattttggtgagaccgttttgtttgagtctgagacaaggcatcaacacaactttgccaagagttaacaaagaaccaattcttatgagtcatgtaaattctgcatcaatgattacaactctcttctgtt

SEQ ID NO: 37877 - DNA, 600 bp, Chicken  19866894268199_1
ccaaacttatgatgtctgtagagttcatactttcctcaggtacattgtctaagggatatagtctctacaatgactgatgtcaaacacaaatgtgtatgaattagaagatgatgttttaacccaaaggttcaagtatcatatactaaacacacaactgtgtgttgaaaactgaaaagtgactctacgttactatggtaggaagaaatttgcaaaagagacatagcacctctgccgatccagcctaacacagactaaaccaggtgatgggttttagtgaagcaagatcagttgtatattatrccacggcgatttagaagttccgtctagtctttgcacaaagaaaaatgtatcacaggataggaactgcctgtgagtgtggtgtgggctctgttttcctaaaaataactgaacactgcatggctcgagttggaagagatcttaaaagccatctcactccaaccctcttccatgggtaggaacaactttcacaacaggttactcagagccccagataacctggccaaaagcttcacaaatagccttttatagacattttaacatcaaacaccacagaaagactttggaggaatcaaagaaatg

SEQ ID NO: 37878 - DNA, 600 bp, Chicken  19866894268202_1
tcctctattgcctggagaagacagcttctcccgaagatgccttaaagcaggagtgtgctttcgtctatcctctggtgaacttcattttctttggttactacacagaagcaattatttcagttcagaggcctagcgttaagtatatttctcagtctgtttttcccaccagtaagaacataggaattatcagtagctttgttttcttttctagagcacagaccaggcacaagaaactaaaaagtgttgtgttgttttttctttgtttttgttttttaatgagctttgagctttttttttccstgtgagacagttgcgagttcatttccctaattcagagctgatctggagctcacacagatccttggtatctggcattttaactgcattacctttatatattaaagtatgactgtgatgaaatctgtaagcaattgaaaaattgaagctgcaatttaaaacatttaatatgcccaatacaattctacctatttatcaatactgtgtttttatctaattggaaaaagctcatttcagctagttaaatgctaaaatagttttgatgtagcttacagaaaggtggcttgcacttgtgatttattt

SEQ ID NO: 37879 - DNA, 600 bp, Chicken  19866894268208_1
agttgttttcacttttgttcagtagagaccaagcaaaatatagcaacaaatatatttagaaagtatttagaatgtatatgcatttctatttcgtatttggcccacctgaacactttgtgcctgatatttttagctggaaatttttttgtctttctttcccccatgcacttcactggtgaggttttgggggctcatcagagggagggtggcagacatgcacagggctagaggaaaggtcacattagctcccatatgagcagggatgcagcagaagccaggttttaatgcaacatgaaaatyacttactttcttcctaccaggcacacccacccaaggggtttccaccctccaacactgccacattcaaatcccctttctttgggcaattagatgtcttttaaagcttaggattccttaaatagcctaaagatttagattcttcctttcagagttcagttctgggtgttcatggcagcattttaatacaagcccagtgcagtggaattgccaggtcacagcctgaaccattggttgagcgccagatgagaaggtgtggctaatacagggagctcaggtgcaagcaaggcacctgagtgacca

SEQ ID NO: 37880 - DNA, 600 bp, Chicken  19866894268208_2
gaaagcccagagagataagttcaaagagatacaagcaattctcttcttgcccatctgtggccccagagctgctgcaggcttgcagcatgagtctgaatgcacaccctaaccttcaccctctgccccgggtgacctctgtccgtacatgaatgatgagcagaagcaagagtactgctgaacacgctctccaaaaggaaaaggggaaaaagaaggtaaaacaaaacctcgtcttcaaagtttcatgaaaccacagagaactgagaaatcaaatacatactgagagtagctcagagtctcccragctcaagtgtcagtgctccagtattaggctgactattgaccactgtaaaatgttgctgttcttcacagtttttgaacaatgtacccattgcttcctggatctatcagatctgggagtgtaagtggagtactaaaaatgcaaatggctttcaagctgcattaatgtgaagtaagatggtcactctatgttaagctgtctagacttatgactaaagtccccttaaactgagcaaacctatctggcaaataagcttatttgtgagccctctctgtgtgtaacatctcctgatatctttcctc

SEQ ID NO: 37881 - DNA, 600 bp, Chicken  19866894268218_1
gtgcaatgttataggtacagttgaaaggaatgcattaacagtgagatggtgatcattatgccaagtctcaacctggtgatgaggaactctcactagaccaagccctagtacaagccacctgtctggcttgtgagtgccagatggcaagggattttgtaggaggagatgctggtagcaggtcctacccatggtcatgttccacatccgtaccaattaccacttcagagtgatgtgagcatgatgacctgccatagtgtttggatagcacctgtcatcacaaagacttcatccacatccagycctcacatagcagtgcrtgtaaatgatggggaattgctgctctgagtgctcatcgtaaggccccttatctcagcaagtcaatggagtcttatgggtgacagattgtaaatcctgagttattttctgcatgctacctgtctcaagtaaatctgattttcatctaccctaatttaacttcttttcagaggcaacaacattgcctgtgagcctttttttcccccaaatttgcaaactcatggctaatggatggtttgggtggcatccaggacataaggaaatcaattgctcccattctggtta

SEQ ID NO: 37882 - DNA, 600 bp, Chicken  19866894268218_2
cagttgaaaggaatgcattaacagtgagatggtgatcattatgccaagtctcaacctggtgatgaggaactctcactagaccaagccctagtacaagccacctgtctggcttgtgagtgccagatggcaagggattttgtaggaggagatgctggtagcaggtcctacccatggtcatgttccacatccgtaccaattaccacttcagagtgatgtgagcatgatgacctgccatagtgtttggatagcacctgtcatcacaaagacttcatccacatccagycctcacatagcagtgcrtgtaaatgatggggaattgctgctctgagtgctcatcgtaaggccccttatctcagcaagtcaatggagtcttatgggtgacagattgtaaatcctgagttattttctgcatgctacctgtctcaagtaaatctgattttcatctaccctaatttaacttcttttcagaggcaacaacattgcctgtgagcctttttttcccccaaatttgcaaactcatggctaatggatggtttgggtggcatccaggacataaggaaatcaattgctcccattctggttagtattgaaaaaatgcca

SEQ ID NO: 37883 - DNA, 599 bp, Chicken  19866894268227_1
  misc_feature (1)..(20): n is any nucleotide
nnnnnnnnnnnnnnnnnnnncatttcatgtttctgctattttatcctaaagcagcaaagaagccttcattttgattccctgctaactttaattgaattcattcctcattaaatgttacttgctttattgtatactatggtaagaattattttacgataaaaaacatgcagaaaatcatagtttcaaaataattacatctgtttgaatcagctttgatgcataagcataagcatgatatccaccctgaaaagcagttagaaggagatacatatttctgtctctaatttgtttcttgcagtmgttctaccatttctgtcrtcagtctttaggctgtgcacaaatrgttcattgataccattcaatatctgagatgtaaaaatttcacactgcatacttacactgtcattggatacataggtaaaaaaagctctgcaaaatgcagtttccaccatggatatcacattcatcagtttaaagaaactgactatcaatttattcagttgcctttcctatttgatgtgcttttcaacacatctgccagagaacttctgcaaagcgataatagtggaagaacacagagaagaggaaataaatctatt

SEQ ID NO: 37884 - DNA, 599 bp, Chicken  19866894268227_2
  misc_feature (1)..(2): n is any nucleotide
nncatttcatgtttctgctattttatcctaaagcagcaaagaagccttcattttgattccctgctaactttaattgaattcattcctcattaaatgttacttgctttattgtatactatggtaagaattattttacgataaaaaacatgcagaaaatcatagtttcaaaataattacatctgtttgaatcagctttgatgcataagcataagcatgatatccaccctgaaaagcagttagaaggagatacatatttctgtctctaatttgtttcttgcagtmgttctaccatttctgtcrtcagtctttaggctgtgcacaaatrgttcattgataccattcaatatctgagatgtaaaaatttcacactgcatacttacactgtcattggatacataggtaaaaaaagctctgcaaaatgcagtttccaccatggatatcacattcatcagtttaaagaaactgactatcaatttattcagttgcctttcctatttgatgtgcttttcaacacatctgccagagaacttctgcaaagcgataatagtggaagaacacagagaagaggaaataaatctattttgatatttaaataaatt

SEQ ID NO: 37885 - DNA, 600 bp, Chicken  19866894268227_3
tcctaaagcagcaaagaagccttcattttgattccctgctaactttaattgaattcattcctcattaaatgttacttgctttattgtatactatggtaagaattattttacgataaaaaacatgcagaaaatcatagtttcaaaataattacatctgtttgaatcagctttgatgcataagcataagcatgatatccaccctgaaaagcagttagaaggagatacatatttctgtctctaatttgtttcttgcagtmgttctaccatttctgtcrtcagtctttaggctgtgcacaaatrgttcattgataccattcaatatctgagatgtaaaaatttcacactgcatacttacactgtcattggatacataggtaaaaaaagctctgcaaaatgcagtttccaccatggatatcacattcatcagtttaaagaaactgactatcaatttattcagttgcctttcctatttgatgtgcttttcaacacatctgccagagaacttctgcaaagcgataatagtggaagaacacagagaagaggaaataaatctattttgatatttaaataaattttagatggctttaacatctatactca

SEQ ID NO: 37886 - DNA, 600 bp, Chicken  19866894268229_1
tatagtgaagggcactgagcaccagacccaaatttccccaactcacaaacactgatgtgagccccagagctgcagatgaagcgcagaaggctcctcttttcctccttcactctcttgttttgaaattgaaaaggtgtattcacagacagcaaaatcaattacgtcctgcagttggtggggcacattctgaagagacgactgtagttttggggattcgctgacagtttgtgctgaagaagcgctcacaaggagaactgctgcattcttactccgaggattagatcttagaatttcttgtgytcatcataaaaactaaaggtttcagaagaattaggacacgtcttctgaaggtgaggacttatgcaagtgaagttacatcctttttttttcaggcagcctctatttcagacctccacggaatcaattcattataaatcctctatgttcttcaatatgacagcagagctccaacacagtctttccacctccaacgtcagccttgcatgctgcacaggctcctctttgggccagatctaccatatggagcaaacatgaaggcactaacactcaacaggggctgagcagagagcactcccatat

SEQ ID NO: 37887 - DNA, 600 bp, Chicken  19866894268239_1
atgtgagcctggtaataagcagagctaggaccctgtgctttaggagagcaaacttccggctgctcaaggaactgctgaatgagatcccctgggaaactgtctttaaggccattggcacagaacagagttgacagctctttaaggacacccttctgagagtgcaacagctctccatcccccagcagaagaaatcgagcagggaaggcaggcgaccactgtggctgtgcaagaacctgctgcttaaactgagagaaaagagggaaatgtacagaaaggggaagcagggttgtgtatcttggraggaatacagggctgttgtccatgtgtacagagataggattaggaaagccgaggcgcagatggagctgaacttggcaagggatgtgaaagaaaacaaaaaggggttctactggtatataggcaggaagagacagaccaaggagagtgttccccctctaatgaaaggtaatgggtagctggctttctcagacatataaaaagctgaggtactcaatgagtgctttgcctcagtcttcacaggtggtcaggcttcctgtgtctgccaggaccatgagcctataggtgaaggtgtgaggagtg

SEQ ID NO: 37888 - DNA, 600 bp, Chicken  19866894268243_1
aatacgctgtgagcattctatatttggtagctttgcaagtactctttaagttgggcccagagtgatgaaaggacaggagtcaggaattcggctgcagcagaggctcggcgtgggagctcacttctctctgcagggccctccaggggcaccaagctttgcagccactgctgagaggggacagtgcttgggggactataccaggcacttccaaaatgggaggtgttgccatggtaccaatcctcccaccatctataccctgagggtacaaaatgaagtttttgaacccagttgtgccagtamagcctcacttgccttctgctttccttctcctgtgatgcgatacatgtttgaacctgggtaagatgcccatgaagtgagtgacaaggattctaccagctcacagtcctcacatcccagcaatgctctgctcaatgccaccacactcctgtggccatttgtggcacccaacagcgacgcacagtgatgcagcgggagccctctgacagatctgcagcactcactgatcattcagtctcattctcgagcttcccacataagtttattacagccacttcaaagacagcaaacactaaaccctat

SEQ ID NO: 37889 - DNA, 600 bp, Chicken  19866894268246_1
gttgaaggacacacagagatcatcttgactgggctgtgcttgccatgaaagagaatacagtgggctttgtgtaggaactcaggatttagggaatttacctgaagtggcatagagacaagtaacctagtgtaagttttagtgaccacgtaaataaattcgtttttaagcatagaaacttgaaaaggctctacggaatccacctccaaaatgacctcaggctcattaagagaggtctcttggaagagggctttctaaacacaggtcctccacagccaaaaggggacacctataccgtgttcmaatggaaagtccatgctggagaacagaccctgaagacaaggacatcggaaaccattcagtatagagcagcagaagygattaagcatgaagtggcataaagaaaccattccagataccacctcagcttccggaactgagtgtcaccttgcracaggaataaggaaaatagggaatgggaaacagggagggtagatatttatgtaagtattttttgcataaatgtttttttttcctgaccctaatcatcagtgggaggtttgtttttgtttgcaataaattaattcagttacaattccctga

SEQ ID NO: 37890 - DNA, 600 bp, Chicken  19866894268246_2
actcaggatttagggaatttacctgaagtggcatagagacaagtaacctagtgtaagttttagtgaccacgtaaataaattcgtttttaagcatagaaacttgaaaaggctctacggaatccacctccaaaatgacctcaggctcattaagagaggtctcttggaagagggctttctaaacacaggtcctccacagccaaaaggggacacctataccgtgttcmaatggaaagtccatgctggagaacagaccctgaagacaaggacatcggaaaccattcagtatagagcagcagaagygattaagcatgaagtggcataaagaaaccattccagataccacctcagcttccggaactgagtgtcaccttgcracaggaataaggaaaatagggaatgggaaacagggagggtagatatttatgtaagtattttttgcataaatgtttttttttcctgaccctaatcatcagtgggaggtttgtttttgtttgcaataaattaattcagttacaattccctgactccagactgttttgcccacaatagtgtcccaaacaaataaagatgccttcttgcatcacagagctaactacctca

SEQ ID NO: 37891 - DNA, 600 bp, Chicken  19866894268246_3
ataaattcgtttttaagcatagaaacttgaaaaggctctacggaatccacctccaaaatgacctcaggctcattaagagaggtctcttggaagagggctttctaaacacaggtcctccacagccaaaaggggacacctataccgtgttcmaatggaaagtccatgctggagaacagaccctgaagacaaggacatcggaaaccattcagtatagagcagcagaagygattaagcatgaagtggcataaagaaaccattccagataccacctcagcttccggaactgagtgtcaccttgcracaggaataaggaaaatagggaatgggaaacagggagggtagatatttatgtaagtattttttgcataaatgtttttttttcctgaccctaatcatcagtgggaggtttgtttttgtttgcaataaattaattcagttacaattccctgactccagactgttttgcccacaatagtgtcccaaacaaataaagatgccttcttgcatcacagagctaactacctcatagttttgagtgtagaattttaggcagtgctcctttctgcttgtttctcacttgtgaggcctctcagctgtaat

SEQ ID NO: 37892 - DNA, 600 bp, Chicken  19866894268278_1
ttctccttgaacgccacaaaccccacataactgcccatttcctcactctgcttaattgcttacgcagaaacttcttggtcagtacaaagttatcactggcaaataattaccctgcaagtttttcacctttggagcccttacgctccttctccagccgatcttcagacgagcccatttcatcactgtgctatcgcagcagtgcacgctgctgctgggggacgctgcgggcacggcggggctgccgaggggcagtcacccaggtgcaaaggtgcagctaacagcagccgttatctccgctcrcagcgataacgcggatccttggcgggtcagcacggagaccgggtaaaatacagcggggtccrctgtgcggctcaggctgcgcgctgctccccacacggcgcccgccgcccccccaggctttatcccacyctcggcccgctgcagaggggcagttccgaacccgcagaacgcarcgcaragcactcggctgcatcgccagggcggccggggcacacacggctccccccagcaccactcacctacgtactcatccatgttgaaggttttcacgtacttgaaggacaggtccccatttttgta

SEQ ID NO: 37893 - DNA, 600 bp, Chicken  19866894268278_2
cgcagaaacttcttggtcagtacaaagttatcactggcaaataattaccctgcaagtttttcacctttggagcccttacgctccttctccagccgatcttcagacgagcccatttcatcactgtgctatcgcagcagtgcacgctgctgctgggggacgctgcgggcacggcggggctgccgaggggcagtcacccaggtgcaaaggtgcagctaacagcagccgttatctccgctcrcagcgataacgcggatccttggcgggtcagcacggagaccgggtaaaatacagcggggtccrctgtgcggctcaggctgcgcgctgctccccacacggcgcccgccgcccccccaggctttatcccacyctcggcccgctgcagaggggcagttccgaacccgcagaacgcarcgcaragcactcggctgcatcgccagggcggccggggcacacacggctccccccagcaccactcacctacgtactcatccatgttgaaggttttcacgtacttgaaggacaggtccccatttttgtagtactccaccagctttctgtagcagcccagcggcgtgctgcctgcggacacacggcacgtca

SEQ ID NO: 37894 - DNA, 600 bp, Chicken  19866894268278_3
tggagcccttacgctccttctccagccgatcttcagacgagcccatttcatcactgtgctatcgcagcagtgcacgctgctgctgggggacgctgcgggcacggcggggctgccgaggggcagtcacccaggtgcaaaggtgcagctaacagcagccgttatctccgctcrcagcgataacgcggatccttggcgggtcagcacggagaccgggtaaaatacagcggggtccrctgtgcggctcaggctgcgcgctgctccccacacggcgcccgccgcccccccaggctttatcccacyctcggcccgctgcagaggggcagttccgaacccgcagaacgcarcgcaragcactcggctgcatcgccagggcggccggggcacacacggctccccccagcaccactcacctacgtactcatccatgttgaaggttttcacgtacttgaaggacaggtccccatttttgtagtactccaccagctttctgtagcagcccagcggcgtgctgcctgcggacacacggcacgtcagtcagtctgtccgtccgcccgtccctcacagccctcccgcctcgcacgcccatccgtccctcacagc

SEQ ID NO: 37895 - DNA, 600 bp, Chicken  19866894268278_4
atttcatcactgtgctatcgcagcagtgcacgctgctgctgggggacgctgcgggcacggcggggctgccgaggggcagtcacccaggtgcaaaggtgcagctaacagcagccgttatctccgctcrcagcgataacgcggatccttggcgggtcagcacggagaccgggtaaaatacagcggggtccrctgtgcggctcaggctgcgcgctgctccccacacggcgcccgccgcccccccaggctttatcccacyctcggcccgctgcagaggggcagttccgaacccgcagaacgcarcgcaragcactcggctgcatcgccagggcggccggggcacacacggctccccccagcaccactcacctacgtactcatccatgttgaaggttttcacgtacttgaaggacaggtccccatttttgtagtactccaccagctttctgtagcagcccagcggcgtgctgcctgcggacacacggcacgtcagtcagtctgtccgtccgcccgtccctcacagccctcccgcctcgcacgcccatccgtccctcacagcccgcccggtcccgccgccacccaccttgtgggcagccccagcgt

SEQ ID NO: 37896 - DNA, 600 bp, Chicken  19866894268278_5
atcactgtgctatcgcagcagtgcacgctgctgctgggggacgctgcgggcacggcggggctgccgaggggcagtcacccaggtgcaaaggtgcagctaacagcagccgttatctccgctcrcagcgataacgcggatccttggcgggtcagcacggagaccgggtaaaatacagcggggtccrctgtgcggctcaggctgcgcgctgctccccacacggcgcccgccgcccccccaggctttatcccacyctcggcccgctgcagaggggcagttccgaacccgcagaacgcarcgcaragcactcggctgcatcgccagggcggccggggcacacacggctccccccagcaccactcacctacgtactcatccatgttgaaggttttcacgtacttgaaggacaggtccccatttttgtagtactccaccagctttctgtagcagcccagcggcgtgctgcctgcggacacacggcacgtcagtcagtctgtccgtccgcccgtccctcacagccctcccgcctcgcacgcccatccgtccctcacagcccgcccggtcccgccgccacccaccttgtgggcagccccagcgtgaaaa

SEQ ID NO: 37897 - DNA, 600 bp, Chicken  19866894268279_1
cacagaattagcaaaccgctaaacaaaaccagtgcccatctaagcaaaggggtctggggctgcagacttgaaagctagcgcctgtgtttgttactgagcatgaatcaacaaatgatcccattctgagcagatctgaaactagatgtcaggtcagtcacaccagaccctgcttaatcagctggttttgcttagaaatatgataagggagggcaaggctggggggcacagctcctattggcagtccctgacagctccctctcactgcgaagcaagcagtgtggaagattataggtgcaaaayctgctcacctacccagagactgcacagcttgacttctcttcctgtgcttcatttatttgtgtaatgacattccaccgttgttccatctgtatgtagaacttcactctttaaaacagatcattcatgtctaatataactgaactgaatgcagcagagctcagctacactccacagttctgcacagtattacagctggcaaccttagggccctccagtggcaacctgtccacaggtgcctcaacccctattaaagggctaaagaccttcaaaattgctactagctactcagaaggtactcac

SEQ ID NO: 37898 - DNA, 600 bp, Chicken  19866894268291_1
gcagtaattgaaaactgcatcttcaaagtcattccaaaaaaattcacaaaaaaaaaaaaaaaaatcaagaaaagcacaaaccatgttatatcatacttactgcaaacaaaagttacactttttaaatttcttgtttctatatactgtagatttctcaggatggcgttactacacattggctactatactacctaaattaagttttattagctctagactacttcataactataagtctaggaaagatttctagtgaaatggccatttgaaagagacttggtcttatttggtttccctgtrccttacgtattttcttgctaagtcattcaaaatggtggtaatacttgctgaagtcagtagtgttgtgaaactgcttcataatttgggaaggcaaagcatgttaaaatggtcatgacatgaagatgtcaaatttgctgcaaagttgctgtactatacttccagtgagagagaagaaaagtctcttattctgttatcatgaagaatatctgaagtaaaaggcagcctcttttcacagttgcagtacacaaatcaatattatcgttctacacagtgtgccaaaatgaatagtagtaacacttg

SEQ ID NO: 37899 - DNA, 599 bp, Chicken  19866894268298_1
  misc_feature (1)..(63): n is any nucleotide
nnnnnnnnnnnnnnnnnnnnnnnnnnnnnnnnnnnnnnnnnnnnnnnnnnnnnnnnnnnnnnncatccccaccatgcccactaaccatatccctcagtgccttatctccacatttcttgaacacctgaggggatggtgagcccaccacctacccaggcagcctgttccaatatcgcatcacttcttttctgataataaattttcctaatatctatcctgaatatcagactgcagaaatgaatttccaagtgaaatctacaccgcctcctctccccagaacatggggctggagacactgaygcaggaygtttgggcactccaaggctggagaggaactctaagacacaagacttctcatgacttctccttggtgctcagagggtccagcatgccgcagcagcttgaagcaggctgaaactcagctcgatagcagatgctgtgcaaagataccaaagttactgaggccaaaagagagagcaataaatcacagcgtgttacagttattattttgttatctttatgacataaaatccctcccactctctctcctctgcccacgtgacttgcagcagaagcatcccactccatttttgcagatg

SEQ ID NO: 37900 - DNA, 599 bp, Chicken  19866894268298_2
  misc_feature (1)..(56): n is any nucleotide
nnnnnnnnnnnnnnnnnnnnnnnnnnnnnnnnnnnnnnnnnnnnnnnnnnnnnnnncatccccaccatgcccactaaccatatccctcagtgccttatctccacatttcttgaacacctgaggggatggtgagcccaccacctacccaggcagcctgttccaatatcgcatcacttcttttctgataataaattttcctaatatctatcctgaatatcagactgcagaaatgaatttccaagtgaaatctacaccgcctcctctccccagaacatggggctggagacactgaygcaggaygtttgggcactccaaggctggagaggaactctaagacacaagacttctcatgacttctccttggtgctcagagggtccagcatgccgcagcagcttgaagcaggctgaaactcagctcgatagcagatgctgtgcaaagataccaaagttactgaggccaaaagagagagcaataaatcacagcgtgttacagttattattttgttatctttatgacataaaatccctcccactctctctcctctgcccacgtgacttgcagcagaagcatcccactccatttttgcagatgaaatcat

SEQ ID NO: 37901 - DNA, 431 bp, Chicken  19866894268298_3
ccttggtgctcagagggtccagcatgccgcagcagcttgaagcaggctgaaactcagctcgatagcagatgctgtgcaaagataccaaagttactgaggccaaaagagagagcaataaatcacagcgtgttacagttattattttgttatctttatgacataaaatccctcccactctctctcctctgcccacgtgacttgcagcagaagcatcccactccatttttgcagatgaaatcattaaggacagcagcagttcagacctcaaagttgatgagaggacaatcgaacatctagaaygtaggggcatacctcatgttggcttttgcattcagaaaggtgttgcattgtgccttttcctccattttctggcactcagcacttgcaaaaactaacacagggtctgattcacttatccattttctgagcca

SEQ ID NO: 37902 - DNA, 600 bp, Chicken  19866894268307_1
ggaccacaatgctcatctcgttccaaccccctgctatgtgcagggtcgccaaccaccagaccaggctgcccagagccacatccagcctggaaaataacaataatggagaaaggattggatgcctgaacaatgaaatagattctatcccaacgtaggcattgcgcacctcatttcttgtcagtgctcggttttcctccaacgactgtgtggccgctgctggcagctgaggtgcagatgtcagtgcagcacacttctgtccccaaatattaaagtccctcccttggtttctctgcagtgcaytgggaaggtcatagaagcgccatgkccgggagccgttcagtcgtcagaaaacctgactgcatcaggggatagttttgcttcgggtgagagagtctccttgatatgtgattgctgcatgaatttgcgtgctttgtacttttatcccaagaggaaaatccrtgattctgtggctgttatgggccctatgtcacagacaccagcaagagcagataccgagcaggtttagsttttatggggttttttttgtgctgttctttttagtcacgactttctttgctctctccccatgatcttcacctc

SEQ ID NO: 37903 - DNA, 600 bp, Chicken  19866894268307_2
accccctgctatgtgcagggtcgccaaccaccagaccaggctgcccagagccacatccagcctggaaaataacaataatggagaaaggattggatgcctgaacaatgaaatagattctatcccaacgtaggcattgcgcacctcatttcttgtcagtgctcggttttcctccaacgactgtgtggccgctgctggcagctgaggtgcagatgtcagtgcagcacacttctgtccccaaatattaaagtccctcccttggtttctctgcagtgcaytgggaaggtcatagaagcgccatgkccgggagccgttcagtcgtcagaaaacctgactgcatcaggggatagttttgcttcgggtgagagagtctccttgatatgtgattgctgcatgaatttgcgtgctttgtacttttatcccaagaggaaaatccrtgattctgtggctgttatgggccctatgtcacagacaccagcaagagcagataccgagcaggtttagsttttatggggttttttttgtgctgttctttttagtcacgactttctttgctctctccccatgatcttcacctctggtaagggcatttttcaacagtgt

SEQ ID NO: 37904 - DNA, 600 bp, Chicken  19866894268307_3
tgcgcacctcatttcttgtcagtgctcggttttcctccaacgactgtgtggccgctgctggcagctgaggtgcagatgtcagtgcagcacacttctgtccccaaatattaaagtccctcccttggtttctctgcagtgcaytgggaaggtcatagaagcgccatgkccgggagccgttcagtcgtcagaaaacctgactgcatcaggggatagttttgcttcgggtgagagagtctccttgatatgtgattgctgcatgaatttgcgtgctttgtacttttatcccaagaggaaaatccrtgattctgtggctgttatgggccctatgtcacagacaccagcaagagcagataccgagcaggtttagsttttatggggttttttttgtgctgttctttttagtcacgactttctttgctctctccccatgatcttcacctctggtaagggcatttttcaacagtgtactgctgtcattgtcctttgtttctttgtctaactggtctatcagaaaattctcattcactttgcattttcagcttcaaacatacacaagagatctgcattcccttatcagtttttgccatcgttacattccct

SEQ ID NO: 37905 - DNA, 600 bp, Chicken  19866894268307_4
ggtgcagatgtcagtgcagcacacttctgtccccaaatattaaagtccctcccttggtttctctgcagtgcaytgggaaggtcatagaagcgccatgkccgggagccgttcagtcgtcagaaaacctgactgcatcaggggatagttttgcttcgggtgagagagtctccttgatatgtgattgctgcatgaatttgcgtgctttgtacttttatcccaagaggaaaatccrtgattctgtggctgttatgggccctatgtcacagacaccagcaagagcagataccgagcaggtttagsttttatggggttttttttgtgctgttctttttagtcacgactttctttgctctctccccatgatcttcacctctggtaagggcatttttcaacagtgtactgctgtcattgtcctttgtttctttgtctaactggtctatcagaaaattctcattcactttgcattttcagcttcaaacatacacaagagatctgcattcccttatcagtttttgccatcgttacattccctcttctggatgttgaacgcagaagctcaggtgaagcagtgacagctctgcttctatctcggccactttg

SEQ ID NO: 37906 - DNA, 600 bp, Chicken  19866894268309_1
gaatggtctgaccttccaagtgtaatggctcccaggctgccatgctgcctgacctgggaacaacccgctggctttacctaggttaataaaaactgttaattccaatgatcctgtccatagaaaatatgaacaaataaacataatcctaaatggtgctccgtgggactagtagtgataaactgcagtagcagataatctggtccagaagttgttaatggaatccctaacacaatcttacagttccatgaggaacagtaacagcaaagaattttgatattcacatctgcagagcaatgtacrtttataaaacagtgtagtccctgctgggatcaggatataaactacccaggcatttagcacttccacagttgcccttaggagatgattttaaacccagaagaaaccatctttcttattatatgaatcaaaactgtttacaccgaaggtactaaaaagcagttcacagcaagaagtggttgttagcacggatgagataatttaggataacttcagctcttaagcagtcagtctgatctgtaaattgtacataactcaatttaggtaacattttgtaaggataactgcaaatgtaatgaaata

SEQ ID NO: 37907 - DNA, 600 bp, Chicken  19866894268312_1
cacccggcagcaatatcatgtcagaacagcagctgcaaaatctggtcttcaattactgccagcttcaaggagagtgaaatccgggggcttggtgcaacctgttgtaaaatgctgctcctcgcagagagcctttttccccccccatccatatttcaggagcagcctggtgtctgcaccgaatgggagagcgctgaggtcaaggtggggcattgctggaggcatcccctgccttgtgaggccgaaatggatgggataactatcacaaagcaccacaaacaaacaaatcctcatcgcctccarcctcggttgaagagcaccttcaccctcagcccacacctctgacagcctgcaaagagaggagtcaagcagcagaaagcactgttctgagagctgcactcagcccatgaaaaatgcaacggagattgatgccttcctcagagagtgcaacctgcatcgtgctggcttgtatgtacaacagtgttagaggccataagcagcacaatgggattgcacctggctcttacagcctggtgttctgccctctcccactgctcccaaagacaagatttttgcrgttacaattcaccagattacacgttt

SEQ ID NO: 37908 - DNA, 600 bp, Chicken  19866894268312_2
aacaaacaaatcctcatcgcctccarcctcggttgaagagcaccttcaccctcagcccacacctctgacagcctgcaaagagaggagtcaagcagcagaaagcactgttctgagagctgcactcagcccatgaaaaatgcaacggagattgatgccttcctcagagagtgcaacctgcatcgtgctggcttgtatgtacaacagtgttagaggccataagcagcacaatgggattgcacctggctcttacagcctggtgttctgccctctcccactgctcccaaagacaagatttttgcrgttacaattcaccagattacacgtttgcacagtgcasgttatttagcaaagagattgcatcactgcaatgacatctgcatggcacccacagcagtgacagcaccatgcatggctgtgcagactgccatggcaaagagtttcctttgacctctctacagtactaaagcaggggatcaggatatgctaatgttagcacttttgcaaaccaaattaatgcttttctaagccccagaggcattggattcctctattcctctgctcctgcagggacacgtgttgggtgaacaccgagcaccctca

SEQ ID NO: 37909 - DNA, 600 bp, Chicken  19866894268312_3
gagcaccttcaccctcagcccacacctctgacagcctgcaaagagaggagtcaagcagcagaaagcactgttctgagagctgcactcagcccatgaaaaatgcaacggagattgatgccttcctcagagagtgcaacctgcatcgtgctggcttgtatgtacaacagtgttagaggccataagcagcacaatgggattgcacctggctcttacagcctggtgttctgccctctcccactgctcccaaagacaagatttttgcrgttacaattcaccagattacacgtttgcacagtgcasgttatttagcaaagagattgcatcactgcaatgacatctgcatggcacccacagcagtgacagcaccatgcatggctgtgcagactgccatggcaaagagtttcctttgacctctctacagtactaaagcaggggatcaggatatgctaatgttagcacttttgcaaaccaaattaatgcttttctaagccccagaggcattggattcctctattcctctgctcctgcagggacacgtgttgggtgaacaccgagcaccctcaaggcacatgggaacttcacactccagagttgtaacag

SEQ ID NO: 37910 - DNA, 600 bp, Chicken  19866894268313_1
atgtctcctggccctgtcattattcaacattatcatgcattcctagtagttttatctaaagaaaaactttcaggggtggaaatttcagaatatctgtgttacagtattgaccacagtaactttacggtaatagttaacagtaattaaagtgaacacattttttttttttttttgctgattgttgattatggctctggttcagcaaagcacttaagaacattcttaatttcatgtaaataagaaatacaatgaaagtcaaacagtctgcctgcatgtattattctgatgagggtaaacttygttgaattatgtcttacactaatgttttgtttttttttgcagtaataaagtgagccctactactgagaaaattaatagccgtttgtggtccagcctaatggacttgttttgtctgatttatgtgtgtaatttccatggagaagtaattcctgtgtgaatggagtgtgtgacagagtacctattttttaataaaaagtactaaaaatgaagaaattatagtgggtgggtcagactggaatatgttgtgtttttctactttacacaaatgcagtttgatttcctgggaatgacattttcaaa

SEQ ID NO: 37911 - DNA, 600 bp, Chicken  19866894268313_2
aatgaagaaattatagtgggtgggtcagactggaatatgttgtgtttttctactttacacaaatgcagtttgatttcctgggaatgacattttcaaaagtagctatctgcttatagttcctatgtttttcaaaagcatgtttatttccctagttctcgacagctgtgcagtcggtcagaatggcaaaaggctgctctgggttgatgttagtgggcagttgttgagtttatttccgtcagcaaagaattgacaagaggaagacaaacccagctatcttgcactacctgcaaatttgcagaraggctactaaattgagtacctgatcagctctgttagctctgggaaagaaagtggtcactgggcacaggaacagctgagacaatattttcgattttcagcaagaagtggtagatcattaggtcgttcggtgtagttaaggtacaggagcgttttcacagtggatttttatgaaaraaatagttctgtggctgatccaagcccatttgtagtggtgcaaattaggatttctgtgtggattctccctgccgtgagatcagaatgaaggatggattggattttgggtaaaaattctgttttgcc

SEQ ID NO: 37912 - DNA, 600 bp, Chicken  19866894268313_3
tcagaatggcaaaaggctgctctgggttgatgttagtgggcagttgttgagtttatttccgtcagcaaagaattgacaagaggaagacaaacccagctatcttgcactacctgcaaatttgcagaraggctactaaattgagtacctgatcagctctgttagctctgggaaagaaagtggtcactgggcacaggaacagctgagacaatattttcgattttcagcaagaagtggtagatcattaggtcgttcggtgtagttaaggtacaggagcgttttcacagtggatttttatgaaaraaatagttctgtggctgatccaagcccatttgtagtggtgcaaattaggatttctgtgtggattctccctgccgtgagatcagaatgaaggatggattggattttgggtaaaaattctgttttgccattatatttctgtagttggttgaaattaatgttcataggtttaattcagttgtactctataatgggaaaaatatgtatatttcaacctgaatcttgcctgtcttgagtattagataccatcaatcacagttaagactctttagttgaagaaagaatatattgcatatgaaaaga

SEQ ID NO: 37913 - DNA, 600 bp, Chicken  19866894268313_4
ccattatatttctgtagttggttgaaattaatgttcataggtttaattcagttgtactctataatgggaaaaatatgtatatttcaacctgaatcttgcctgtcttgagtattagataccatcaatcacagttaagactctttagttgaagaaagaatatattgcatatgaaaagaggaaacagcattatattaaatgctaaggtgtaataatttccttctgaaagactttaaattatgtaaggattttggtatactatgcaataagcacatgaagcaattttgccccagataacagtartgttagactatctcgttagacctcttaacttccaaatgtttrtrtgttttctgcgttattaaacatatcctctgatgggggctgkggtggattatgacagaatagtgatctttatccagtgttgttggttatggaataaaaagctgatggaaaatgattgccacagagctgaaaagataatcggatgcagttcattactcatcttgtcagctgctcctgctacaagggattgtatcacaagatgttaatctgcctgtgactagatttcaaagcaagcatttttattttggggcgggtata

SEQ ID NO: 37914 - DNA, 600 bp, Chicken  19866894268313_5
ttaattcagttgtactctataatgggaaaaatatgtatatttcaacctgaatcttgcctgtcttgagtattagataccatcaatcacagttaagactctttagttgaagaaagaatatattgcatatgaaaagaggaaacagcattatattaaatgctaaggtgtaataatttccttctgaaagactttaaattatgtaaggattttggtatactatgcaataagcacatgaagcaattttgccccagataacagtartgttagactatctcgttagacctcttaacttccaaatgtttrtrtgttttctgcgttattaaacatatcctctgatgggggctgkggtggattatgacagaatagtgatctttatccagtgttgttggttatggaataaaaagctgatggaaaatgattgccacagagctgaaaagataatcggatgcagttcattactcatcttgtcagctgctcctgctacaagggattgtatcacaagatgttaatctgcctgtgactagatttcaaagcaagcatttttattttggggcgggtatagcttctttcagttttatatagttttcataagagaaatggaac

SEQ ID NO: 37915 - DNA, 600 bp, Chicken  19866894268313_6
aattcagttgtactctataatgggaaaaatatgtatatttcaacctgaatcttgcctgtcttgagtattagataccatcaatcacagttaagactctttagttgaagaaagaatatattgcatatgaaaagaggaaacagcattatattaaatgctaaggtgtaataatttccttctgaaagactttaaattatgtaaggattttggtatactatgcaataagcacatgaagcaattttgccccagataacagtartgttagactatctcgttagacctcttaacttccaaatgtttrtrtgttttctgcgttattaaacatatcctctgatgggggctgkggtggattatgacagaatagtgatctttatccagtgttgttggttatggaataaaaagctgatggaaaatgattgccacagagctgaaaagataatcggatgcagttcattactcatcttgtcagctgctcctgctacaagggattgtatcacaagatgttaatctgcctgtgactagatttcaaagcaagcatttttattttggggcgggtatagcttctttcagttttatatagttttcataagagaaatggaacat

SEQ ID NO: 37916 - DNA, 600 bp, Chicken  19866894268313_7
aacctgaatcttgcctgtcttgagtattagataccatcaatcacagttaagactctttagttgaagaaagaatatattgcatatgaaaagaggaaacagcattatattaaatgctaaggtgtaataatttccttctgaaagactttaaattatgtaaggattttggtatactatgcaataagcacatgaagcaattttgccccagataacagtartgttagactatctcgttagacctcttaacttccaaatgtttrtrtgttttctgcgttattaaacatatcctctgatgggggctgkggtggattatgacagaatagtgatctttatccagtgttgttggttatggaataaaaagctgatggaaaatgattgccacagagctgaaaagataatcggatgcagttcattactcatcttgtcagctgctcctgctacaagggattgtatcacaagatgttaatctgcctgtgactagatttcaaagcaagcatttttattttggggcgggtatagcttctttcagttttatatagttttcataagagaaatggaacattcccaatttaaagtctcaaaatgttaattgatgaaaaatat

SEQ ID NO: 37917 - DNA, 599 bp, Chicken  19866894268332_1
  misc_feature (1)..(82): n is any nucleotide
nnnnnnnnnnnnnnnnnnnnnnnnnnnnnnnnnnnnnnnnnnnnnnnnnnnnnnnnnnnnnnnnnnnnnnnnnnnnnnnnnncctgctgtgtcgtgttccttttacttggaaaacagcagtccatctgacatggctgttagccatgcggacctaactctccagccactaatgttttgtttttgtggcaagctgtctgctgaagagatgacagatggtactcatttcaaacctctgtatctgctgcccagtatcatgaggcatctgattccagaacagagtccaagtttttccttttctcytctatcagtaagagggaaaaggatacttcttatacttgcctctgttctcaaggtggaggccactagtgctgctggtggtagagcaggaaggctgtgactcctctggcatcaacagcagcttactcaggaacggccccaaaagagacagtctttgatgctgaaggccaggattcggccaagaacaacagtgactgatgagggtaggggatactgtaggccctcggtacccaaagatgcagaacaatatcacaaccaaacaattagtgagattagcagactaggatcaaccatgccaagtt

SEQ ID NO: 37918 - DNA, 600 bp, Chicken  19866894268332_2
aagagggaaaaggatacttcttatacttgcctctgttctcaaggtggaggccactagtgctgctggtggtagagcaggaaggctgtgactcctctggcatcaacagcagcttactcaggaacggccccaaaagagacagtctttgatgctgaaggccaggattcggccaagaacaacagtgactgatgagggtaggggatactgtaggccctcggtacccaaagatgcagaacaatatcacaaccaaacaattagtgagattagcagactaggatcaaccatgccaagttctgccatatytgcagtccagacctctarcttgcctgaaacccatcacttacttcttaaatttatcctgggggatttgtgctaccctgtgattagcaagaccccttaagcaggaaaatgaaagttgttaatacccttcccctaggtagactgataaataaccttctgtttcagccactcttgggctcctgtgatcagtctttctytcctgtctacagtagcaacattttcaaggctccttggaggtaaagcaaggtccaagggaagaatcaaacatctgttgcagagttctgcaactgaactgaaaatgag

SEQ ID NO: 37919 - DNA, 600 bp, Chicken  19866894268332_3
tcttatacttgcctctgttctcaaggtggaggccactagtgctgctggtggtagagcaggaaggctgtgactcctctggcatcaacagcagcttactcaggaacggccccaaaagagacagtctttgatgctgaaggccaggattcggccaagaacaacagtgactgatgagggtaggggatactgtaggccctcggtacccaaagatgcagaacaatatcacaaccaaacaattagtgagattagcagactaggatcaaccatgccaagttctgccatatytgcagtccagacctctarcttgcctgaaacccatcacttacttcttaaatttatcctgggggatttgtgctaccctgtgattagcaagaccccttaagcaggaaaatgaaagttgttaatacccttcccctaggtagactgataaataaccttctgtttcagccactcttgggctcctgtgatcagtctttctytcctgtctacagtagcaacattttcaaggctccttggaggtaaagcaaggtccaagggaagaatcaaacatctgttgcagagttctgcaactgaactgaaaatgaggactgaaaatgatgaaag

SEQ ID NO: 37920 - DNA, 600 bp, Chicken  19866894268332_4
ggggatactgtaggccctcggtacccaaagatgcagaacaatatcacaaccaaacaattagtgagattagcagactaggatcaaccatgccaagttctgccatatytgcagtccagacctctarcttgcctgaaacccatcacttacttcttaaatttatcctgggggatttgtgctaccctgtgattagcaagaccccttaagcaggaaaatgaaagttgttaatacccttcccctaggtagactgataaataaccttctgtttcagccactcttgggctcctgtgatcagtctttctytcctgtctacagtagcaacattttcaaggctccttggaggtaaagcaaggtccaagggaagaatcaaacatctgttgcagagttctgcaactgaactgaaaatgaggactgaaaatgatgaaagaaaagactaaagagrccaatcatacacataaataagaaagtaaattcttaggcatctggagatagtgacctctacacacaaggagggaaaagtgagctgaaaggaaacagcaaaacaacctagcatttaactgcaggagggacaaagtctggcactaaagaagaagagcaggtgca

SEQ ID NO: 37921 - DNA, 600 bp, Chicken  19866894268332_5
tcacttacttcttaaatttatcctgggggatttgtgctaccctgtgattagcaagaccccttaagcaggaaaatgaaagttgttaatacccttcccctaggtagactgataaataaccttctgtttcagccactcttgggctcctgtgatcagtctttctytcctgtctacagtagcaacattttcaaggctccttggaggtaaagcaaggtccaagggaagaatcaaacatctgttgcagagttctgcaactgaactgaaaatgaggactgaaaatgatgaaagaaaagactaaagagrccaatcatacacataaataagaaagtaaattcttaggcatctggagatagtgacctctacacacaaggagggaaaagtgagctgaaaggaaacagcaaaacaacctagcatttaactgcaggagggacaaagtctggcactaaagaagaagagcaggtgcagtgtatgttctaccatgatgaggttaattcatcaaaaaatctttgctaattggatttggcacaatgattttatagtagaacttggctttgtatcttgggggcatgactttttttcttgcaacattaagaagtcttacag

SEQ ID NO: 37922 - DNA, 600 bp, Chicken  19866894268332_6
atgggtggtatggcagtagaggttgagccttcccgccagtattctgttacatgtggttgctgtgtgacagatggcagcagcggggcagtctgacgcagtggtgtctgatttgggagtgtggatgaagcaaaagcgtgtcagtgaatttctccatgaggaaaaaattgcactcactgacattcatcagtacttgctgaacagggaggctgcgggtagtgcatttcagcagtgactacagtgacgtaaaagacaagccacgttctggatcaccatgcacagctgtcacaccaaaaaaagagyaaatcagtgtgtcctaaaagtcctggcatctggagactgaaaaagaaagaaaacataattattacagtaatttcaaagcacatcaggcctttccttctattctggccatttgtatcagctcttaattccctagtctgtatccacctgtttaaatttagtacccaaatgtaagtgtttttcttacgctgaaattttcctagtatcaaggtttaatgaggakgttgatttacctctggactatgttgctgcactacaaattgatgccagagtttaacttgctgtagttaatttcctatacta

SEQ ID NO: 37923 - DNA, 600 bp, Chicken  19866894268332_7
tttcagcagtgactacagtgacgtaaaagacaagccacgttctggatcaccatgcacagctgtcacaccaaaaaaagagyaaatcagtgtgtcctaaaagtcctggcatctggagactgaaaaagaaagaaaacataattattacagtaatttcaaagcacatcaggcctttccttctattctggccatttgtatcagctcttaattccctagtctgtatccacctgtttaaatttagtacccaaatgtaagtgtttttcttacgctgaaattttcctagtatcaaggtttaatgaggakgttgatttacctctggactatgttgctgcactacaaattgatgccagagtttaacttgctgtagttaatttcctatactagattaattggactgtattctcagttgcagtcttctggctatgcagcatctgacttccacagatctaccaatccaactgactcagttttccartccactgttcagctgtgtgactgtgctgtcccagtagggttattttgaggctggttataatgctggccaattcattgtaaggtaaagatatgcttactttcatttacagtttagaccaccatagaaca

SEQ ID NO: 37924 - DNA, 600 bp, Chicken  19866894268332_8
ccttctattctggccatttgtatcagctcttaattccctagtctgtatccacctgtttaaatttagtacccaaatgtaagtgtttttcttacgctgaaattttcctagtatcaaggtttaatgaggakgttgatttacctctggactatgttgctgcactacaaattgatgccagagtttaacttgctgtagttaatttcctatactagattaattggactgtattctcagttgcagtcttctggctatgcagcatctgacttccacagatctaccaatccaactgactcagttttccartccactgttcagctgtgtgactgtgctgtcccagtagggttattttgaggctggttataatgctggccaattcattgtaaggtaaagatatgcttactttcatttacagtttagaccaccatagaacacaatggtctacacacacgataagcaaaagaaaaaataccaagtgctacagttctcagtcttctgcagaagatcaatccattgatttgtttggctggatcacaacagctggacaatgctctaaggtattgttgagctttaagactccattgaacacaggatcattggttacag

SEQ ID NO: 37925 - DNA, 583 bp, Chicken  19866894268334_1
ctgtgttgtggggcaaagaaggagctgagaaaaccagaggaatgcttacctagagctgatcttggtcaggagacatatggaccctgctgtgtcatgttccttttacttggaaaacagcagtccatctgacatggctgttagccatgcggacctaactctccagccactaatgttttgtttttgtggcaagctgtctgctgaagagatgacagatggtactcatttcaaacctctgtatctgctgcccagtatcatgaggcatctgattccagaacagagtccaagtttttccttttctcytctatcagtaagagggaaaaggatacttcttatacttgcctctgttctcaaggtggaggccactagtgctgctggtggtagagcaggaaggctgtgactcctctggcatcaacagcagcttactcaggaacggccccaaaagagacagtctttgatgctgaaggccaggattcggccaagaacaacagtgactgatgagggtaggggatactgtaggccctcggtacccaaagatgcagaacaatatcacaaccaaacaattagtgagattagcagactagga

SEQ ID NO: 37926 - DNA, 600 bp, Chicken  19866894268348_1
cctttgcaatgacgttgcttgctttttcactcagtatggagtattggttcacaacagcgtaaaacctggtggtagcttgttagcaactccttgacaaaattaatgatgctgttttatttctcctctgcccggtagtgctggaggagcagtagaattcctttgcccttgatcagctcacttgtctttccctgctgagcttctcgttattaggtgtagttttcccttgtttcttctgcctgtatttttgtatttgttattatttttcctgccatctttctcattacagctgtggaatcccasggcatgggatggtggctggggataggtatgtcccatgggcatgggggacactttctataacgaaccctgaaagtgagaggaggaaaagcctgctgatattgggcaggataaattaattgtcaattgagagggctcatctcaaagtgggggttctgtgtcttacaagcaggggaggaaggcaggtccttacagagagccaaggctccagctgagcttctcagggctgtggtcctgcatctggcatgactgctccaagttctccgtgagacacagcatctcatgctgagttcttacacaaca

SEQ ID NO: 37927 - DNA, 600 bp, Chicken  19866894268350_1
acctcatggcatgcacaaacattgcatatgtggtggaattagtgtttgtctctttcaaagctagtttcaaaaccctaactgaaagaaccaacattgcaacttcaattatctataaaagatatctctgagtacatctggtctcctcagtggtgagaaaacgtatctaatccattggcttagactcagtttacctggaagcctaactgtgctttagaaactgtgagcagcaattaatttttcaaagacatctgtgggcagaagagcctttacaaatctttttacaagcagttggcttgctgyatttactactgatacctcttagtgtgaaagaaggaccgcattcatacactgtgcttcytwcgatgttacaagcctttctggagggcagcaagattccagctgagttctgccattgagatatgcttaccttgggtatcctcaatcaaagtgtatctgtttgacatgaattaacaggcctctttttttatgcacaggaaagaagttgtttaaacctgcttttatcctccaaatctggaagaagaacaactcaagggtactgcatgggtttctaatgaggctagtgttcatggcatgccatgt

SEQ ID NO: 37928 - DNA, 600 bp, Chicken  19866894268350_2
agctagtttcaaaaccctaactgaaagaaccaacattgcaacttcaattatctataaaagatatctctgagtacatctggtctcctcagtggtgagaaaacgtatctaatccattggcttagactcagtttacctggaagcctaactgtgctttagaaactgtgagcagcaattaatttttcaaagacatctgtgggcagaagagcctttacaaatctttttacaagcagttggcttgctgyatttactactgatacctcttagtgtgaaagaaggaccgcattcatacactgtgcttcytwcgatgttacaagcctttctggagggcagcaagattccagctgagttctgccattgagatatgcttaccttgggtatcctcaatcaaagtgtatctgtttgacatgaattaacaggcctctttttttatgcacaggaaagaagttgtttaaacctgcttttatcctccaaatctggaagaagaacaactcaagggtactgcatgggtttctaatgaggctagtgttcatggcatgccatgtggctaggaaatgtgtgactaaatgtgtagtttaaccctaaatttatacaactaattca

SEQ ID NO: 37929 - DNA, 600 bp, Chicken  19866894268350_3
ctagtttcaaaaccctaactgaaagaaccaacattgcaacttcaattatctataaaagatatctctgagtacatctggtctcctcagtggtgagaaaacgtatctaatccattggcttagactcagtttacctggaagcctaactgtgctttagaaactgtgagcagcaattaatttttcaaagacatctgtgggcagaagagcctttacaaatctttttacaagcagttggcttgctgyatttactactgatacctcttagtgtgaaagaaggaccgcattcatacactgtgcttcytwcgatgttacaagcctttctggagggcagcaagattccagctgagttctgccattgagatatgcttaccttgggtatcctcaatcaaagtgtatctgtttgacatgaattaacaggcctctttttttatgcacaggaaagaagttgtttaaacctgcttttatcctccaaatctggaagaagaacaactcaagggtactgcatgggtttctaatgaggctagtgttcatggcatgccatgtggctaggaaatgtgtgactaaatgtgtagtttaaccctaaatttatacaactaattcaga

SEQ ID NO: 37930 - DNA, 600 bp, Chicken  19866894268351_1
aaagaagcacgtgagtttgcaagatcacagtccagtgacttaccgcatttttcagatccagatactttgtgttcctggtcactggcatcccagacagaaaagctaaaatgtcattgttcgcctgtaagccacaaagacaagaaaatcttctctgtgacaccaagacaaaaaaacctatacatgagaagcaaagaactgtgcgacctggggcaagacggcttgcaagcatcttgaccagtcccctgaactggttccaattctgctgttctcatttccacctgatcccatcactgtctgaaycccacctccgaggaaaataagtacaatctttctgcccaattaggaatctgcaaatcccaatggcggaacagtttgggaactcaggccttgttttttcccctcaggttgcccctgcagttttgctcagacgctggaggcttctctccactcttcctaaactaattttaaagaaactgcccccagttgcctgtctagggtcaagatttagatctgtatgcatcacctagctaggaaaggcactaagtttccacccacctcatccagcacagcgttgcgctttgcccgctgccgttggcgcag

SEQ ID NO: 37931 - DNA, 600 bp, Chicken  19866894268351_2
ccctgcagttttgctcagacgctggaggcttctctccactcttcctaaactaattttaaagaaactgcccccagttgcctgtctagggtcaagatttagatctgtatgcatcacctagctaggaaaggcactaagtttccacccacctcatccagcacagcgttgcgctttgcccgctgccgttggcgcagcagaaccaggcctgcaatgatgtcagatgggacgatgtcaaggtctcggaagaactcagcgaaaaggtaggcgatttcagagtatgcatcctgcaaaatccacagagarragggcttaggaggargagtttgagtgtggggagcctcaaaacaggacacagaacgagagccggtgaggcagcaatggcctcatktctgtagctctccccaaaacacccatgagattccttctgacaacaccacatctgttctaatcattattaatacctcctactgtacaaagtggacagcctggtctggtggttggcgaccctgcacgtagcaggggggttcaaaataggtgatcgttgtgcttctttccaacccaggccattctatgattctatgaacgtcacacgcgtaggtctca

SEQ ID NO: 37932 - DNA, 600 bp, Chicken  19866894268351_3
cctgcagttttgctcagacgctggaggcttctctccactcttcctaaactaattttaaagaaactgcccccagttgcctgtctagggtcaagatttagatctgtatgcatcacctagctaggaaaggcactaagtttccacccacctcatccagcacagcgttgcgctttgcccgctgccgttggcgcagcagaaccaggcctgcaatgatgtcagatgggacgatgtcaaggtctcggaagaactcagcgaaaaggtaggcgatttcagagtatgcatcctgcaaaatccacagagarragggcttaggaggargagtttgagtgtggggagcctcaaaacaggacacagaacgagagccggtgaggcagcaatggcctcatktctgtagctctccccaaaacacccatgagattccttctgacaacaccacatctgttctaatcattattaatacctcctactgtacaaagtggacagcctggtctggtggttggcgaccctgcacgtagcaggggggttcaaaataggtgatcgttgtgcttctttccaacccaggccattctatgattctatgaacgtcacacgcgtaggtctcag

SEQ ID NO: 37933 - DNA, 600 bp, Chicken  19866894268351_4
agacgctggaggcttctctccactcttcctaaactaattttaaagaaactgcccccagttgcctgtctagggtcaagatttagatctgtatgcatcacctagctaggaaaggcactaagtttccacccacctcatccagcacagcgttgcgctttgcccgctgccgttggcgcagcagaaccaggcctgcaatgatgtcagatgggacgatgtcaaggtctcggaagaactcagcgaaaaggtaggcgatttcagagtatgcatcctgcaaaatccacagagarragggcttaggaggargagtttgagtgtggggagcctcaaaacaggacacagaacgagagccggtgaggcagcaatggcctcatktctgtagctctccccaaaacacccatgagattccttctgacaacaccacatctgttctaatcattattaatacctcctactgtacaaagtggacagcctggtctggtggttggcgaccctgcacgtagcaggggggttcaaaataggtgatcgttgtgcttctttccaacccaggccattctatgattctatgaacgtcacacgcgtaggtctcagctgagcctggatttg

SEQ ID NO: 37934 - DNA, 600 bp, Chicken  19866894268351_5
gggtcaagatttagatctgtatgcatcacctagctaggaaaggcactaagtttccacccacctcatccagcacagcgttgcgctttgcccgctgccgttggcgcagcagaaccaggcctgcaatgatgtcagatgggacgatgtcaaggtctcggaagaactcagcgaaaaggtaggcgatttcagagtatgcatcctgcaaaatccacagagarragggcttaggaggargagtttgagtgtggggagcctcaaaacaggacacagaacgagagccggtgaggcagcaatggcctcatktctgtagctctccccaaaacacccatgagattccttctgacaacaccacatctgttctaatcattattaatacctcctactgtacaaagtggacagcctggtctggtggttggcgaccctgcacgtagcaggggggttcaaaataggtgatcgttgtgcttctttccaacccaggccattctatgattctatgaacgtcacacgcgtaggtctcagctgagcctggatttgcactgtgtgggtgtgctgtgtggataagctgaccacctaagcagcaggacagggaatgcatatgcaaag

SEQ ID NO: 37935 - DNA, 600 bp, Chicken  19866894268351_6
ccctgcacgtagcaggggggttcaaaataggtgatcgttgtgcttctttccaacccaggccattctatgattctatgaacgtcacacgcgtaggtctcagctgagcctggatttgcactgtgtgggtgtgctgtgtggataagctgaccacctaagcagcaggacagggaatgcatatgcaaagggagggaaggacaacgttttcagggtaaataagacagaggaagtaagctgagaaccaaaaaaatcccaatctcgtgtcaccgcacagtcagcctttctcctcaaaagcaatttcasttgaacaaaggctattcaggaaaagtgcactaaatatatccratttaacagcctcttcagtcctgaaactctgtcctggagctatttccccatacttaagtcagacctcaccaccctgggcacatcacggagaaastgagggacttttgcaggctgccagtgaacagcctctgtactgctcactgctcaccactgtgctgtttactatgtgatttcaaagagttaaattacaacaagcaggtgttacacatcagagctccgggtcctgaaagagctgagcaagtcagcaagcttttccaa

SEQ ID NO: 37936 - DNA, 600 bp, Chicken  19866894268351_7
cttctttccaacccaggccattctatgattctatgaacgtcacacgcgtaggtctcagctgagcctggatttgcactgtgtgggtgtgctgtgtggataagctgaccacctaagcagcaggacagggaatgcatatgcaaagggagggaaggacaacgttttcagggtaaataagacagaggaagtaagctgagaaccaaaaaaatcccaatctcgtgtcaccgcacagtcagcctttctcctcaaaagcaatttcasttgaacaaaggctattcaggaaaagtgcactaaatatatccratttaacagcctcttcagtcctgaaactctgtcctggagctatttccccatacttaagtcagacctcaccaccctgggcacatcacggagaaastgagggacttttgcaggctgccagtgaacagcctctgtactgctcactgctcaccactgtgctgtttactatgtgatttcaaagagttaaattacaacaagcaggtgttacacatcagagctccgggtcctgaaagagctgagcaagtcagcaagcttttccaagtctgtcttggagcacaccccaagcaaaagggcctgaaaaga

SEQ ID NO: 37937 - DNA, 590 bp, Chicken  19866894268351_8
ggataagctgaccacctaagcagcaggacagggaatgcatatgcaaagggagggaaggacaacgttttcagggtaaataagacagaggaagtaagctgagaaccaaaaaaatcccaatctcgtgtcaccgcacagtcagcctttctcctcaaaagcaatttcasttgaacaaaggctattcaggaaaagtgcactaaatatatccratttaacagcctcttcagtcctgaaactctgtcctggagctatttccccatacttaagtcagacctcaccaccctgggcacatcacggagaaastgagggacttttgcaggctgccagtgaacagcctctgtactgctcactgctcaccactgtgctgtttactatgtgatttcaaagagttaaattacaacaagcaggtgttacacatcagagctccgggtcctgaaagagctgagcaagtcagcaagcttttccaagtctgtcttggagcacaccccaagcaaaagggcctgaaaagaacaacctgtgaaaatagatccgagtcatcgaaccatagaatcattaaggttggaaaagaccactgagttcatcaagtccaagtt

SEQ ID NO: 37938 - DNA, 600 bp, Chicken  19866894268352_1
gcgaattctcatctataaaacactatttttcagcatagtcaccaccattagccaattcacatggatgagctaatcaaaatgcttttcattttgtggtgtgacagctgtgcacggctttctggaacttgtctcgcatttcatatcactgtctccagtgttgaaacacaccacccactgcctcactgtgctctcattcattgtttggtttccataaatgtctagcaagcatgaatgaatgccaataggtgctattttttcctcatggaggaattaaatgacacacttttgcttcatttgcasttccatgtcaggcaccatttggtcaaactgcccctctgctgtcatcacacaacaacaaaatgtaacagaaaattggtgggaaggttcaacttctactgccataccaccaccattcatctctgaagtcacagaccaacataataggaggtattatatttagaacagccctcgtacattcaagaaaatggtcccagaacttgcacattttaactgagtataacattactaaatcaattttcttcactgtcttcatatgtagaagttcaaataccttaaagaacaaaagatatttgaagaaaa

SEQ ID NO: 37939 - DNA, 600 bp, Chicken  19866894268352_2
tgtagaagttcaaataccttaaagaacaaaagatatttgaagaaaatattctcagtagtgaaagttgcatatttaaattcaacatacagctcatggaagacttactcagaaaatgcagccaatatagcaaaaaaatcacaagaatttatgggagtgtgtgaaaagtaacagaatcaggttttctagttttagttatactggatgctaagatgctgaatatatataggaaaattatattgtaaataccatttgagattagtgaaatgtaatttatatttgcaaaaacagtagcaaagaatygtcaatttattttgtgtaakgttttctcttccccacaaaagctgcaataacaaaagaggccagttgcacatgtacggaccttacctggacggcctcccaatgacattttgaatcaaatccagaatatttcattctacaactttggtactccagataaaaggaatatttctaatacctgttagtataatcaacctatatatttccttttttttcaggtttccaattgtcatataaaagtgtaattactaattcttgattaggaataattttatcttgcgaggacaatgctcatatattaca

SEQ ID NO: 37940 - DNA, 600 bp, Chicken  19866894268352_3
aaagaacaaaagatatttgaagaaaatattctcagtagtgaaagttgcatatttaaattcaacatacagctcatggaagacttactcagaaaatgcagccaatatagcaaaaaaatcacaagaatttatgggagtgtgtgaaaagtaacagaatcaggttttctagttttagttatactggatgctaagatgctgaatatatataggaaaattatattgtaaataccatttgagattagtgaaatgtaatttatatttgcaaaaacagtagcaaagaatygtcaatttattttgtgtaakgttttctcttccccacaaaagctgcaataacaaaagaggccagttgcacatgtacggaccttacctggacggcctcccaatgacattttgaatcaaatccagaatatttcattctacaactttggtactccagataaaaggaatatttctaatacctgttagtataatcaacctatatatttccttttttttcaggtttccaattgtcatataaaagtgtaattactaattcttgattaggaataattttatcttgcgaggacaatgctcatatattacagttagtgcatcacagaagat

SEQ ID NO: 37941 - DNA, 600 bp, Chicken  19866894268354_1
gcagtattctgcaatcagcacataggaagcagctttactggcagcatgtgagccagtttaggaaccagttcattcccaaccgcgggtgccttatagtgttaaggttcctctaaacaaatcaggaagatctattttagggatgtgtcaccttgagaaagatgaggctgctccttacgttgacatggtgttaactacagaattctatctttaattttcacattcatatcttaagttcactgaggtaaaaagctgatgcatctgtacctgttgtgtagcagggaagaagaaaagcccacacawttatgtttcttccctctttctagaggaaaggtttcctcatttgtacattagagaatgtgtaggttggggtgcgctgtatcctgacggctgctgttcagactgtgccccaaaggggagcatgtaaaggtggcattagactttcatttctatccatgtagtttgaaatggatgttgtggccagtttagatcttgaagggtgttgtggggatggggaaaaaggagaattgacttttgtgagttttttgtgacacaactctaaatccatttggtgttttctgtgggctcttgatcccaatcttg

SEQ ID NO: 37942 - DNA, 521 bp, Chicken  19866894268368_1
gcttcaatgctaccagtaacagtgactctttgaaaatgcatgagcggatacacggtgggaagagtctggttgccactgctgtccaggcaatacaggtacagtttgtatggggagagctcagcataacaggtttgccagtagctgtcattgtctcttctaatttctaagtatcccttcttcagaatatttgggaacgttggcttgtgttctagaagaaacaaaatgagaacattaattcattttaaacaacatctcactttgctcaatcatattggcttaaacttttctactgatcatacrtgatgtattcagaggctaagaccatagaaatagcctttatccaatacactatgattacaaaatacaagcgctgactatcaaaaacatagcacttccttactgagagatgccaaagcactttacagagaggaggcaggggaaaaagggacaaaggaaagtaatttttcagcaataatccggtagaagtgacacagcaaccaagactgcaagcctctcagaac

SEQ ID NO: 37943 - DNA, 600 bp, Chicken  19866894268370_1
agtgttatcgaacagctgacagagcagacaggagctcagctggcttgggcaagctctgctgcaatgggcttttgagactctgggcagcacattcagttgttgtgcatcttttgcggtctgcagcgtggatgaggtgaatgtgaagaggatggaggaagggacaaaaattccaccttcttgagaagctgtgcttatcagtacaggcatggaactctatacaaaatgtgtccgtgtatatgacatgaagctgctgttatagcagactctggaaagagtctgtctagaggggagggtttgcaycatactttgagtccgttgtgatgggaagtgagaaagacaggatccaaggtaattcatgctgtaygtacatgtgcacgcattcttatttgggagtggaaggagctgtgccatgggttcaagtgcccactcaggagagaggaggtgaaggattcaagcatgacatcttgctattgctggactacttccagtgacattgtgggtgtaagctatttggrcaccacataccaaaacaaaaaggaaacgaatgctttcaaaatctgacaaaatctaaacaaatatgcttcgctttctagagaaatc

SEQ ID NO: 37944 - DNA, 600 bp, Chicken  19866894268370_2
tgggcttttgagactctgggcagcacattcagttgttgtgcatcttttgcggtctgcagcgtggatgaggtgaatgtgaagaggatggaggaagggacaaaaattccaccttcttgagaagctgtgcttatcagtacaggcatggaactctatacaaaatgtgtccgtgtatatgacatgaagctgctgttatagcagactctggaaagagtctgtctagaggggagggtttgcaycatactttgagtccgttgtgatgggaagtgagaaagacaggatccaaggtaattcatgctgtaygtacatgtgcacgcattcttatttgggagtggaaggagctgtgccatgggttcaagtgcccactcaggagagaggaggtgaaggattcaagcatgacatcttgctattgctggactacttccagtgacattgtgggtgtaagctatttggrcaccacataccaaaacaaaaaggaaacgaatgctttcaaaatctgacaaaatctaaacaaatatgcttcgctttctagagaaatctgcttcttgtattcatggtttgtaaggcacttggagcacaccaccaagccttgttatgtgagaa

SEQ ID NO: 37945 - DNA, 600 bp, Chicken  19866894268370_3
atacaaaatgtgtccgtgtatatgacatgaagctgctgttatagcagactctggaaagagtctgtctagaggggagggtttgcaycatactttgagtccgttgtgatgggaagtgagaaagacaggatccaaggtaattcatgctgtaygtacatgtgcacgcattcttatttgggagtggaaggagctgtgccatgggttcaagtgcccactcaggagagaggaggtgaaggattcaagcatgacatcttgctattgctggactacttccagtgacattgtgggtgtaagctatttggrcaccacataccaaaacaaaaaggaaacgaatgctttcaaaatctgacaaaatctaaacaaatatgcttcgctttctagagaaatctgcttcttgtattcatggtttgtaaggcacttggagcacaccaccaagccttgttatgtgagaaaggaaatgttagcacagagacagactgggcattgcttcgttatagttctctaaagacataatagtcattcacctactaatagaatggctactgacttgctggtgtttttgagcagtgtgtccgaatgctgtcagcaaagatttagctcccc

SEQ ID NO: 37946 - DNA, 600 bp, Chicken  19866894268372_1
ctctccatcccaccaaggtgatgagctcccaccaggcagaccactgggcaaggaccacatctccatgtcatccctggtcatctcctggggccacgacatgcctcatttcagcctttatctactttgcaaaactgctctggaaactcaactgagccttctgagagtatctacaagaaaaactctacgtaatcataccaccctctaagagggcataattatcagctctttaggaaaaggaatactaagggcatcgatccaacactgcaacctctctgccaagcccaagcacttggacaaatwttctttccacaagcttcaaagctggtcagaacgctgcccagggctatgggatttcactgccctgcactatctaggacacagatctttgctgcacaactgtactcccattctacaggatgcagccctcggctgttagcattacgaacacaaaccacagcaccttgaagaattaagtacatgacatagactaagtacagaaggaataaccttaaaagacttgtctcctgcagcacaaacatgtggagcaggccacctactccttcaagacctgggcagtgtcaaaatgcctccatagagtca

SEQ ID NO: 37947 - DNA, 600 bp, Chicken  19866894268375_1
actgattatatgagtagttttatttgctttactgtcacctggatcagtgctcaacaaacatgcacaaacattcaatctcttctgagaaagagggcataatggtgcttaaatatttactctgcaactgttcagagtgcttctgcactagccagtgccttggttaatgaacacatcatacaacacatttgaatataagaaataaaaatcacagcaatcataaccagaagatgttacactgggaagagacagaaagtgtgtttaaattcccatttttaaggcataactaagccttgcctcccygtgccagctgtgtcttacttgcaggtttccagaatgcctctgacatccactatgaatgtagtgccaacctaaacaccaaattcacaacttctcttttgaagaaggtctgtttacagatgaatagcttttttatcaccattgcccattccaaaaaacccgagaattcaggayttcaaacagacagcatttggcagtaaccacaaggacctctcactgttcttcattctccctttctccaccttccttttctttttctggcttcaacaccctctgtcctgtgctgcagagaatcagtgtgca

SEQ ID NO: 37948 - DNA, 600 bp, Chicken  19866894268375_2
atcatacaacacatttgaatataagaaataaaaatcacagcaatcataaccagaagatgttacactgggaagagacagaaagtgtgtttaaattcccatttttaaggcataactaagccttgcctcccygtgccagctgtgtcttacttgcaggtttccagaatgcctctgacatccactatgaatgtagtgccaacctaaacaccaaattcacaacttctcttttgaagaaggtctgtttacagatgaatagcttttttatcaccattgcccattccaaaaaacccgagaattcaggayttcaaacagacagcatttggcagtaaccacaaggacctctcactgttcttcattctccctttctccaccttccttttctttttctggcttcaacaccctctgtcctgtgctgcagagaatcagtgtgcacaggttgtgaaaccacgctgtgttgcatagacagatacaaagcacaagagaaatgttatgctctgcatagggctgctagcttgtatggagaagctgtggaaaaaactgcttgggaagctacatatcaggtgtccatgaggtactcacagatgtgacacaaagcattaccaa

SEQ ID NO: 37949 - DNA, 600 bp, Chicken  19866894268384_1
gctcctatgtccccatcccaccccctccctctttgcaatacgaggccaagagacctccaccaaccatggagcatcccagggtgtacctgggaagacaaagatgaagcaggcggccaagcctccaatgacagatatgactttgccaatgtcagggatgaagagagccaggaggagagtcaggaggaaccagctaatggtctgaagcaggcgtctcctccgctcccgaaccacgtcctcctccaccgtcactccggtgtagcggagccagaggccttccaggacagccctgtgggcacagasccgtgggaaggaaggagggttcccagcagtgcccmcctgcctgcgccagccccactgcctctcctcactcaccggccgcagaagtgcaggatggggtaggacgtcagcacacacaggatgatgaaagcccgagcgagggcgactgggatgtcattggaggggtaggaaagcaacacatcctggtccacgctggccccaaaggtcaggaagccacagacacctgccagggaagggcacactcagcaggggacagggaaagaccctcctggacgtgtgttcaggttacctctgctgaccaga

SEQ ID NO: 37950 - DNA, 600 bp, Chicken  19866894268384_2
caatacgaggccaagagacctccaccaaccatggagcatcccagggtgtacctgggaagacaaagatgaagcaggcggccaagcctccaatgacagatatgactttgccaatgtcagggatgaagagagccaggaggagagtcaggaggaaccagctaatggtctgaagcaggcgtctcctccgctcccgaaccacgtcctcctccaccgtcactccggtgtagcggagccagaggccttccaggacagccctgtgggcacagasccgtgggaaggaaggagggttcccagcagtgcccmcctgcctgcgccagccccactgcctctcctcactcaccggccgcagaagtgcaggatggggtaggacgtcagcacacacaggatgatgaaagcccgagcgagggcgactgggatgtcattggaggggtaggaaagcaacacatcctggtccacgctggccccaaaggtcaggaagccacagacacctgccagggaagggcacactcagcaggggacagggaaagaccctcctggacgtgtgttcaggttacctctgctgaccagagcgtctgtccccaggagctcacagctcctccaagg

SEQ ID NO: 37951 - DNA, 600 bp, Chicken  19866894268390_1
cttgttccgagctgatagcttcagtgagtgagcatatacgagctggttggtgtgatatagaggactgccacggtacttaatcatttccttgatgtctaccctttgggacaggccaaagagagagatgcttcttctgtagcgctgttggtggctttgccttgctgatggatgcccatgttgtcatcttctgtgtgatggagagaccagttatccaattgtttgtaaaactgcttttttaagttctatttgcagcgtccactgaatgtgaaaaggttactgacttgatgaaaagcgtagggygcaataaaaacagtgcgtagctcttcctgcagcatgrgattaccctagtataacaaagtgcctattcaataaataattgaaatgtatgtgagccgccatctggtgctgcagagtggggatagaagtttataatccaggctctccctggtaaagggatgggcctaagtctggactgctgtatatttgtgttccgtcagccgggaatacccttaaaagcaattaaagctgatactgtgggttcctcccttcccttcaagctgttaaaagcaagaaaatgccaacgagacaccttttatctgt

SEQ ID NO: 37952 - DNA, 600 bp, Chicken  19866894268390_2
acgagctggttggtgtgatatagaggactgccacggtacttaatcatttccttgatgtctaccctttgggacaggccaaagagagagatgcttcttctgtagcgctgttggtggctttgccttgctgatggatgcccatgttgtcatcttctgtgtgatggagagaccagttatccaattgtttgtaaaactgcttttttaagttctatttgcagcgtccactgaatgtgaaaaggttactgacttgatgaaaagcgtagggygcaataaaaacagtgcgtagctcttcctgcagcatgrgattaccctagtataacaaagtgcctattcaataaataattgaaatgtatgtgagccgccatctggtgctgcagagtggggatagaagtttataatccaggctctccctggtaaagggatgggcctaagtctggactgctgtatatttgtgttccgtcagccgggaatacccttaaaagcaattaaagctgatactgtgggttcctcccttcccttcaagctgttaaaagcaagaaaatgccaacgagacaccttttatctgtgtcctaatgccctcacagcgtgtttccactgacaagg

SEQ ID NO: 37953 - DNA, 600 bp, Chicken  19866894268393_1
tatctcagtacaaaaaacagtgcagcacggagtcttagcataagagaaaattagcccacaggaaatgcaacccttaataaattttcaaacattgagttgtaaatggtgtttaacagctatatttgcttcctaagtatgactcttaccctacaagtagtgacccatagtattgcactggtttatatatcactttacatattttttaaccacctaaacgggaatattttgtttaagctttgcttgactgagacagacaggaatctcttggaggctgcatggtcttagctcagaaaacatttyaaaatgggatgaactgccactggacattcctcttcccaccctgtcttccctgacaaagtctagatctagaaacagaaatgtgcaaccatccttcaagacagaggcagtgtgtttactaccactggtagggttttatttctagaataaatgacacacacacaagatccacaggtgcttcagaagacgtgacagacttgtgggaaccgcatgatgttttccgctactatctgcaaagcaggaatagtcacagaaaaagatgcttgggaaaatcatgccattagctgaagactttgcaaaatc

SEQ ID NO: 37954 - DNA, 600 bp, Chicken  19866894268399_1
cccccactaggaatactcagataataccaaatgggaagtacttgaacagaatagatgttcctccatctacctattcttaacctgcaaagtattttctatctggatgctgtacagtgagcaagatgaagtattttgtcacacactgttgaaaatctattactttatcaatcaaacatgtaatcctgtcagagaatgaaatcaggtttgtgtgatatggcctattttctcaaaaatcatcatgtttattcttggctctttgatttgtgatcagtttagtcagatatcatctttccatttacrcttgggattgatgtcaggtgagtgccctataattactcagttctttagcatgcccttttgacaactgttgtgttttcagcactccttctgaaatatccaggtattccaagtgttattaaaaatgactatcagcrgggctaagacatctaaggctttcttgaagtggatgggtataagttccctcctgaatttgaaaacttatctactagagaaagccattgggctacctttctaggtagtatgcagtctggaaatgacatcttaatccccrcaggacgtgtctttctgaatgggaaacag

SEQ ID NO: 37955 - DNA, 559 bp, Chicken  19866894268399_2
gtcacacactgttgaaaatctattactttatcaatcaaacatgtaatcctgtcagagaatgaaatcaggtttgtgtgatatggcctattttctcaaaaatcatcatgtttattcttggctctttgatttgtgatcagtttagtcagatatcatctttccatttacrcttgggattgatgtcaggtgagtgccctataattactcagttctttagcatgcccttttgacaactgttgtgttttcagcactccttctgaaatatccaggtattccaagtgttattaaaaatgactatcagcrgggctaagacatctaaggctttcttgaagtggatgggtataagttccctcctgaatttgaaaacttatctactagagaaagccattgggctacctttctaggtagtatgcagtctggaaatgacatcttaatccccrcaggacgtgtctttctgaatgggaaacagagtgtgagtcattccgtaacacctctgccgcatttctactccttttccctggcaaggctgtatgtgacatttgtacgttccaacacataaaca

SEQ ID NO: 37956 - DNA, 422 bp, Chicken  19866894268399_3
tttagtcagatatcatctttccatttacrcttgggattgatgtcaggtgagtgccctataattactcagttctttagcatgcccttttgacaactgttgtgttttcagcactccttctgaaatatccaggtattccaagtgttattaaaaatgactatcagcrgggctaagacatctaaggctttcttgaagtggatgggtataagttccctcctgaatttgaaaacttatctactagagaaagccattgggctacctttctaggtagtatgcagtctggaaatgacatcttaatccccrcaggacgtgtctttctgaatgggaaacagagtgtgagtcattccgtaacacctctgccgcatttctactccttttccctggcaaggctgtatgtgacatttgtacgttccaacacataaaca

SEQ ID NO: 37957 - DNA, 600 bp, Chicken  19866894268401_1
tcctagcttttgtaaaagttttaactgaataggtattcagagtaatgtttactttccccccagtgtctatagaaataaaacactgccaattaatcagggaaatgttttttagacatttggcacaatttaaaatataattgcaagaacactgaaaattaaataatataaaatgcttcatctctgaaacatctgaagctaaaatatgtatttgtacactgctgcaagtattaactcatgtactttgttatattgcctttccacatttgtacatgatgcatacaacaattctttctttgactytgtgctttttcttccaggtttggatttattcttcataaagatgagcctgtgctccagaaaattgatcttgaaactatgtcgtacatcaagacaattagtttaaaggattataattgcattcctcagtccctggcttatacacatcttggaggatttttttttatctactgtaaacctgataccactgggtgctgttctaccacaacttatagtggatagtgttactgattctgtgattggatacaatgggtgatgtaacaggcagaccctcacgtctctccagatggacactacctttgt

SEQ ID NO: 37958 - DNA, 600 bp, Chicken  19866894268406_1
aggtggataaaggaactagagcaaacaagtgaagagagtggtttatcatggtgaagagagcgctgttctgcactcccttggggtctcactcccactgccaggaaaatcagcttgacctggagcactcattaacaggcctctttaggccaactgtctacctaccatcttttcacaataaatcttccagaatttaattgtatctgagctgtgatggatgaggcatacaataaaacaactgacacctgaagttccagttttccttagaaaaagaaaaaaaaacaaccatcagtgcaagcacartagcatgcaggagttatgaagatcacaggcccagtatgtggggctgtcattgacaacactatttctaggatctacaaagtactttaaaaatgtcacatgaaataagtgagcacacattccatgaaactgatgtatgagtctgatcccatacaacttcatataacaattgatgcttcaaggacattgttttactggggctgctttctgtatgtccaaataaattaaaatcctctgcagtcattttartctactactgcaaaaaaactcctgcaaggcactcagtgttagccaagtcctcat

SEQ ID NO: 37959 - DNA, 600 bp, Chicken  19866894268406_2
agttccagttttccttagaaaaagaaaaaaaaacaaccatcagtgcaagcacartagcatgcaggagttatgaagatcacaggcccagtatgtggggctgtcattgacaacactatttctaggatctacaaagtactttaaaaatgtcacatgaaataagtgagcacacattccatgaaactgatgtatgagtctgatcccatacaacttcatataacaattgatgcttcaaggacattgttttactggggctgctttctgtatgtccaaataaattaaaatcctctgcagtcattttartctactactgcaaaaaaactcctgcaaggcactcagtgttagccaagtcctcatttacactaaataaattcagcagataatcagttgtgaacattttcttcctgatttattcccccagtttaaccatatgcctgattgtgatgtgcaaagaaatatgcattattgaattgctgcaatgactggcactagaggaaacaagcaatccactgcctagatagcttctgtgtcttgtgatcaaagttttatctgtgtaattagcaactgtccaatgcagatagatgaatccatacaacaggagtc

SEQ ID NO: 37960 - DNA, 599 bp, Chicken  19866894268413_1
  misc_feature (1)..(125): n is any nucleotide
nnnnnnnnnnnnnnnnnnnnnnnnnnnnnnnnnnnnnnnnnnnnnnnnnnnnnnnnnnnnnnnnnnnnnnnnnnnnnnnnnnnnnnnnnnnnnnnnnnnnnnnnnnnnnnnnnnnnnnnnnnnnnctccttgtagtgaggggcccaaagatgaacacagcatttgagatgtggtcttactaaggctgagtacagagggatgattacctccctgcttctgctggtcacaccttttctaattcaagcttggatacgatgccgtgggctttcatggccacctggacacactgctggcttatgytgagcctgctgccaaccagcaccctcaggtccttttctaccaggcaactttccccaagcctgtgtcaagtgcagcacctagcacttacctttgttgaatgccatacatctgtgtgtggctcctctatccagattyctcttcaaaacattcctgccctcaagcagacaaacagtcccatctaacttggtatcacctgtgaacttcctctcatccagatcgctgataaatatactaaaccagatccagtactgagccctggggagtgccactggtgactgtctgacaaccaggctgatctc

SEQ ID NO: 37961 - DNA, 600 bp, Chicken  19866894268413_2
tgaggggcccaaagatgaacacagcatttgagatgtggtcttactaaggctgagtacagagggatgattacctccctgcttctgctggtcacaccttttctaattcaagcttggatacgatgccgtgggctttcatggccacctggacacactgctggcttatgytgagcctgctgccaaccagcaccctcaggtccttttctaccaggcaactttccccaagcctgtgtcaagtgcagcacctagcacttacctttgttgaatgccatacatctgtgtgtggctcctctatccagattyctcttcaaaacattcctgccctcaagcagacaaacagtcccatctaacttggtatcacctgtgaacttcctctcatccagatcgctgataaatatactaaaccagatccagtactgagccctggggagtgccactggtgactgtctgacaaccaggctgatctccattcrcagtgacccttcgagcccatccagccagccacttcttcacccagcaatctgtatacctgtccaagccacaagccacagtttcttcaggagaatactatgggatggtgtcaaatactttactaaaatccag

SEQ ID NO: 37962 - DNA, 600 bp, Chicken  19866894268413_3
ctgctgccaaccagcaccctcaggtccttttctaccaggcaactttccccaagcctgtgtcaagtgcagcacctagcacttacctttgttgaatgccatacatctgtgtgtggctcctctatccagattyctcttcaaaacattcctgccctcaagcagacaaacagtcccatctaacttggtatcacctgtgaacttcctctcatccagatcgctgataaatatactaaaccagatccagtactgagccctggggagtgccactggtgactgtctgacaaccaggctgatctccattcrcagtgacccttcgagcccatccagccagccacttcttcacccagcaatctgtatacctgtccaagccacaagccacagtttcttcaggagaatactatgggatggtgtcaaatactttactaaaatccagggagacaacatccacagcctttcccttatctactaagtgggctatcttgtcatagaaggagatcagattagtcaggcaggacctgcctttcataaactcatgctggctgcttcggatcacttgattgtcccaatagtatggtgtcatgacattcaggatagtctgctcca

SEQ ID NO: 37963 - DNA, 599 bp, Chicken  19866894268416_1
  misc_feature (1)..(152): n is any nucleotide
nnnnnnnnnnnnnnnnnnnnnnnnnnnnnnnnnnnnnnnnnnnnnnnnnnnnnnnnnnnnnnnnnnnnnnnnnnnnnnnnnnnnnnnnnnnnnnnnnnnnnnnnnnnnnnnnnnnnnnnnnnnnnnnnnnnnnnnnnnnnnnnnnnnnnnnntcctgtttaaaacaaatgttgcaaagggcttaccagcacaatgaagaaaaaaggagagaaaacaacaaagctcaccattacttgtgtccatatttagatcagtgcgtacgcaccccaggagaatctccagcccctgccaatgaggtcmttatggrctgatccaaaacytggggagtggcacaggagagctcctcatcactgctaccaaagataagggagcccttgagttcagcctgggagtctcaagctgactgcaactaaacccaggatttgtcactcaggcttcaagtgtggattttcagctaacgaacactgcgtatgcactgaaattccttgactttgagtgtttctgctctgcagtaaacagagattttgtgcctgagatttttctacataaatatttacagcaaaatttgcggctactggtcagatgagaatgtttgttgt

SEQ ID NO: 37964 - DNA, 599 bp, Chicken  19866894268416_2
  misc_feature (1)..(145): n is any nucleotide
nnnnnnnnnnnnnnnnnnnnnnnnnnnnnnnnnnnnnnnnnnnnnnnnnnnnnnnnnnnnnnnnnnnnnnnnnnnnnnnnnnnnnnnnnnnnnnnnnnnnnnnnnnnnnnnnnnnnnnnnnnnnnnnnnnnnnnnnnnnnnnnnntcctgtttaaaacaaatgttgcaaagggcttaccagcacaatgaagaaaaaaggagagaaaacaacaaagctcaccattacttgtgtccatatttagatcagtgcgtacgcaccccaggagaatctccagcccctgccaatgaggtcmttatggrctgatccaaaacytggggagtggcacaggagagctcctcatcactgctaccaaagataagggagcccttgagttcagcctgggagtctcaagctgactgcaactaaacccaggatttgtcactcaggcttcaagtgtggattttcagctaacgaacactgcgtatgcactgaaattccttgactttgagtgtttctgctctgcagtaaacagagattttgtgcctgagatttttctacataaatatttacagcaaaatttgcggctactggtcagatgagaatgtttgttgttctcagc

SEQ ID NO: 37965 - DNA, 599 bp, Chicken  19866894268416_3
  misc_feature (1)..(132): n is any nucleotide
nnnnnnnnnnnnnnnnnnnnnnnnnnnnnnnnnnnnnnnnnnnnnnnnnnnnnnnnnnnnnnnnnnnnnnnnnnnnnnnnnnnnnnnnnnnnnnnnnnnnnnnnnnnnnnnnnnnnnnnnnnnnnnnnnnnntcctgtttaaaacaaatgttgcaaagggcttaccagcacaatgaagaaaaaaggagagaaaacaacaaagctcaccattacttgtgtccatatttagatcagtgcgtacgcaccccaggagaatctccagcccctgccaatgaggtcmttatggrctgatccaaaacytggggagtggcacaggagagctcctcatcactgctaccaaagataagggagcccttgagttcagcctgggagtctcaagctgactgcaactaaacccaggatttgtcactcaggcttcaagtgtggattttcagctaacgaacactgcgtatgcactgaaattccttgactttgagtgtttctgctctgcagtaaacagagattttgtgcctgagatttttctacataaatatttacagcaaaatttgcggctactggtcagatgagaatgtttgttgttctcagcatttttgggcaca

SEQ ID NO: 37966 - DNA, 584 bp, Chicken  19866894268422_1
cagaaaagggaggctctttaacagcaagagagagtttagtaacttagtgaagaaagctgaatgatttactttggctacatgactgcttcttcccagaagtgtatcagctatggtgtagtaatcccaggtacaaccattcctttccaagctttgctccttgtcatactaatgcacttcaataagtaagactagagaacatgttaaaattcaacaggacatccaaattccttgttacaaatccctcaagctcctgaactgttatctgtctaatctgatttgtgatgtactcatcactggaaygtgtggatactgacccagtagggccaaggactgaaatatgaatgagaagtgaagagagaagagccacagaattcaccctgctcatcttcccgttagctgttcccttttctcacctgtttgcagagccttggcaataccctgcctattgcagccagtagaactttcctaactctgccctttcccttaccagctgcagccagtggctggagaaatgcttcccaaggaagcaaacctgtcacccctgggtaggcctggctctgtgattttataaattgggtgccatt

SEQ ID NO: 37967 - DNA, 599 bp, Chicken  19866894268433_1
  misc_feature (1)..(216): n is any nucleotide
nnnnnnnnnnnnnnnnnnnnnnnnnnnnnnnnnnnnnnnnnnnnnnnnnnnnnnnnnnnnnnnnnnnnnnnnnnnnnnnnnnnnnnnnnnnnnnnnnnnnnnnnnnnnnnnnnnnnnnnnnnnnnnnnnnnnnnnnnnnnnnnnnnnnnnnnnnnnnnnnnnnnnnnnnnnnnnnnnnnnnnnnnnnnnnnnnnnnnnnnnnnnnnnnnnnnnnnnataatagaaaagaaaaacccaaatacttgactatctttgtacacgagaagctaatcagcctcatcagccgtctctcagcttccktaatcctacaacattatgtcagtgtttgaggaccaagactgattattgttcagtcctataatttgagagcattcataacgagcactgaagcccaatgcttaatggagagcttttttcagtggaagcacagatgtgacaactaaacgtgccctaagacttgtactacaggttttaatttctaatactcttcatgtgctcatttgcaggtctagacctataatgctttgttagcttgaacagctgtgtttttacggctggactagatctgaatgaaagtttaaaggcttgtgtgtagttat

SEQ ID NO: 37968 - DNA, 599 bp, Chicken  19866894268452_1
  misc_feature (1)..(28): n is any nucleotide
nnnnnnnnnnnnnnnnnnnnnnnnnnnnctggcaatggaaatagtggggtaatttgagcagatctattggtaggtcttgaggactgttacctaattaaaagatgaagaggaaagacggcctgctggaactgctgggatgataagtgcaggttgggtgaagagatgagaagggagtaggaactgggtgtagtaggcagagctggacttgagagaagactaaaagaaaaagatatgtcaagcttagcaggggtattaaagtgagagtcctgaatcatgaaaacactgcatggaggtgtgagkaakgagtctgagatggaacagcagcagaactagtgggaccaaatttggagaaactgaacagaaaaaaagtatgccaattttgatacagtccatgaaaagtaaacaaacttgttcagcaaatcttgctattttttccctgctttctgcaaatgtgcacttaaaaaatatatatttattacttttcttccccatgcaatttctctttcaatgcataaggaagagtaactctagagttacttagtaagatgccagtgccaaatgtatttgctttatctaccaatgcagttggaagctgtgta

SEQ ID NO: 37969 - DNA, 599 bp, Chicken  19866894268452_2
  misc_feature (1)..(25): n is any nucleotide
nnnnnnnnnnnnnnnnnnnnnnnnnctggcaatggaaatagtggggtaatttgagcagatctattggtaggtcttgaggactgttacctaattaaaagatgaagaggaaagacggcctgctggaactgctgggatgataagtgcaggttgggtgaagagatgagaagggagtaggaactgggtgtagtaggcagagctggacttgagagaagactaaaagaaaaagatatgtcaagcttagcaggggtattaaagtgagagtcctgaatcatgaaaacactgcatggaggtgtgagaaakgagtctgagatggaacagcagcagaactagtgggaccaaatttggagaaactgaacagaaaaaaagtatgccaattttgatacagtccatgaaaagtaaacaaacttgttcagcaaatcttgctattttttccctgctttctgcaaatgtgcacttaaaaaatatatatttattacttttcttccccatgcaatttctctttcaatgcataaggaagagtaactctagagttacttagtaagatgccagtgccaaatgtatttgctttatctaccaatgcagttggaagctgtgtaata

SEQ ID NO: 37970 - DNA, 600 bp, Chicken  19866894268467_1
aagccatgatgctgagaaaagatgctcattttcctttagttggtcttcagtccctgactactgaaagtgctcattcatagcaaaatctttcccaagctagtcatcagtttcataggtctatcttgtttcctgtagaaaatggacgtcatcatggaaatatgtcttcagaagcacggggaatatcctcctggacatccctcagggaaacaataccttcctggcttcatgtgaaacctctgcttgttttactgtaaaaatcttattatctatcacacactacttacagctgttcttatatckgagcaaagaacrtttaatttctctgccaagctcactggatttcacaaattcctttttcctacaacctctaaattgcccagctggcacttgaactaccaccatgtccatgattttctagttgccatcttaaggccaaatacattagttgctccgaaagtaatgcctcctgtttatttccatgcaaactacaacagatacagtaagcacaataacactatttgatagagcaaattctcaactctaacattatttttcaacatagtcaccgcagtgactatagcttgcaatatgcacactgtt

SEQ ID NO: 37971 - DNA, 600 bp, Chicken  19866894268467_2
tgagaaaagatgctcattttcctttagttggtcttcagtccctgactactgaaagtgctcattcatagcaaaatctttcccaagctagtcatcagtttcataggtctatcttgtttcctgtagaaaatggacgtcatcatggaaatatgtcttcagaagcacggggaatatcctcctggacatccctcagggaaacaataccttcctggcttcatgtgaaacctctgcttgttttactgtaaaaatcttattatctatcacacactacttacagctgttcttatatckgagcaaagaacrtttaatttctctgccaagctcactggatttcacaaattcctttttcctacaacctctaaattgcccagctggcacttgaactaccaccatgtccatgattttctagttgccatcttaaggccaaatacattagttgctccgaaagtaatgcctcctgtttatttccatgcaaactacaacagatacagtaagcacaataacactatttgatagagcaaattctcaactctaacattatttttcaacatagtcaccgcagtgactatagcttgcaatatgcacactgttgctcagctctag

SEQ ID NO: 37972 - DNA, 600 bp, Chicken  19866894268468_1
ataacatttccaaggaagcccttgacgtgactagaaaaatatcgaggacaattaagtcacatggcactcacagccctgtgggaacggccttgagctctgctgcaggactcagatagcatgagaaaacctggttcaaacggagtagcaagagtctaggaggtagtaattattaaagatctcctggttaaagatcctctggggtccctctattattttaataatggttcgagccaactttagtgcttccagaggaaaagaatgagaggggtctgttagcacaaaggaggcagggctcatcaygaggggagctggggggggttggctgcccctaacatcgttcactggggaacaagagcgtgttgctcacactaccttgggtgtccaggtaggttttgtctctcacttgtatccagtcttactggatggagcaatgccatgagcagaggttgttgcgagcaggacatcatcatggggccacccactgctttattacagatgctggcccattggtgtttgtagggtgccagcatcagtgctcctggtcttggttccaccaagtccctggaggttcctccccaccagccctccagaaacgtgctc

SEQ ID NO: 37973 - DNA, 600 bp, Chicken  19866894268479_1
gtaggatttatgactgatttacttactctcagaaatgaatgcatttagagttgttatgaaaacccctgttgtcttaaataagctcttggtttcaacaatattattgagtttttgtgaggcacagtttccctcaatttaaaccactgtttttcatgggaaatttaattaaaaaacaagtatttcttactaaatggaagtcagtattacaaaaacagtggaggttttctgcagccagtgcttgtctggttctggcattagtgatggaattaattttaagagctctcatcttatgagagcaawccagaacctaaaaacttcaaatttgtttcggagccycattattattttccaaatctaaatttagcaagctgtttttctctcttcctaattatattgtctaccaagtttcaaaagctatctagttgaatacgttctttgtacatccttttctggtggctgctctccaaaggagaggtgtggagaccaccatctaccttaagagaatgtgttggtgaggggaaagggatgcttagcctggcacacaagagggacacacactcaactggcactgcagaaattggctcaactgcagcctcattg

SEQ ID NO: 37974 - DNA, 600 bp, Chicken  19866894268479_2
gaatgcatttagagttgttatgaaaacccctgttgtcttaaataagctcttggtttcaacaatattattgagtttttgtgaggcacagtttccctcaatttaaaccactgtttttcatgggaaatttaattaaaaaacaagtatttcttactaaatggaagtcagtattacaaaaacagtggaggttttctgcagccagtgcttgtctggttctggcattagtgatggaattaattttaagagctctcatcttatgagagcaawccagaacctaaaaacttcaaatttgtttcggagccycattattattttccaaatctaaatttagcaagctgtttttctctcttcctaattatattgtctaccaagtttcaaaagctatctagttgaatacgttctttgtacatccttttctggtggctgctctccaaaggagaggtgtggagaccaccatctaccttaagagaatgtgttggtgaggggaaagggatgcttagcctggcacacaagagggacacacactcaactggcactgcagaaattggctcaactgcagcctcattgctctctgtcctggctaaaactacccctggtgtgcca

SEQ ID NO: 37975 - DNA, 600 bp, Chicken  19866894268488_1
ttgctgttaatgggtgacgttaccactaacgatagcaagcagagctaccaagcctcattgcttggcagtcttatgttgtacatttcatttaactggagtcatacaccagcaaggaaagcatattgatcctgattagaggagagctgggcttcccctctctgttctgcgaagcagtgcattcttcccacagtagcttgggtggagaaaaagcaccaccagcagtttcataggaatgcagtttaaaaaaaaaaaagctaattataaattttcagagactgaggagaaaggtatcaaaacaarggagttcagagcaaggtgcatatggagttccttaagtgcagaatcatagaatgacatattgacttaggttggaaggggtcttgaaaaccatctaattccaatcccctgctctgggcagggatgccttgcactagatcagcctgcccaaaaccccattcagcctggccttcaacacttcagggatgggcatccacagctgcctctttgcaacctgtgccagagctccacaaccctcatcatgaaggatttctttccaatatctaatctaaaccttcccttttttagcttaaagtcttttcc

SEQ ID NO: 37976 - DNA, 600 bp, Chicken  19866894268501_1
gggcataccagaaacacatttaccctttatcagattagtcttacaatagtcctttccatatattccgattagacgcatttatcacacacacacaaaaaaagtaacatctaaaggctctttataataaaccttatttaaatctaccccacactttggttaattgtttctgagttaaggagcagctttttccatgaacaatagcaacgtgggaagatttcagcacatcacaggaaaccttgggaggaagcaaccaagacgagctggatggagagctcattttggtccttccagcttcctttyccaattctttttttactgtctaggactctggaagttttgatgccatctcaggaataaaaaaatctgtgtgtacagactacaataataactgaaaagactatcgtcttgcggctctgtgtattctacaacaatgagcacttcaacaaatataaataaaaacagcttttcctcttctgacttgtcccatggagatttcgttgggcctccacataatccaygggatttctgaagcttttagttttaaccaagtaatttgtacgactgcccgagacgcttccaaatgtgcagtaactggatttt

SEQ ID NO: 37977 - DNA, 600 bp, Chicken  19866894268501_2
agcacatcacaggaaaccttgggaggaagcaaccaagacgagctggatggagagctcattttggtccttccagcttcctttyccaattctttttttactgtctaggactctggaagttttgatgccatctcaggaataaaaaaatctgtgtgtacagactacaataataactgaaaagactatcgtcttgcggctctgtgtattctacaacaatgagcacttcaacaaatataaataaaaacagcttttcctcttctgacttgtcccatggagatttcgttgggcctccacataatccaygggatttctgaagcttttagttttaaccaagtaatttgtacgactgcccgagacgcttccaaatgtgcagtaactggattttggtacgctcccaaccgcctaattaaaaccatagaatagaatcattgggcttaggtgatttttaattcttctttcttcctccttttattttttaatcaaaagaaaccttctgagtcacatatccaggggattattccaaacagcactttggaaagggcacacactggaaatcctatatagcagcagaggagagttgtcacgcatgtgtgtagagctcgt

SEQ ID NO: 37978 - DNA, 600 bp, Chicken  19866894268509_1
gtctggaacctaaataactacatgcagctgtgctaactcagtttttaaattggctcaagagctgagctgggtagttaaaaaacaaaccagggatcggcaatgtatttgtgtctgaaatgggaggcacctggcggcaccatacaagctcatggaggtgtactaagcttcttatgacctcttttgcccaagtgtttgagggtttttcaggttgtaatggtaagggccacttcatagtgaggaatcacgaaagcacagaagaaattgtgaaaccagagactcacagtcttgtgacctgaagtmacagcatagatagctcaatttggtggcctacagcaaggctttggggactgtcaaattcaagggggactacatcattttgagaaaatgaagctactactttgcaaaattcatcatatatacacatgtgtacatccttgtggagaggcaaagaagaatagaaaaacctaaattagttgtaaagggaatctcaaatcattgtgtgaatggatgtgtaagttgtgaccatctggactagcaggaatcaagacgtatttatcaaggagaatctcctccaaaatatgttatcattagtgataagtc

SEQ ID NO: 37979 - DNA, 547 bp, Chicken  19866894268514_1
gaagctattgcttttgctgtcctttccttgtccacacttatactctgacatctccaaatcaacagggtctgaatcatggcttttgttacatgaaaagcaaatgaagggtttggtcaaagacagctctcagaagagctttgttctcactgcctaagctcagctggggtttcatgtcttcccagcccctttttcgctcattttttctccttacttgtgctgtgcagtgctggagatgaggaagggactgctcattagggctggtgggatcatggctgatgtctgagtgaatgagtgcttgcrtcctcacagagcatgctacatgcaaaaagccccatatcactgagggaaggaaygagagatgttatgtttgaacctctgaaccttgaaccctcagttgctaacgatgctgcaggaattagcacgtactcagcaactctgaacatcagtcacatcgaagtgataagcagcacaaactttttttatagtcagtcactgtggctcttttgttatcatctcggattaaacaattagccatttcaatctgctg

SEQ ID NO: 37980 - DNA, 494 bp, Chicken  19866894268514_2
ccaaatcaacagggtctgaatcatggcttttgttacatgaaaagcaaatgaagggtttggtcaaagacagctctcagaagagctttgttctcactgcctaagctcagctggggtttcatgtcttcccagcccctttttcgctcattttttctccttacttgtgctgtgcagtgctggagatgaggaagggactgctcattagggctggtgggatcatggctgatgtctgagtgaatgagtgcttgcrtcctcacagagcatgctacatgcaaaaagccccatatcactgagggaaggaaygagagatgttatgtttgaacctctgaaccttgaaccctcagttgctaacgatgctgcaggaattagcacgtactcagcaactctgaacatcagtcacatcgaagtgataagcagcacaaactttttttatagtcagtcactgtggctcttttgttatcatctcggattaaacaattagccatttcaatctgctg

SEQ ID NO: 37981 - DNA, 600 bp, Chicken  19866894268515_1
tggtctattcagaggtcctggaatagatggtcaagctagatctatttaagcactctagtcacatgaagtacaaaattaactgaccctacaagctataaaattgtatatcataatacaaaggagctctgttccaggtaatccaagtcagaactacagctgtgggtaacagcagcttgctcgttcctttcacaccgctggctcaatgtgactgctggtactgcactatgcagcacctacacctttcctgcaccaccaccactcacagccaccactctgcaacaaacaactttgctgcacacwccccccccargctgaaccccagcaatcayatactgcacaatgtcaagatcagaaacattatctatgcaagacaaactggtaaccattcaacacaarcaattaagtgtaagggtacattgtaaaaagtgattaatattacaattcatatgatctgcttagaaccatatacagattcacatctttacatttgccacctgttacaagatacaaggaacaaagcaagttcaacagctaaaacattttaaaaatgcaccaagctttatgaaattccaaaacaaaacaatgttctgtacatactcc

SEQ ID NO: 37982 - DNA, 600 bp, Chicken  19866894268515_2
agaggtcctggaatagatggtcaagctagatctatttaagcactctagtcacatgaagtacaaaattaactgaccctacaagctataaaattgtatatcataatacaaaggagctctgttccaggtaatccaagtcagaactacagctgtgggtaacagcagcttgctcgttcctttcacaccgctggctcaatgtgactgctggtactgcactatgcagcacctacacctttcctgcaccaccaccactcacagccaccactctgcaacaaacaactttgctgcacacwccccccccargctgaaccccagcaatcayatactgcacaatgtcaagatcagaaacattatctatgcaagacaaactggtaaccattcaacacaarcaattaagtgtaagggtacattgtaaaaagtgattaatattacaattcatatgatctgcttagaaccatatacagattcacatctttacatttgccacctgttacaagatacaaggaacaaagcaagttcaacagctaaaacattttaaaaatgcaccaagctttatgaaattccaaaacaaaacaatgttctgtacatactccccgtactcag

SEQ ID NO: 37983 - DNA, 600 bp, Chicken  19866894268515_3
gtcaagctagatctatttaagcactctagtcacatgaagtacaaaattaactgaccctacaagctataaaattgtatatcataatacaaaggagctctgttccaggtaatccaagtcagaactacagctgtgggtaacagcagcttgctcgttcctttcacaccgctggctcaatgtgactgctggtactgcactatgcagcacctacacctttcctgcaccaccaccactcacagccaccactctgcaacaaacaactttgctgcacacwccccccccargctgaaccccagcaatcayatactgcacaatgtcaagatcagaaacattatctatgcaagacaaactggtaaccattcaacacaarcaattaagtgtaagggtacattgtaaaaagtgattaatattacaattcatatgatctgcttagaaccatatacagattcacatctttacatttgccacctgttacaagatacaaggaacaaagcaagttcaacagctaaaacattttaaaaatgcaccaagctttatgaaattccaaaacaaaacaatgttctgtacatactccccgtactcagatctaacgacttcctgtac

SEQ ID NO: 37984 - DNA, 574 bp, Chicken  19866894268515_4
aaaattgtatatcataatacaaaggagctctgttccaggtaatccaagtcagaactacagctgtgggtaacagcagcttgctcgttcctttcacaccgctggctcaatgtgactgctggtactgcactatgcagcacctacacctttcctgcaccaccaccactcacagccaccactctgcaacaaacaactttgctgcacacwccccccccargctgaaccccagcaatcayatactgcacaatgtcaagatcagaaacattatctatgcaagacaaactggtaaccattcaacacaarcaattaagtgtaagggtacattgtaaaaagtgattaatattacaattcatatgatctgcttagaaccatatacagattcacatctttacatttgccacctgttacaagatacaaggaacaaagcaagttcaacagctaaaacattttaaaaatgcaccaagctttatgaaattccaaaacaaaacaatgttctgtacatactccccgtactcagatctaacgacttcctgtacacagctccttctcaaagtcttatttcctctcatttgacctg

SEQ ID NO: 37985 - DNA, 600 bp, Chicken  19866894268519_1
ttgtggaatcctaggcaccgagtacaaggcggagccctcatggctcaggcacgttattttctataattaagtcacaatggacttttgaagagctctgctgaatgattgagagcctgtgcacagctggacctactaacaaactctgtgctagtccaaggtaagggttgaattcaatattctaactttgttgtgaaggattttaactcttctgtgcctgtgctcctacactagtttcccctgtgttaaaactgcatcctggctttgcctagtagtagggcaacagcatagggtccaaatccrgtgcatcctcatttctctgtcaggttggcatccttgtgatcaaagctacgttgttccagccagtgcccctgagctgctgtaggataagcacatccagagacccatcrgctaacatcatacttcattccctgctcagtagactcaggggyttctgtaatgtttatgtcctcaaatyctcacagtgttgcctttattccacttcctccaccactcgctgtttcccacctgtctctccctgcccacacccttaccaaatgcgtgtcaagctatgcttatttggatggcacaaggcatttcagc

SEQ ID NO: 37986 - DNA, 600 bp, Chicken  19866894268519_2
gagagcctgtgcacagctggacctactaacaaactctgtgctagtccaaggtaagggttgaattcaatattctaactttgttgtgaaggattttaactcttctgtgcctgtgctcctacactagtttcccctgtgttaaaactgcatcctggctttgcctagtagtagggcaacagcatagggtccaaatccrgtgcatcctcatttctctgtcaggttggcatccttgtgatcaaagctacgttgttccagccagtgcccctgagctgctgtaggataagcacatccagagacccatcrgctaacatcatacttcattccctgctcagtagactcaggggyttctgtaatgtttatgtcctcaaatyctcacagtgttgcctttattccacttcctccaccactcgctgtttcccacctgtctctccctgcccacacccttaccaaatgcgtgtcaagctatgcttatttggatggcacaaggcatttcagcaaaatctcttcaacagaagggctgtatgaggcctgtggttaaggggctgggcaggaaacctgctgtttggcttttgtactgacctgccgcctgatttgagccatact

SEQ ID NO: 37987 - DNA, 599 bp, Chicken  19866894268519_3
agtccaaggtaagggttgaattcaatattctaactttgttgtgaaggattttaactcttctgtgcctgtgctcctacactagtttcccctgtgttaaaactgcatcctggctttgcctagtagtagggcaacagcatagggtccaaatccrgtgcatcctcatttctctgtcaggttggcatccttgtgatcaaagctacgttgttccagccagtgcccctgagctgctgtaggataagcacatccagagacccatcrgctaacatcatacttcattccctgctcagtagactcaggggyttctgtaatgtttatgtcctcaaatyctcacagtgttgcctttattccacttcctccaccactcgctgtttcccacctgtctctccctgcccacacccttaccaaatgcgtgtcaagctatgcttatttggatggcacaaggcatttcagcaaaatctcttcaacagaagggctgtatgaggcctgtggttaaggggctgggcaggaaacctgctgtttggcttttgtactgacctgccgcctgatttgagccatacttaaactgcctgcgcccagtgacatctgtgggggatgacaaa

SEQ ID NO: 37988 - DNA, 573 bp, Chicken  19866894268519_4
attctaactttgttgtgaaggattttaactcttctgtgcctgtgctcctacactagtttcccctgtgttaaaactgcatcctggctttgcctagtagtagggcaacagcatagggtccaaatccrgtgcatcctcatttctctgtcaggttggcatccttgtgatcaaagctacgttgttccagccagtgcccctgagctgctgtaggataagcacatccagagacccatcrgctaacatcatacttcattccctgctcagtagactcaggggyttctgtaatgtttatgtcctcaaatyctcacagtgttgcctttattccacttcctccaccactcgctgtttcccacctgtctctccctgcccacacccttaccaaatgcgtgtcaagctatgcttatttggatggcacaaggcatttcagcaaaatctcttcaacagaagggctgtatgaggcctgtggttaaggggctgggcaggaaacctgctgtttggcttttgtactgacctgccgcctgatttgagccatacttaaactgcctgcgcccagtgacatctgtgggggatgacaaa

SEQ ID NO: 37989 - DNA, 600 bp, Chicken  19866894268541_1
gaaatctgagaatcttactttaaagtagccacagaacacccaggaatacgttcggttaacattattatctgttatgccatgggtcacagtgtctgctacataaagtaaataacagtttctggagcctgatttgtaagtcgcagccaagttcaatactttctaattctttgctttgagataacttgtaagtaattcatagttttaataccagtatggaactctatcgtattcctctaaacacaaatcaatcataatgcctccatttggccagctgtcttccttacaagcaactgtatttaycagaagtgttatcaaaaaagtgaaaaagcaggtgccagtccagcctgaagtaattaatctattgttggaactctgttccttgggaaaagaaaaaatatatgcattttgtttgatttcctaagcctctaatgcttataaacataaagtaaatctttacaacacaagtcaggctcaaaagcaaaaaaaaaaaaaaaaaaaaaaaaaaaggcaagcagagcaaagaacattcttcccacatcagctgctaacactgcttaagatgttacaatccattcctcaactactaatccaaacctgagc

SEQ ID NO: 37990 - DNA, 600 bp, Chicken  19866894268552_1
aacatcttgtcactaggctggctaggtgactattttcaccaaactgttaaaaaataagggctgtatttgtaatgtggatttctacagattccacttgccagtccttcttaagccttgacctactagattaaagagcactttagtataccattacacacacactaatctagacagaggttgcattaaacagagtgttaaaacactgactttgaacctgaagtacaattcatttttccctgcatatcatttctgcagctccttcctacaccatttttttctttttctcaaatactgatactscaagcagattctccagcccaggaatgatctcaccagtactkcatatagaactaatgtccttcccagaagtccaggctgataytgtcctatacttattattatgtatamgcaccagatggaaccagaactagcttttgcacgcagtaacccagcactgtgaatcatccatcctgcaccgaagggctccaatgacagatgaagcctgaaattatgaactaaaggaatatcacagaaaatttataagaatggcccataaattatgagaatatgtgtgtgtgggtatatatatatatatataca

SEQ ID NO: 37991 - DNA, 600 bp, Chicken  19866894268552_2
aactgttaaaaaataagggctgtatttgtaatgtggatttctacagattccacttgccagtccttcttaagccttgacctactagattaaagagcactttagtataccattacacacacactaatctagacagaggttgcattaaacagagtgttaaaacactgactttgaacctgaagtacaattcatttttccctgcatatcatttctgcagctccttcctacaccatttttttctttttctcaaatactgatactscaagcagattctccagcccaggaatgatctcaccagtactkcatatagaactaatgtccttcccagaagtccaggctgataytgtcctatacttattattatgtatamgcaccagatggaaccagaactagcttttgcacgcagtaacccagcactgtgaatcatccatcctgcaccgaagggctccaatgacagatgaagcctgaaattatgaactaaaggaatatcacagaaaatttataagaatggcccataaattatgagaatatgtgtgtgtgggtatatatatatatatatacatacatgcatatataacaaaaagaaagggtaagttccaactc

SEQ ID NO: 37992 - DNA, 600 bp, Chicken  19866894268552_3
tacagattccacttgccagtccttcttaagccttgacctactagattaaagagcactttagtataccattacacacacactaatctagacagaggttgcattaaacagagtgttaaaacactgactttgaacctgaagtacaattcatttttccctgcatatcatttctgcagctccttcctacaccatttttttctttttctcaaatactgatactscaagcagattctccagcccaggaatgatctcaccagtactkcatatagaactaatgtccttcccagaagtccaggctgataytgtcctatacttattattatgtatamgcaccagatggaaccagaactagcttttgcacgcagtaacccagcactgtgaatcatccatcctgcaccgaagggctccaatgacagatgaagcctgaaattatgaactaaaggaatatcacagaaaatttataagaatggcccataaattatgagaatatgtgtgtgtgggtatatatatatatatatacatacatgcatatataacaaaaagaaagggtaagttccaactcctgcaattctgtgattctgtcattagtctggatatgtagaa

SEQ ID NO: 37993 - DNA, 600 bp, Chicken  19866894268552_4
taagccttgacctactagattaaagagcactttagtataccattacacacacactaatctagacagaggttgcattaaacagagtgttaaaacactgactttgaacctgaagtacaattcatttttccctgcatatcatttctgcagctccttcctacaccatttttttctttttctcaaatactgatactscaagcagattctccagcccaggaatgatctcaccagtactkcatatagaactaatgtccttcccagaagtccaggctgataytgtcctatacttattattatgtatamgcaccagatggaaccagaactagcttttgcacgcagtaacccagcactgtgaatcatccatcctgcaccgaagggctccaatgacagatgaagcctgaaattatgaactaaaggaatatcacagaaaatttataagaatggcccataaattatgagaatatgtgtgtgtgggtatatatatatatatatacatacatgcatatataacaaaaagaaagggtaagttccaactcctgcaattctgtgattctgtcattagtctggatatgtagaaactggtaggatctgagcatgatataa

SEQ ID NO: 37994 - DNA, 577 bp, Chicken  19866894268554_1
tgttattcatttcaaagcagtcatgatgttaaattaaaaacagactcttaaaatttgtgctgatggacttgcttctctgtcagttttacacggtgccaaaacactgagtcactagtctgcttctcttggacagaaaggggagttatgtgtgaaggccagccaattcttcacatgcattttacacttttcagcagttgtttgaaagtgtactggttgacttattcaatcacattgtggacagatttaggctttaaacacctttctcagctgcagagtggagttttgtatttgtgcctatgytaytgaaagataactttctgtccttggtaacagtaatcttcatctaccttctttgggaagccttgattagcttttgtttgtttgttatgctgaggtttaggtttgcagcagactgtggtattaaaactcaggctgtgtatgttgaaagtcagggaagctactaatgctttgaagcacatcagtagatagcagctcagatgtgctctttttaaggaggtaagagtattgtaagcttgaagatgttgtttatgttcagagttgtgttagataaacctta

SEQ ID NO: 37995 - DNA, 574 bp, Chicken  19866894268554_2
tattcatttcaaagcagtcatgatgttaaattaaaaacagactcttaaaatttgtgctgatggacttgcttctctgtcagttttacacggtgccaaaacactgagtcactagtctgcttctcttggacagaaaggggagttatgtgtgaaggccagccaattcttcacatgcattttacacttttcagcagttgtttgaaagtgtactggttgacttattcaatcacattgtggacagatttaggctttaaacacctttctcagctgcagagtggagttttgtatttgtgcctatgytaytgaaagataactttctgtccttggtaacagtaatcttcatctaccttctttgggaagccttgattagcttttgtttgtttgttatgctgaggtttaggtttgcagcagactgtggtattaaaactcaggctgtgtatgttgaaagtcagggaagctactaatgctttgaagcacatcagtagatagcagctcagatgtgctctttttaaggaggtaagagtattgtaagcttgaagatgttgtttatgttcagagttgtgttagataaacctta

SEQ ID NO: 37996 - DNA, 600 bp, Chicken  19866894268556_1
ctttattaattgaacccagttttattttgctaataaggaattagattaagctaggggaagccagatcttaatcagattggaggactgtaagggtatttgcactgatttcaccgatttagttttaaaacaaaaccttttggttaagctagcataacttcaaggaacgacacgtcttggctagcagcctggaaaataccagtgtgttaactattaaggaagacagcacctgcagtttttcccctggagtttgcagactggctcggtgatctctttgcatttggacatttgagacgggtaacragctcaattgtacgaaagcagtgagagccttgttaatatttaagtgttgttatctcagttaagtagtagactagttgggggctgtaagacgtaagaattcttctctgggaggtaggaagcatgttttaggtcttcctgctgtttgtgcctctaacattgggtctggtcccttatcggttcgcctttggaggtgttcctccagttgcccaggtttcctcagggctctgctaaagttctttctgtccaaccatccaagcatcttcaacatctccccgaggttaatggcycctgtttgattgt

SEQ ID NO: 37997 - DNA, 443 bp, Chicken  19866894268556_2
gagacgggtaacragctcaattgtacgaaagcagtgagagccttgttaatatttaagtgttgttatctcagttaagtagtagactagttgggggctgtaagacgtaagaattcttctctgggaggtaggaagcatgttttaggtcttcctgctgtttgtgcctctaacattgggtctggtcccttatcggttcgcctttggaggtgttcctccagttgcccaggtttcctcagggctctgctaaagttctttctgtccaaccatccaagcatcttcaacatctccccgaggttaatggcycctgtttgattgttttatgagagcttctccttcctgcatttcattttttacatttattggatttgtctgttaaagtatgagtgcatcccacatttgtcttctgaacgtcrgacttgagccacagcatttctttctatgccatt

SEQ ID NO: 37998 - DNA, 333 bp, Chicken  19866894268556_3
ttcttctctgggaggtaggaagcatgttttaggtcttcctgctgtttgtgcctctaacattgggtctggtcccttatcggttcgcctttggaggtgttcctccagttgcccaggtttcctcagggctctgctaaagttctttctgtccaaccatccaagcatcttcaacatctccccgaggttaatggcycctgtttgattgttttatgagagcttctccttcctgcatttcattttttacatttattggatttgtctgttaaagtatgagtgcatcccacatttgtcttctgaacgtcrgacttgagccacagcatttctttctatgccatt

SEQ ID NO: 37999 - DNA, 600 bp, Chicken  19866894268566_1
aaagcacaaatgactggttctactggaaacatggaattagaaagcgatggttctagcataaatcccggtgttgaaatactggagcagagcccaggagcgaatctagatgctgctgctgaagaggaggttatggaagaacacagagaaccactggcagagcatcaacatgaggtgacgcaggtggatccctctcttgggtctgtcctggggcctttgggaccgtgctgcacgctgaaggaaggtccccatgcttcttgccagagtgctggtgaaagtactataccagtccacgccactacrttgcctgccacgcctgagagtttggctgtgggtgtggagagaagctctccttcrgggaacgtgacagatgcagcagcagtccgagcttgtgctgatcaggaaacaaatyatagttgtccagtaaatcctccagagcagttgaacggaggagaagtaggtgaaatagagctggggagaagagagagccctgaggatgaagagattgaacaagtgcaggctgtgaaggagcatcggagtagctgtagttgctrttctaccaacgctcctgcggatggagtgctttcagatggtgaagaacaa

SEQ ID NO: 38000 - DNA, 600 bp, Chicken  19866894268566_2
agcataaatcccggtgttgaaatactggagcagagcccaggagcgaatctagatgctgctgctgaagaggaggttatggaagaacacagagaaccactggcagagcatcaacatgaggtgacgcaggtggatccctctcttgggtctgtcctggggcctttgggaccgtgctgcacgctgaaggaaggtccccatgcttcttgccagagtgctggtgaaagtactataccagtccacgccactacrttgcctgccacgcctgagagtttggctgtgggtgtggagagaagctctccttcrgggaacgtgacagatgcagcagcagtccgagcttgtgctgatcaggaaacaaatyatagttgtccagtaaatcctccagagcagttgaacggaggagaagtaggtgaaatagagctggggagaagagagagccctgaggatgaagagattgaacaagtgcaggctgtgaaggagcatcggagtagctgtagttgctrttctaccaacgctcctgcggatggagtgctttcagatggtgaagaacaagaggtccctgcttgtcagcataagagrgctgaagatgccatgctgccccaaact

SEQ ID NO: 38001 - DNA, 600 bp, Chicken  19866894268566_3
ctgctgctgaagaggaggttatggaagaacacagagaaccactggcagagcatcaacatgaggtgacgcaggtggatccctctcttgggtctgtcctggggcctttgggaccgtgctgcacgctgaaggaaggtccccatgcttcttgccagagtgctggtgaaagtactataccagtccacgccactacrttgcctgccacgcctgagagtttggctgtgggtgtggagagaagctctccttcrgggaacgtgacagatgcagcagcagtccgagcttgtgctgatcaggaaacaaatyatagttgtccagtaaatcctccagagcagttgaacggaggagaagtaggtgaaatagagctggggagaagagagagccctgaggatgaagagattgaacaagtgcaggctgtgaaggagcatcggagtagctgtagttgctrttctaccaacgctcctgcggatggagtgctttcagatggtgaagaacaagaggtccctgcttgtcagcataagagrgctgaagatgccatgctgccccaaactgcactgccagcagagagtgggcaggtggcagaacagtcaggtaccagcggatcct

SEQ ID NO: 38002 - DNA, 600 bp, Chicken  19866894268566_4
ttcttgccagagtgctggtgaaagtactataccagtccacgccactacrttgcctgccacgcctgagagtttggctgtgggtgtggagagaagctctccttcrgggaacgtgacagatgcagcagcagtccgagcttgtgctgatcaggaaacaaatyatagttgtccagtaaatcctccagagcagttgaacggaggagaagtaggtgaaatagagctggggagaagagagagccctgaggatgaagagattgaacaagtgcaggctgtgaaggagcatcggagtagctgtagttgctrttctaccaacgctcctgcggatggagtgctttcagatggtgaagaacaagaggtccctgcttgtcagcataagagrgctgaagatgccatgctgccccaaactgcactgccagcagagagtgggcaggtggcagaacagtcaggtaccagcggatccttgctgggtcttgatgctcaagcagaagactcgagtcagtttggaagccacagatctggagagaggtgtggggatccacgaggatggacagaaaaccaaggcaatggaagtgaaatgaactctgtgctgagcccagagtgtgt

SEQ ID NO: 38003 - DNA, 600 bp, Chicken  19866894268566_5
gtgggtgtggagagaagctctccttcrgggaacgtgacagatgcagcagcagtccgagcttgtgctgatcaggaaacaaatyatagttgtccagtaaatcctccagagcagttgaacggaggagaagtaggtgaaatagagctggggagaagagagagccctgaggatgaagagattgaacaagtgcaggctgtgaaggagcatcggagtagctgtagttgctrttctaccaacgctcctgcggatggagtgctttcagatggtgaagaacaagaggtccctgcttgtcagcataagagrgctgaagatgccatgctgccccaaactgcactgccagcagagagtgggcaggtggcagaacagtcaggtaccagcggatccttgctgggtcttgatgctcaagcagaagactcgagtcagtttggaagccacagatctggagagaggtgtggggatccacgaggatggacagaaaaccaaggcaatggaagtgaaatgaactctgtgctgagcccagagtgtgtttcagcacaggactcgcagggaggggaggagaaccaagacagtttttctgatgtggacaggacaaaggctgtagcc

SEQ ID NO: 38004 - DNA, 600 bp, Chicken  19866894268571_1
tcacactggtaataaagacagcacaaatacggctcagtgcagcagaatgacatgttctcttacacagcatatcaagagaagtttacctgtttaactcaaagtcacaaacacacagcacaggttcttggggaacgtacaacaagttcaagcatcagctgcggttgcttcaagtgtggaagttaacattttatttttcatgtgaacgtggataccactacagagtcccagtcttattttgtttgcaatttaaaaatgcatttaaggaagttatatatagacaatacggtaatgataacgtayaggataatatggcttatatattgctagagtgaatgaaagatgaaaacatgcataagcagagggtcagcttttaagtctgacatgagactggcgctaagaggaaagatgttgcttcaagccagctgtttaggcaatcggtaagagaaaacagaggtattaaagatagtaacaatatcatccactgtgctggagacaggcaagatgaaatataagcagcaacagagaatcaagaacacagttcgcagaacggggaaaatggattcaccagatasaggcatcaacttacttcagtaataaaca

SEQ ID NO: 38005 - DNA, 600 bp, Chicken  19866894268571_2
tatagacaatacggtaatgataacgtayaggataatatggcttatatattgctagagtgaatgaaagatgaaaacatgcataagcagagggtcagcttttaagtctgacatgagactggcgctaagaggaaagatgttgcttcaagccagctgtttaggcaatcggtaagagaaaacagaggtattaaagatagtaacaatatcatccactgtgctggagacaggcaagatgaaatataagcagcaacagagaatcaagaacacagttcgcagaacggggaaaatggattcaccagatasaggcatcaacttacttcagtaataaacagttctccacccataaatcatgttaattacataattaaacatttgaggaaattacactcaagcttccagtaaactgtaattaaaaacaaacaaacaaagcagtgactgaaatcttggcatgaggagcacataaatgcagcaggacagcagagcaagcagaaaagacactgctgctgggtttggttattctcaagccacccctttgttaccagtcctctccttctgactgcacctcctgggctcctgccctcagccccaaaggagagcagaacg

SEQ ID NO: 38006 - DNA, 599 bp, Chicken  19866894268577_1
  misc_feature (1)..(131): n is any nucleotide
nnnnnnnnnnnnnnnnnnnnnnnnnnnnnnnnnnnnnnnnnnnnnnnnnnnnnnnnnnnnnnnnnnnnnnnnnnnnnnnnnnnnnnnnnnnnnnnnnnnnnnnnnnnnnnnnnnnnnnnnnnnnnnnnnnngatgttttccctcgaatactgttccttgcttcctttttttctttcttcctttaattcaattcttttcaagtgtggattgattaagttgattccaattgtacattattatttcaaaatataaatagaggaaagaggagaaagggttgttaatccataggcttacaagatmtgattgaactggaaggctaaatgtaaacttgttgattagatttggttttgtctatacaattcaagaatctgaacagactgactaggaaaayggcagagaagctttctgtagctgttgtcagtttctcattaaccaggtgaacactgcgttcgaagcatttgttctgtgcgtggcagtgtgggcccaagaagggttttcaggttgagctgtccttaaacagaggttgatgggcttaagacactcaaaagtaggggcagaagtctggtggaagttttgctgcatgagcacaaaagctgggt

SEQ ID NO: 38007 - DNA, 599 bp, Chicken  19866894268577_2
  misc_feature (1)..(40): n is any nucleotide
nnnnnnnnnnnnnnnnnnnnnnnnnnnnnnnnnnnnnnnngatgttttccctcgaatactgttccttgcttcctttttttctttcttcctttaattcaattcttttcaagtgtggattgattaagttgattccaattgtacattattatttcaaaatataaatagaggaaagaggagaaagggttgttaatccataggcttacaagatmtgattgaactggaaggctaaatgtaaacttgttgattagatttggttttgtctatacaattcaagaatctgaacagactgactaggaaaayggcagagaagctttctgtagctgttgtcagtttctcattaaccaggtgaacactgcgttcgaagcatttgttctgtgcgtggcagtgtgggcccaagaagggttttcaggttgagctgtccttaaacagaggttgatgggcttaagacactcaaaagtaggggcagaagtctggtggaagttttgctgcatgagcacaaaagctgggtttcccaacagctgtgtctcaggagtgctcttctgacctgaaactggagaggagagcatgcattgcatgcaatttggcacrttttcctgttg

SEQ ID NO: 38008 - DNA, 489 bp, Chicken  19866894268577_3
gactaggaaaayggcagagaagctttctgtagctgttgtcagtttctcattaaccaggtgaacactgcgttcgaagcatttgttctgtgcgtggcagtgtgggcccaagaagggttttcaggttgagctgtccttaaacagaggttgatgggcttaagacactcaaaagtaggggcagaagtctggtggaagttttgctgcatgagcacaaaagctgggtttcccaacagctgtgtctcaggagtgctcttctgacctgaaactggagaggagagcatgcattgcatgcaatttggcacrttttcctgttggtcaggttggggttccacccaaacctgcactsatacctgtggctgagaactcagcagcatctgtactggctagggtcaaaaatcaatttagcacagcggtatctccagtggcaggtgcctgagggggaatataggaatagtacaagcatatggcaatatctctagccgtgtgcttatt

SEQ ID NO: 38009 - DNA, 446 bp, Chicken  19866894268577_4
ttctcattaaccaggtgaacactgcgttcgaagcatttgttctgtgcgtggcagtgtgggcccaagaagggttttcaggttgagctgtccttaaacagaggttgatgggcttaagacactcaaaagtaggggcagaagtctggtggaagttttgctgcatgagcacaaaagctgggtttcccaacagctgtgtctcaggagtgctcttctgacctgaaactggagaggagagcatgcattgcatgcaatttggcacrttttcctgttggtcaggttggggttccacccaaacctgcactsatacctgtggctgagaactcagcagcatctgtactggctagggtcaaaaatcaatttagcacagcggtatctccagtggcaggtgcctgagggggaatataggaatagtacaagcatatggcaatatctctagccgtgtgcttatt

SEQ ID NO: 38010 - DNA, 600 bp, Chicken  19866894268578_1
atttacagctcggtgtctgcaccaaagttttccctttgacctttgtggctacccatctactaagtattagtgctatttatagtttgaagtaaattgtatgactgacattagaaaaagggaaatccttacaacaggacccatgctttcattcagcacaccataatatattacaagtgttctttccccttgagtctaatatttttatatattctttgtgcagccctcagcaacataacattcgcctggagctcacagaaatgccaccatttagcctagatttggtcttagtttcccagggcrcagttggacagcttcaactgattgcaggcttrgcatataaaaacaaacaggcaagtacttttgactcccactgctcaaagaccaagttcttctgtgatgttgataacattcctgggcactttttaatattatgtataagataaatgttttattccttttcttttatcattttaatttttcagttttttaaaatgaacttaagtttcttaattcttaacaaaatgtcgcttgctgttttcaaaattgtagttgtaatctctgacttacacctcccaaattatgtcttcagctggaatttta

SEQ ID NO: 38011 - DNA, 600 bp, Chicken  19866894268578_2
cctttgacctttgtggctacccatctactaagtattagtgctatttatagtttgaagtaaattgtatgactgacattagaaaaagggaaatccttacaacaggacccatgctttcattcagcacaccataatatattacaagtgttctttccccttgagtctaatatttttatatattctttgtgcagccctcagcaacataacattcgcctggagctcacagaaatgccaccatttagcctagatttggtcttagtttcccagggcrcagttggacagcttcaactgattgcaggcttrgcatataaaaacaaacaggcaagtacttttgactcccactgctcaaagaccaagttcttctgtgatgttgataacattcctgggcactttttaatattatgtataagataaatgttttattccttttcttttatcattttaatttttcagttttttaaaatgaacttaagtttcttaattcttaacaaaatgtcgcttgctgttttcaaaattgtagttgtaatctctgacttacacctcccaaattatgtcttcagctggaattttaatgctattagtagtgtatgagtgcttatgtaa

SEQ ID NO: 38012 - DNA, 600 bp, Chicken  19866894268579_1
gtaatcaccacagcaaccccaaacagcgctatttttaggcgtgcttacatgacacagcggtgagtaacgcggtgacgcagcgctgccgcccgctgtcatctcgtcccgggccgcgatcctcagcgcgtgctgaaggcgttacagtaattaaagaagcgctttaacgaaggaaggggttcggggggaaatgcccgtttccttacctggtgctcgggacggagctcagcgccgcccgcgttttggtgaggaaaaacccaaagtgaccccaaatcagcgcctggacgccgaccgcccgctctyctccccacggacccgcaccccgattcctcctcgacgccatttctcccccacmcccctgcggtgcccattctctccttttgccccctcaggtatcccgcaaaggatcgatcccacagagatcccctcgcagaacccccccccgcagagaaggatcgctctcatagatccaaccccggagaccccctcagaaaaccccctccggattccctcacagaaaccccctgacgaagggacccctccccagaccgccgatcccgccgtcccgccccgctccaagatggcgccgctgcctcacagctc

SEQ ID NO: 38013 - DNA, 600 bp, Chicken  19866894268579_2
cacagcggtgagtaacgcggtgacgcagcgctgccgcccgctgtcatctcgtcccgggccgcgatcctcagcgcgtgctgaaggcgttacagtaattaaagaagcgctttaacgaaggaaggggttcggggggaaatgcccgtttccttacctggtgctcgggacggagctcagcgccgcccgcgttttggtgaggaaaaacccaaagtgaccccaaatcagcgcctggacgccgaccgcccgctctyctccccacggacccgcaccccgattcctcctcgacgccatttctcccccacmcccctgcggtgcccattctctccttttgccccctcaggtatcccgcaaaggatcgatcccacagagatcccctcgcagaacccccccccgcagagaaggatcgctctcatagatccaaccccggagaccccctcagaaaaccccctccggattccctcacagaaaccccctgacgaagggacccctccccagaccgccgatcccgccgtcccgccccgctccaagatggcgccgctgcctcacagctctcagcccgtttttcccgccaaagagctctcccccgtcacgtgacggcgcggg

SEQ ID NO: 38014 - DNA, 600 bp, Chicken  19866894268582_1
cctacaaagctgttctatgattaggaatgggaagtctatgagcatccataagacaaactctttgaaataatgtctactttatggagaacttccaagggcttatagtactgagaaaacatcctatcatttcttagacaggcactaatggattctgtcaagacttcccagcttccagctctgggatcagaaatgctgacaatgaccaattccttctttatgacaaactggatgaagtgacacaggaacaatttcccttggtcacatgaaactcacactatggcttttgtccctttctccatsacagactgctggcatcacctttgcacatttaagaccrctgacagccaatgcaagctgtgggcattggaaaggatatacaaaaataatcattattcacacatgccaaatgtttacattagaaacactgccctgaagaacgtggaaggccaagatccgctccaaagcccattacatcaacgggaagacttccactgacttcaacaggctttgctcttggctaaaactgggcctgcagcctaattccctatgtgagtctctgccaggacttggcatgaaacggcaaccycaacgtgagccatc

SEQ ID NO: 38015 - DNA, 600 bp, Chicken  19866894268582_2
atgagcatccataagacaaactctttgaaataatgtctactttatggagaacttccaagggcttatagtactgagaaaacatcctatcatttcttagacaggcactaatggattctgtcaagacttcccagcttccagctctgggatcagaaatgctgacaatgaccaattccttctttatgacaaactggatgaagtgacacaggaacaatttcccttggtcacatgaaactcacactatggcttttgtccctttctccatsacagactgctggcatcacctttgcacatttaagaccrctgacagccaatgcaagctgtgggcattggaaaggatatacaaaaataatcattattcacacatgccaaatgtttacattagaaacactgccctgaagaacgtggaaggccaagatccgctccaaagcccattacatcaacgggaagacttccactgacttcaacaggctttgctcttggctaaaactgggcctgcagcctaattccctatgtgagtctctgccaggacttggcatgaaacggcaaccycaacgtgagccatcacagtccaggtaggtttgtgaagcccagcccrgagcc

SEQ ID NO: 38016 - DNA, 600 bp, Chicken  19866894268582_3
tccctttctccatsacagactgctggcatcacctttgcacatttaagaccrctgacagccaatgcaagctgtgggcattggaaaggatatacaaaaataatcattattcacacatgccaaatgtttacattagaaacactgccctgaagaacgtggaaggccaagatccgctccaaagcccattacatcaacgggaagacttccactgacttcaacaggctttgctcttggctaaaactgggcctgcagcctaattccctatgtgagtctctgccaggacttggcatgaaacggcaaccycaacgtgagccatcacagtccaggtaggtttgtgaagcccagcccrgagccctgtgctactatgactgcagctatgagtgggtgctgtctgcttcrrgaggagcacagcacctggaataccatgttagacagcaaacatgggtattcacacaggtttttatgtatgggtttatgtttttttcctatctgtttggttctgaattttcatgtgtagctactttagcacatacaaccagaacagaaatataagctgtatgaaggtagcttatttcttctgtgcaaagaagcaaacaagttcag

SEQ ID NO: 38017 - DNA, 575 bp, Chicken  19866894268582_4
gaccrctgacagccaatgcaagctgtgggcattggaaaggatatacaaaaataatcattattcacacatgccaaatgtttacattagaaacactgccctgaagaacgtggaaggccaagatccgctccaaagcccattacatcaacgggaagacttccactgacttcaacaggctttgctcttggctaaaactgggcctgcagcctaattccctatgtgagtctctgccaggacttggcatgaaacggcaaccycaacgtgagccatcacagtccaggtaggtttgtgaagcccagcccrgagccctgtgctactatgactgcagctatgagtgggtgctgtctgcttcrrgaggagcacagcacctggaataccatgttagacagcaaacatgggtattcacacaggtttttatgtatgggtttatgtttttttcctatctgtttggttctgaattttcatgtgtagctactttagcacatacaaccagaacagaaatataagctgtatgaaggtagcttatttcttctgtgcaaagaagcaaacaagttcagtggcaacgaatgtgcttccca

SEQ ID NO: 38018 - DNA, 525 bp, Chicken  19866894268582_5
ataatcattattcacacatgccaaatgtttacattagaaacactgccctgaagaacgtggaaggccaagatccgctccaaagcccattacatcaacgggaagacttccactgacttcaacaggctttgctcttggctaaaactgggcctgcagcctaattccctatgtgagtctctgccaggacttggcatgaaacggcaaccycaacgtgagccatcacagtccaggtaggtttgtgaagcccagcccrgagccctgtgctactatgactgcagctatgagtgggtgctgtctgcttcrrgaggagcacagcacctggaataccatgttagacagcaaacatgggtattcacacaggtttttatgtatgggtttatgtttttttcctatctgtttggttctgaattttcatgtgtagctactttagcacatacaaccagaacagaaatataagctgtatgaaggtagcttatttcttctgtgcaaagaagcaaacaagttcagtggcaacgaatgtgcttccca

SEQ ID NO: 38019 - DNA, 524 bp, Chicken  19866894268582_6
taatcattattcacacatgccaaatgtttacattagaaacactgccctgaagaacgtggaaggccaagatccgctccaaagcccattacatcaacgggaagacttccactgacttcaacaggctttgctcttggctaaaactgggcctgcagcctaattccctatgtgagtctctgccaggacttggcatgaaacggcaaccycaacgtgagccatcacagtccaggtaggtttgtgaagcccagcccrgagccctgtgctactatgactgcagctatgagtgggtgctgtctgcttcrrgaggagcacagcacctggaataccatgttagacagcaaacatgggtattcacacaggtttttatgtatgggtttatgtttttttcctatctgtttggttctgaattttcatgtgtagctactttagcacatacaaccagaacagaaatataagctgtatgaaggtagcttatttcttctgtgcaaagaagcaaacaagttcagtggcaacgaatgtgcttccca

SEQ ID NO: 38020 - DNA, 600 bp, Chicken  19866894268583_1
gaaggacagtcagtggactgtttaagtaaagcaacatggacataactaattacaagccagcatggctagatgtacgtggctaatttgtaccagtacaaacaaagcaggaaaccttggcttaactcaagtcagtaaaatctgttaggtgttgaaaaaaaggtaacgtgagctgaagtcttaatgcctttaagaagccctgttgtgttttggcttaataaagatcaagttcctacaaataaaagaggagaggaaagaatgagatccctagcatacaccagtttcaacacagtataagacacyaatctttcttcagagagagtacaatggaataagaaacgatttgagacaggcaatytgcacagkaagatttggttgtgaagctgaaagtgattttggctcagcaggacattttccatctctttaattttatttatttatttatttatttatttcattttcataggcagttgaatagtgcaagttatacaacttccacgtcgaaaagcaaccatatattaagttcttacaggtaaaaatatttttcctctatacaaaagaacaggtttacctctgccatcagaaagatgaaagagattaaaa

SEQ ID NO: 38021 - DNA, 600 bp, Chicken  19866894268583_2
gccagcatggctagatgtacgtggctaatttgtaccagtacaaacaaagcaggaaaccttggcttaactcaagtcagtaaaatctgttaggtgttgaaaaaaaggtaacgtgagctgaagtcttaatgcctttaagaagccctgttgtgttttggcttaataaagatcaagttcctacaaataaaagaggagaggaaagaatgagatccctagcatacaccagtttcaacacagtataagacacyaatctttcttcagagagagtacaatggaataagaaacgatttgagacaggcaatytgcacagkaagatttggttgtgaagctgaaagtgattttggctcagcaggacattttccatctctttaattttatttatttatttatttatttatttcattttcataggcagttgaatagtgcaagttatacaacttccacgtcgaaaagcaaccatatattaagttcttacaggtaaaaatatttttcctctatacaaaagaacaggtttacctctgccatcagaaagatgaaagagattaaaaataataataataatagttctttatgtaaataattaaactatagcaatcttcctta

SEQ ID NO: 38022 - DNA, 600 bp, Chicken  19866894268583_3
ggctagatgtacgtggctaatttgtaccagtacaaacaaagcaggaaaccttggcttaactcaagtcagtaaaatctgttaggtgttgaaaaaaaggtaacgtgagctgaagtcttaatgcctttaagaagccctgttgtgttttggcttaataaagatcaagttcctacaaataaaagaggagaggaaagaatgagatccctagcatacaccagtttcaacacagtataagacacyaatctttcttcagagagagtacaatggaataagaaacgatttgagacaggcaatytgcacagkaagatttggttgtgaagctgaaagtgattttggctcagcaggacattttccatctctttaattttatttatttatttatttatttatttcattttcataggcagttgaatagtgcaagttatacaacttccacgtcgaaaagcaaccatatattaagttcttacaggtaaaaatatttttcctctatacaaaagaacaggtttacctctgccatcagaaagatgaaagagattaaaaataataataataatagttctttatgtaaataattaaactatagcaatcttccttataagaatt

SEQ ID NO: 38023 - DNA, 600 bp, Chicken  19866894268591_1
agtcttcctcatgggctcttaacattctctcctacttgtatcttcaaatgttgagcattagctcccatagaaatgcctcctgtctatcccaaggacaaagggctatgctatgcctatggtcctccctttatcctgaaggcttggcccctgttggactttttcccactgagaagatagagggtacattcttagctgcatattgcaggtagagggagggatgttttcttatcgacgccttgtacaggtaatatttggctgtgacatcccacatcagcaccagttcatagagcttctgcattytcttctagttggcactcttcaccattatgctgttatgcttctgggagctcagcacaccttcctggaggagttccttcatggtcccactcacattacagactccatgtattaggaggtcactgttctactgaatgaactttgccacttgcagagaagagaaggatgagtttggtgactcagtgttgctgtgacccattcctggaccccacctccccagctcacctttcttcagcttctccaggagcatatcatcccggcacatccagcccatgctcttcactatgtgtgctgacacctcca

SEQ ID NO: 38024 - DNA, 600 bp, Chicken  19866894268596_1
aacccatttctgcaaataccatgtcgttttctaaaggtttcttaaattttcaagtagctttggatgcattctcttttgtacaaagatagatttatcctttgtcctccaactgtttcacttagtatttcttttaccattcagaaggtcaaagtatttttacagaaaggctcaacttcaatcacaaagatgcaaaaaaagattagaggaaggatagaaacaatttatacaatggacaagtgagtttactgccctgaatgagcaagtctgaaagagaggcaggtgtacaaaaggcttaaaaayatttaaagtagaaagaacttctcaacattaggaaaaaaaaaagagcccattataaaaagaggagcagtaaaatggttagaaatctttcaacaacaaagaatcaaaagcatattactagggaatgcacagcaagtatttacaaatgttaaccacagtgaagtttacagcaaaggccaactcccactggcaatacaatatcttaagtgtcttctgcagagcacctgcaaggtttccagtgcaatcctatctgacctttatttaaaggtcacccctccagacaaggaattacagccagcccct

SEQ ID NO: 38025 - DNA, 480 bp, Chicken  19866894268603_1
ctgatggcagcacacagcctgcccagacgcctgccagcttctcccactgccaccatcccctttttccacacaaagtttatggataaaactatccatcttcctaaattaggccacaaatatcttctctaaatggcttttctttcttccctcctcagagaaggaagaaacgattgctctttaacttgcagagggctgacccacacacactgctctgtagatacacttgctggccactcttttggacagcagtgtacactaccaacttacaggtggagctggggcaaacaaccaggacctgtrtccagcttacascacagggcaaacarccaggacccgtatccagcttacatcacastgatcaccacagacgcggccacccaggatctccctctgagggcgtcgctgcggcggccccgctccgaggtggcggttgggccgcgccgggagcacggcggtttctgtgcgaatcctgaggggatt

SEQ ID NO: 38026 - DNA, 468 bp, Chicken  19866894268603_2
cacagcctgcccagacgcctgccagcttctcccactgccaccatcccctttttccacacaaagtttatggataaaactatccatcttcctaaattaggccacaaatatcttctctaaatggcttttctttcttccctcctcagagaaggaagaaacgattgctctttaacttgcagagggctgacccacacacactgctctgtagatacacttgctggccactcttttggacagcagtgtacactaccaacttacaggtggagctggggcaaacaaccaggacctgtrtccagcttacascacagggcaaacarccaggacccgtatccagcttacatcacastgatcaccacagacgcggccacccaggatctccctctgagggcgtcgctgcggcggccccgctccgaggtggcggttgggccgcgccgggagcacggcggtttctgtgcgaatcctgaggggatt

SEQ ID NO: 38027 - DNA, 454 bp, Chicken  19866894268603_3
acgcctgccagcttctcccactgccaccatcccctttttccacacaaagtttatggataaaactatccatcttcctaaattaggccacaaatatcttctctaaatggcttttctttcttccctcctcagagaaggaagaaacgattgctctttaacttgcagagggctgacccacacacactgctctgtagatacacttgctggccactcttttggacagcagtgtacactaccaacttacaggtggagctggggcaaacaaccaggacctgtrtccagcttacascacagggcaaacarccaggacccgtatccagcttacatcacastgatcaccacagacgcggccacccaggatctccctctgagggcgtcgctgcggcggccccgctccgaggtggcggttgggccgcgccgggagcacggcggtttctgtgcgaatcctgaggggatt

SEQ ID NO: 38028 - DNA, 425 bp, Chicken  19866894268603_4
tcccctttttccacacaaagtttatggataaaactatccatcttcctaaattaggccacaaatatcttctctaaatggcttttctttcttccctcctcagagaaggaagaaacgattgctctttaacttgcagagggctgacccacacacactgctctgtagatacacttgctggccactcttttggacagcagtgtacactaccaacttacaggtggagctggggcaaacaaccaggacctgtrtccagcttacascacagggcaaacarccaggacccgtatccagcttacatcacastgatcaccacagacgcggccacccaggatctccctctgagggcgtcgctgcggcggccccgctccgaggtggcggttgggccgcgccgggagcacggcggtttctgtgcgaatcctgaggggatt

SEQ ID NO: 38029 - DNA, 600 bp, Chicken  19866894268604_1
gtatttaaaattctttttgacttattcagctgctggtcttcagagcgctttgcacctgctttccttacttaaattgcacagctcccaaaggaggtgaaaaaatgtcttgttttcagccccaaacaggatctcatctcagacatatattccatctttaactcttccctgtgaggttttgcacctgcctgggaaaaaattaacttagttctcggatggaaacacattatttttttttttccttaagtaattctatgaactacttcagtgattgataacagaaaccttgtttctaggtgcacrcaaggargaactgctgtgatgagtgacggagctgcacagacttgccgtcctccaagcataggattctctgcaaggagaggactgggctcacacaggttatttgctgatactgttctaacagcaggaatgttactacacctcttattatttatctcagggatcctaaagcaaagcagctgaaaaaataagtgcaaatgcaaggttagaaaaatagaataaggagagcatgaccgctgtcttaagctgtggtttaactgtttccatgacctttgcaatctccctttggtgtcttgctttttg

SEQ ID NO: 38030 - DNA, 600 bp, Chicken  19866894268604_2
aaattctttttgacttattcagctgctggtcttcagagcgctttgcacctgctttccttacttaaattgcacagctcccaaaggaggtgaaaaaatgtcttgttttcagccccaaacaggatctcatctcagacatatattccatctttaactcttccctgtgaggttttgcacctgcctgggaaaaaattaacttagttctcggatggaaacacattatttttttttttccttaagtaattctatgaactacttcagtgattgataacagaaaccttgtttctaggtgcacrcaaggargaactgctgtgatgagtgacggagctgcacagacttgccgtcctccaagcataggattctctgcaaggagaggactgggctcacacaggttatttgctgatactgttctaacagcaggaatgttactacacctcttattatttatctcagggatcctaaagcaaagcagctgaaaaaataagtgcaaatgcaaggttagaaaaatagaataaggagagcatgaccgctgtcttaagctgtggtttaactgtttccatgacctttgcaatctccctttggtgtcttgctttttgcagtcca

SEQ ID NO: 38031 - DNA, 600 bp, Chicken  19866894268608_1
gaacatgccaaaaaaatggtaagtacaaagccaaaactaattatttctttgtactgggtaaactcttgcttgatagctagagagttcgcaaacttaagagctcattgccttttattttcttaagagggtaaaacatttctggttagtgtaaagtatgctgtagaaatcttttagatacttttgatgatacaataaattgtacatgagaatatcctcctctcccgaatcaagaaataaaaaagtctttgttagggatcctatggccattttatctggactcactcctggcccttggatctraatgtgctatgagttatggtatggacagagcactgcttctcaaacaaccttgctatgcagcatcccaggcattttctagagggagtgtagacagcaattacaaacataatgattttgctacttaatttacctttcagtgactaaagaagttgtctttaatcccrttcagggatctttgcatcccagaggaaaagcagtggcctacaacacattgagagaaggcacaaataaagatgatgtcctcttctctcccttttatgccttcaatcttccagaacaaaacttctcagatcatgcgca

SEQ ID NO: 38032 - DNA, 592 bp, Chicken  19866894268608_2
aatcttttagatacttttgatgatacaataaattgtacatgagaatatcctcctctcccgaatcaagaaataaaaaagtctttgttagggatcctatggccattttatctggactcactcctggcccttggatctraatgtgctatgagttatggtatggacagagcactgcttctcaaacaaccttgctatgcagcatcccaggcattttctagagggagtgtagacagcaattacaaacataatgattttgctacttaatttacctttcagtgactaaagaagttgtctttaatcccrttcagggatctttgcatcccagaggaaaagcagtggcctacaacacattgagagaaggcacaaataaagatgatgtcctcttctctcccttttatgccttcaatcttccagaacaaaacttctcagatcatgcgcacacccactactgtcttgccctttcttcaaggcagtaggcataaaaccgctggttttgttttgttctgttattggactctgttgtttttcttgggtttttttgtccaccactctctaacaattgtggaatactgagttttctaggttaaaatgtgat

SEQ ID NO: 38033 - DNA, 600 bp, Chicken  19866894268609_1
ttctagagggaggtgtccttgcttgttacagggggactgaaactagatgatcttaatgctcccttccaacccaaaccattctatgattctatgattccttgattctacgactctgaaaggacaggtgagctttaactgcactcacgtatagggcacactgctgagtgtcaggacagatcaagtcatggatgtagtgctatggcaagacaatgaagccttgggctgatgttggaagcaggtccaaatgcgaagcatgttgctttagagcagaaacccctcagtgctcaacttttgattttkgtatcccagtggtgtcttatgggaaacagattttcagcagtygcatgctgcagatttctatgatttcccttataatttctgaaaccatacaaaaatagctgtcagattttatagagacgacaattacagagttagagaatttgttaaaaatttgtaagaatagttgtatgggtggcagggtgactgattcagcctgtycacaaagggaaaggctgcagtgtgcactaagcattgataagctgcaaaggacacacatgagtcagaaatactaccagttctgttactcagactttttaaaag

SEQ ID NO: 38034 - DNA, 600 bp, Chicken  19866894268609_2
ctagatgatcttaatgctcccttccaacccaaaccattctatgattctatgattccttgattctacgactctgaaaggacaggtgagctttaactgcactcacgtatagggcacactgctgagtgtcaggacagatcaagtcatggatgtagtgctatggcaagacaatgaagccttgggctgatgttggaagcaggtccaaatgcgaagcatgttgctttagagcagaaacccctcagtgctcaacttttgattttkgtatcccagtggtgtcttatgggaaacagattttcagcagtygcatgctgcagatttctatgatttcccttataatttctgaaaccatacaaaaatagctgtcagattttatagagacgacaattacagagttagagaatttgttaaaaatttgtaagaatagttgtatgggtggcagggtgactgattcagcctgtycacaaagggaaaggctgcagtgtgcactaagcattgataagctgcaaaggacacacatgagtcagaaatactaccagttctgttactcagactttttaaaagacttaggcatcttaggagcaaatgtcactggaaagttcttgg

SEQ ID NO: 38035 - DNA, 600 bp, Chicken  19866894268609_3
atggcaagacaatgaagccttgggctgatgttggaagcaggtccaaatgcgaagcatgttgctttagagcagaaacccctcagtgctcaacttttgattttkgtatcccagtggtgtcttatgggaaacagattttcagcagtygcatgctgcagatttctatgatttcccttataatttctgaaaccatacaaaaatagctgtcagattttatagagacgacaattacagagttagagaatttgttaaaaatttgtaagaatagttgtatgggtggcagggtgactgattcagcctgtycacaaagggaaaggctgcagtgtgcactaagcattgataagctgcaaaggacacacatgagtcagaaatactaccagttctgttactcagactttttaaaagacttaggcatcttaggagcaaatgtcactggaaagttcttggatttcagcacttttcaaacttttgcttcttgagtgcatctacagacattttttaaagtgtttaaggtttacatgaatatgacaaaggctgygttgtgcttcttagatagaatcttggaaatgaaaaggctaagataaaatgtcattcaagcaaggt

SEQ ID NO: 38036 - DNA, 600 bp, Chicken  19866894268609_4
agagaatttgttaaaaatttgtaagaatagttgtatgggtggcagggtgactgattcagcctgtycacaaagggaaaggctgcagtgtgcactaagcattgataagctgcaaaggacacacatgagtcagaaatactaccagttctgttactcagactttttaaaagacttaggcatcttaggagcaaatgtcactggaaagttcttggatttcagcacttttcaaacttttgcttcttgagtgcatctacagacattttttaaagtgtttaaggtttacatgaatatgacaaaggctgygttgtgcttcttagatagaatcttggaaatgaaaaggctaagataaaatgtcattcaagcaaggtaatgctgtatcacagacccaaagtctctaatgttcattttgcaagatagttaacatgacagtgatgtccagccttgttactcagatttacctctaagaatttctcaggataacactgacctttatattcatgccagaactgtgctggctgttaattgcttccaagagttttacaaaacttctaaatctagtcttgatgtagagtgkagtttctccatctagatagctggctccta

SEQ ID NO: 38037 - DNA, 600 bp, Chicken  19866894268609_5
aaggtttacatgaatatgacaaaggctgygttgtgcttcttagatagaatcttggaaatgaaaaggctaagataaaatgtcattcaagcaaggtaatgctgtatcacagacccaaagtctctaatgttcattttgcaagatagttaacatgacagtgatgtccagccttgttactcagatttacctctaagaatttctcaggataacactgacctttatattcatgccagaactgtgctggctgttaattgcttccaagagttttacaaaacttctaaatctagtcttgatgtagagtgkagtttctccatctagatagctggctcctagtatttgctgtgggttctctgatttattaccactttaatatctaacatatgaaaaacatgtaatatctttcactctccatgttgttatgatctggatttaattctgcatttggcagaggtactcaagaggtgtctgctctattttttatttgctcttccatacttgaatctcaaactggagaaaaatacagagacagcatctctgacttctcagctcaataagccaatgtttagtgagttatgttaaaaatctcttaccagggcaacactg

SEQ ID NO: 38038 - DNA, 600 bp, Chicken  19866894268610_1
agccatccgcgggcaccggtaatgaaacacaatgtgcaagcagctaatgaagctgcttacaaagccagtgattctccacacttgaaagagggtgaaaataaggaaaatggaacaaaaataaagacttctgctgaaaaaatagaaacactaacagaactgatgctgggagcgggggatgtttatcatcgctattacggatactcagcaaaaatggggccacataatgctcactgtgattacatacattgtggctcttatatatcaacaatatatttgctacaaaggacttctgttgtagaygcagatagaaaagcgaaggcaatgcagcaccagccagggcctggccaggctccgttcccagcacactgcacatctgcagcaaagaaaagctgcaaaactttttaataattctgtgacctatttaaaaaatatctactcacttacattcatctatgctgtataagaaataaamtatagcactgaagagctttgagtggcagcacttcccttaagacggataaaagctgcgagttctcttggctgtttggtgccaattattacccgagttttgacttatacattatttcatagatcatttag

SEQ ID NO: 38039 - DNA, 600 bp, Chicken  19866894268610_2
gggatgtttatcatcgctattacggatactcagcaaaaatggggccacataatgctcactgtgattacatacattgtggctcttatatatcaacaatatatttgctacaaaggacttctgttgtagaygcagatagaaaagcgaaggcaatgcagcaccagccagggcctggccaggctccgttcccagcacactgcacatctgcagcaaagaaaagctgcaaaactttttaataattctgtgacctatttaaaaaatatctactcacttacattcatctatgctgtataagaaataaamtatagcactgaagagctttgagtggcagcacttcccttaagacggataaaagctgcgagttctcttggctgtttggtgccaattattacccgagttttgacttatacattatttcatagatcatttagtaaaacaacctgcatacaaaccctgtgctatgcctctcttcagtcgtaatccgctggcacaggagtgcttcaggcactcaccctgtacacctccagccagaaaacagtgggccccttcgctaaggcactctgtacgtgatgctgttgtaaccaagtggtccaaatgaagaga

SEQ ID NO: 38040 - DNA, 600 bp, Chicken  19866894268613_1
taattatttatactttagctcctaaatgcttttagaactgtgaattgtaccagcagccataaaatgccaaataccaccaatacttcatggaaagtttgccaatgtttgctgatttgaggaagttaatgagataaggccacctttttgctgcgggttgtgtgcctgctggagctttacagacgtcccatgtagtcagcagtgggagctgactttgcctcaagtctcttgctgacttgatgaaaactccaacctaattgcattaaactccaggatccgttgctgcatctcattatgttaggraaatgtttgctgaggttcatctgtgtggttgctggtgacgtatttacagctgkgactgcagcaggatatcagtaaaatcaaccttaatgagagcacagtgtaatgtaaagcagctccaacctggcttctgctacagctcrtgcttttgtttccttcctgccctacaatttattgctttcctaaagttayatgaaattacagtgtgtgaaagggccttctctcctcccgagctgccccaaagccccagcagacgagcagcaaacagatgctcagctttccctgtgggcagagctgtctgtt

SEQ ID NO: 38041 - DNA, 600 bp, Chicken  19866894268613_2
cagccataaaatgccaaataccaccaatacttcatggaaagtttgccaatgtttgctgatttgaggaagttaatgagataaggccacctttttgctgcgggttgtgtgcctgctggagctttacagacgtcccatgtagtcagcagtgggagctgactttgcctcaagtctcttgctgacttgatgaaaactccaacctaattgcattaaactccaggatccgttgctgcatctcattatgttaggraaatgtttgctgaggttcatctgtgtggttgctggtgacgtatttacagctgkgactgcagcaggatatcagtaaaatcaaccttaatgagagcacagtgtaatgtaaagcagctccaacctggcttctgctacagctcrtgcttttgtttccttcctgccctacaatttattgctttcctaaagttayatgaaattacagtgtgtgaaagggccttctctcctcccgagctgccccaaagccccagcagacgagcagcaaacagatgctcagctttccctgtgggcagagctgtctgttggcctctgcggtgttcagaatacagcagtggtgactgaaatgtgtgcttatgt

SEQ ID NO: 38042 - DNA, 600 bp, Chicken  19866894268613_3
ctttttgctgcgggttgtgtgcctgctggagctttacagacgtcccatgtagtcagcagtgggagctgactttgcctcaagtctcttgctgacttgatgaaaactccaacctaattgcattaaactccaggatccgttgctgcatctcattatgttaggraaatgtttgctgaggttcatctgtgtggttgctggtgacgtatttacagctgkgactgcagcaggatatcagtaaaatcaaccttaatgagagcacagtgtaatgtaaagcagctccaacctggcttctgctacagctcrtgcttttgtttccttcctgccctacaatttattgctttcctaaagttayatgaaattacagtgtgtgaaagggccttctctcctcccgagctgccccaaagccccagcagacgagcagcaaacagatgctcagctttccctgtgggcagagctgtctgttggcctctgcggtgttcagaatacagcagtggtgactgaaatgtgtgcttatgtatttcagttctgatctcactgtcctctgggatgcccaaccacagcgccagcatccaggtatggcactgctcgtgttctgctctgctg

SEQ ID NO: 38043 - DNA, 600 bp, Chicken  19866894268613_4
tagtcagcagtgggagctgactttgcctcaagtctcttgctgacttgatgaaaactccaacctaattgcattaaactccaggatccgttgctgcatctcattatgttaggraaatgtttgctgaggttcatctgtgtggttgctggtgacgtatttacagctgkgactgcagcaggatatcagtaaaatcaaccttaatgagagcacagtgtaatgtaaagcagctccaacctggcttctgctacagctcrtgcttttgtttccttcctgccctacaatttattgctttcctaaagttayatgaaattacagtgtgtgaaagggccttctctcctcccgagctgccccaaagccccagcagacgagcagcaaacagatgctcagctttccctgtgggcagagctgtctgttggcctctgcggtgttcagaatacagcagtggtgactgaaatgtgtgcttatgtatttcagttctgatctcactgtcctctgggatgcccaaccacagcgccagcatccaggtatggcactgctcgtgttctgctctgctgtgtaatcccaaatgtgggaaaatgagcttgtgttcctctgctaaagcag

SEQ ID NO: 38044 - DNA, 580 bp, Chicken  19866894268613_5
aaatgtgggaaaatgagcttgtgttcctctgctaaagcagtaaataactcctgcttaggaggagtcctacagaccgaagcatttcctatgaattctgttgtttcctttggtttagaaagcaacatcttctcttctgaaggttttctcactcttttattcagctaattctattgatacatcgtgaaatccgctctgttttgcaatcagttcatgcaacaagactactagaggccacaggtcttcctcagaatgctgcttccctgtgtgctccagcaacccctgcatgtaaaacaacttcaygaagagttgttttaatgtagacctttaaagcttagccttcttytttttccttccagctttgtgtacagaagttaaggatattgatcgaggactctgaccagaactgtaagtatgttgcttgtcttcatggcagctctgagcaagcactcacaggggagaaattgcagcagtcttagtgcagtgagctgtgtctccaaacatctcgttcagtattacagagctgtgatgttgtaaacaattgttggggctgtaatgtggaaataattttagatagtgagct

SEQ ID NO: 38045 - DNA, 537 bp, Chicken  19866894268613_6
ataactcctgcttaggaggagtcctacagaccgaagcatttcctatgaattctgttgtttcctttggtttagaaagcaacatcttctcttctgaaggttttctcactcttttattcagctaattctattgatacatcgtgaaatccgctctgttttgcaatcagttcatgcaacaagactactagaggccacaggtcttcctcagaatgctgcttccctgtgtgctccagcaacccctgcatgtaaaacaacttcaygaagagttgttttaatgtagacctttaaagcttagccttcttytttttccttccagctttgtgtacagaagttaaggatattgatcgaggactctgaccagaactgtaagtatgttgcttgtcttcatggcagctctgagcaagcactcacaggggagaaattgcagcagtcttagtgcagtgagctgtgtctccaaacatctcgttcagtattacagagctgtgatgttgtaaacaattgttggggctgtaatgtggaaataattttagatagtgagct

SEQ ID NO: 38046 - DNA, 600 bp, Chicken  19866894268617_1
gccttgatttggagggtggcggtgtgcatgtgtgtggtctattacacctttaatctttagggtgccttaatgatggaatagtatgggtgggaaagatgtgtatgatttgatgactgagctggagaggggagatgatggtggtttaccttacctagcaagttctctagtgaaagaacatctgtgacaacatcttcccagaggaggctggcagtcagtccattctcccattcaatgactaacacagctgcagttacaactcttctatgacctgatggccttgtgcttatctgatatgtagtsagtgaaatgaccacaggtgattagtttgtgattctaggaagctcttctggatgaagagggctatttagacccttactgagaatcatttctattgcagatgtttatacacagagagcaacaagcccgctcaagctgaagtattcctttgttcttacagaaaactctgtagacttccttacctacaaagatttgaatggtactcctggcattgctattgtcttccagcatttccctacctcccaggaagctgactttgtttgggaaaataattgatttttctaaaacttactgttgttctca

SEQ ID NO: 38047 - DNA, 600 bp, Chicken  19866894268619_1
caggatgtgatacgcacatactgtacttgcaggcaaaagtttaacctcttttatgcaaccaaagggaataaaacatgagaagttccagctccttcaaggaaatgagtcaaaaaaccaaaaggatgctgggcaccttttacctccaaatactacaacttttttcctccagtaagtggtaataaaggatacacccacactgcaaaacaacaaatgtctaatacaagaagaggagatatttccctgtattagtaactcattactttaatcaattagttttgcattcctgcattaaaaaagaayaacaacactgctgcttacaacaagcaaaatcagcactaacaactcactgtttttgccattttaatttcaatgtcaaaaacattcgtttttactaataatatgtttgatattttaaattgtaatgagatgcctttggataaatacagaacttcctttaactttctgaaaatgcctacaactactgaagctcttaagagctggaaagacgctgatgctgagaaacacctgaaagtctcaacagaagcataatgttatcctatttcaaacaatgctccaacggcacttggacttctgagacat

SEQ ID NO: 38048 - DNA, 600 bp, Chicken  19866894268619_2
gtaatgagatgcctttggataaatacagaacttcctttaactttctgaaaatgcctacaactactgaagctcttaagagctggaaagacgctgatgctgagaaacacctgaaagtctcaacagaagcataatgttatcctatttcaaacaatgctccaacggcacttggacttctgagacatctaaaacgataaatgatttagttttgtatggcctttcaagtatgaagtgatcaggatttttcagtcttatttcctacagctgctgaatagacagaacaaacaaaactgtaaaaactcraaaggcagctattcttggaaggccagctgatgcctaaacctagttaaagccattaccttacctctggggagtatttaaagaagtcttgatagtcttgttcactttgcctaatgcaagagaaatttcaccacatgaaatggaaggcaactttatttaaataaataaaacccacaatttgcagaactctgagctcaagagtatgctgattttcaaaacagaggatgttttcaagaattaaatcaccgttttgttgtcagttgcaactgtaaagagtactaaatcctactaagttaggcttta

SEQ ID NO: 38049 - DNA, 600 bp, Chicken  19866894268627_1
tatcttcactactgatagtaagtgttatctagatctaagaataacagtctgtgaaatgtctcacactcctgaaagggggatagctttgaagtttcttctcatcactaaataggatttctgctctgtggagctctttattggaaggtgcctcctgcagcagcttttcattattcacccttcagtaccccctgcaagaccttcccatctcagcacgctccctattgtccatattcacatagaatgcaaaggaggacagggagaaagccatccacagctgaaggcaacctgtccaagttctgyaccagtaacatcacaccgatcagtggggacgttgctctctaaaggatacaggatgacaggagaagggcaataacactttttgcatccctggattatgggtcctttattgattatagccacaaatgtagatgaagtattatgaagcttgtttacagtgttatctgcttgcctgccagtcattgattctctctgttaacatcttcacttctaagtacaagaacagaagaagagccttcagatgttccatctytagatagctgcacctttattgctgttaaaacccaagtaggacctatttca

SEQ ID NO: 38050 - DNA, 570 bp, Chicken  19866894268627_2
tgtccatattcacatagaatgcaaaggaggacagggagaaagccatccacagctgaaggcaacctgtccaagttctgyaccagtaacatcacaccgatcagtggggacgttgctctctaaaggatacaggatgacaggagaagggcaataacactttttgcatccctggattatgggtcctttattgattatagccacaaatgtagatgaagtattatgaagcttgtttacagtgttatctgcttgcctgccagtcattgattctctctgttaacatcttcacttctaagtacaagaacygaagaagagccttcagatgttccatctytagatagctgcacctttattgctgttaaaacccaagtaggacctatttcaagaaactgttctggtgacaaagttacagcttctggaatggttgtttttacatacttagcatcaagagcaatcacagttttgatgaacttgcccaggttcctcttctgactgtatgggcaagctcaggatgagagatttcagttcatactttctttttttggtctttctgcaaaaggatcctggaaagcagta

SEQ ID NO: 38051 - DNA, 542 bp, Chicken  19866894268627_3
ggacagggagaaagccatccacagctgaaggcaacctgtccaagttctgyaccagtaacatcacaccgatcagtggggacgttgctctctaaaggatacaggatgacaggagaagggcaataacactttttgcatccctggattatgggtcctttattgattatagccacaaatgtagatgaagtattatgaagcttgtttacagtgttatctgcttgcctgccagtcattgattctctctgttaacatcttcacttctaagtacaagaacagaagaagagccttcagatgttccatctytagatagctgcacctttattgctgttaaaacccaagtaggacctatttcaagaaactgttctggtgacaaagttacagcttctggaatggttgtttttacatacttagcatcaagagcaatcacagttttgatgaacttgcccaggttcctcttctgactgtatgggcaagctcaggatgagagatttcagttcatactttctttttttggtctttctgcaaaaggatcctggaaagcagta

SEQ ID NO: 38052 - DNA, 600 bp, Chicken  19866894268633_1
aatcaaatggcactgtgaagttagttggatgccttgggctgtgggcaagaaggaagcttcatacctagaacccatgtgagagtaaaggaaggctgtgtaaagtgcagcagtggacttatgtcttacctggatcaggactagaagacttgcaagaaaaacaaaggtcaagttgaaccccagcagctccagtaaagacaaggcaagacagcctctctcagtgcattcttctactgctgcacagagggtcaaggaaagcaacaacattcctcccatcaacacacaatcattccgtgttgtctrgcaacaggagccaaacttgtgcttccaactccagccagggcagaygacaacccatcaggaagccagagctcaagggtgagctataaggaagggaaacaactaattctttcagagattagcctttgcccacatactgatactgaaastactttcttggtttcaagggctgaatgacacaggcaagtgaaaacctgattaatcaacaatgtgaccgatggcaaaagtctaaaagaatcagcttctctgagcaaaacatggcaataggaagaaaagggtcactcgagtccaacaggactccat

SEQ ID NO: 38053 - DNA, 600 bp, Chicken  19866894268633_2
caagaaggaagcttcatacctagaacccatgtgagagtaaaggaaggctgtgtaaagtgcagcagtggacttatgtcttacctggatcaggactagaagacttgcaagaaaaacaaaggtcaagttgaaccccagcagctccagtaaagacaaggcaagacagcctctctcagtgcattcttctactgctgcacagagggtcaaggaaagcaacaacattcctcccatcaacacacaatcattccgtgttgtctrgcaacaggagccaaacttgtgcttccaactccagccagggcagaygacaacccatcaggaagccagagctcaagggtgagctataaggaagggaaacaactaattctttcagagattagcctttgcccacatactgatactgaaastactttcttggtttcaagggctgaatgacacaggcaagtgaaaacctgattaatcaacaatgtgaccgatggcaaaagtctaaaagaatcagcttctctgagcaaaacatggcaataggaagaaaagggtcactcgagtccaacaggactccatccgtcaggtaaaagatacagctttgtacgacccggaacttgagct

SEQ ID NO: 38054 - DNA, 600 bp, Chicken  19866894268633_3
ttgcaagaaaaacaaaggtcaagttgaaccccagcagctccagtaaagacaaggcaagacagcctctctcagtgcattcttctactgctgcacagagggtcaaggaaagcaacaacattcctcccatcaacacacaatcattccgtgttgtctrgcaacaggagccaaacttgtgcttccaactccagccagggcagaygacaacccatcaggaagccagagctcaagggtgagctataaggaagggaaacaactaattctttcagagattagcctttgcccacatactgatactgaaastactttcttggtttcaagggctgaatgacacaggcaagtgaaaacctgattaatcaacaatgtgaccgatggcaaaagtctaaaagaatcagcttctctgagcaaaacatggcaataggaagaaaagggtcactcgagtccaacaggactccatccgtcaggtaaaagatacagctttgtacgacccggaacttgagctgggtaaagagccgtacaaagaaatccacaaagaggcccacctacgaaaaaaagacagacctgtcatcagaaatcatatatacgagcaacaaagacactctc

SEQ ID NO: 38055 - DNA, 600 bp, Chicken  19866894268641_1
gagctctatagtctgtaatggcaaaatttcagtgacctcccaggtatttagcaaagatacaggtttgaagccttttcctaggtgaggctctttctgtttcctgaaaaggctgcagagtgaaccagattttattttgtatgggtatatggggaatgtgtgcactgtatgccatgtatttcagtactgtcaagtggaaacagtattatcagtggtgctattgagaaaaagttattgccattataggactgtttcttgcggacttctttttctgtagtttaagaaaagaaacattaagactcrtaatcctgaagtttcatcagtttcagcacctctggaatgatgatctttaattaggcagttaaaagatggtgagtgagattattcaaagcctcctagatagcctaattttgatcagatgttagacaatgatatcttctggatatggaaatgattctggatacgatagacttctggatatggaaagtagtaaaacccacatccttttgaatgttcctctctaaaaacatcaggcaatgctgttgtcctgaccacagttagcagccactgtgttactcacgaggagtatgggtagaaagaagt

SEQ ID NO: 38056 - DNA, 600 bp, Chicken  19866894268645_1
ggtttctgtcctgaagtgtctgtctccaaaaacaacgtgcctacaaatagcataggctggcatgagcattgtacagctgtgctcagtgtcacagctagaccctgcttggaatggaggtggtgactgttgttgtttgcagctcggctctacggccatcggcatccagacctcggagggcgtgtgcctggctgtggagaagaggatcacctccccactcatggagcccagcagcattgagaagattgtagaaatagattcccatataggtaaggagaaatgtacttctgctgccccccgggrcacccacccaattgttgttgtgtgtaaatacgtacartaaagctctgtccctgtgagtttcagaacaagcctttcctgcaggcagctctggcaatccaagtgggaatgctcagctctcccagtgagcaccaggtcctgctctgctggcctgcagcctggaaaaccagcggacatagttacaggagtaggaagaggcagctgaagcacccccaccttctgtgacctctctgatgaaagctcatcccaaaattagatctgggagggcagggaattattgcaatgtaaaggcttgactcgagg

SEQ ID NO: 38057 - DNA, 600 bp, Chicken  19866894268645_2
tgcctacaaatagcataggctggcatgagcattgtacagctgtgctcagtgtcacagctagaccctgcttggaatggaggtggtgactgttgttgtttgcagctcggctctacggccatcggcatccagacctcggagggcgtgtgcctggctgtggagaagaggatcacctccccactcatggagcccagcagcattgagaagattgtagaaatagattcccatataggtaaggagaaatgtacttctgctgccccccgggrcacccacccaattgttgttgtgtgtaaatacgtacartaaagctctgtccctgtgagtttcagaacaagcctttcctgcaggcagctctggcaatccaagtgggaatgctcagctctcccagtgagcaccaggtcctgctctgctggcctgcagcctggaaaaccagcggacatagttacaggagtaggaagaggcagctgaagcacccccaccttctgtgacctctctgatgaaagctcatcccaaaattagatctgggagggcagggaattattgcaatgtaaaggcttgactcgaggccaggttctcctggagcactagtgcctgtacccctgc

SEQ ID NO: 38058 - DNA, 599 bp, Chicken  19866894268651_1
  misc_feature (1)..(234): n is any nucleotide
nnnnnnnnnnnnnnnnnnnnnnnnnnnnnnnnnnnnnnnnnnnnnnnnnnnnnnnnnnnnnnnnnnnnnnnnnnnnnnnnnnnnnnnnnnnnnnnnnnnnnnnnnnnnnnnnnnnnnnnnnnnnnnnnnnnnnnnnnnnnnnnnnnnnnnnnnnnnnnnnnnnnnnnnnnnnnnnnnnnnnnnnnnnnnnnnnnnnnnnnnnnnnnnnnnnnnnnnnnnnnnnnnnnnnnnnnnctatagagagcaaagatttgttttcagactggtatgttaaatacaggtacactgtgcattatgtaytgtaactctacttctgcattacatatttagacttttaaggagtgaaataaaaatttagatacaagattttttctgttttttgccatctccacagatactggaatctatctttacactgttgagttagtcctataattttttgatgttgaggaacttgaggcagaggaagacaccaaagcttttaaaaggacagatatgtgatgtgtcagtctagcaccccagctagggctctgcttcctgagtgagctgtgcagtacacgagcagcctgcagtgttggtagtgtcatacagaaatatag

SEQ ID NO: 38059 - DNA, 600 bp, Chicken  19866894268651_2
aaatttagatacaagattttttctgttttttgccatctccacagatactggaatctatctttacactgttgagttagtcctataattttttgatgttgaggaacttgaggcagaggaagacaccaaagcttttaaaaggacagatatgtgatgtgtcagtctagcaccccagctagggctctgcttcctgagtgagctgtgcagtacacgagcagcctgcagtgttggtagtgtcatacagaaatataggatgatacaaattaaaagaggcctctggaagttgtttggtccgacccctgytgagcctaatcccagtagattagtttgctcacagacttgttgatctctgcatgtctcaaagaacagacttcrcagcttcactgaacccaatattcaaccaccctcrtgctaaaaacacttttcctaacatgtaatcaggatttgctctgttgaaacttgcctgttgactcttgcactgccagtgcatatctttgagacgggcctggccccatcttctctgtgccctcctcccaggtagctgtgggctgcaatgggacgttgcccagcaccctgagccttctctccatcaagctgggcaag

SEQ ID NO: 38060 - DNA, 600 bp, Chicken  19866894268651_3
gttagtcctataattttttgatgttgaggaacttgaggcagaggaagacaccaaagcttttaaaaggacagatatgtgatgtgtcagtctagcaccccagctagggctctgcttcctgagtgagctgtgcagtacacgagcagcctgcagtgttggtagtgtcatacagaaatataggatgatacaaattaaaagaggcctctggaagttgtttggtccgacccctgytgagcctaatcccagtagattagtttgctcacagacttgttgatctctgcatgtctcaaagaacagacttcrcagcttcactgaacccaatattcaaccaccctcrtgctaaaaacacttttcctaacatgtaatcaggatttgctctgttgaaacttgcctgttgactcttgcactgccagtgcatatctttgagacgggcctggccccatcttctctgtgccctcctcccaggtagctgtgggctgcaatgggacgttgcccagcaccctgagccttctctccatcaagctgggcaagtccaggtccctcagcctcacctgcatcatgtgctccagcccctgcaccacctgggtgtagtgggctgggctc

SEQ ID NO: 38061 - DNA, 600 bp, Chicken  19866894268651_4
gaggcagaggaagacaccaaagcttttaaaaggacagatatgtgatgtgtcagtctagcaccccagctagggctctgcttcctgagtgagctgtgcagtacacgagcagcctgcagtgttggtagtgtcatacagaaatataggatgatacaaattaaaagaggcctctggaagttgtttggtccgacccctgytgagcctaatcccagtagattagtttgctcacagacttgttgatctctgcatgtctcaaagaacagacttcrcagcttcactgaacccaatattcaaccaccctcrtgctaaaaacacttttcctaacatgtaatcaggatttgctctgttgaaacttgcctgttgactcttgcactgccagtgcatatctttgagacgggcctggccccatcttctctgtgccctcctcccaggtagctgtgggctgcaatgggacgttgcccagcaccctgagccttctctccatcaagctgggcaagtccaggtccctcagcctcacctgcatcatgtgctccagcccctgcaccacctgggtgtagtgggctgggctccagcttgtctgcctctgggttgtggttgcccagg

SEQ ID NO: 38062 - DNA, 600 bp, Chicken  19866894268652_1
aaggtctccatgtgttgcagcaagtttctgcgagtgaaatgttttggagcactctaacaggtgtttcgggaacacgttgttatttaacctagagctgctgctgctgctctgtaatctggccagtttgctcacttaccatgtaatgtgtgactgatctttccagagcctgggggaatacttcacagaagtgtgagttaaaaataaataaagtgaagaagtaataataataattaaaaaataaaataaaataaaggagaaaaagggaaaaagaagaaaactggaaataggaaactgagtgargtgggtgatgtgtggttctatctggttcgttgggataaacaaaaattataaaggaagagtttcatttctggggaaatgagctttctctctaagaggtggggaaagagacactgaatgtacagaagcattttgagggagtttcactgtttgttgttgatgtcttggaatagatatgtaacattcagctctttaaaaggaatactgagttggaacaattggaattgaactggaattccagcaatgggaaaagaaaatgtgagttggtgcacaaaatgctgtaaattcttacattttcatgga

SEQ ID NO: 38063 - DNA, 600 bp, Chicken  19866894268665_1
acaaatattagcaagtaatgaaaaagtctgaatctgttcagaaacagtacagtaaaactgttcaccccaggaacggggcacccacagcttctctgggcatctgtgccggggcctcactgccctctgagcaaagaattgcctcctaacatctcacctaaatctcccctcttttagtttaaagacattctcctccgtcctaccactaacaaactgggtaaaaagtcactctctttcctgtttatgtgctcccttcaagtactacagggccacaatgaggtctccccagagccttctcttctscatgctgaacaagcccaactgtctcagcctttctttgcaggacaggtgctccacgcctctgatcatcagaagagcctctgaagtgggtgaggaaacaggaaatgtctttcagaaaatacagttacgttcagatccagttcttcagctcctgtgcaagactctaaatgcagataagactagaaagactgatatcctcttttgagctacaacagctgtccactgttaaagaaaagtaaacactcagccacacaatacattcagagtcattagatatgagccccaaagcaatggacagtataa

SEQ ID NO: 38064 - DNA, 600 bp, Chicken  19866894268672_1
aatactttcaagggataagcaggcagtatatcttctcctaagggatttgattaactactttttttttttttgttttctggggcatattgcagaatatgctcaggcagcttccgctctgtcatgaatgataccagttttactgactgtcttgaaacatcccctcctaagacagctttgggcctctctacaactagaaaacatagctgatcttcaagcacaagcttgatttctcatctttcagctatttcccattaagattgtgcacttctgtctgataataacactaagcttcttttcttytgtgaacgtgactttgagtactgtcagcaagtatggtccaggctcttcrgctgtctggtcaagggtattccttatgtagattattttaacagcagtaaaattacagccaaagtaggtttccacagctctgtcctactgctagcctagtaaagccaaagtgcttaatgcagtctgaagccactgactgttttgcacctagcagtatctcttttgattcacagtgaagtaacctccaagttagctgagcacccttttgctatgtgtactcttttttctccctctgagcataactggtgtcca

SEQ ID NO: 38065 - DNA, 600 bp, Chicken  19866894268672_2
attaactactttttttttttttgttttctggggcatattgcagaatatgctcaggcagcttccgctctgtcatgaatgataccagttttactgactgtcttgaaacatcccctcctaagacagctttgggcctctctacaactagaaaacatagctgatcttcaagcacaagcttgatttctcatctttcagctatttcccattaagattgtgcacttctgtctgataataacactaagcttcttttcttytgtgaacgtgactttgagtactgtcagcaagtatggtccaggctcttcrgctgtctggtcaagggtattccttatgtagattattttaacagcagtaaaattacagccaaagtaggtttccacagctctgtcctactgctagcctagtaaagccaaagtgcttaatgcagtctgaagccactgactgttttgcacctagcagtatctcttttgattcacagtgaagtaacctccaagttagctgagcacccttttgctatgtgtactcttttttctccctctgagcataactggtgtccagctagactaggtttactgaataaccaacccacccactttagaaaaaggc

SEQ ID NO: 38066 - DNA, 595 bp, Chicken  19866894268673_1
tctaaccagcagagagctgtgggcggcagacagaccagaaagcagctctgtgttgagagtcgtgcgtggagtcagttcacctcgctgtctgccaggcgccagagaggacacaaactgtagtttggagcgcagaaagtgcctacatcaatctgcaaaccagcgttaatataaccacacagtgctgtgggatgctatgcggtgttcaaaaactgggttttgagcttgccttggtgcacaggcactgaggctgcaggggccgtgtggggagcggccatgtcggtgccaccagctccaaggacygaggaggccactgggcctgggaggtgtgatggagaaggggcagagcaatgaaaagtgcaaggggaaggcctgtgagcatcaaggcatagaaatgagaagcatagacatttactagtgttgggtttttttgtttctttttttctttccctccttcttctcagtgtctgggttatttaattctcagtgtggaaaaataccagcgctcggtttccatgggtgttggggagggtgggactagtgcctgtgaaatactgcaataccatggagattggagcccgagagcaggctgtgagga

SEQ ID NO: 38067 - DNA, 417 bp, Chicken  19866894268674_1
tcataggacactggggcaataaaaatgctatgaagtacaattattgcatgtttcatgctcagtagctaatttttaatttcaccatcttggacactttttcatcccctcaggcttcctaaataggaaatgagaatcatttggacttggaaaacaggaacagtaattcaaaaaggaattaatttacttgactgttcatttgctttacttttgcaattatttccgctgttgcgtttgaacaataactttctccctgtgcatcagataccacttgttcagtcctatagggaaataacagtcccrcaattgtgacatcagttgttgatcccaaagttggaaatacctcacctgtgacatcagaagtcccctaatggcagggccagcgcagaggtaaaagcaactctgggaggagaggaagaa

SEQ ID NO: 38068 - DNA, 599 bp, Chicken  19866894268690_1
  misc_feature (1)..(29): n is any nucleotide
nnnnnnnnnnnnnnnnnnnnnnnnnnnnntgaatgtgcacatgcagcctggagcaaagccagagcaccttagtgggaccagttctccttcatcttgcaagccagcatcgcttcgagcacacatgtgtctgtggtcactccttcccttcgcagcattgccccggcatcatcattcactgtcgcctgcatgagctgtttctttactggtgtaccaaaggtactttgaagatgggatggggctttttagagggaaaacctggaaatagctacggatgtggtttgccccaaacttggctgctcwtcagtgcaaaaccaacccctctgcccatctgttctgccccaaacagcggcggctgtcagatgagatcgacaaactgaggctggaggttgatcagctcaagaccagaagtgggacgtttgtggagagtgtgcacacaaggtgagaggctcctgctgacaacyctgctttctggcacacaccccactgccgtggttttggggaagtttccttttagggctcccaaatgctgttggcattgggtatttgagtgccagcaagccttgatgcagagctgcacggtggcagcagatctgtcctgg

SEQ ID NO: 38069 - DNA, 600 bp, Chicken  19866894268690_2
ggcatcatcattcactgtcgcctgcatgagctgtttctttactggtgtaccaaaggtactttgaagatgggatggggctttttagagggaaaacctggaaatagctacggatgtggtttgccccaaacttggctgctcwtcagtgcaaaaccaacccctctgcccatctgttctgccccaaacagcggcggctgtcagatgagatcgacaaactgaggctggaggttgatcagctcaagaccagaagtgggacgtttgtggagagtgtgcacacaaggtgagaggctcctgctgacaacyctgctttctggcacacaccccactgccgtggttttggggaagtttccttttagggctcccaaatgctgttggcattgggtatttgagtgccagcaagccttgatgcagagctgcacggtggcagcagatctgtcctggggtgagacacagactgtggagaacagcccagcccaactgaatgacctctgctttgctcttctgatggcaaaaaaaagcacccactggacatccgtgtctttttctgcccaaaggactcggagtttgtgttacctctctctcagctgtgtcaccccagagtgg

SEQ ID NO: 38070 - DNA, 599 bp, Chicken  19866894268696_1
  misc_feature (1)..(4): n is any nucleotide
nnnnaggaaatgtcgactgaacgtggtgtacctgggctatcatgtttgttcagagactgatggccatatccactggccataccagtgaggaatatatttttaagagagctcagagtcacaatttcatatccccaagacatataggagaacttggcctccatttagatgctgaactggagagtttaaaagtgttctgggacccacatactcaatggttatacacgcattcgtgtccaaatgagtgctgtgcctatgtcaaagtgtgggccttatggccctcttggcatgtgtaagtgcacrtgcacagccaatgcggtaggtgccccttccatataaacttactccaagtctcctggagacaaatttttggggtttggacagaccatgacaagactctcatcatttttcattgttttggttgccatggaaaccatgggtctcagatatctttttaagcttgttttccatagaacttcattgaaatagaaagartatagtgcattctgttctgtttgcagattttaaaaagatgatcctttgtggtttcggggttttcttggtctgtttggcacgagtgaaatctaggcatttattcttct

SEQ ID NO: 38071 - DNA, 585 bp, Chicken  19866894268696_2
tctgggacccacatactcaatggttatacacgcattcgtgtccaaatgagtgctgtgcctatgtcaaagtgtgggccttatggccctcttggcatgtgtaagtgcacrtgcacagccaatgcggtaggtgccccttccatataaacttactccaagtctcctggagacaaatttttggggtttggacagaccatgacaagactctcatcatttttcattgttttggttgccatggaaaccatgggtctcagatatctttttaagcttgttttccatagaacttcattgaaatagaaagartatagtgcattctgttctgtttgcagattttaaaaagatgatcctttgtggtttcggggttttcttggtctgtttggcacgagtgaaatctaggcatttattcttctattaagtgtaacaaattgaatagaatttcatcgattcagaatctagtaaggaagagaatttttattagtttttaggaaaaaaaaaacaaaagatctgtatttttgaggattagctgttgaaaactgccatgaagtggtgatttttttaattttaaaattttaccttaattttatttaa

SEQ ID NO: 38072 - DNA, 599 bp, Chicken  19866894268706_1
  misc_feature (1)..(66): n is any nucleotide
nnnnnnnnnnnnnnnnnnnnnnnnnnnnnnnnnnnnnnnnnnnnnnnnnnnnnnnnnnnnnnnnnnaatgtctgagcagaaattatactcaaagctattttcttaggtattagtaacaaaccaagcttatgcaaacatcagccaaagtagctgctgatgtgaagacgtggaagagcagatcaaatccaagcttgcaacagcaaacaggtatcagtaggaaagaaatacctgcctgaattttgatgcccttgaacaactcagtaagtcacatcactcacatcactctacatacggaccttrataggagtcagacagcagtaatgcccttgaaaatcaggcagtgagctctgggaggaaggaagtagctgggacatgcagtaaattcaatgaaaaaaaaaaaaaaggaaaataaatctgaaaaaaaataaaaatcacagttctgctgcagaatcattccattcaatctggctacaaacataggcagctacaaaccgatcattcatctccaacataaacatagatttggttagactagcagtaacataggttgagatttttagtagatgacataaataaatgtatttttatatttcctgacc

SEQ ID NO: 38073 - DNA, 600 bp, Chicken  19866894268714_1
gcacccaagacaacagtgcagaaccgaaattgaagccaccactattggtgcagatggtgggatttaccaagctctgggcaacaaaatctcatatctgccgtcattccttccacagcacaaggtcatgagcatcattatttcccctacattttcaacaccaacccaaacttcatattcacgcaacacctcacccttctcaaatctaccccaaaattacttacaggaaggtctcagtagtcccaatagctctgtcaagctgtcgacagtcccagtggaaaacctctgtgaaactcaccgccmggcagcccttacagaatcccagaggagcctgctgcagtccccacacctcggccctattcactgccttccactggcctctggcagctgattttatcactgagcactgggctatgttgagaggatgaaccacttggtttatttttagggaaggtgaagctgctcttccacccggctgagtcaatcatgagctggggaggtggggaaatgtgggggcctggcttattttcagaacttgttcattcaaaatacccctggtgtaatccagtatgggacaagggacgcttccaaactgcagtgcca

SEQ ID NO: 38074 - DNA, 600 bp, Chicken  19866894268714_2
atgtgggggcctggcttattttcagaacttgttcattcaaaatacccctggtgtaatccagtatgggacaagggacgcttccaaactgcagtgccatggggaagagccatttccctgattcactgccatgtcctcagcctgtgatctgtactgcctgaccccctttgctttgggccaccgccagaattttaagggaaggcaacaggtattacattttctagttcctcatttcttccttagctcaagtactctagtactgagaaagaaaataagatattttaggaaaagggaagtgagagraagcacgaatgcaaaggaggatgacatgctcccttctcccacattcttccttgatgggcagcgcagcactactgggagctgctctgggcagcatttgggcatccaaatgaggtctatgaagttggcaaagagttgagagggcaagagtgtaaggagtgcctgaggtcccatgatttgttccagggcagtggtcccaggccacgcacatgtcccccacacccaatgccagaccacacgggactaccctgatagggcagggagctgcacagaggcaaaactgtgctgaaccaagcaatgtag

SEQ ID NO: 38075 - DNA, 600 bp, Chicken  19866894268716_1
aacgttccactgcttctggaaacttcctggaagtggatattactctccagatctggacctttctgactttgttgcgctttgtcgaggtgttccacttcattaatgcagaaatggaaaagtgaccgagactcttcagctatttgacgagaaaagaccctctccgactccagaggtcttccaaaatctgccacgaagctattcatccgaaatcttttttcagaagattctgtatttctagggaaaattaaataaaagtacagtgagactatgaatttggaattattggcattcttagcagcwtgtctggtttcagcagccattatgagtaggaagaacgaaaacccttcagctcatctatgagagttacaagccagcactgtttattattttccactkaagttactttaagccttgattctgagtagtaattttccatgggaatcagttaccaatgccagcactctttaatggcacttctagtcatcagtgtaattcaataatcagctcacaccactgagtgagctcagaactactctacagaatttcctcttagggcaagcaatggaagtttaaaataaacgtttcatagaatattgtgag

SEQ ID NO: 38076 - DNA, 600 bp, Chicken  19866894268716_2
tcattaatgcagaaatggaaaagtgaccgagactcttcagctatttgacgagaaaagaccctctccgactccagaggtcttccaaaatctgccacgaagctattcatccgaaatcttttttcagaagattctgtatttctagggaaaattaaataaaagtacagtgagactatgaatttggaattattggcattcttagcagcwtgtctggtttcagcagccattatgagtaggaagaacgaaaacccttcagctcatctatgagagttacaagccagcactgtttattattttccactkaagttactttaagccttgattctgagtagtaattttccatgggaatcagttaccaatgccagcactctttaatggcacttctagtcatcagtgtaattcaataatcagctcacaccactgagtgagctcagaactactctacagaatttcctcttagggcaagcaatggaagtttaaaataaacgtttcatagaatattgtgagaataatctttgatagcaagaacctttcagagacacaggcaatgctgctgtcactaaagacgtaatttgggtggttgatcgtctagatatcaaacca

SEQ ID NO: 38077 - DNA, 600 bp, Chicken  19866894268738_1
aaagcctataaaccttcacatacccagaggtcctgaatctgcccagctccttttactttgttttaggatgacagaaaacaaagaaatacagttcatgtctctttaccagacttttgtaagccctctccaaccagagagaaatacccctcacttcacaaccacgccttatttgtgtcattgctttttggctgtacagacatttgtcaatgactgtcttgaaggatgaagtacaggagaagtaacatttcactaaatacctctgctgaacacctgaagaactcactgaggattgcagccatwgccattgagccagactgatgtgcttgtttcagaaaaacaagatcagatatcccatcatttttattgttctgctgctctcttttgtatatgttttaataaagagcattaaaaaatgagttttgttgctttaaatacattaagtatagcctatgttgaatgagagctgctccaaaagtaatgcctcctattttctgatgtcgatgggatggcagtagagattgaaccttcccaccaatacactgctacatcttattgctgtggaagagatggcagcagagcagcagtctgacagaatggcgc

SEQ ID NO: 38078 - DNA, 600 bp, Chicken  19866894268748_1
gttcaagtatgcaggctgctaatatgcttctgaaaaaaatcgtaagatgttctgccttctcatttccaatacaacgtgggatgaaacaggatttgtttccacttagtagaactctgattctgtcaccttgcctgaaagaggacaattcacgcagctcttcagaaaaagtagatttagatgcatggaaggaagtaatgaagtctgggttgcaagaagtcagccagacggtctctgagcctaaggagctttccactttggctgctgcacgtgagactttggagttgtggaggctagttggtmggccagttcctgaaaacatcagtgaagaacagctaaaagcttttatggaatgtccttccaaatcggccaaaaagaagtatttaaaatatttgcatcttaaagaactgtacaagaaaaatagcaaaagaaagatggatgagaaaagggaaaggaggctggaaacacaagagagagcttcagagactcaagagcccaagaagaatccatttgtttgtttgtggagcagygttatggataaaacatacaactggagagttgctcagtctatgatctttggccagcctctagtgtttgatatgt

SEQ ID NO: 38079 - DNA, 600 bp, Chicken  19866894268748_2
gtctctgagcctaaggagctttccactttggctgctgcacgtgagactttggagttgtggaggctagttggtmggccagttcctgaaaacatcagtgaagaacagctaaaagcttttatggaatgtccttccaaatcggccaaaaagaagtatttaaaatatttgcatcttaaagaactgtacaagaaaaatagcaaaagaaagatggatgagaaaagggaaaggaggctggaaacacaagagagagcttcagagactcaagagcccaagaagaatccatttgtttgtttgtggagcagygttatggataaaacatacaactggagagttgctcagtctatgatctttggccagcctctagtgtttgatatgtcgtacgaaaggtatatgtctgtcagagaagtagcaaatgcagtgagacaaatagtattaagtgaaggttgcaatcgaagatcggtggatccattccacattcacttctgtaatttcaaagatgacagtctgtatcataaggagtttatcaaacattatagaggagcgtgggacaagctgcttatcactgtgacagaccagtgctacacagacatctttcccaaggat

SEQ ID NO: 38080 - DNA, 599 bp, Chicken  19866894268749_1
  misc_feature (1)..(39): n is any nucleotide
nnnnnnnnnnnnnnnnnnnnnnnnnnnnnnnnnnnnnnncctctctggacagcctgttccagtgctctgtcacccttaccataaagaagttcttccagtggcccttttctattaatgcttttgtgaatttgagtctgacaattacaatctgactattctgtattactgagggtgtcagatttgaggcttgcagtaattctttctgactttaacatctatgaatctacatcagttcaacttagtatttgttgtaattaagtgtgattcaagcgtcaatgagttataatctcagcaaacatktgtaggtagtagagaggtttcatttaaatgtgagcttcaacccatacatataatattgcagttcagttgaggtcataaacacagtgcagagaccagcaaacactttcatccctccagcttgcactctgcatgagttctggatacccctgctgcatattccaaaggtcaactgaacatgatggcttctaaggaaattataggctgcagatttccacccatatcatctacctacatgtctcatttcaaaatctttttgtgaaatactctagtttgtacagatgtaaactgaaacgtcaaga

SEQ ID NO: 38081 - DNA, 600 bp, Chicken  19866894268750_1
catctatatcactttgtaccactctgtatctctaagcctgcgtaagtaatgctgtactaacaattatcagacactataccaatgatctcagtttttataatatagcgtccatccacactcaaactctttctagatatttacaaatgctccgtgatatctgaaaaaaatcaactttgatgtcaatatttttaaacacacatacaagaaactacatctgctctgagagctaccagacctgatgagctatgatccagcatcacagagatctatctatctttacaataatctgagctaatgcaytcactgtggcgattgagttctttgatttgaatgctacaacaccctcatatgactgcgtgattatttatttatttatttattttagaagaaaaacttaggaaaaatgaaaatgctttgaaaactgttgttctgatagttattatgtgttctgattttctgttttgccatgaattttatttagatttttttagaaattatataatataacactggagaaaagatgaaaatcagcaggtttgtttttaaggaaaagttccataaaataaatttcctactttaagtcttatggttctgaagaac

SEQ ID NO: 38082 - DNA, 599 bp, Chicken  19866894268756_1
  misc_feature (1)..(17): n is any nucleotide
nnnnnnnnnnnnnnnnncaatgtgctttttgaaattcttaatttctaaattttgaaattctaaaccaatacagctattagatattttccactccaccaactcagagggcagcaatgaaattaacacaggccagtttcactctggtggtgtttgtagacagctatgaaaacttctgaagacttctgcttatcaggacataactactactatcactattaccagagatgctaagttaccccataggagtggttcagagctctgtttaacgtggtggaccaccacacccgggctctctcaaaycactgaaacagtcagaagcatcaattaagggcatcacgcagttccaggatgaagaccaggactttcttaaataccattaaatagactgcaggcagagacacttcatgaacaacctgcagatccctcacaaataccataaggacagagttcacccaagtcttctcataggacaacaacgtaaaacctacaaacaccacaaaacgtagaagatcctccacattgctcatggccagggcaaaatgcaacacttaaaactaaaaccaatgtaaagatgcctagttattggttcagtatttcag

SEQ ID NO: 38083 - DNA, 600 bp, Chicken  19866894268762_1
aacattcaggttcaaatgcaatgaactaatttattctttttaacagtacatccaactgtttttcaccactcacagatgtcactggaacaacttgaatacaaaaagaaaaaaaaacaaagcccagcctaagaacaatatcctgcacagagcagctaatattaattgctttaaaaatgccctctattaaactaaataatagccaaatctcactacagtaaatgtgcccttatatgattaagtataatttaacagaaatatgattgcatagtagaaaacacgaaaatgttgaaaatgaaggcyttttttttctttttctttcccagaatatgaatctccaaagaaacacccagaagaggaaaacagccattagccagtcattcatccacagaggccaaaactgtgattgcactaaactctaccactctaagtgaackcgttcccaagaagggaggctggtgggctctcaccacaggctctggccaccctcgatgaccaggttgtggcccgtcatgtagtctgaagcttcagaggccaagtagacaacagcagcctgcaggtcggtgacccgtgccagcctggcagcagggatgtccgccagcc

SEQ ID NO: 38084 - DNA, 600 bp, Chicken  19866894268762_2
atatcctgcacagagcagctaatattaattgctttaaaaatgccctctattaaactaaataatagccaaatctcactacagtaaatgtgcccttatatgattaagtataatttaacagaaatatgattgcatagtagaaaacacgaaaatgttgaaaatgaaggctttttttttctttttctttcccagaatatgaatctccaaagaaacacccagaagaggaaaacagccattagccagtcattcatccacagaggccaaaactgtgattgcactaaactctaccactctaagtgaackcgttcccaagaagggaggctggtgggctctcaccacaggctctggccaccctcgatgaccaggttgtggcccgtcatgtagtctgaagcttcagaggccaagtagacaacagcagcctgcaggtcggtgacccgtgccagcctggcagcagggatgtccgccagccagcgctgcaccaatggctgcagctctggggagtggatgagtggtgtgtccacgatgcctctgcaaagagcacacacgatgtgtgtttaggaatttgttggcccaagtggaaaggcagtacaaggtgttaattca

SEQ ID NO: 38085 - DNA, 600 bp, Chicken  19866894268763_1
ggtcagtgttcagcccgttttgatctttgtgtgttttcaactgtgtcacataaacatctaactctactgaaaccacccactgaattcagcaagaccaaagattttgccatttataaatttcacccttgacatgaaatctttttgtataatctatcctaacttcagttctaaccgcctaactactgagaacatggatgtatctgaaattaatcaaaagaccattctagcctctatagataccatagtcagataaatcttgctgtcttcatgaaaggcaatttttgattcaaaacaagtagygctatgagaaagaaggaacattttgttatttatcaaagcattttgaagtaaaaagctaacccctatttaatgcagtcaatagcttagtttagccaaagtatattttatcagataatccttgaatattatgtgtacaaaaaaattcaccatgcaagtgcatgtatrtacctatacatmcagtttgaattcttttattatttccattgttgtgcctcatggttttctgtaaataattttggaaaatgattgctgtgtttctcttcctaactccagctgccccatactggataacagcaccca

SEQ ID NO: 38086 - DNA, 600 bp, Chicken  19866894268763_2
ttctaaccgcctaactactgagaacatggatgtatctgaaattaatcaaaagaccattctagcctctatagataccatagtcagataaatcttgctgtcttcatgaaaggcaatttttgattcaaaacaagtagygctatgagaaagaaggaacattttgttatttatcaaagcattttgaagtaaaaagctaacccctatttaatgcagtcaatagcttagtttagccaaagtatattttatcagataatccttgaatattatgtgtacaaaaaaattcaccatgcaagtgcatgtatrtacctatacatmcagtttgaattcttttattatttccattgttgtgcctcatggttttctgtaaataattttggaaaatgattgctgtgtttctcttcctaactccagctgccccatactggataacagcacccaggaacttagtattgtctcctggagaagatgggacattgatctgcagagctaatggcaacccaaaacctagcataagctggttaacaaatggcgttcccatagcaagtaagacttttaactaccttgcaggaggattaataagaaaatacaaaaagtattaatttt

SEQ ID NO: 38087 - DNA, 600 bp, Chicken  19866894268763_3
aactactgagaacatggatgtatctgaaattaatcaaaagaccattctagcctctatagataccatagtcagataaatcttgctgtcttcatgaaaggcaatttttgattcaaaacaagtagygctatgagaaagaaggaacattttgttatttatcaaagcattttgaagtaaaaagctaacccctatttaatgcagtcaatagcttagtttagccaaagtatattttatcagataatccttgaatattatgtgtacaaaaaaattcaccatgcaagtgcatgtatrtacctatacatmcagtttgaattcttttattatttccattgttgtgcctcatggttttctgtaaataattttggaaaatgattgctgtgtttctcttcctaactccagctgccccatactggataacagcacccaggaacttagtattgtctcctggagaagatgggacattgatctgcagagctaatggcaacccaaaacctagcataagctggttaacaaatggcgttcccatagcaagtaagacttttaactaccttgcaggaggattaataagaaaatacaaaaagtattaatttttataaaaattat

SEQ ID NO: 38088 - DNA, 600 bp, Chicken  19866894268763_4
agaactttccagagagtgttgcagtgtagtgtcagttttttgcactcagcatggccaccaccatcaaatcccacttggtttgtctagttttatcccttctttttcataaagcaatataaaaataatccaccctgtttccatgtgagagataatgtactgtaaaatactggactgttctgacccactgagtgtatgactgtgactttcaggattttcaggaggtgtttgagaggtgtaccaaaagtgggtgtcatagagatcactctacagtgagaatataggaaatagcaaaagacaaasaagaactttcattagatatatttaaaatatttgcgatacaagagagctgacactgaactgcaggggaaaagtatgcaactctgggggaaaatctaaagtatttacaaaagacactctatgattctgatttccacaaggatgtctgtaatagcaaagtagttttcagaagcctacagtctagcatggtatacattttaatcttttataycaaaaagatggaataagggaaagtattgaaacaattatttagccaagaacctatgtcaggggtattaattaaatgtaagttgagatctctgg

SEQ ID NO: 38089 - DNA, 600 bp, Chicken  19866894268763_5
ggattttcaggaggtgtttgagaggtgtaccaaaagtgggtgtcatagagatcactctacagtgagaatataggaaatagcaaaagacaaasaagaactttcattagatatatttaaaatatttgcgatacaagagagctgacactgaactgcaggggaaaagtatgcaactctgggggaaaatctaaagtatttacaaaagacactctatgattctgatttccacaaggatgtctgtaatagcaaagtagttttcagaagcctacagtctagcatggtatacattttaatcttttataycaaaaagatggaataagggaaagtattgaaacaattatttagccaagaacctatgtcaggggtattaattaaatgtaagttgagatctctggcctgagatttcaaacaagaagcttccattgtttaagaaaactatgtaagctgacattaagcaccatttcagagagctatttctcatctcaccgaacaatggtaagtaccgcaggaaaacaggaaaataacaaagtaatcttgtgcatgctgtatgtacataaatgagactttctgctttatgcttgaattcttgtgcctatcctgttc

SEQ ID NO: 38090 - DNA, 600 bp, Chicken  19866894268763_6
tttgtgttgcagatagtttattccttcagcacccctgaccaataacatctattgcagatgattatgacatgcattttcgcctcgtactgcttccttgtcaaagctgtaggagttgctattaaaataacgaacaagtagattttccagaaaagccacaatgcatcttgcagcatttcagggtagcagtaaaacattaagagatacaaagatttcagaagcagctgcatgataccaccacatttcccaaaaacaagggcagcatatattggctcactggccctgaggaatcagtatgtggarttttattgaagggaacccaggcaaaattgaaagactttaataaaaytacccactcaacctcagtaggagggagggaaaaaaaaggaaaggcaaaagaatacagcaaataataactgggtagctaagcattatgttaaggrgcactttcactgctgaggaaggctgaagtttcaccatcttaaatatataagttcaagttcactggatgctccaggacactgaatctgtcagagcatcaaagagagaaaagcatcatgatcacagaaatcgcagttctgaagattcttgtgattttgtgtt

SEQ ID NO: 38091 - DNA, 600 bp, Chicken  19866894268763_7
atctattgcagatgattatgacatgcattttcgcctcgtactgcttccttgtcaaagctgtaggagttgctattaaaataacgaacaagtagattttccagaaaagccacaatgcatcttgcagcatttcagggtagcagtaaaacattaagagatacaaagatttcagaagcagctgcatgataccaccacatttcccaaaaacaagggcagcatatattggctcactggccctgaggaatcagtatgtggarttttattgaagggaacccaggcaaaattgaaagactttaataaaaytacccactcaacctcagtaggagggagggaaaaaaaaggaaaggcaaaagaatacagcaaataataactgggtagctaagcattatgttaaggrgcactttcactgctgaggaaggctgaagtttcaccatcttaaatatataagttcaagttcactggatgctccaggacactgaatctgtcagagcatcaaagagagaaaagcatcatgatcacagaaatcgcagttctgaagattcttgtgattttgtgttattctgagtaatcaaaaagctggtatggaaactactaagtacagta

SEQ ID NO: 38092 - DNA, 600 bp, Chicken  19866894268763_8
tttccagaaaagccacaatgcatcttgcagcatttcagggtagcagtaaaacattaagagatacaaagatttcagaagcagctgcatgataccaccacatttcccaaaaacaagggcagcatatattggctcactggccctgaggaatcagtatgtggarttttattgaagggaacccaggcaaaattgaaagactttaataaaaytacccactcaacctcagtaggagggagggaaaaaaaaggaaaggcaaaagaatacagcaaataataactgggtagctaagcattatgttaaggrgcactttcactgctgaggaaggctgaagtttcaccatcttaaatatataagttcaagttcactggatgctccaggacactgaatctgtcagagcatcaaagagagaaaagcatcatgatcacagaaatcgcagttctgaagattcttgtgattttgtgttattctgagtaatcaaaaagctggtatggaaactactaagtacagtatgctcttttgttcacttgttactaaatgacaaaattgagcccctcttccaactgaatgattagtaaatcactgtaaaaggaaactaaagcagct

SEQ ID NO: 38093 - DNA, 600 bp, Chicken  19866894268766_1
ttgcagatgactgttttggctgtaaatttctgtgatgccacttaagtgcaatctcagctataaggagggctaaacacaattcactcctaaaaggaattgaaacactaattgtgtattggattctgtcgcagcttcaatcaaaacacgttgaaggcttaacagtaactttgcagtttcaattactgcttctggaaattgtatattctattgatatagctatcacgcttgctcttgatagtgctgtaaatgtatgtagatatatagaaatcagcaagacaggatttattgctgtgtatgaastaagactggcaagcactggagaacataacagggttcgttcttaatacgcttctataaaatggttatccctcattaaattgagaagctatttaccatgtcaagtaggctggcttcatgagaaggctttaatcttgctgctttttcattacttaactgtgatactgcacttcccaccastaaatcccagctttacatgtgaaataacagaacggctgggatacatttaaattgattaaagcaaaaacaatatttcaaatgaaatgttaaatattgttgtgcagatatttaggcagcagatgg

SEQ ID NO: 38094 - DNA, 600 bp, Chicken  19866894268766_2
aattactgcttctggaaattgtatattctattgatatagctatcacgcttgctcttgatagtgctgtaaatgtatgtagatatatagaaatcagcaagacaggatttattgctgtgtatgaastaagactggcaagcactggagaacataacagggttcgttcttaatacgcttctataaaatggttatccctcattaaattgagaagctatttaccatgtcaagtaggctggcttcatgagaaggctttaatcttgctgctttttcattacttaactgtgatactgcacttcccaccastaaatcccagctttacatgtgaaataacagaacggctgggatacatttaaattgattaaagcaaaaacaatatttcaaatgaaatgttaaatattgttgtgcagatatttaggcagcagatggatttcactgcttatgtccctggataagacatgaaaaaggattgagaccgatttttaatatgctcataaacttgagcagagctgttagagctgttcaggctctggggaggagggggggggactttgctctgcttaggagagaagttgtttgcagcaatgaaggaattctgcctgaaga

SEQ ID NO: 38095 - DNA, 600 bp, Chicken  19866894268773_1
agggctgtgctcaaggagatcctcccccagtttgtgtgaataggtggggttgatgtggcccaagtgaagcagcctgcacttggccttactgagcctcattaggttttcatgggcccacttctccagcctgttcgtgtagttctcaagggcttctcttccttctagtgtattgactgcaccgctcagccgggtgtcatccaaaaacttgatggaggtgcacttaatgccagcatctatgtcactgatggagatgctgaagagcaccagtcccaagactgacccccgagggacactgcttgkggctggcctccaccctgacacagacccagtgatcatgaccctktgggctgtgtccagcctgcccattcctaatccaccgaacagttggtctttcaaatccagttctccagtttagagagraggatggggtgagggaccatgccaaaggccttgcagcagtccaggtagacgacgtgcaccacttttctcccatccagtgaagctgtcactccatcgtagaaggtcccccgattgttcaggcacaaggtgtccttggtgaagccatgctgcctgtctcaaatcacctctttatcrtgtatg

SEQ ID NO: 38096 - DNA, 600 bp, Chicken  19866894268773_2
gtggggttgatgtggcccaagtgaagcagcctgcacttggccttactgagcctcattaggttttcatgggcccacttctccagcctgttcgtgtagttctcaagggcttctcttccttctagtgtattgactgcaccgctcagccgggtgtcatccaaaaacttgatggaggtgcacttaatgccagcatctatgtcactgatggagatgctgaagagcaccagtcccaagactgacccccgagggacactgcttgkggctggcctccaccctgacacagacccagtgatcatgaccctktgggctgtgtccagcctgcccattcctaatccaccgaacagttggtctttcaaatccagttctccagtttagagagraggatggggtgagggaccatgccaaaggccttgcagcagtccaggtagacgacgtgcaccacttttctcccatccagtgaagctgtcactccatcgtagaaggtcccccgattgttcaggcacaaggtgtccttggtgaagccatgctgcctgtctcaaatcacctctttatcrtgtatgtgccttagcatagcttcgaggaggatgtgctccatgatcttcc

SEQ ID NO: 38097 - DNA, 600 bp, Chicken  19866894268773_3
ctccagcctgttcgtgtagttctcaagggcttctcttccttctagtgtattgactgcaccgctcagccgggtgtcatccaaaaacttgatggaggtgcacttaatgccagcatctatgtcactgatggagatgctgaagagcaccagtcccaagactgacccccgagggacactgcttgkggctggcctccaccctgacacagacccagtgatcatgaccctktgggctgtgtccagcctgcccattcctaatccaccgaacagttggtctttcaaatccagttctccagtttagagagraggatggggtgagggaccatgccaaaggccttgcagcagtccaggtagacgacgtgcaccacttttctcccatccagtgaagctgtcactccatcgtagaaggtcccccgattgttcaggcacaaggtgtccttggtgaagccatgctgcctgtctcaaatcacctctttatcrtgtatgtgccttagcatagcttcgaggaggatgtgctccatgatcttccccggcacagaagtgaggctcacgggcctgtggttcccctggtccttctttctgcctttcttaaaaatgggagtagtg

SEQ ID NO: 38098 - DNA, 600 bp, Chicken  19866894268773_4
gcttgkggctggcctccaccctgacacagacccagtgatcatgaccctktgggctgtgtccagcctgcccattcctaatccaccgaacagttggtctttcaaatccagttctccagtttagagagraggatggggtgagggaccatgccaaaggccttgcagcagtccaggtagacgacgtgcaccacttttctcccatccagtgaagctgtcactccatcgtagaaggtcccccgattgttcaggcacaaggtgtccttggtgaagccatgctgcctgtctcaaatcacctctttatcrtgtatgtgccttagcatagcttcgaggaggatgtgctccatgatcttccccggcacagaagtgaggctcacgggcctgtggttcccctggtccttctttctgcctttcttaaaaatgggagtagtgtttccctttttccagtcaccaactaggcagccacagtttttcaaatatgacagaaagtggcttggcaaccacatcagccagctatttcatacccctaggatatcatctggctcaatggacttacagttcagttttgcgaagaggacttggacttgttccactgttacagkggga

SEQ ID NO: 38099 - DNA, 600 bp, Chicken  19866894268773_5
atcrtgtatgtgccttagcatagcttcgaggaggatgtgctccatgatcttccccggcacagaagtgaggctcacgggcctgtggttcccctggtccttctttctgcctttcttaaaaatgggagtagtgtttccctttttccagtcaccaactaggcagccacagtttttcaaatatgacagaaagtggcttggcaaccacatcagccagctatttcatacccctaggatatcatctggctcaatggacttacagttcagttttgcgaagaggacttggacttgttccactgttacagkgggacagaaaccactccccacaccttcacctggaggcttatggtccgggcggacacgggaagcctgaccacccatgaagactgaggcaaagcactcattaagtacctcagtgttttgtatgtgtgaggaagtcagctccccattgcctctcatcagagggggagcactttccttggcctgtcccctcctacctatgtacctgtagaaccccttgttatctttcacgtcccttgccaagttcagctccatctgcgccttggctttcctaattctgtctctacacacatgggcagcagtcct

SEQ ID NO: 38100 - DNA, 599 bp, Chicken  19866894268779_1
  misc_feature (1)..(102): n is any nucleotide
nnnnnnnnnnnnnnnnnnnnnnnnnnnnnnnnnnnnnnnnnnnnnnnnnnnnnnnnnnnnnnnnnnnnnnnnnnnnnnnnnnnnnnnnnnnnnnnnnnnnnnagctctgtggcaatgagaagcctgtggtgccagcccaggggcgtgtagacactgtgataaagccattgctggtgcaggtcagacaagttatgggggatgaaagagggatgagggctgaacaaacctgggggtgcgatgggaagaccccatcacgctgtcttgggagtgggacagcaccaagtgtcgctgcagggatgsccctgggggacatgaggacatggaggtcacaggattgaccatgtgttgcttcctacagcctggtggcatcctggtggagaaggcacacagctccctgctctgccaggaaggtaggagcatctggtaccactgtggggacatggggctgctggccataagggccaccaagctggaagaaccatggatgtgggtctcctggcccaagcccatggaatccatagagggatggagcatcaaggggtgggtgagggtgctatggggccatgtccactgccaccccattgccatgagcctccatc

SEQ ID NO: 38101 - DNA, 600 bp, Chicken  19866894268779_2
tggagaaggcacacagctccctgctctgccaggaaggtaggagcatctggtaccactgtggggacatggggctgctggccataagggccaccaagctggaagaaccatggatgtgggtctcctggcccaagcccatggaatccatagagggatggagcatcaaggggtgggtgagggtgctatggggccatgtccactgccaccccattgccatgagcctccatcctcacagcctctgaagaagtgtccctggagcttcctgccaacgtcttggagggctcccagcgagctcacgtcacygtgatgggtaagggatggaaatgaggtgcagaggtctcacctggaggtgggatggcccaaagtaatgggatggggtatggggtgcacgcaggtgacatcatgggcaacgcactgcagaacgtggaccgcctcctggccatgccctacggctgcggggagcagaacatggtgcgcttcgcccccaacatctacatccagcagtacctggagaagagcgggcagatgaaccccgacatccgtgccaaggcgcagggcttcctgcagagcggtcagcgtcctcctcctgcccttcctgctacc

SEQ ID NO: 38102 - DNA, 600 bp, Chicken  19866894268782_1
tttgacataatttactattagaagtgaatgactaataaccttgatctacctttccataaatctataaataaatgttgatctttgcaggagcttgtgtccagcactgccaacattaccataacatggagcttcacacaggaaggtatttcatttgttgaagtgtctgttttgaggactggtaactggtaaacggtaaaaggagctaagaaagggggactgcctaaagaaatctctcatgcatgggcatacagtagacatgcaacaaacagtagctcattgtggttttttcttattgaaatrgaggtgtggaagcctacagragttgcatgcacttcttagctgattggaatatcctaggttcttttgcataatgcacatttgcttcttttatttttctctatttaaactttgaaaattgtatagtagcagtaatggcaggtgaaacaattgctaaactaactgaggcgtgcttattgcagacttgtactgaagaatgtacaaattaaacttagtagaacattgtattatattaatgactaattataactacataggaaacccagcatcatgatccaatactaagttctgttgcttgatctg

SEQ ID NO: 38103 - DNA, 600 bp, Chicken  19866894268782_2
gaagtgaatgactaataaccttgatctacctttccataaatctataaataaatgttgatctttgcaggagcttgtgtccagcactgccaacattaccataacatggagcttcacacaggaaggtatttcatttgttgaagtgtctgttttgaggactggtaactggtaaacggtaaaaggagctaagaaagggggactgcctaaagaaatctctcatgcatgggcatacagtagacatgcaacaaacagtagctcattgtggttttttcttattgaaatrgaggtgtggaagcctacagragttgcatgcacttcttagctgattggaatatcctaggttcttttgcataatgcacatttgcttcttttatttttctctatttaaactttgaaaattgtatagtagcagtaatggcaggtgaaacaattgctaaactaactgaggcgtgcttattgcagacttgtactgaagaatgtacaaattaaacttagtagaacattgtattatattaatgactaattataactacataggaaacccagcatcatgatccaatactaagttctgttgcttgatctggtttattttttaatccattt

SEQ ID NO: 38104 - DNA, 600 bp, Chicken  19866894268783_1
ttcaggagtgctctttctcattttaattggctgcctaattggaatgtttatgggttctgcgatagcttgggatgaaaaggcagggtgagcaattatgtgctcagcattcctatctggcagagttaatagttttttttttaaaaaaagctaaagttcactggaatgccatgtttttgttctctaagaaataccttgatttgaaacaatgtaatccccaagtcagaaattatgtcaagctgtgcttatccagtagcaagtttgagcttctggaaggctctttgctcctttttgatgttagcrtaacatgaagaacaggaggctatctggtggctgtcaagtttttaactgcttactctctcactggatggagataagatgtaagcagagcacttgatggactttattaattctctggaacgaaggtttgtctttcttggctcaatgaatgacttcattctagtaaatgaggtcactcaaggcaaggcaataaagtttctgatattcacaaaaaagctagtttttcaaagctgccagcctctaaaaagagaagcacaagtgttttctcatttacctactatctagctgcaacatccagcctgc

SEQ ID NO: 38105 - DNA, 600 bp, Chicken  19866894268783_2
tcacaaaaaagctagtttttcaaagctgccagcctctaaaaagagaagcacaagtgttttctcatttacctactatctagctgcaacatccagcctgctattctacctattctctcccgcacagggctgtgtttcagctgaaaagcaggtctagcacaggcccagatttaagaaaaaagaagaaacaaaggtttttcacaaagtgattgtcaaaatgccaacaggaagagaaaacatgctttccgacctgaccagtctggttgcacttcccctccctgcctgcgctgcggctgcgatgcwctggctgcaaacacctggggcagagcccagtactgccgcactcactgtgagcaagagaacccacctgctgccaacacaagtaaggcacgtgaaaggacaccatgttccctgtaggacttccatcttgtgtgctattacctgtagctctagggtgtgtttacagattgtccttcccaaagcaaaattagccttctccaccttccctgtctccctgttaataaatatcatgtagttgagaactggtgaaaaggagttaaaacggctgaattgctttgtaaatatcagagttcttctcacaaa

SEQ ID NO: 38106 - DNA, 600 bp, Chicken  19866894268789_1
ccatgcagcaatacattaaccggcactctagaaaatcagaaatgcagctgaaatgctatcaataggcattttcttgagattatgctcacgcagctcccactttgctctccagccatggaagcttttccagctgagctaagcacttcccagagatttcataactaggctcgggcacctacaaaagcaacagcatatcactgagctgcattaattaaggatctgtacacccactgcagcccacagtagtggctcccaggtctgctctgtgatcaggagccacacactggggctctcactctsttccttacagagctgaccatcaggtgggtatctgcgtgttgatttgcaacagaccttaagaagctgaccagaaggggcacaaaaattctagggagcaagctggctgggctggttagcagggctttaaactagatatggtgggggtgcactggatgacagagaagagtatgggaatgctgtcaccttgcaaggcagtagaggaaaaccctagacttgccctggaggtattagggagggctcctctcctccctaagagggaagaggcaaggaggccaagaaggcaagaaggccaataggcaa

SEQ ID NO: 38107 - DNA, 600 bp, Chicken  19866894268789_2
ggtgggtatctgcgtgttgatttgcaacagaccttaagaagctgaccagaaggggcacaaaaattctagggagcaagctggctgggctggttagcagggctttaaactagatatggtgggggtgcactggatgacagagaagagtatgggaatgctgtcaccttgcaaggcagtagaggaaaaccctagacttgccctggaggtattagggagggctcctctcctccctaagagggaagaggcaaggaggccaagaaggcaagaaggccaataggcaagctgaagtgcctctataccaaygcacacagcatgggaaataaaaaggaagagttagaaaccacggtgcaattgggaaagtatgacctaattgctatcatggaaacatggtagaaggaatcccacaatttctagtgagctatgtcctcactattataatatagcttgggttggaagggatctcaaagatcatccagttccaaccccccagtctatgcccccaaagagactggagagtatagacaggatacagcttcattgcagttactttcctccctcccaagcacccagactgtggtagcacagatgaatcagggctgaacc

SEQ ID NO: 38108 - DNA, 600 bp, Chicken  19866894268790_1
cattggaagaaccaaaaactatgttgagtgaaaaacaggtgggatgtttcatagaataaagcattctaaactgatatcagccttcccaaagctccaaattatttatctctcttctgtggaagaggagcaggattgcagttactcatccctgttagagcctgttgcagctgttctgcctcattctgttcctgctcttgccctgagcttccctcacccccacagctggttgctcttctggctcttgatctctcctctcttaactcctgctttgcactgctaggctggaactccccagatgcrttttggtccttgtgtttattgcaggatcaagctctgtaatgtcagcagttttgtctctgagaattatcttgtttggaatgttcaccagatgacagcagttcaggatgtttgccaaatacggtcttagaaatccctagtatgtatttctagaatgaatattttaatgtactgtttgacatccttttgtcatcagggttggtcagtgcaggcaagtcctgcaggaagtctctggaagggccgcttgctgatggttcacttgggaacaaccaagctagagctccaatagaggacactttacag

SEQ ID NO: 38109 - DNA, 599 bp, Chicken  19866894268796_1
  misc_feature (1)..(162): n is any nucleotide
nnnnnnnnnnnnnnnnnnnnnnnnnnnnnnnnnnnnnnnnnnnnnnnnnnnnnnnnnnnnnnnnnnnnnnnnnnnnnnnnnnnnnnnnnnnnnnnnnnnnnnnnnnnnnnnnnnnnnnnnnnnnnnnnnnnnnnnnnnnnnnnnnnnnnnnnnnnnnnnnnnaaaacagaaaaaaatccacacgttcaagacagtaaaaaaaaaaaaaaatttaagaaatataacaataactgaaatatgaaatttgatttaccaaacgatttcaagactgcaattaacttctattcctgaaagccacawgaactttagtccttatctagtaaaaagtaaaagctctttagattagatatgaagcttttatatgtactacattacacatcttaggaaactctgtggagtttttgaggtgtttttgtgcggtctgtaacagtcccagctgtccccactgaaacgcatcacgaaaaatgtgttagatgggccaagcaggagcacacataacccttggtctcaatttcaggtcatgatttacacttccaaatggacaagaacagaaaataaactgacaacttcacaaatgtgaatttgtttatcatcacaca

SEQ ID NO: 38110 - DNA, 600 bp, Chicken  19866894268797_1
ctgtgcagaccctattccctgcctttagctgtctgtgaatctgtaacatgcttgatccagattttctttgacagattttatgagggaccttgcataccacattttttaagagactggataagacttcctgttatccagccttctccattaatagatttgaggacatgatgttctgtagacttttctctgacatatctaatctattcttgtgtctagtatttccactctgtactacagcaaacatatttcgctccttccattacttgagggtgaatctggttcatgcagtcaaagcagaayagagtgaattgttcagcatttttataacctttagagattctgggtggttggcacctggttctggtaatattataagtaaataataaaaataacwatctgtgttctcaatgcattcaaaagtatccaatgccggccattgaatttggctttgttctatctttggaagtaaaaaaagcggttctgggttttcttattgtttcaggtgacgtcagtgaccagctcagcaaggctgatggggtcaatttattcatgcaagcagcctttcagctaggtcaccccagccacatccctgcagagggg

SEQ ID NO: 38111 - DNA, 600 bp, Chicken  19866894268797_2
taccacattttttaagagactggataagacttcctgttatccagccttctccattaatagatttgaggacatgatgttctgtagacttttctctgacatatctaatctattcttgtgtctagtatttccactctgtactacagcaaacatatttcgctccttccattacttgagggtgaatctggttcatgcagtcaaagcagaayagagtgaattgttcagcatttttataacctttagagattctgggtggttggcacctggttctggtaatattataagtaaataataaaaataacwatctgtgttctcaatgcattcaaaagtatccaatgccggccattgaatttggctttgttctatctttggaagtaaaaaaagcggttctgggttttcttattgtttcaggtgacgtcagtgaccagctcagcaaggctgatggggtcaatttattcatgcaagcagcctttcagctaggtcaccccagccacatccctgcagaggggtcatgtcactcagctgaggtagccctgggctgtctccctgtgattcaggccaggcaggggcatcaatcagacactgcagccgccgcgggagcaa

SEQ ID NO: 38112 - DNA, 600 bp, Chicken  19866894268806_1
gacctcattctagggaacctcagtcttcctctgaatcatttaaggagtctgaccacaaggctcaataaggaaatgcttcagttcttctgtgaatccgggtcacgatgtttttgtttttctccacacacggaagagtgaaatcatatagctttgtagtagaaatagtactgtaattgcaaatttattttaaatttctaatgtcaccgagtacgtacagtttacgaaagccaaagtccttttctgctacattaaaaagaataaacaaacccccaacatagctccattagaaactcccttggyactctcactaaattgaagagtgcttacgcagagaatacacaacaaacacttgtgctccgcacattctctaatggagatttagaacagcaatgtctacaggcaggaagtttcttcaaaagccaaagacagccccaacttcaccatcatgcgctgaaggccaatatcgaaagccaacacatcgtacaggattccattcattaacagtaattccttaagacttaaaactaatgcattaatcacattaatgataatccactaatgtgaggaacctggagataaaaaatgtagaatcagggatat

SEQ ID NO: 38113 - DNA, 600 bp, Chicken  19866894268818_1
gagagttctgtttctgtagcctcttttgcatgatcagcttgctagaaaagtgtgctaattagtggcactgccactagatgccaactgaaaacagggctgaaaacagctgcttgtattccaggggatacaggaattatgcacagctgataatttttggctcctaacaattgggtttgggtctgtccccagcagaaggaagtgatttgactagaactggcttactgaaaaggatatgaaagaaatattcccttatattaggaaactaaggctttatagaacagtttgagtctaaagtgcctsaaatgtgattacatgcttaattacttgtgtgtaaataatggagtaaaatcctcatgagttttaattgagatgcacctgtaagcaattaagtagagcagtttataatattgatttttttgaaatataaaaaaaatatcaattctcacagcacaaaatcacacacctccatgtactgaaaatattgtctcctaagagaaccaggtgggaactagaatctatttctagatttatctttctaccactgctttatctgcttcatttttagtagtagaaatagaatagtaggaatagagaccttca

SEQ ID NO: 38114 - DNA, 600 bp, Chicken  19866894268829_1
aattgtgtgacaacgttccaacgcttctgataagccaggagcagcactgggccgatgtgaaatgatggtgagaactcttttgatcctaatttgtgtggtttttttccattgatttgcactgaggttgcatcactgacagaagcagcagcgatgttctcctgcagcggccactcttgggggctgtcagagagtcagatggttttggtgttgccctcacttctcaaaagcaaggagagcaaagctttgtgttttaattccctcctcgtgggtttgcaatagagacaggtaaatgcataaggrgtccrtgtggcttcccacccagctcattgcagctgacaccaggctgagctcctggcagggagttccccttgcatcaggtgtgcgtgctcctgtccctgctgctgggacatccctgcgttcagctcagaytgtggctggatgtcatctgcttgtgctgtaactgtgctctccttccttttcattatggtttggctgctccgtgactctgccttgacacttccccaccatggagatggaggtcctcgtggccgactgcaggcttccatcagcaaagcagtctgaggatgtgaattagcacgg

SEQ ID NO: 38115 - DNA, 600 bp, Chicken  19866894268829_2
tgtgacaacgttccaacgcttctgataagccaggagcagcactgggccgatgtgaaatgatggtgagaactcttttgatcctaatttgtgtggtttttttccattgatttgcactgaggttgcatcactgacagaagcagcagcgatgttctcctgcagcggccactcttgggggctgtcagagagtcagatggttttggtgttgccctcacttctcaaaagcaaggagagcaaagctttgtgttttaattccctcctcgtgggtttgcaatagagacaggtaaatgcataaggrgtccrtgtggcttcccacccagctcattgcagctgacaccaggctgagctcctggcagggagttccccttgcatcaggtgtgcgtgctcctgtccctgctgctgggacatccctgcgttcagctcagaytgtggctggatgtcatctgcttgtgctgtaactgtgctctccttccttttcattatggtttggctgctccgtgactctgccttgacacttccccaccatggagatggaggtcctcgtggccgactgcaggcttccatcagcaaagcagtctgaggatgtgaattagcacggtgctg

SEQ ID NO: 38116 - DNA, 600 bp, Chicken  19866894268829_3
tcactgacagaagcagcagcgatgttctcctgcagcggccactcttgggggctgtcagagagtcagatggttttggtgttgccctcacttctcaaaagcaaggagagcaaagctttgtgttttaattccctcctcgtgggtttgcaatagagacaggtaaatgcataaggrgtccrtgtggcttcccacccagctcattgcagctgacaccaggctgagctcctggcagggagttccccttgcatcaggtgtgcgtgctcctgtccctgctgctgggacatccctgcgttcagctcagaytgtggctggatgtcatctgcttgtgctgtaactgtgctctccttccttttcattatggtttggctgctccgtgactctgccttgacacttccccaccatggagatggaggtcctcgtggccgactgcaggcttccatcagcaaagcagtctgaggatgtgaattagcacggtgctgctcagaaaccctgcgtgttcttcatacttcaacacttctttgtagcaattctgcattgcagagctcacgtgagggtgttgggacacgatgtgctgtgagaatcacagctgctaactgctctgtc

SEQ ID NO: 38117 - DNA, 600 bp, Chicken  19866894268834_1
cataagagagatgctccaggcccctatagccatttttgttgccctctgctggactctctctagctcatctttcatgaactgaggagcccagaactggacacagtactccagatgtagcctcaccagggcagagtagagcaggaacatcactccctcaggcagctggctgcactctttttgatttggcccaggataccgggaacaagggcacattgctggcttgcggccaatctattctccaccaggacacccagctccttctccacagatctcttttccatcagggcagcccctaaaccraggcatgcagtttattcttttccaggtacaggactctacacttactcttgttcaacttcataatgttcctttccactcaactctcccatctactcagggctcactaaagggcagcacattcttttcatgcatcagccactcctcccaggtttctgtcatcagcaaacttgctgaaggtgcactctaccccatcaaactccctcttgctccagccaatctgtttktctccacaaatatttctgcaaaggctttaaaataaatctacagctctgcattctgaccctttggaatctactgggt

SEQ ID NO: 38118 - DNA, 570 bp, Chicken  19866894268834_2
ggccaatctattctccaccaggacacccagctccttctccacagatctcttttccatcagggcagcccctaaaccraggcatgcagtttattcttttccaggtacaggactctacacttactcttgttcaacttcataatgttcctttccactcaactctcccatctactcagggctcactaaagggcagcacattcttttcatgcatcagccactcctcccaggtttctgtcatcagcaaacttgctgaaggtgcactctaccccatcaaactccctcttgctccagccaatctgtttktctccacaaatatttctgcaaaggctttaaaataaatctacagctctgcattctgaccctttggaatctactgggtgctttagcaaaaaaataaacacacaaacaaaaaagaacccacacatcaatgtggctgcatgacaactacactaagtgctgatctgtttcttctatgacttttttgactttttgccagtcaaatggaataggactactgcttagctatttggcttccaaacaggctaccatacaccaattgccatcatctcctta

SEQ ID NO: 38119 - DNA, 562 bp, Chicken  19866894268840_1
gagcaggattggggaggcaggacaaatctggggttaattgtggaacactgctagaaatggaggggcaggcaaagagaggggcagcagggcgtgctgcagtgagggtttgctccttggtacaggacagcaagcagccccagcaatggaggtgtcagactggtgtttaggtgagtaagtgagataatgtgtgtctgagagccgtttcctttatctgagggtggtgaccaggatcagatctgatcatccttctaacttggaggcattctgagtttttttccctgacctcccagagaggagagsgagaacggggcactgattgcagccattgcacagacaaaatcagggaaggagcccaaatagcgttttcttccagtcttaccagatctcctggccaaagaaagcatgaaataacaacagctctcgagaaaggctaaatcgtttgcctgtaccaacagatgtttctgtaagtcattgatttttaggttgtcccagcttaaatacagggcagagtgaaaagggttgaaagggtaaaatgcatttagaggagttttctctggttaag

SEQ ID NO: 38120 - DNA, 600 bp, Chicken  19866894268841_1
gaggtccgattctgagtttctcattcacgtctctaaggagaggcacacagagctttgattcttcagtccagtttcatgcaaccctcagcaggtttgcatacctttcaggacccagagccttattttggtgcctgaataactttttatggctgaatttgacatgaatgttagcttttccatgtgtctgtgcatccaatgaaccaatgactcttatccccagcacctacccattatttcggccgtttgacgtctgagataaatgttttatatctctgtgtactgagcgccacacctctcagmccaaccttctcagcccagtgcttgacttctttccatcatagccatacaacgacatacccgagtcaatacaacaatattaaggagcacggtaatgctttattttgaaaccctttgactcactgccttgctgcattctgttactgttgaggtttccgtgcatgtcatccacatccagcttttgctgttgtcctygatcaaccccacattccggggggagcctctgggccacgtctcgctgggactccttgagatggccctgtttcataatcctccctatttctgaacccaaacagtctattt

SEQ ID NO: 38121 - DNA, 586 bp, Chicken  19866894268841_2
ccaatgaaccaatgactcttatccccagcacctacccattatttcggccgtttgacgtctgagataaatgttttatatctctgtgtactgagcgccacacctctcagmccaaccttctcagcccagtgcttgacttctttccatcatagccatacaacgacatacccgagtcaatacaacaatattaaggagcacggtaatgctttattttgaaaccctttgactcactgccttgctgcattctgttactgttgaggtttccgtgcatgtcatccacatccagcttttgctgttgtcctygatcaaccccacattccggggggagcctctgggccacgtctcgctgggactccttgagatggccctgtttcataatcctccctatttctgaacccaaacagtctatttcctaccacacgctgtgttcctactgtgtttagtttttgacatttatgtccatcctatccatcttgattacctttctagtggagttcggccctgtttttatagtccgtcatgtagtcatttctcagcttctccaagccccattccttcttatcttcaccaaacaaaggaggctgccagt

SEQ ID NO: 38122 - DNA, 587 bp, Chicken  19866894268842_1
ggcggagggacgcggtgcgagagctgctgcgcgccgcgctggaggactacgcgccgtcccacgtgaacctcgaggagttcttcctggagggccgctaccgctgcgaggaggccgaggcctcggggctgccgtcgtggctgctgggcgccttggccagaggcgagctggccccgctcgtcgcaaacgtcgtgacgctgaggagcaccttccttcacgtccaggtggaggacatgcggcggcccagcgcgcactgcgccgcgctgcccatccggcgggttctgtacggcctactgctgcgcrctgctacccgggccgacgcgcagcctcagtcacagagcggcgcgctgccggcygtgtgcgagttcgaccgagtccaaaaatcagttaaaaagacgtttgtccaagcagcgagcctccccgcgcccttcggcgaggatgggttttctttggccaagttagtggaggtgagtggttgtcgtggcaggctaacagcgcggcacgcgcttaagaggcgctgtgtttgacagcagggcgctaaaggtgatggctgaacccagcgacttcagtgagcaaatcctcagccctca

SEQ ID NO: 38123 - DNA, 534 bp, Chicken  19866894268842_2
ccgtcccacgtgaacctcgaggagttcttcctggagggccgctaccgctgcgaggaggccgaggcctcggggctgccgtcgtggctgctgggcgccttggccagaggcgagctggccccgctcgtcgcaaacgtcgtgacgctgaggagcaccttccttcacgtccaggtggaggacatgcggcggcccagcgcgcactgcgccgcgctgcccatccggcgggttctgtacggcctactgctgcgcrctgctacccgggccgacgcgcagcctcagtcacagagcggcgcgctgccggcygtgtgcgagttcgaccgagtccaaaaatcagttaaaaagacgtttgtccaagcagcgagcctccccgcgcccttcggcgaggatgggttttctttggccaagttagtggaggtgagtggttgtcgtggcaggctaacagcgcggcacgcgcttaagaggcgctgtgtttgacagcagggcgctaaaggtgatggctgaacccagcgacttcagtgagcaaatcctcagccctca

SEQ ID NO: 38124 - DNA, 599 bp, Chicken  19866894268849_1
  misc_feature (1)..(67): n is any nucleotide
nnnnnnnnnnnnnnnnnnnnnnnnnnnnnnnnnnnnnnnnnnnnnnnnnnnnnnnnnnnnnnnnnnnactgggcagtgcggtgattaaaggcagtgtttgctctgccttgcaggaaggggctccactctgtaactgagtatcaggattgagcagacaatccctttgctctgcatcacttcagttcgggtgttgatttatttcagtgacttcctttgtctccaaaatctgtcttggtttccttttcctctgcatatgaacttcgatctattcatttatttatttgtattttaacatgaacrttcttaacacacccccatgcrctgggattaagggctggtgacctcatcctggttaaagaacccctcagaataaaacccccctgttgcactggggagggacagcagagggaggctctgatttacggggctgttttggaggctccttgtccctatccctgattgcttttgtgtgcttgctgttttgtgttgaatcattcccaggatatggggttttgctctctgtactcccagtcccctttcagactgctattctgctctatgtatatatatatatatatatatatattcctcttcttgcg

SEQ ID NO: 38125 - DNA, 599 bp, Chicken  19866894268849_2
  misc_feature (1)..(46): n is any nucleotide
nnnnnnnnnnnnnnnnnnnnnnnnnnnnnnnnnnnnnnnnnnnnnnactgggcagtgcggtgattaaaggcagtgtttgctctgccttgcaggaaggggctccactctgtaactgagtatcaggattgagcagacaatccctttgctctgcatcacttcagttcgggtgttgatttatttcagtgacttcctttgtctccaaaatctgtcttggtttccttttcctctgcatatgaacttcgatctattcatttatttatttgtattttaacatgaacrttcttaacacacccccatgcrctgggattaagggctggtgacctcatcctggttaaagaacccctcagaataaaacccccctgttgcactggggagggacagcagagggaggctctgatttacggggctgttttggaggctccttgtccctatccctgattgcttttgtgtgcttgctgttttgtgttgaatcattcccaggatatggggttttgctctctgtactcccagtcccctttcagactgctattctgctctatgtatatatatatatatatatatatattcctcttcttgcgtactgtatgtctgctttctgc

SEQ ID NO: 38126 - DNA, 599 bp, Chicken  19866894268882_1
  misc_feature (1)..(110): n is any nucleotide
nnnnnnnnnnnnnnnnnnnnnnnnnnnnnnnnnnnnnnnnnnnnnnnnnnnnnnnnnnnnnnnnnnnnnnnnnnnnnnnnnnnnnnnnnnnnnnnnnnnnnnnnnnnnnnaccccataattcctgctttctagaaatactactgggtacttctggagtaacaacacatattgctagttcattaaattcctgtgtgctctggaagaaccgtatcacagacaaatcactaagccagcatgcaaatgttgtacttccaaagtcaaactgctgctgtcaaaaatcaacagcaccttgacttctrtaagtctgtatatacacgtgtgtgtatgtgrgagtgtgtgtatatatattacacaaaataatagtgtaacatttattgcaatacatttgaatgcacacatatctgtaaaactgtaccactgtgagagactagatacaaaaagagaacagagcacagcagcttgatttgttatgagaaaaataaaaagtatatagatctgttaagaaagcttgcaagacagatgacctaaaattagcacaagatgattcgtatgcaatacgttcttttaaaagtacaaagacattaataagtatcgcagt

SEQ ID NO: 38127 - DNA, 599 bp, Chicken  19866894268882_2
  misc_feature (1)..(79): n is any nucleotide
nnnnnnnnnnnnnnnnnnnnnnnnnnnnnnnnnnnnnnnnnnnnnnnnnnnnnnnnnnnnnnnnnnnnnnnnnnnnnnnaccccataattcctgctttctagaaatactactgggtacttctggagtaacaacacatattgctagttcattaaattcctgtgtgctctggaagaaccgtatcacagacaaatcactaagccagcatgcaaatgttgtacttccaaagtcaaactgctgctgtcaaaaatcaacagcaccttgacttctrtaagtctgtatatacacgtgtgtgtatgtgrgagtgtgtgtatatatattacacaaaataatagtgtaacatttattgcaatacatttgaatgcacacatatctgtaaaactgtaccactgtgagagactagatacaaaaagagaacagagcacagcagcttgatttgttatgagaaaaataaaaagtatatagatctgttaagaaagcttgcaagacagatgacctaaaattagcacaagatgattcgtatgcaatacgttcttttaaaagtacaaagacattaataagtatcgcagttcaaatcctttactcctttactgacctgcca

SEQ ID NO: 38128 - DNA, 599 bp, Chicken  19866894268884_1
  misc_feature (1)..(203): n is any nucleotide
nnnnnnnnnnnnnnnnnnnnnnnnnnnnnnnnnnnnnnnnnnnnnnnnnnnnnnnnnnnnnnnnnnnnnnnnnnnnnnnnnnnnnnnnnnnnnnnnnnnnnnnnnnnnnnnnnnnnnnnnnnnnnnnnnnnnnnnnnnnnnnnnnnnnnnnnnnnnnnnnnnnnnnnnnnnnnnnnnnnnnnnnnnnnnnnnnnnnnnnnnnntgaagtgatccttcccctctgctgggcactggtgagaccctactgagcacatctggagtgctgtatccaatttccgacttcttaggacaaaaaggtrtgtcctgagacaagtccagcagacactgcagatgttcaaggtcacagggacatgaaagctaagactgaaaacgggcttggtcagtctggagaagagagrcttgaggtgaagatcttcttgccttctacaacaacctactgaaaggatatgaagataaatgagccgtattcatctcagaaatgcacattgaaaagacaagatgcaacaggcagaggttgcctcrgaggaaattaagatttagtataaagaaagaattctttattgtgccacagattagacagagaatctgtgcaatcttc

SEQ ID NO: 38129 - DNA, 599 bp, Chicken  19866894268884_2
  misc_feature (1)..(104): n is any nucleotide
nnnnnnnnnnnnnnnnnnnnnnnnnnnnnnnnnnnnnnnnnnnnnnnnnnnnnnnnnnnnnnnnnnnnnnnnnnnnnnnnnnnnnnnnnnnnnnnnnnnnnnnntgaagtgatccttcccctctgctgggcactggtgagaccctactgagcacatctggagtgctgtatccaatttccgacttcttaggacaaaaaggtrtgtcctgagacaagtccagcagacactgcagatgttcaaggtcacagggacatgaaagctaagactgaaaacgggcttggtcagtctggagaagagagrcttgaggtgaagatcttcttgccttctacaacaacctactgaaaggatatgaagataaatgagccgtattcatctcagaaatgcacattgaaaagacaagatgcaacaggcagaggttgcctcrgaggaaattaagatttagtataaagaaagaattctttattgtgccacagattagacagagaatctgtgcaatcttcactgctgggagacattccaattaatctgaataackccatgagcaacttgcactagttagacttgcaactgagcatgggtttggcttaaatgacctctgg

SEQ ID NO: 38130 - DNA, 600 bp, Chicken  19866894268884_3
gctgggcactggtgagaccctactgagcacatctggagtgctgtatccaatttccgacttcttaggacaaaaaggtrtgtcctgagacaagtccagcagacactgcagatgttcaaggtcacagggacatgaaagctaagactgaaaacgggcttggtcagtctggagaagagagrcttgaggtgaagatcttcttgccttctacaacaacctactgaaaggatatgaagataaatgagccgtattcatctcagaaatgcacattgaaaagacaagatgcaacaggcagaggttgcctcrgaggaaattaagatttagtataaagaaagaattctttattgtgccacagattagacagagaatctgtgcaatcttcactgctgggagacattccaattaatctgaataackccatgagcaacttgcactagttagacttgcaactgagcatgggtttggcttaaatgacctctggaggtctctcttgacccacattgttccactattggtgactccaygaacagggtaataatttagattactgcattccagtactaaggaatatttccaggaactgtttattttttgtttaccattata

SEQ ID NO: 38131 - DNA, 600 bp, Chicken  19866894268884_4
ttcaaggtcacagggacatgaaagctaagactgaaaacgggcttggtcagtctggagaagagagrcttgaggtgaagatcttcttgccttctacaacaacctactgaaaggatatgaagataaatgagccgtattcatctcagaaatgcacattgaaaagacaagatgcaacaggcagaggttgcctcrgaggaaattaagatttagtataaagaaagaattctttattgtgccacagattagacagagaatctgtgcaatcttcactgctgggagacattccaattaatctgaataackccatgagcaacttgcactagttagacttgcaactgagcatgggtttggcttaaatgacctctggaggtctctcttgacccacattgttccactattggtgactccaygaacagggtaataatttagattactgcattccagtactaaggaatatttccaggaactgtttattttttgtttaccattatagaggtagccaaacatttccagcagggaaataagcagattagtatgttttgaaaacactgaaacatcggaagcaggaactgtgagaggtaaatttctttgcaaaggactttt

SEQ ID NO: 38132 - DNA, 600 bp, Chicken  19866894268884_5
aaggatatgaagataaatgagccgtattcatctcagaaatgcacattgaaaagacaagatgcaacaggcagaggttgcctcrgaggaaattaagatttagtataaagaaagaattctttattgtgccacagattagacagagaatctgtgcaatcttcactgctgggagacattccaattaatctgaataackccatgagcaacttgcactagttagacttgcaactgagcatgggtttggcttaaatgacctctggaggtctctcttgacccacattgttccactattggtgactccaygaacagggtaataatttagattactgcattccagtactaaggaatatttccaggaactgtttattttttgtttaccattatagaggtagccaaacatttccagcagggaaataagcagattagtatgttttgaaaacactgaaacatcggaagcaggaactgtgagaggtaaatttctttgcaaaggactttttttttttttttttttcaaaagaaccaaatcatcatgggcaaatgtgacaataagttatttacagttcaagaaaagagctctgagaaaagatggaaggaaccaaattg

SEQ ID NO: 38133 - DNA, 600 bp, Chicken  19866894268891_1
ggagcctgcatacctgaagtgctatgaacgttggtgaaggaattgtcagaggcactgtagggccaggcaccaggtgaaggcagcgaggtgttgagggaagaattagaccctatcaaagacagaaagataaagaaagtgaagagtaggccagtttcagagttaaatcccaagaaagccatgatttgtaccagtgtcagccttttgcacgatatacaaccgtggagcacaggcacacaggcttccttcttagtcaaatgcaacagacttatcctgttatgacaagaatatcagaatattctsaaatatcagacataagtaatcatatgccagctgttcactgttttacctgtggtgttgtcccgcagaagttggtggtcagtatctacaatgggagatgtggctgtcccccccagcacacttccaggggtcacgtaggggtcagattcagggtcaatgttttgtatacctttccatggcactcctggttggaactctgggacagaaggaaagaaggagttagatgcagacaatggaacgttgcttactagaagtaactgtgaaggatattttaggaggataatcttccacactgttcctaaa

SEQ ID NO: 38134 - DNA, 600 bp, Chicken  19866894268891_2
ataatctaggctaacaggtatcaaaattcctaacagtatgaacaatctattggcactatatgaagaaagaaagatgttcagcttctcccaaaatacagcagtcccctgaagagaaggatcaccttatgcttaaggatcactgaatgcagactctcaggtctagtcaaaaagattttctctgttccaagagaaagaatctataaacaaagtttaggatacaaaatggctgatggtaagataaatccaagtctcacctttgtcaagatgcctgagaactggtgagactgaaaattagtgcaycataacctctcttcaaatagttaggtcaaacaagggtctaagaccaggaacactgtattgcttttaacaataaacatatccactccaatacaatgtggtgtggaggtgtggagacattaaaaatgaggcttctgatctctggctgcaggtcaagtaagtaccactgattaggctgcccaccttgttgctcagaagatcagttaaataaactgttttgaagttggtctggaacagtttgtcagttccagtgctctgtagctttctgggaggaggtactcatgccagtacttcatgtgaatg

SEQ ID NO: 38135 - DNA, 600 bp, Chicken  19866894268899_1
gaacaaggacagttctgtgtgcttgttttcaataacagtgccaacgtttttcaagaaaagaaaatccatactctttaatcccattgatacataaaagacattatcacaaattcaaaaaaattcactttaattctattaagagctttaatcatagatcattcaataaataaaggatgtttgccctcatattatttttccaaggatgagtttaataatttgcacttgaattccaaatgtcaatgtggcaactgactgatcaagcaattccagaatccaaggaatatcctgcataaagccttygattatgagaaacttctcttactctcatctcaaatttcatccaaatctctagtgcacatatattacagtaagctttcagatctcaatggctaattgaagtgctgacacagccccttattaaaaaaataaccttccagatcaacacccataggcctaagaacttaattctaagttagagcctatagaatctagtaatcattctagaaggttttgtttcattttgaacaaactgcattggaataacctaaaaaattctgactcaggtacatttatagctcagtcactgaaagaatttagctg

SEQ ID NO: 38136 - DNA, 600 bp, Chicken  19866894268903_1
ggaaagatgaagctagtttcgccttatggcaaaattgacttcagtgaaaattcatttttgtctatgtgatacaaagaaataaggaataaatagaaagttcaggttttcacagcttggctgtagatgaaacacatcttgtacacccaaggaagtatactggaataagtgccactgggaaaattaataacaggaacaagtgatcacacaagcgctaaaaccagtgaaccttggtttttatagatttaaattgcgtgcttggattctctggtgtttcataaggtagaacccttccctgcttgkcttccctgcttccctggccttttccctctactgtagcattaaacagaattctgcactaggctttgcctacgttcatgatctctttgctattattggagtcttattactttattaaatttagttcaagttagccaaccggacagacaccattccctctccctgccctacactcagagtgtgactttctaagagtcgacaccttaagaagctgaactaaaaaacacccatgctatcagaatggagaggagcttccacaaacatctgctcaagtaatgcattatcccccttcaaaacctgctt

SEQ ID NO: 38137 - DNA, 600 bp, Chicken  19866894268903_2
gaatggagaggagcttccacaaacatctgctcaagtaatgcattatcccccttcaaaacctgctttaacattcctcccttctgtggcactgacataaaaactgacagtgattagtttgctagtgtccaaagaccattgcttatctcacagaccaaaagtgcctcattttttcttgtagttttcagtttgtctgtctgtcctctgtctcatcttagtttgatttagactgcaaatgctttgatacagaggtcacctttttactgtttgtttttgcagcaacaaaatcatccatgtccatgmccaagatacctgagcacagtattaatgcaattaatagctaatatttatattaagaaaattgtaattgtgcaagatgcytgcagagtcacacagtattcatcactctgacctgctgtctttgataaagaactgccagttgttttaatgcactgaatgagatattattcgtatgacaaacgaatctgtcaattggctttatwggccagcccaaattctaacagtgtttatccaaaacaaatccctgctttaagttggcagactcattatttttcatattaatatgtgtaccaacttgagggt

SEQ ID NO: 38138 - DNA, 600 bp, Chicken  19866894268903_3
ttctgtggcactgacataaaaactgacagtgattagtttgctagtgtccaaagaccattgcttatctcacagaccaaaagtgcctcattttttcttgtagttttcagtttgtctgtctgtcctctgtctcatcttagtttgatttagactgcaaatgctttgatacagaggtcacctttttactgtttgtttttgcagcaacaaaatcatccatgtccatgmccaagatacctgagcacagtattaatgcaattaatagctaatatttatattaagaaaattgtaattgtgcaagatgcytgcagagtcacacagtattcatcactctgacctgctgtctttgataaagaactgccagttgttttaatgcactgaatgagatattattcgtatgacaaacgaatctgtcaattggctttatwggccagcccaaattctaacagtgtttatccaaaacaaatccctgctttaagttggcagactcattatttttcatattaatatgtgtaccaacttgagggttactactgaaccattctaggcctctacagatggactgatgattgcactttgatttatggctcatcaccaggacattat

SEQ ID NO: 38139 - DNA, 600 bp, Chicken  19866894268903_4
tctgtctcatcttagtttgatttagactgcaaatgctttgatacagaggtcacctttttactgtttgtttttgcagcaacaaaatcatccatgtccatgmccaagatacctgagcacagtattaatgcaattaatagctaatatttatattaagaaaattgtaattgtgcaagatgcytgcagagtcacacagtattcatcactctgacctgctgtctttgataaagaactgccagttgttttaatgcactgaatgagatattattcgtatgacaaacgaatctgtcaattggctttatwggccagcccaaattctaacagtgtttatccaaaacaaatccctgctttaagttggcagactcattatttttcatattaatatgtgtaccaacttgagggttactactgaaccattctaggcctctacagatggactgatgattgcactttgatttatggctcatcaccaggacattattcacaaagccttgataactcatttatatcggtcagcatgtgcatttgacttgacagaatcattatccacattatcaccagaactcacacatggacctctgcctttgctctggaattgatatt

SEQ ID NO: 38140 - DNA, 600 bp, Chicken  19866894268903_5
ctcatttatatcggtcagcatgtgcatttgacttgacagaatcattatccacattatcaccagaactcacacatggacctctgcctttgctctggaattgatattggctttcaagtcactaaacgctattcagtgcattccccctcagagctacgccttactgcccctctgcaccgtactcacatagtacctaaagtccatcacactctttttcatacatctaatctgtgatcaacctttttttttcacatccattctacatcagttgatatttgagatgttatatctgtacttaaaacrtccaaaggtgaaagaaagaaaataacttgatattactaaattatttcataccatttatcttaatttgtagccaattaaaaccctactgcacctttaggacacatggtatttttgccatgttttatacagaccaccccattatattaatgcatagttgctcaaatctttccagagcagaataaaaaacagagttctaaaaatcagaatgctcacaatccaaaagacccacaaaacctgagttctgttctaatgcatgatggatgtggcttccatgtataagaacacctcatacttgacttg

SEQ ID NO: 38141 - DNA, 599 bp, Chicken  19866894268912_1
  misc_feature (1)..(25): n is any nucleotide
nnnnnnnnnnnnnnnnnnnnnnnnncatcttcatggcccatttctggacctgctccaacagctcagtgttggagacaacaagtcacacacagccctctgagcagcaagccgctgtaccacacagcaggacagcctccagcatggaatgtttctggcactctatgtgctcaccagttcttttgcaatgaagttagatacaaaatcctcctctgttttaacaataagtcggtgacacaaagacaggaaaggccatgggaacacaaccagctcaacatcctggtgcaaacccaacagaacacrttgggaacactcacgcagcacagcttccagcagaatgatcacagaatccttagagttggaagggacctctaacggccatctagtccaagtcccctgcaatgaacagggacaccacagctccaccaggtgctcagagccccatccagcctggcagatctccatcagtgctgaatgaggagttgctttaatgtggagatgaccaaaaaccttacagatattatagcaaagaaacctgaagacagcatttcaaggtacaagagcacggggcaccatccaaaccacagaagacagaacaaacc

SEQ ID NO: 38142 - DNA, 600 bp, Chicken  19866894268914_1
aaagcaagaacaacctgagcaacttcttgcactgagaccatgtgctccctgctaaggtcattttcttcacctctaacttttcctaaatttcactgcactaatttaataaaaactagattaaaaaaaacagtaaatctaaagaattagaaagctacagtcactcacagcacgctgagcatgcctgacagcaatcctgagcactccaggtaccagaatcacatctcattgagatacaatgatcttttggtgctggagttgtgacaaaatggtaataaatcactgcaactgaaaataagccasaaatttgaagtttttaccactcygggatatatttctgtaagaagttcagactggagcagtgtctgtgacagctaccgaagagagaagccaagcacttgataaacaaaggccaggaattaatgctgctctgactgacaaggaccacacgaggacattgagcacggctctcagaggatttgaatggatggtctgctccagtgcttcactaccaccaatggcattcaagatctttaactggcttaaacactgcctaggcagttgcactgaaaacagtggatgaaccaaagcagaaaagtattc

SEQ ID NO: 38143 - DNA, 600 bp, Chicken  19866894268914_2
ttcttgcactgagaccatgtgctccctgctaaggtcattttcttcacctctaacttttcctaaatttcactgcactaatttaataaaaactagattaaaaaaaacagtaaatctaaagaattagaaagctacagtcactcacagcacgctgagcatgcctgacagcaatcctgagcactccaggtaccagaatcacatctcattgagatacaatgatcttttggtgctggagttgtgacaaaatggtaataaatcactgcaactgaaaataagccasaaatttgaagtttttaccactcygggatatatttctgtaagaagttcagactggagcagtgtctgtgacagctaccgaagagagaagccaagcacttgataaacaaaggccaggaattaatgctgctctgactgacaaggaccacacgaggacattgagcacggctctcagaggatttgaatggatggtctgctccagtgcttcactaccaccaatggcattcaagatctttaactggcttaaacactgcctaggcagttgcactgaaaacagtggatgaaccaaagcagaaaagtattcttaaagtacaattggtcattaca

SEQ ID NO: 38144 - DNA, 599 bp, Chicken  19866894268915_1
  misc_feature (1)..(123): n is any nucleotide
nnnnnnnnnnnnnnnnnnnnnnnnnnnnnnnnnnnnnnnnnnnnnnnnnnnnnnnnnnnnnnnnnnnnnnnnnnnnnnnnnnnnnnnnnnnnnnnnnnnnnnnnnnnnnnnnnnnnnnnnnnnccccttcttacaggaggtcagccatcaaggctggaatctcaccgctgctggagctgtctgctgaaacaggtggtcactgagtaccacttcacagactgaagcgatgcacgtcggccccctgagaacacagtccgggggcacccagtgtgcctcacacctcttctgaccgcagcagcrgatattggaacattaaayggagaaatctggtgatgattacaattaaaccctatttaaggcttaaaaatgaaacaatagatttacaaacagttcacaacacaacaataagcagtaggggcttaattctttgttcygttcagtagattcatagaaagttatatagtgcagtatggggccccacgggaaaaatcaccttggtaatttcatggttattgtgggcaagctataggagaggtcactgtttggaaaaataaccactactgtctggaaaaactggtaattctgagattgctacaatg

SEQ ID NO: 38145 - DNA, 599 bp, Chicken  19866894268915_2
  misc_feature (1)..(105): n is any nucleotide
nnnnnnnnnnnnnnnnnnnnnnnnnnnnnnnnnnnnnnnnnnnnnnnnnnnnnnnnnnnnnnnnnnnnnnnnnnnnnnnnnnnnnnnnnnnnnnnnnnnnnnnnnccccttcttacaggaggtcagccatcaaggctggaatctcaccgctgctggagctgtctgctgaaacaggtggtcactgagtaccacttcacagactgaagcgatgcacgtcggccccctgagaacacagtccgggggcacccagtgtgcctcacacctcttctgaccgcagcagcrgatattggaacattaaayggagaaatctggtgatgattacaattaaaccctatttaaggcttaaaaatgaaacaatagatttacaaacagttcacaacacaacaataagcagtaggggcttaattctttgttcygttcagtagattcatagaaagttatatagtgcagtatggggccccacgggaaaaatcaccttggtaatttcatggttattgtgggcaagctataggagaggtcactgtttggaaaaataaccactactgtctggaaaaactggtaattctgagattgctacaatggagtttttccaaggaaaa

SEQ ID NO: 38146 - DNA, 600 bp, Chicken  19866894268915_3
aggaggtcagccatcaaggctggaatctcaccgctgctggagctgtctgctgaaacaggtggtcactgagtaccacttcacagactgaagcgatgcacgtcggccccctgagaacacagtccgggggcacccagtgtgcctcacacctcttctgaccgcagcagcrgatattggaacattaaayggagaaatctggtgatgattacaattaaaccctatttaaggcttaaaaatgaaacaatagatttacaaacagttcacaacacaacaataagcagtaggggcttaattctttgttcygttcagtagattcatagaaagttatatagtgcagtatggggccccacgggaaaaatcaccttggtaatttcatggttattgtgggcaagctataggagaggtcactgtttggaaaaataaccactactgtctggaaaaactggtaattctgagattgctacaatggagtttttccaaggaaaactgtgtcttgatgattataggaaagagttatcaaaaggagaggggacaaaggaagaacaccctgtacaattccaataccaggcacagggagagcacgcagctgttaaaggtgcggtg

SEQ ID NO: 38147 - DNA, 600 bp, Chicken  19866894268915_4
gatactggctaacagcgttccttctgctttcggaggctctaacgtagctactggggaatgaaacctggccagctcgcgagacgaagagcttgctaaatgtgctcagaattcctggtgctaactccaccctttgttttttcagcatttttcttgctctgctttttgttacaatccaactatgcaagatcccattaaccaaagggaccagcctgcccccgcccaggaactgccgcgctgccgcccacagtccacagccacccttctccacttccacgtctcagaccacaactgcccacccgrctggcagcccggagtcggagctcctctgttccaacacctcctaggaccaaatgctgcgtcctgcagctctgagttctgttctttacccctttggatttgcaagcaattatgtgtgggtttaggaaaatctaggacagggcacttactgtatttaaactcagagagtcgttcaccttctgctctaacatcactacccccaaaacacactgctgtactctaaggtgggaaacaatgcygttttactaccatgatcccaggaatatccaactctgacctatttcccaatatcgtatttttaga

SEQ ID NO: 38148 - DNA, 600 bp, Chicken  19866894268915_5
gccgcccacagtccacagccacccttctccacttccacgtctcagaccacaactgcccacccgrctggcagcccggagtcggagctcctctgttccaacacctcctaggaccaaatgctgcgtcctgcagctctgagttctgttctttacccctttggatttgcaagcaattatgtgtgggtttaggaaaatctaggacagggcacttactgtatttaaactcagagagtcgttcaccttctgctctaacatcactacccccaaaacacactgctgtactctaaggtgggaaacaatgcygttttactaccatgatcccaggaatatccaactctgacctatttcccaatatcgtatttttagagctatatgttcacaattaatggtgtagtaatcctaagatgctgaacgaaaacaacacaattgctgttactgttatcagaaatagcaacaaaaccatacctctaaatcagcccaaattctgagaatgccatgaaaatgcatctcctgtagatacagccaggagtgagcacagagcaaaacgaagccagttctgggatgactcattaagaagagcgaacggctgcactaaattatgta

SEQ ID NO: 38149 - DNA, 600 bp, Chicken  19866894268928_1
acacctaggagcggacacggttgtacggttctgttctctcacagagctgtacagtacttgaccaaaaggtaaaatcacgggagcggattataaaccaaggttagatcatggagaccttcagttcaagtaaagcagtctgtgtgtgtcgtgtgctttgggctttatgcgtccttgtttcagtagaaaccagctcaggaacaaaaaggtagagttttatttctctgtctggtgcaagctgtcaaacagcaattcagaacgaagagaatctccattttgaggccatctgtgtaagttcttttktctgaacctgacaaggggtcatggcagatggtggggtcacaaagtctggcttcttgaggttgacaaaatgtgttcataaagctggaagaataccaactgtttgtactgtctgaaaagcactgtggcaaatgactgtcatagtttatggatgataccttctggatcactaagcttgatggcaaataacatgtcaaagattaaactagtttgcctatctgtcagcatgttgaaactgcctagaaaatgttttcttagctatgttttatttgagtaaattacttgtaaaacctattgaagtga

SEQ ID NO: 38150 - DNA, 600 bp, Chicken  19866894268928_2
aaactgcatcataaattttggtccagagctccagatgatgtatttggaaggtgtgtgtggaaggaggagaaagagaacggaatggcagaatcctaattttcaaatgtggtgcaggttgtcagtgtatgctctttgctgtggaccattgacactgcgtggcttttctttggcaacttcccaggtttcaagatggctacacggatctagcagtcccttttccccaggaacattaatagataactctctatattcttacaattatatccctaccagataaaaatgcttctcattttcttggakrttttgttgtggaactaaaactaaaagctctttttgctacagtatgtcttagtagacagatcgtgtggtatttggatgctggaatagctgcttgatcacagctgcagcagatcggggcagcaggggaggtagatagagctcattcagtaggaaagggagaacactaccgaatggagtagcatgttttcctttaactctagtagcagctgaagtgatgcaatatctgaataaactaagagatctgtagaaagcctgatggagttcaaggagcacaaaatgaatgaatgactgaaaagatat

SEQ ID NO: 38151 - DNA, 600 bp, Chicken  19866894268928_3
aactgcatcataaattttggtccagagctccagatgatgtatttggaaggtgtgtgtggaaggaggagaaagagaacggaatggcagaatcctaattttcaaatgtggtgcaggttgtcagtgtatgctctttgctgtggaccattgacactgcgtggcttttctttggcaacttcccaggtttcaagatggctacacggatctagcagtcccttttccccaggaacattaatagataactctctatattcttacaattatatccctaccagataaaaatgcttctcattttcttggakrttttgttgtggaactaaaactaaaagctctttttgctacagtatgtcttagtagacagatcgtgtggtatttggatgctggaatagctgcttgatcacagctgcagcagatcggggcagcaggggaggtagatagagctcattcagtaggaaagggagaacactaccgaatggagtagcatgttttcctttaactctagtagcagctgaagtgatgcaatatctgaataaactaagagatctgtagaaagcctgatggagttcaaggagcacaaaatgaatgaatgactgaaaagatatg

SEQ ID NO: 38152 - DNA, 600 bp, Chicken  19866894268931_1
gtaatgaagaaagccatctcagcacagaacagaactccattctctctaacctggctttcatttttctatcagtggcacttgagaattcacataaaaagctgtgactatgagaaattatatgtagtgacctttaactatagcatgcaccaattcagtaaattaattcagctaagtgtaaatgtaaaattgtgattcccttgggtatggcaattgtgtttgccttgcagggattcatctatctgtaacaacaatgtataaagcagcacatgattatactgtcttaaaaaaaaaaaaaaaaamaactaaaaaacacacacagctccctggtattctaaaaagaccttgactccttcagtgattgctatatcttgtgaacaaatagcagggtrcccgatcaagcaaactgaggccataaattactgggtgagtaagaatcaatattttattagaagcacaaggtttagtatgatgaaccttgcagatatattcctttctgtttataggtaaatcattagatttcctaaaatagacatggctgttagacagctgattttttcagcctcaagctatgaggattgtattgtaggcaaaaagaaagaa

SEQ ID NO: 38153 - DNA, 600 bp, Chicken  19866894268931_2
cataaaaagctgtgactatgagaaattatatgtagtgacctttaactatagcatgcaccaattcagtaaattaattcagctaagtgtaaatgtaaaattgtgattcccttgggtatggcaattgtgtttgccttgcagggattcatctatctgtaacaacaatgtataaagcagcacatgattatactgtcttaaaaaaaaaaaaaaaaamaactaaaaaacacacacagctccctggtattctaaaaagaccttgactccttcagtgattgctatatcttgtgaacaaatagcagggtrcccgatcaagcaaactgaggccataaattactgggtgagtaagaatcaatattttattagaagcacaaggtttagtatgatgaaccttgcagatatattcctttctgtttataggtaaatcattagatttcctaaaatagacatggctgttagacagctgattttttcagcctcaagctatgaggattgtattgtaggcaaaaagaaagaaggtaggaaatggggaatgtaattatataaatcctcctcaagggaaaggagagggaggaaggtgcaaaatacaactatacaacccacgtg

SEQ ID NO: 38154 - DNA, 600 bp, Chicken  19866894268938_1
tagaaactgccttataggtgggtttttttatctggaaagcttggatgggattcatctcatctaactcaatgtctgcaatgtagatattcccatccaaactccttgctctcagctcctctcatagccaagggaagaaatagagctgggctgtgagtcaacagactgactgtagacatggagtttagggtgatgtgaatgaagctgcccttttccaactgtactgatgagaaatccagtgactacaaagggagcctgggtagaccagaccatctgtaggtactcgctgataatgatattcayagataattttattcagccctgtcctacctatgatggcagtttgttctatactggacgtgtagtgaacaactcatgcagagactgaaatactaacaagatcatctgcttagtatgcaacctgttcactcacatttatagctatttatcagcatattttccagccctgctgcttgccaaatggagtattgtgctgctaatgactctaatagctagcaaaactgaggtgactgcacaaagataagtaaaaggaagaacatactatgttcaagtttcttgtttttctctcctaacaaaagacaa

SEQ ID NO: 38155 - DNA, 599 bp, Chicken  19866894268940_1
  misc_feature (1)..(36): n is any nucleotide
nnnnnnnnnnnnnnnnnnnnnnnnnnnnnnnnnnnnctggcatctgaaggcacctgtctcctgctggccattttgtatccctactatgaataagggaaagatgccattcttcagcatgctgtcagtggtttgatcagaaagccactctttatatagtattttgaacatacattgcactgcatatacacacagtattacagattattactacttccattaaataaatgcattctagtggcatggctttttaattcttttagccctgaccctggattcttgtaagtactctgatgtggcaaytccctcaccagcctgggaagaccgggcctgctcctccactcgcttacaagatggcaagtcttacaagagcaatttctgctgcagaagtgaccctactcaaatagctatccaaacgcaacagtatcccaaaatactcgtcctcrtgctttccagaggaaggacatcagctcctgatgtggccagatgaaggacacaggtgcacaccgtgccgctgcaccgtaagcaggtggaagcggtagcatgcctcgactctccctgcaccgtaaactgtgaaatatcctctccaaratgaaattatc

SEQ ID NO: 38156 - DNA, 600 bp, Chicken  19866894268940_2
actctttatatagtattttgaacatacattgcactgcatatacacacagtattacagattattactacttccattaaataaatgcattctagtggcatggctttttaattcttttagccctgaccctggattcttgtaagtactctgatgtggcaaytccctcaccagcctgggaagaccgggcctgctcctccactcgcttacaagatggcaagtcttacaagagcaatttctgctgcagaagtgaccctactcaaatagctatccaaacgcaacagtatcccaaaatactcgtcctcrtgctttccagaggaaggacatcagctcctgatgtggccagatgaaggacacaggtgcacaccgtgccgctgcaccgtaagcaggtggaagcggtagcatgcctcgactctccctgcaccgtaaactgtgaaatatcctctccaaratgaaattatcccccgagcttgttttcaaaacaaaagctgaactctgtactgctaggaccgtaagtttcaaaggagaaggcctcatgttagacacccaagtccacattaggggcacgtaagcaggtgaagagaaaactttttctccaaatagtgt

SEQ ID NO: 38157 - DNA, 534 bp, Chicken  19866894268940_3
tgatgtggcaaytccctcaccagcctgggaagaccgggcctgctcctccactcgcttacaagatggcaagtcttacaagagcaatttctgctgcagaagtgaccctactcaaatagctatccaaacgcaacagtatcccaaaatactcgtcctcrtgctttccagaggaaggacatcagctcctgatgtggccagatgaaggacacaggtgcacaccgtgccgctgcaccgtaagcaggtggaagcggtagcatgcctcgactctccctgcaccgtaaactgtgaaatatcctctccaaratgaaattatcccccgagcttgttttcaaaacaaaagctgaactctgtactgctaggaccgtaagtttcaaaggagaaggcctcatgttagacacccaagtccacattaggggcacgtaagcaggtgaagagaaaactttttctccaaatagtgtttaattcttacttggtttccactagttaacctcccaaaagtcagaagaaaaacaacatataaacaatatttcacattca

SEQ ID NO: 38158 - DNA, 600 bp, Chicken  19866894268946_1
tacggacatctttgaataactgaagatgtcttatttaccccatctgtttaaagtcaagaaaaatgcagttgtgtttttcattcagaaaggcttaagtagctgtatttgttattcctggggaaaaatatgaatggataaatttcaattatagccccagtaatattgttaccgttctagaaaaaggcaaactgattaatagcaatgtctgatatatacattattcaaattgaaaattagactatattttgaattaattatttcttgacagattgagtttttaattaagaaaaaattgcagcrcaagagatttttttcatttttcttacaagaaaggtaatttttatcagcgcagctctccagccaggcaaaacgaaactgcaaaaagcagagctacagaatttcctccagtgtttttacagcaatacccggatcaagtrgaaactgagccaagaaaggagtatctgcgctgactttagggggccccttctctaactctgtggacttcgacccaatmactgcagcactgctggaygtgcagtytcaccctcgtgactcccccagcatgcagcccactgaattgattccgccagtccygagttc

SEQ ID NO: 38159 - DNA, 600 bp, Chicken  19866894268946_2
aatttcaattatagccccagtaatattgttaccgttctagaaaaaggcaaactgattaatagcaatgtctgatatatacattattcaaattgaaaattagactatattttgaattaattatttcttgacagattgagtttttaattaagaaaaaattgcagcrcaagagatttttttcatttttcttacaagaaaggtaatttttatcagcgcagctctccagccaggcaaaacgaaactgcaaaaagcagagctacagaatttcctccagtgtttttacagcaatacccggatcaagtrgaaactgagccaagaaaggagtatctgcgctgactttagggggccccttctctaactctgtggacttcgacccaatmactgcagcactgctggaygtgcagtytcaccctcgtgactcccccagcatgcagcccactgaattgattccgccagtccygagttctatatgcacttcctgtgactacttccaaacagtttaagygcagtaaaaagaagctgccatcgtataagtaatggaaaactttaataccgatgtctctgtcttgaacagtttgagcgtctcccattattcacaagggt

SEQ ID NO: 38160 - DNA, 600 bp, Chicken  19866894268946_3
acattattcaaattgaaaattagactatattttgaattaattatttcttgacagattgagtttttaattaagaaaaaattgcagcrcaagagatttttttcatttttcttacaagaaaggtaatttttatcagcgcagctctccagccaggcaaaacgaaactgcaaaaagcagagctacagaatttcctccagtgtttttacagcaatacccggatcaagtrgaaactgagccaagaaaggagtatctgcgctgactttagggggccccttctctaactctgtggacttcgacccaatmactgcagcactgctggaygtgcagtytcaccctcgtgactcccccagcatgcagcccactgaattgattccgccagtccygagttctatatgcacttcctgtgactacttccaaacagtttaagygcagtaaaaagaagctgccatcgtataagtaatggaaaactttaataccgatgtctctgtcttgaacagtttgagcgtctcccattattcacaagggttccttcagtttgaccttgacttttatggagctcacggaaatgtacaaaatgtaaaatagaccaggaaagaagctgga

SEQ ID NO: 38161 - DNA, 600 bp, Chicken  19866894268946_4
attagactatattttgaattaattatttcttgacagattgagtttttaattaagaaaaaattgcagcrcaagagatttttttcatttttcttacaagaaaggtaatttttatcagcgcagctctccagccaggcaaaacgaaactgcaaaaagcagagctacagaatttcctccagtgtttttacagcaatacccggatcaagtrgaaactgagccaagaaaggagtatctgcgctgactttagggggccccttctctaactctgtggacttcgacccaatmactgcagcactgctggaygtgcagtytcaccctcgtgactcccccagcatgcagcccactgaattgattccgccagtccygagttctatatgcacttcctgtgactacttccaaacagtttaagygcagtaaaaagaagctgccatcgtataagtaatggaaaactttaataccgatgtctctgtcttgaacagtttgagcgtctcccattattcacaagggttccttcagtttgaccttgacttttatggagctcacggaaatgtacaaaatgtaaaatagaccaggaaagaagctggaagtgcaggtaccagctcc

SEQ ID NO: 38162 - DNA, 600 bp, Chicken  19866894268946_5
atattttgaattaattatttcttgacagattgagtttttaattaagaaaaaattgcagcrcaagagatttttttcatttttcttacaagaaaggtaatttttatcagcgcagctctccagccaggcaaaacgaaactgcaaaaagcagagctacagaatttcctccagtgtttttacagcaatacccggatcaagtrgaaactgagccaagaaaggagtatctgcgctgactttagggggccccttctctaactctgtggacttcgacccaatmactgcagcactgctggaygtgcagtytcaccctcgtgactcccccagcatgcagcccactgaattgattccgccagtccygagttctatatgcacttcctgtgactacttccaaacagtttaagygcagtaaaaagaagctgccatcgtataagtaatggaaaactttaataccgatgtctctgtcttgaacagtttgagcgtctcccattattcacaagggttccttcagtttgaccttgacttttatggagctcacggaaatgtacaaaatgtaaaatagaccaggaaagaagctggaagtgcaggtaccagctcccttccata

SEQ ID NO: 38163 - DNA, 569 bp, Chicken  19866894268946_6
gcagcrcaagagatttttttcatttttcttacaagaaaggtaatttttatcagcgcagctctccagccaggcaaaacgaaactgcaaaaagcagagctacagaatttcctccagtgtttttacagcaatacccggatcaagtrgaaactgagccaagaaaggagtatctgcgctgactttagggggccccttctctaactctgtggacttcgacccaatmactgcagcactgctggaygtgcagtytcaccctcgtgactcccccagcatgcagcccactgaattgattccgccagtccygagttctatatgcacttcctgtgactacttccaaacagtttaagygcagtaaaaagaagctgccatcgtataagtaatggaaaactttaataccgatgtctctgtcttgaacagtttgagcgtctcccattattcacaagggttccttcagtttgaccttgacttttatggagctcacggaaatgtacaaaatgtaaaatagaccaggaaagaagctggaagtgcaggtaccagctcccttccatagaagtgggtgagcagcccagcaa

SEQ ID NO: 38164 - DNA, 524 bp, Chicken  19866894268946_7
tttatcagcgcagctctccagccaggcaaaacgaaactgcaaaaagcagagctacagaatttcctccagtgtttttacagcaatacccggatcaagtrgaaactgagccaagaaaggagtatctgcgctgactttagggggccccttctctaactctgtggacttcgacccaatmactgcagcactgctggaygtgcagtytcaccctcgtgactcccccagcatgcagcccactgaattgattccgccagtccygagttctatatgcacttcctgtgactacttccaaacagtttaagygcagtaaaaagaagctgccatcgtataagtaatggaaaactttaataccgatgtctctgtcttgaacagtttgagcgtctcccattattcacaagggttccttcagtttgaccttgacttttatggagctcacggaaatgtacaaaatgtaaaatagaccaggaaagaagctggaagtgcaggtaccagctcccttccatagaagtgggtgagcagcccagcaa

SEQ ID NO: 38165 - DNA, 599 bp, Chicken  19866894268948_1
  misc_feature (1)..(94): n is any nucleotide
nnnnnnnnnnnnnnnnnnnnnnnnnnnnnnnnnnnnnnnnnnnnnnnnnnnnnnnnnnnnnnnnnnnnnnnnnnnnnnnnnnnnnnnnnnnnnncctgggaaaaaaataattaaaaataatgatcggagtgatctgttttcttaatccatgggaagatgactaaaatgcagaactgtaataccatacaactcgttttagggaggaaaaaaaaaaaaaaaaaagcttttataattagatgcactaattagtgcattctgcactaataattagactaatttgcacttacacatagttacttygagaagcatgctatagaaatgtcctgatctcactcacctccttttgctgtgctccttaacattttttcagcaccttttatttccaagatactctgcagaagtttgtgagctaaatccaggattttactgacttgactatagctaatctctgtgcttctgtacacagttgtattgatttagattgagttcttgttacatttgcatctacctatgctaatattgcttaaatttgagggcttatttttctgtgagtagtttggaaacaaaatgtgtattaaagatctacagatcatatatag

SEQ ID NO: 38166 - DNA, 599 bp, Chicken  19866894268955_1
  misc_feature (1)..(64): n is any nucleotide
nnnnnnnnnnnnnnnnnnnnnnnnnnnnnnnnnnnnnnnnnnnnnnnnnnnnnnnnnnnnnnnntcagtttttcagttgccaatgtttcagtcatgccataaactagactgaagatatcgaagcttaacctggtaggcaagagattatttccatgctctctacagcaattcagaaagccactaaaaatgttattttctacttcccaaacagggcctcagccttagacaggacaataataatttgcaaagctgacgtaagctattgtttagcataatttttaggagagccaaacaatacaygtgttgcctgctgcacaagaagtaggcagaacctttttcttctatattctataaataccatgcctcaggaaaagctgctttgctgaaccggagctgaacattatatacagcaacctgcctagaccaggagacaaaaccatggatcccaaatagacaaaagaaaagtgcacaaggctcgatggggaaagcaacactacctacctttaatccctgccaaggcagactggttctgttaaagtacatcaatacatagcctagagactccatgtcatctcggcgactrtagaaagggaaagaat

SEQ ID NO: 38167 - DNA, 600 bp, Chicken  19866894268955_2
agagccaaacaatacaygtgttgcctgctgcacaagaagtaggcagaacctttttcttctatattctataaataccatgcctcaggaaaagctgctttgctgaaccggagctgaacattatatacagcaacctgcctagaccaggagacaaaaccatggatcccaaatagacaaaagaaaagtgcacaaggctcgatggggaaagcaacactacctacctttaatccctgccaaggcagactggttctgttaaagtacatcaatacatagcctagagactccatgtcatctcggcgactrtagaaagggaaagaatactctgaattacacatttcagcatttcaacttcattccaagcagtgaaatcattgcacaatttaaaaaataaataaacaaaaaataaaatcaaggaatcaccagtgcaccagtctgggactaataatgaatacctgtgcccaakgagcaatgtatttacgaagggcrtaactcctttcttctctaatttttgtttaaataaaccaacacaatcatctccttactattaaggcaagtgatattcagaaaggtgcaggcatcaatctgagaggtgcttctttgcat

SEQ ID NO: 38168 - DNA, 585 bp, Chicken  19866894268955_3
tcccaaatagacaaaagaaaagtgcacaaggctcgatggggaaagcaacactacctacctttaatccctgccaaggcagactggttctgttaaagtacatcaatacatagcctagagactccatgtcatctcggcgactrtagaaagggaaagaatactctgaattacacatttcagcatttcaacttcattccaagcagtgaaatcattgcacaatttaaaaaataaataaacaaaaaataaaatcaaggaatcaccagtgcaccagtctgggactaataatgaatacctgtgcccaakgagcaatgtatttacgaagggcrtaactcctttcttctctaatttttgtttaaataaaccaacacaatcatctccttactattaaggcaagtgatattcagaaaggtgcaggcatcaatctgagaggtgcttctttgcattctccctccttcagtatagccaaagttaaccatccgtagacttcactgagaattagcacgcaaactttcacgtaaaaggcctcaaatgttctctgtactgcatatgcttcagacccatgcttcagccacacgaacaccaccacac

SEQ ID NO: 38169 - DNA, 562 bp, Chicken  19866894268955_4
gcacaaggctcgatggggaaagcaacactacctacctttaatccctgccaaggcagactggttctgttaaagtacatcaatacatagcctagagactccatgtcatctcggcgactrtagaaagggaaagaatactctgaattacacatttcagcatttcaacttcattccaagcagtgaaatcattgcacaatttaaaaaataaataaacaaaaaataaaatcaaggaatcaccagtgcaccagtctgggactaataatgaatacctgtgcccaakgagcaatgtatttacgaagggcrtaactcctttcttctctaatttttgtttaaataaaccaacacaatcatctccttactattaaggcaagtgatattcagaaaggtgcaggcatcaatctgagaggtgcttctttgcattctccctccttcagtatagccaaagttaaccatccgtagacttcactgagaattagcacgcaaactttcacgtaaaaggcctcaaatgttctctgtactgcatatgcttcagacccatgcttcagccacacgaacaccaccacac

SEQ ID NO: 38170 - DNA, 599 bp, Chicken  19866894268956_1
  misc_feature (1)..(208): n is any nucleotide
nnnnnnnnnnnnnnnnnnnnnnnnnnnnnnnnnnnnnnnnnnnnnnnnnnnnnnnnnnnnnnnnnnnnnnnnnnnnnnnnnnnnnnnnnnnnnnnnnnnnnnnnnnnnnnnnnnnnnnnnnnnnnnnnnnnnnnnnnnnnnnnnnnnnnnnnnnnnnnnnnnnnnnnnnnnnnnnnnnnnnnnnnnnnnnnnnnnnnnnnnnnnnnnnccaaacaaaggaattctactgtttctcctgtagcttctccagcgtatttccctaatggagagtttagaaaaacctgacccctagtcataccrtgccactaatgctgcagctccaagcttgtggaacctgaggtggagcaagcaagtgccagtaaggtaagatctatttaaacttatcttgtcagtgcaacaacatttatgcagaagcgatgttatattttgatacattcattaagggggaaaaaaaaagtgtttttccagatgaatgactaatcacagaattccgtgcttcgtttcagatacaggtaaccatagttacttttgttgcctagcgacacttcttcatacagctgagaatggtcctgctcttgccactttctgtacagccaaat

SEQ ID NO: 38171 - DNA, 600 bp, Chicken  19866894268964_1
ctgtgtagctttcatgcaactgaaagggagatttattttattgtcttgtaacagtttttcttgtggacactgttaggggactagaacttgtcttcagctcctgttagacaaaaagggagttttattcttatggcacagagtgactttggctcgtatgacttgtttgttatatgcataatcgaaacccacaattgtcagaaaagtcctcagcaactgggttaatttctgtgctaccagtaggcttgtttagctacagcagatataaaaatgtcatgcctaataactcttaaagtcttgacrgaatggtgtgtagctcatagggagcttctaaaggcaggaattttcctgccatactgctgcctttctggttaagctcaacagtgcttctgccctatccagtgcagcattctttctttttttatgaaacaaatagttgttaatagatgcactcagtcatttggttgctgctcattttctactcatctcgtttttttgctgagtgtattttatctcatgaataagtcataccacagtgaawctgtgctgaagcatttcccagccatctcagaactgctttggctttgtgcactaacaaagttc

SEQ ID NO: 38172 - DNA, 600 bp, Chicken  19866894268964_2
aggcttgtttagctacagcagatataaaaatgtcatgcctaataactcttaaagtcttgacrgaatggtgtgtagctcatagggagcttctaaaggcaggaattttcctgccatactgctgcctttctggttaagctcaacagtgcttctgccctatccagtgcagcattctttctttttttatgaaacaaatagttgttaatagatgcactcagtcatttggttgctgctcattttctactcatctcgtttttttgctgagtgtattttatctcatgaataagtcataccacagtgaawctgtgctgaagcatttcccagccatctcagaactgctttggctttgtgcactaacaaagttcacatttcttatgaacatcttagggtggttaaaagaaatagagctgaaatatctgtgctcttctaaatgaagctgtagggctttgatgtgtgtatcctgaagttccttttatttctgaaaggatgctgtctggagtatctccatcaaagcagtgtggcaaacttcccaagagcatacccgttctcataggaagaatcggatgtctgtagtgctacacagggcagaatctgcagcacggg

SEQ ID NO: 38173 - DNA, 599 bp, Chicken  19866894268966_1
  misc_feature (1)..(133): n is any nucleotide
nnnnnnnnnnnnnnnnnnnnnnnnnnnnnnnnnnnnnnnnnnnnnnnnnnnnnnnnnnnnnnnnnnnnnnnnnnnnnnnnnnnnnnnnnnnnnnnnnnnnnnnnnnnnnnnnnnnnnnnnnnnnnnnnnnnnnatttccaaggagttttgtttgggtccacagtaaaggcttatagaaaattgtgttgatggcggtaagagaaatgatgatgaagtataagacgaaatcttctgcaggtcagtaattgtttaaaagctaaaaaacaatgaagaaatatatcagggttattttgttgttgwttgtttttcttcacaacagggatttgctacaatttcgctggggatccatgttgttattttattactaagtgatgtcaaaaaggtgaagaacaaggccatgagcttcagtaataatactgagttctttaggatactaaaataaaaaaaccgactgtgaaatgttgtagaaggaccccatgagtaagttgcatgaggggaaaaaaaaacctgacagaatcaggttaattttagaaaatcctaacttttcaawacagaatgatggtttctaaactaatgttactaccaggctaacacttttk

SEQ ID NO: 38174 - DNA, 578 bp, Chicken  19866894268966_2
taaaagctaaaaaacaatgaagaaatatatcagggttattttgttgttgtttgtttttcttcacaacagggatttgctacaatttcgctggggatccatgttgttattttattactaagtgatgtcaaaaaggtgaagaacaaggccatgagcttcagtaataatactgagttctttaggatactaaaataaaaaaaccgactgtgaaatgttgtagaaggaccccatgagtaagttgcatgaggggaaaaaaaaacctgacagaatcaggttaattttagaaaatcctaacttttcaawacagaatgatggtttctaaactaatgttactaccaggctaacacttttktttgtttgtttgtttgaagaaaggataacggaggggacactatgaaagagatctttgaagatgatgactggtatagggaaaggcagacagcgagcagaactgagtaggaatctataaaattctcatatggcaagtttgaaacaaagggaatttatttttcccataatgtagaattgaatgaagaatacacattctcttaagctaataaatatgtgatgagttaaaaaag

SEQ ID NO: 38175 - DNA, 529 bp, Chicken  19866894268966_3
tttgtttttcttcacaacagggatttgctacaatttcgctggggatccatgttgttattttattactaagtgatgtcaaaaaggtgaagaacaaggccatgagcttcagtaataatactgagttctttaggatactaaaataaaaaaaccgactgtgaaatgttgtagaaggaccccatgagtaagttgcatgaggggaaaaaaaaacctgacagaatcaggttaattttagaaaatcctaacttttcaawacagaatgatggtttctaaactaatgttactaccaggctaacacttttktttgtttgtttgtttgaagaaaggataacggaggggacactatgaaagagatctttgaagatgatgactggtatagggaaaggcagacagcgagcagaactgagtaggaatctataaaattctcatatggcaagtttgaaacaaagggaatttatttttcccataatgtagaattgaatgaagaatacacattctcttaagctaataaatatgtgatgagttaaaaaag

SEQ ID NO: 38176 - DNA, 486 bp, Chicken  19866894268967_1
aggagatagagaatgtttgaaggcttcaagattaattaagtttcatctttttagactgttctttacatgtaaaggtaattgcttttagatgttataaatcttgtgtaaaattcctcaagcaataaacacaagctgtatcttagtaattgtctattgactgcgctttccagtatgaattaattttcagttacagacttccctcctcactgtatcaggctagaagtctgcattttgaacacgtagatgttctcatcttgtgtggtttctcatcttgtgtaaatttgtctcacattatgctgrggaaaaaaatagagattcattgtgcaactatcagactgaatatcaatgcagcatgacaataacagtatatgtcaaaacttagatttcctctgcaaattcccagacagtaacaaagacccatttgcaaccttaattatttttattgctgctacattatgctcatctctactgcttctttaaaagtta

SEQ ID NO: 38177 - DNA, 599 bp, Chicken  19866894268968_1
  misc_feature (1)..(170): n is any nucleotide
nnnnnnnnnnnnnnnnnnnnnnnnnnnnnnnnnnnnnnnnnnnnnnnnnnnnnnnnnnnnnnnnnnnnnnnnnnnnnnnnnnnnnnnnnnnnnnnnnnnnnnnnnnnnnnnnnnnnnnnnnnnnnnnnnnnnnnnnnnnnnnnnnnnnnnnnnnnnnnnnnnnnnnnnnntgctggaagatcaaatgtttgtggggcagggaaggaaaacttacagaaggggaagaaggagaccccaagccctcacgtttccatcctccaagctccactgattcctccaaggtcaccttttcccagacastggaaatgtgctttccatcaacactgactttgcttgtgctgttgagaagttgaataaaccactgctgtttgggaaggatgaacttgtgtgagcttctcatatctrgctgagatgggagatgctcctctgctcaacagaccctccctaacctaaarggcaactgctccagactcccagtgttttataaagagctggtgcactggtgtacgaggtaacagcctctgagttctttgatggaggcgtaaccagtttgcccagtgagtatctgcagcaaagccaaaattggtacccagtccaga

SEQ ID NO: 38178 - DNA, 599 bp, Chicken  19866894268968_2
  misc_feature (1)..(65): n is any nucleotide
nnnnnnnnnnnnnnnnnnnnnnnnnnnnnnnnnnnnnnnnnnnnnnnnnnnnnnnnnnnnnnnnntgctggaagatcaaatgtttgtggggcagggaaggaaaacttacagaaggggaagaaggagaccccaagccctcacgtttccatcctccaagctccactgattcctccaaggtcaccttttcccagacastggaaatgtgctttccatcaacactgactttgcttgtgctgttgagaagttgaataaaccactgctgtttgggaaggatgaacttgtgtgagcttctcatatctrgctgagatgggagatgctcctctgctcaacagaccctccctaacctaaarggcaactgctccagactcccagtgttttataaagagctggtgcactggtgtacgaggtaacagcctctgagttctttgatggaggcgtaaccagtttgcccagtgagtatctgcagcaaagccaaaattggtacccagtccagagcaaagcccacaccccccactgcagtctgcatgaagtttgtggttactgtgcacatgggcraggctggctgccctgcatgtctcccagagccagagttaaatggt

SEQ ID NO: 38179 - DNA, 599 bp, Chicken  19866894268968_3
  misc_feature (1)..(15): n is any nucleotide
nnnnnnnnnnnnnnntgctggaagatcaaatgtttgtggggcagggaaggaaaacttacagaaggggaagaaggagaccccaagccctcacgtttccatcctccaagctccactgattcctccaaggtcaccttttcccagacastggaaatgtgctttccatcaacactgactttgcttgtgctgttgagaagttgaataaaccactgctgtttgggaaggatgaacttgtgtgagcttctcatatctrgctgagatgggagatgctcctctgctcaacagaccctccctaacctaaarggcaactgctccagactcccagtgttttataaagagctggtgcactggtgtacgaggtaacagcctctgagttctttgatggaggcgtaaccagtttgcccagtgagtatctgcagcaaagccaaaattggtacccagtccagagcaaagcccacaccccccactgcagtctgcatgaagtttgtggttactgtgcacatgggcraggctggctgccctgcatgtctcccagagccagagttaaatggtttttttgtctgctaatgctggtggcatttggtttgcttctttctgatcct

SEQ ID NO: 38180 - DNA, 484 bp, Chicken  19866894268968_4
actgctgtttgggaaggatgaacttgtgtgagcttctcatatctrgctgagatgggagatgctcctctgctcaacagaccctccctaacctaaarggcaactgctccagactcccagtgttttataaagagctggtgcactggtgtacgaggtaacagcctctgagttctttgatggaggcgtaaccagtttgcccagtgagtatctgcagcaaagccaaaattggtacccagtccagagcaaagcccacaccccccactgcagtctgcatgaagtttgtggttactgtgcacatgggcraggctggctgccctgcatgtctcccagagccagagttaaatggtttttttgtctgctaatgctggtggcatttggtttgcttctttctgatcctccggagcaactccaaatatggggctgggtcagaagtctggcacgtgtggagaagaaactgcttggcaatggtggcagcagatccttctca

SEQ ID NO: 38181 - DNA, 600 bp, Chicken  19866894268978_1
cgctgcgtgggagcagttcccaaggcagcaatgcttccaccacacagctcccagcaagcaaaggcagaaagcagctggaggaggcacacggtgatgggctggcactgagggggcacgcgtggtctcatcgctccgctccataataaggggcctttagatcggtctccatcactgcatgtcagagcagtgcaccctcccagggcacctgggagcattcaacctgtgctgccccacacccacacctgtaagcagcatcccagcaccatccaaagtgcgtcatctcctgctcagcctcccctyggccagtgggggttaatgaagaaatcctgaatctcacagactgagtcagaacgcggttcataagccgcagcacaactgagtcagcggcatctcttttcactgtgattttactgacatctccaatcacaaataccgctcacgctggaccacagccagtgcagtgggagccaaatccctgtctcccaccggcgtatctaagcacgcatctctataaaaaagcaaaatacatctctctgcacccaagaggaaaggggaagctcagaaggaaacataaaaccttggctttccatttttttctgg

SEQ ID NO: 38182 - DNA, 600 bp, Chicken  19866894268981_1
ggatttttctatttttccttgcaagatatttcaaatttcaatgtcatcatctacaatattcgtatttcacacatgacaagattcatataaaattgctgtgtagtatcacttgtcataaactaaagccagactacatgttgagaaaaatgtacacagacaaggatttaggactaggtagacctgaaagctaagtgagaagtaccatatacttctatatatagtactataagtgactgtagtttaatttttcaacttaggcattgaaagccatgagtctaatgagtaggcaagaaaaatttrtttcacccgacaaacctggtgtctaaaggatttaatataaaaacaggcaagcagaagtctgggtatgctattgttgaagacaatgactgaatgtggcttttgtcagtaccatgttagctatctatgtttagaggaatgtaatcagagtacagcaggttggagccccacttatgaatgaatattttttagtgttccttgatcaccattatttttatgaggatgtatattatcaactctgtctcacagaagatatctttggttgccaaacatttttaaaaaatctattttccaaactagaga

SEQ ID NO: 38183 - DNA, 600 bp, Chicken  19866894268982_1
catatagattctgaagctcatcacaaatctgcaaattaattcagcatcactcaagaccagagcacaaatctgtagtttccacaataatatcagttctgtcttgtgtttgtacacattttatatcttcaggtgcccagggtattctattgcttccacagcatgggatggggcagaaagggaggatggaaaatcccatgctacctccacatcctccatataaaatagtgaaagagaagattacttctaatcatgggatcaaactgtgtattgacaagctctaaccaaagacagcttctcaawagcacatgtgatacaatcatacatctacagttttccacccaggattaagacttcccatggtagaagcagtaagaactagttatactagtttttcggagggagaaatactacagcctatgaattagatccataacatcacgatggtagggcatccctggccagcagacaagtacctgcagagttgctcgctcactctcccctccctgtccctgcagggcagaagggagaaaacaggaagagcaaaagcaagtaaactggggggccatggtaaagasagcttatgaagtgaaggaaagaggg

SEQ ID NO: 38184 - DNA, 571 bp, Chicken  19866894268982_2
ctctaaccaaagacagcttctcaawagcacatgtgatacaatcatacatctacagttttccacccaggattaagacttcccatggtagaagcagtaagaactagttatactagtttttcggagggagaaatactacagcctatgaattagatccataacatcacgatggtagggcatccctggccagcagacaagtacctgcagagttgctcgctcactctcccctccctgtccctgcagggcagaagggagaaaacaggaagagcaaaagcaagtaaactggggggccatggtaaagasagcttatgaagtgaaggaaagagggaaaacaaataaataaacaataatttaaaaatcaaatcaagacaaaatgctcaacacctcccatgggcagaccatgctcartgagtttctgaacagcagtcaccttaaaagccaaaaactcaaactctcttcacctagctgaggttccattgctgagcatgacattatatggcatgggacatcctctcagccagttcaggccagatctcccagtttcctgcccacccccagctacccatctgtgggg

SEQ ID NO: 38185 - DNA, 466 bp, Chicken  19866894268982_3
tatactagtttttcggagggagaaatactacagcctatgaattagatccataacatcacgatggtagggcatccctggccagcagacaagtacctgcagagttgctcgctcactctcccctccctgtccctgcagggcagaagggagaaaacaggaagagcaaaagcaagtaaactggggggccatggtaaagasagcttatgaagtgaaggaaagagggaaaacaaataaataaacaataatttaaaaatcaaatcaagacaaaatgctcaacacctcccatgggcagaccatgctcartgagtttctgaacagcagtcaccttaaaagccaaaaactcaaactctcttcacctagctgaggttccattgctgagcatgacattatatggcatgggacatcctctcagccagttcaggccagatctcccagtttcctgcccacccccagctacccatctgtgggg

SEQ ID NO: 38186 - DNA, 600 bp, Chicken  19866894268993_1
cttgtgtttttgggaacctgcctgctgagatggagcacctaggtggggacagatcttctgcagtgagtcaggcagttgtggcctctggcacaaactcacccaataatctgctacaattacagcctaggaaccagaaggtctgctcctcagcaaggcagactgcaccctgggtggagcaggaaggggcagggagaaggcagatagctccctgcaggggagtgggagctgcaggaatggggaagggacagggtgtggaacagtggtgctcccaggaggggtgttctgtgtttcagcagtgcrttctctgtgtttatctggggaaggagatgtgcagatgtgtcttctgtgcaagatgttctttctgccccccttgtttctgcctggtttggaaacgtttccatttttttgttagtcttgttcctcctttccatcatttcaagtgcatgtgatgggaggcaaacttcatttaaagcctgtttctgcactcagtcaaggagctgcctactgtgttccctctccctccaagggctgtttgcttttgtgatacaaacaaaaggaatagagctaattaggccttctaaagctggcagagcaaaacag

SEQ ID NO: 38187 - DNA, 600 bp, Chicken  19866894268997_1
gaaatagaaaaaaatctggtaaataaactgtattaggtaggaagagtgatctgtgtgtcctgtatttgtgcagctgtcatgcgtctccattaagattaacataagtggaaatcctttctatgagaagtgtcgttatagctggctctgtggatgtttgtgctctctgctcagtatgtttctgatcaagaacttatgcaagatgaatagtaattttgcaacttggtattttctgatgctgtacaaccaacttatttccagttgaagtgttgtagtgatatatctttgctgttttctaagtgragatttctattgaagaaaaaacagttttaaaaggctgccagagagttccattaagccctaattgaacaatattccagtagagcacatgcttcrtgaaagtagctatatggatgtacaatcagttattagcgagatcatgttttyagtttaattttttctatataatgctttcgttctcgaagagcgtacwgtacttaattttaaaagatctaatagtattacctgctttatttgaataaggctgtatggcaatatattttagttgtttatatgctcatgtgttctagggaaactgagcta

SEQ ID NO: 38188 - DNA, 600 bp, Chicken  19866894268997_2
gattaacataagtggaaatcctttctatgagaagtgtcgttatagctggctctgtggatgtttgtgctctctgctcagtatgtttctgatcaagaacttatgcaagatgaatagtaattttgcaacttggtattttctgatgctgtacaaccaacttatttccagttgaagtgttgtagtgatatatctttgctgttttctaagtgragatttctattgaagaaaaaacagttttaaaaggctgccagagagttccattaagccctaattgaacaatattccagtagagcacatgcttcrtgaaagtagctatatggatgtacaatcagttattagcgagatcatgttttyagtttaattttttctatataatgctttcgttctcgaagagcgtacwgtacttaattttaaaagatctaatagtattacctgctttatttgaataaggctgtatggcaatatattttagttgtttatatgctcatgtgttctagggaaactgagctagaataaattattgtgaagtgagtgcataagtaatttggaaccatatacagagagcagttggcaatggtataccattaagtgctgttctgcaaa

SEQ ID NO: 38189 - DNA, 600 bp, Chicken  19866894268997_3
ctgtggatgtttgtgctctctgctcagtatgtttctgatcaagaacttatgcaagatgaatagtaattttgcaacttggtattttctgatgctgtacaaccaacttatttccagttgaagtgttgtagtgatatatctttgctgttttctaagtgragatttctattgaagaaaaaacagttttaaaaggctgccagagagttccattaagccctaattgaacaatattccagtagagcacatgcttcrtgaaagtagctatatggatgtacaatcagttattagcgagatcatgttttyagtttaattttttctatataatgctttcgttctcgaagagcgtacwgtacttaattttaaaagatctaatagtattacctgctttatttgaataaggctgtatggcaatatattttagttgtttatatgctcatgtgttctagggaaactgagctagaataaattattgtgaagtgagtgcataagtaatttggaaccatatacagagagcagttggcaatggtataccattaagtgctgttctgcaaacattttaacttgttctggtattactcagtattctcacagataatgtgaatg

SEQ ID NO: 38190 - DNA, 600 bp, Chicken  19866894268997_4
ttatgcaagatgaatagtaattttgcaacttggtattttctgatgctgtacaaccaacttatttccagttgaagtgttgtagtgatatatctttgctgttttctaagtgragatttctattgaagaaaaaacagttttaaaaggctgccagagagttccattaagccctaattgaacaatattccagtagagcacatgcttcrtgaaagtagctatatggatgtacaatcagttattagcgagatcatgttttyagtttaattttttctatataatgctttcgttctcgaagagcgtacwgtacttaattttaaaagatctaatagtattacctgctttatttgaataaggctgtatggcaatatattttagttgtttatatgctcatgtgttctagggaaactgagctagaataaattattgtgaagtgagtgcataagtaatttggaaccatatacagagagcagttggcaatggtataccattaagtgctgttctgcaaacattttaacttgttctggtattactcagtattctcacagataatgtgaatgaaaggccagaaagtaggtttaatacatttatagactagaacaagtg

SEQ ID NO: 38191 - DNA, 600 bp, Chicken  19866894268998_1
ctgaagacataaaaattgtaacagtgtcagttttactataattggtattttattcttagaacaaaccagtgttctacacaatcttcactccaaaagatgaattgtttctctaagatttttttgttatacaacctgatttattttcttgttttatttgagtatattcaaaagttcttccatttaaggactgacaaattaggattgcttttattttttccaaaattctgttctcttcattgcagtttagcaaaagcaaattcagaaatagtcaccatctgtgaatacttctcatctgttatygtccctctatattatatctcaagtgattaagaattagttcaccaactagatacagaagcagactcatcaacttttatataaatcctgaggcaactgtataaatgcagttttcaatttaattatcagttgcatatatctaattctgcacactatttgcatctgtttctatcattcttgttcctagagaaacataaattgctctagttgaggrttaaatagtcttaaatgacttagaaaatataggaaatgatgataattgtcartcttctagactgacagaatctatagttttgtttgttt

SEQ ID NO: 38192 - DNA, 512 bp, Chicken  19866894268998_2
tttttccaaaattctgttctcttcattgcagtttagcaaaagcaaattcagaaatagtcaccatctgtgaatacttctcatctgttatygtccctctatattatatctcaagtgattaagaattagttcaccaactagatacagaagcagactcatcaacttttatataaatcctgaggcaactgtataaatgcagttttcaatttaattatcagttgcatatatctaattctgcacactatttgcatctgtttctatcattcttgttcctagagaaacataaattgctctagttgaggrttaaatagtcttaaatgacttagaaaatataggaaatgatgataattgtcartcttctagactgacagaatctatagttttgtttgttttaatcctccaactgtttcttgagagataactttcctaacattttcttctgaatataaacgaaatttctgatatagagtagtcaggaaaggttataaactcttgaagggaatgataagagagta

SEQ ID NO: 38193 - DNA, 460 bp, Chicken  19866894268998_3
aatagtcaccatctgtgaatacttctcatctgttatygtccctctatattatatctcaagtgattaagaattagttcaccaactagatacagaagcagactcatcaacttttatataaatcctgaggcaactgtataaatgcagttttcaatttaattatcagttgcatatatctaattctgcacactatttgcatctgtttctatcattcttgttcctagagaaacataaattgctctagttgaggrttaaatagtcttaaatgacttagaaaatataggaaatgatgataattgtcartcttctagactgacagaatctatagttttgtttgttttaatcctccaactgtttcttgagagataactttcctaacattttcttctgaatataaacgaaatttctgatatagagtagtcaggaaaggttataaactcttgaagggaatgataagagagta

SEQ ID NO: 38194 - DNA, 600 bp, Chicken  19866894269000_1
cattggtgtgtatgtgtatatgtgtatggtagcctattatgcctgctctctcaagattgcttcagagtgtaatagacaacagaaagcacttaaaagaagtagagaaaactggatgtttctgtatgtgtcaaatcagggaaaggtagaagaaagcaactcgtgtaaagatgtgtgtcactggctatgtaagaaatgtgccttgatgtgacatgattgatgcttgttaagttgtactgagattcctctcagtaagtgtctgagcaaactgtgactttcaggtctcttgagtaatatatttayttttaatagcctttttggccttgtagtgaaaagtctttctataattgtggatcacatattcctataactgagccaaatcacttctctggaagacatagcctcaaatttcagttcaagaaagagaacactgttttaaaagtctatatgcaatttgtaaaagatgaaaaaactttgcctattacttttgcagcagggacaattattcttatatcaaacacacttttttttttttctttaataagagttaagcaggctgtgaatttgttctgtaaatgactgctatataactatctgataaga

SEQ ID NO: 38195 - DNA, 600 bp, Chicken  19866894269001_1
gcctgctgtttctcctccaacgttcagacacaagtggaacaaaggcagctctcaggctctctgtgtgactcactgcaattcagtgctccaactctgaaatttgactccacgtagactttccgtcagaccacggcctaaaagttcctactgtatgcactggatggatggatggatgggcacccctgtcggctgttcatcagcccagtgctgtcactgcgtggtactgccagaagttcctgtgctccctgagaaattgtagcgtggtattttctctggttgtagaaaagtcgttgaaaaagraagtaacatctttcctgctcccacagatgtgacgctgttcatgcagatgatgcacatgaaatgctgatgaaagagccattaatttcgtgtggatacttcagggtggatttctgaccaatgctgcatattttgaacaccgctggataaaagaaggcaaagcaaagcaaagcatttgcccctgcattccattcgtttaaaatctctaaatataaacggtctgttaactccctcttgctacatcttgagattttgtgagtttctggtggtcatttgtagccttaggaactacacagcattaac

SEQ ID NO: 38196 - DNA, 600 bp, Chicken  19866894269002_1
gtattacgctcttttgtctcattcttttcctaccctcctcctttctttttcttttgttttctgcacacctgcttcagtcgtgcctggtggacctgggacgtgctactactgttcttaggcctgtcgatccatgcttgttcagcagctcaggtcatagaaggtaagacttcttcaagctacatctataaattgagagcaagcattaattttatgataagttttgtcaatatagaaagatattctaatttgaagttcttcattttctctgctgcttattgttcttcatttcatatagaaaarctttgttaaggcacatacgagatgaagaggtgattcaagacagccagcatgttttcaccaagggcagatggcatctgaccaaacttgtggccttctatgatggagtcattgcatcagtggacagtggacagtggcatctcgtatgtgccttaaagtagcttctaggaggatctgctccatgatcttctcaggcacagaggtgaggctcaccagcctgtggttccccaggtcttcctttctccctttcttagaaatgggagtaatgtttctctttttccagtcaccagggacttcacccaa

SEQ ID NO: 38197 - DNA, 600 bp, Chicken  19866894269008_1
ttctgtctagagtttactgcaaagagctcttatctttcccttcaacccctccagctatcaccttagacatagctatcatttcagagctcagattccaaggggatctctgatcttccaaacagccctacacagcatgcctcaatcattatatccaagaatagcaaagaatgaccactcaaccccagaattttaaggcacatctccctctgcttggcttcaaagaaagaagtggcatgagcccaaagctggctactgacagttttcaatccagctgtcagctggatcattaaggttggaaasgaccattccagtccaatcaytaacccgtcaccaccatgcctactaaccatgacactcagtgccacatctacccttttctttaacacttccagggacactgagtccaccacttccctgggcagcctgttccaatgcgtaactgctcttgagaataactttttcctaatatcaaacctgaacctttgctaatatgtttcctaataaaggggagagattcttgggtgtttcaagtgggcttcccagggactctcctaaattgtccaggaaaaacccagatccacacacttgccacaactcctt

SEQ ID NO: 38198 - DNA, 600 bp, Chicken  19866894269008_2
aaagagctcttatctttcccttcaacccctccagctatcaccttagacatagctatcatttcagagctcagattccaaggggatctctgatcttccaaacagccctacacagcatgcctcaatcattatatccaagaatagcaaagaatgaccactcaaccccagaattttaaggcacatctccctctgcttggcttcaaagaaagaagtggcatgagcccaaagctggctactgacagttttcaatccagctgtcagctggatcattaaggttggaaasgaccattccagtccaatcaytaacccgtcaccaccatgcctactaaccatgacactcagtgccacatctacccttttctttaacacttccagggacactgagtccaccacttccctgggcagcctgttccaatgcgtaactgctcttgagaataactttttcctaatatcaaacctgaacctttgctaatatgtttcctaataaaggggagagattcttgggtgtttcaagtgggcttcccagggactctcctaaattgtccaggaaaaacccagatccacacacttgccacaactccttttaccaagcaccagtttgtg

SEQ ID NO: 38199 - DNA, 600 bp, Chicken  19866894269009_1
ctggtactttccctggtttaatgtgtgtatgggaaagggaggttgtacccacccattgtgagatggagttaattggaggctggatcccttatagcaccgacaggaggtgagggatggaggctgctcgtggcaaaatggccgaggttggattcttcgagggacatctcgagcttgtggtatcacccgtgggggctgtggtgcgctgtgacttggggcacctcccagcatctccaagtgcaacgcacacccaatagatgggaagaccccatctatcacagtgctcacccccacgactccacrcagggcccggtgctttcagctttcttgtaccagtgaaagttaagcagcggaggaaaaacgttgctgtgtgttatagaggaagagaggtaaaaagggcaggaaatttgcaccatgtccatttccccttggccctgggccgctgctcattccggatttgggatttgcgtaggcagagttaaaaataacaggggtatataaagaaagactcagaaggctgtgctggccccataacagcccggccggcagccccggcactgagggcacagccagggctcgggcggagatcaaagtgggatgcgg

SEQ ID NO: 38200 - DNA, 600 bp, Chicken  19866894269014_1
cagaattctaaataaagtgttactgcagaaaattgtgacaagcctgacttctgccctcctcagtgtctcagcactcaatcagagacaacttaaaaggatcctggttttcagggagtgcttttaacaccaagatcttttatgatagcaactcaagtaacctgaaacagttaaatttccctatttgtatttgaaaatttaaatcaggaatttatttttcaaagttacttgatagtcaaagacagttacttgtatcatctcctttcagacgattgatagcatattaacatcacatataaattytttatttcacagattttgagaacagcatccccatggagatggtttttactcgtaatgatatatttcaattatcatggcatttgagataccaagttttttgtaccactctattcagtagtgtcagtgcaaacaatattccatggctgagttttttccattaaaaaaaaaaaaagaagaagaagaagaagctgattctggaataaaatgaagcttcacttttaagaggaaattggaaacaataacaagaacaaacaaaaatactatgcattttaaaataggcattgcttctagtgctgtcag

SEQ ID NO: 38201 - DNA, 600 bp, Chicken  19866894269014_2
agaaggaatttcatctctactggaagttcttccaaaccacactaagaattggctgttcctggggtctatttcccatatatttaatacttgtttaaaaacaacaaaatgaacatgtgcaggagggctgcaaactctaggctgtgaaggtgaaggaaagccaagatgagggcaggcataaagtcctgcttaaggatacgtaacatcgtgttaagttactgtcctggaaatgtatgttaactcagagaaagaataattctcctctgctaatttttgttcactctgtacacgcaggacttttcwtatgtccatttctgttttattttcatcctagaacaggtaggtagaagattggatgagctgttctctggagatgctaaattatttctattgcttctgtccaccattgtagcctagagatactccattcaaaaaatcctgaaaagtcggtgtcagtgatactgaaagaaagagaaaagggaaaggaggagcaatccgtgacttcagtttgcttccaaagcaaggtatgaatttcacacatacctttctcatcttccttagcactcttggcttcatgacttccctctcagttgtactgtccac

SEQ ID NO: 38202 - DNA, 600 bp, Chicken  19866894269015_1
agtgtatttcctcaagttaaattgatgagtgaattacatattgaagggtcatagaaatttgcaacatatactgaaggaaaatgtttaatttggatccatttgtagataaacattcttgtaaatagcctgactacccatttctgctacatccttcagggatgttgagaagcagcagggtttgagtaggccttaacatacatgtttacaatgttcctggacccagcttttttggaatatttgaccttgcctgattttttatgagagatattcacgacaatcaaatacagaaagcaacaggayagagtgtgtctttggcatgcattggcaaagattyattccaaattgtagaaaacttccaaaatcttggaaaacttgaagaattggcttgtacagtagcctctcagcctgacgaaaccccatgagctcttcttttaagctcattcaccaaatgtttttcttttttttcctgagaaaatacattctgacacctctttggcagagatttatgtgctgcctcagaagctccgtggtagtaaggcagggcacagatttgatgtgctgctcttattwtgtgattaaattgatgttcccctacaattt

SEQ ID NO: 38203 - DNA, 600 bp, Chicken  19866894269015_2
tacatattgaagggtcatagaaatttgcaacatatactgaaggaaaatgtttaatttggatccatttgtagataaacattcttgtaaatagcctgactacccatttctgctacatccttcagggatgttgagaagcagcagggtttgagtaggccttaacatacatgtttacaatgttcctggacccagcttttttggaatatttgaccttgcctgattttttatgagagatattcacgacaatcaaatacagaaagcaacaggayagagtgtgtctttggcatgcattggcaaagattyattccaaattgtagaaaacttccaaaatcttggaaaacttgaagaattggcttgtacagtagcctctcagcctgacgaaaccccatgagctcttcttttaagctcattcaccaaatgtttttcttttttttcctgagaaaatacattctgacacctctttggcagagatttatgtgctgcctcagaagctccgtggtagtaaggcagggcacagatttgatgtgctgctcttattwtgtgattaaattgatgttcccctacaatttagattggaaggagcctctggagatctcaaagcag

SEQ ID NO: 38204 - DNA, 600 bp, Chicken  19866894269015_3
acgacaatcaaatacagaaagcaacaggayagagtgtgtctttggcatgcattggcaaagattyattccaaattgtagaaaacttccaaaatcttggaaaacttgaagaattggcttgtacagtagcctctcagcctgacgaaaccccatgagctcttcttttaagctcattcaccaaatgtttttcttttttttcctgagaaaatacattctgacacctctttggcagagatttatgtgctgcctcagaagctccgtggtagtaaggcagggcacagatttgatgtgctgctcttattwtgtgattaaattgatgttcccctacaatttagattggaaggagcctctggagatctcaaagcagcctcaggctagatgaggttgctcagggccttggacagttaagctctgaatgcctctatggatgtagatttcttgaagcctctgggctcctactgtagaacatgactaatctcatgacaaattttcctgtgctaacttcaaattggaattcctctcattgcaaygtgtattcactgtctttcatcctttttctgtgcacacacaagaaattgggctgcagattctatgtccccacac

SEQ ID NO: 38205 - DNA, 600 bp, Chicken  19866894269015_4
agagatttatgtgctgcctcagaagctccgtggtagtaaggcagggcacagatttgatgtgctgctcttattwtgtgattaaattgatgttcccctacaatttagattggaaggagcctctggagatctcaaagcagcctcaggctagatgaggttgctcagggccttggacagttaagctctgaatgcctctatggatgtagatttcttgaagcctctgggctcctactgtagaacatgactaatctcatgacaaattttcctgtgctaacttcaaattggaattcctctcattgcaaygtgtattcactgtctttcatcctttttctgtgcacacacaagaaattgggctgcagattctatgtccccacacttgcgtagtaaaaggtaacagtaagatcccctccatcagctttaaccttctaaagctaagattaacaaactcagtccatgtggtctcttcttgtacagccttgaagtccatcaaagggtgtgatgtgttattattcatgagtcttatctgcctggctgtgagtctgaccacaaggtttgttattattggaacagagagaaagtcctccatgtgaaggcctctgcaag

SEQ ID NO: 38206 - DNA, 600 bp, Chicken  19866894269015_5
tattcactgtctttcatcctttttctgtgcacacacaagaaattgggctgcagattctatgtccccacacttgcgtagtaaaaggtaacagtaagatcccctccatcagctttaaccttctaaagctaagattaacaaactcagtccatgtggtctcttcttgtacagccttgaagtccatcaaagggtgtgatgtgttattattcatgagtcttatctgcctggctgtgagtctgaccacaaggtttgttattattggaacagagagaaagtcctccatgtgaaggcctctgcaagatyactgcagacactcttatctctgtaagaaatttgagtctaaatatcatgaaccaacatctcttttctggctgtgtaaggacactttgaagcagggcatacacagaaggtcacttcttggtagcttggctccaagggaagtgggcaatgtgactgctaccagctgttcagctcactgctgtgaactggaagtacatgaccaartctgcaatggtgcaaaatttctccatttctgcttggcagctgctctgtgactcactagaatgaactggtgcccatggtactatgggacagtacagttgg

SEQ ID NO: 38207 - DNA, 600 bp, Chicken  19866894269015_6
tattcatgagtcttatctgcctggctgtgagtctgaccacaaggtttgttattattggaacagagagaaagtcctccatgtgaaggcctctgcaagatyactgcagacactcttatctctgtaagaaatttgagtctaaatatcatgaaccaacatctcttttctggctgtgtaaggacactttgaagcagggcatacacagaaggtcacttcttggtagcttggctccaagggaagtgggcaatgtgactgctaccagctgttcagctcactgctgtgaactggaagtacatgaccaartctgcaatggtgcaaaatttctccatttctgcttggcagctgctctgtgactcactagaatgaactggtgcccatggtactatgggacagtacagttggggcattcagatccctttcctttgctactagtcactgttgtgtgacactggtacaagcttgacgaggaaaatcttcccttctccttagacctgcatttgtacgttaaggaagtaacagcggtattacagtcttggttgatgatactgttcagttctcaaaatccccttgaytgtggaggggaaggaatggcaggggacagca

SEQ ID NO: 38208 - DNA, 600 bp, Chicken  19866894269015_7
cactgctgtgaactggaagtacatgaccaartctgcaatggtgcaaaatttctccatttctgcttggcagctgctctgtgactcactagaatgaactggtgcccatggtactatgggacagtacagttggggcattcagatccctttcctttgctactagtcactgttgtgtgacactggtacaagcttgacgaggaaaatcttcccttctccttagacctgcatttgtacgttaaggaagtaacagcggtattacagtcttggttgatgatactgttcagttctcaaaatccccttgaytgtggaggggaaggaatggcaggggacagcatacatacaaccctgaagyctgtttggtgtcttaaaaaagagagtggcacaaaactggtgtggcaggatgttggaaggtccagcactccatcattactcygtgtttttgttccccggttgtacaactcagaaaaacctggagaacatccagcagagaataagtagaaatgctgcatctcctgagtcccaaaccagcatcctgagcagaactctactcactcttccagagttgtctttaggctacaactatattcatattaaaatgtatgg

SEQ ID NO: 38209 - DNA, 600 bp, Chicken  19866894269015_8
ttctccatttctgcttggcagctgctctgtgactcactagaatgaactggtgcccatggtactatgggacagtacagttggggcattcagatccctttcctttgctactagtcactgttgtgtgacactggtacaagcttgacgaggaaaatcttcccttctccttagacctgcatttgtacgttaaggaagtaacagcggtattacagtcttggttgatgatactgttcagttctcaaaatccccttgaytgtggaggggaaggaatggcaggggacagcatacatacaaccctgaagyctgtttggtgtcttaaaaaagagagtggcacaaaactggtgtggcaggatgttggaaggtccagcactccatcattactcygtgtttttgttccccggttgtacaactcagaaaaacctggagaacatccagcagagaataagtagaaatgctgcatctcctgagtcccaaaccagcatcctgagcagaactctactcactcttccagagttgtctttaggctacaactatattcatattaaaatgtatggcttttctgcaatatcaagcaaaataattacagaatctggtgattctttt

SEQ ID NO: 38210 - DNA, 600 bp, Chicken  19866894269015_9
ggcattcagatccctttcctttgctactagtcactgttgtgtgacactggtacaagcttgacgaggaaaatcttcccttctccttagacctgcatttgtacgttaaggaagtaacagcggtattacagtcttggttgatgatactgttcagttctcaaaatccccttgaytgtggaggggaaggaatggcaggggacagcatacatacaaccctgaagyctgtttggtgtcttaaaaaagagagtggcacaaaactggtgtggcaggatgttggaaggtccagcactccatcattactcygtgtttttgttccccggttgtacaactcagaaaaacctggagaacatccagcagagaataagtagaaatgctgcatctcctgagtcccaaaccagcatcctgagcagaactctactcactcttccagagttgtctttaggctacaactatattcatattaaaatgtatggcttttctgcaatatcaagcaaaataattacagaatctggtgattcttttgacttaaaatctactacagactacacacaggaaagcatggtacaatcctagtttaacctcttatgcatcatgtttctatga

SEQ ID NO: 38211 - DNA, 599 bp, Chicken  19866894269020_1
  misc_feature (1)..(7): n is any nucleotide
nnnnnnntgtacagcagatacaaggatgcttccttctgagtagctaaatcctgcaaaaaatagcaagagctgtccagaagtgttcatgaaagcaattaggttgaatcattaaggaaattgaatacctgtggcaagagacagctcttaagaagctgtcagtcaagcaaataaaaaactgagtgggtctaaaccttgtctctagacaaatatggaaggaagggattggaggcctttctgctcatgtaccttcatattttttccatccttctaaactggatgggaataaatttgttagcatgytggagactgttatcagataacaactgaagagagttgctgagcagtcttgtggaactggaagaggcaatctacttttaaaatagttttcttagtacaagagtgaaattgtatgatataacatcatagaactctgagtagtaactggaaattaataaccattttcccgtgtccctaactatatataatgaagaaaaggaattcttgtgaggaaccttgttcttatttagtttgcagtttaatgaaagtacaaacagtgctctgttggctttgtgtgcactatacaggttgaggaaccattt

SEQ ID NO: 38212 - DNA, 600 bp, Chicken  19866894269021_1
catcgagtcccatggacatgtgcaccttcagattctttacatggtctcaatcctgatcttcacttacatcaggcagatctttcttctccaggttcctatctttgctttctgcagtttgggcagtgtggctagagcccttatcagtgaaaactgaggcagagagcctactcttgtgagcttgtgcagtacctctctgtgttccctctgtctgtggataatttaggttgtgaacttacactgtaccctaggtgaaagagtatatacaaaagttagtgcctgtgatgtgattttgggcagctrctttggtccatccatggaatatgtgatcttacacacaactgaagttgtcaaaatacagtgatatgatttgttgctcttgctttaaatataaccayatagagaaacacagaaagtaaattctcataatggtagagggaattaattattgatttttactcttatatttactgcaaatgcagtgctgcaaagtgtagtcatagagttggattttagcagtgcttacaatgaagaaacaccatatgtatggaggcaagtaggggagtaaaaaggaatgggaaaataaattactgagctagcagg

SEQ ID NO: 38213 - DNA, 600 bp, Chicken  19866894269021_2
ctatctttgctttctgcagtttgggcagtgtggctagagcccttatcagtgaaaactgaggcagagagcctactcttgtgagcttgtgcagtacctctctgtgttccctctgtctgtggataatttaggttgtgaacttacactgtaccctaggtgaaagagtatatacaaaagttagtgcctgtgatgtgattttgggcagctrctttggtccatccatggaatatgtgatcttacacacaactgaagttgtcaaaatacagtgatatgatttgttgctcttgctttaaatataaccayatagagaaacacagaaagtaaattctcataatggtagagggaattaattattgatttttactcttatatttactgcaaatgcagtgctgcaaagtgtagtcatagagttggattttagcagtgcttacaatgaagaaacaccatatgtatggaggcaagtaggggagtaaaaaggaatgggaaaataaattactgagctagcaggcaacagtcacagcatgtaaatgtgttcacatttattttgtggatgtcactgtcatggagaattgcatggattaagttgaaaaagtaatgcattag

SEQ ID NO: 38214 - DNA, 600 bp, Chicken  19866894269029_1
aatcgcagattcattgaatagctgaggttgaaagggatgtccagcagtctttgtttcaagttccatgctcaaagcacagtcaactgtagggtgggttactcagggttttgcccactccaaaaatgaagactccacagattctttttgagcagccctgcaggcctcattgtcacggtatcttttatttagagtctgtttggtctgtattcacagaatcatagaatgccttggattggaagaggacttcaaagatcatcaggtttcaaccccctgccatagtttgccagtgcctaggtcaartagcagatcaagttgctcagggccccgtccaacctggccttgaacacctccatgcatggacctctccgggcagcttgttccagcacctcagcactctcagtgaataacttccacctggtgtctaatctaaatcttacctcctttagtttaaaaccatttccccttgtcctatcactacctacccatgaaaaaagttgatttcctcctgtttatgaactccctttaaatgttggaaggttgtattgaagtctccacgcagccttctcttcaccagactgaataagcccatctctttcagcc

SEQ ID NO: 38215 - DNA, 600 bp, Chicken  19866894269042_1
agtcatggcacatagatgctgctgctgcaaagtctttcaaacttacgtaaaacctggcatccatatcttgtatatctattcccaagaatagatatctgcaattatgactaatagcctcatgagactattgcactaattaaaggcatgttaaacatacctcctttcaagccccttacatttgtctggactgtgaagtcacaggatccgtttgtaagaattaggagaatatgtactgcccatgaagttagggtgcaggcatggtgagtgaattactaatgctcactggagttactgcttacyagtcaacatccctaacggtaacatttgtttagttaaactcaagcatgtttttacttgctaaaatcaagmacgtagttaccatggttcatcaaataatgtttcacgttatttgttttactatactccaggagccagagttatggctcttccatttaattacctgacaaaccctgcttacatttaagaaaaagataatccttatgaagcagcctaacggtcatttttaaaratctgtatgagaataagtatttttggtcagacaactcttctatcttgaaataagacctatacttctagcag

SEQ ID NO: 38216 - DNA, 600 bp, Chicken  19866894269042_2
gtatatctattcccaagaatagatatctgcaattatgactaatagcctcatgagactattgcactaattaaaggcatgttaaacatacctcctttcaagccccttacatttgtctggactgtgaagtcacaggatccgtttgtaagaattaggagaatatgtactgcccatgaagttagggtgcaggcatggtgagtgaattactaatgctcactggagttactgcttacyagtcaacatccctaacggtaacatttgtttagttaaactcaagcatgtttttacttgctaaaatcaagmacgtagttaccatggttcatcaaataatgtttcacgttatttgttttactatactccaggagccagagttatggctcttccatttaattacctgacaaaccctgcttacatttaagaaaaagataatccttatgaagcagcctaacggtcatttttaaaratctgtatgagaataagtatttttggtcagacaactcttctatcttgaaataagacctatacttctagcagcatattcactttatatatacgtatatacatatggctggttctaaagagttaaatgatgactgtaactag

SEQ ID NO: 38217 - DNA, 543 bp, Chicken  19866894269042_3
gtactgcccatgaagttagggtgcaggcatggtgagtgaattactaatgctcactggagttactgcttacyagtcaacatccctaacggtaacatttgtttagttaaactcaagcatgtttttacttgctaaaatcaagmacgtagttaccatggttcatcaaataatgtttcacgttatttgttttactatactccaggagccagagttatggctcttccatttaattacctgacaaaccctgcttacatttaagaaaaagataatccttatgaagcagcctaacggtcatttttaaaratctgtatgagaataagtatttttggtcagacaactcttctatcttgaaataagacctatacttctagcagcatattcactttatatatacgtatatacatatggctggttctaaagagttaaatgatgactgtaactagcatattatatgttaaattcagcatataaaagttatatgctaaaaatattgctccatgcaaagcacaactgaagtgaagacatgcggactattctaaggaacca

SEQ ID NO: 38218 - DNA, 600 bp, Chicken  19866894269057_1
tgggtgggggctgtgagcaacctggtctagcagggaggtgtccctgcctatataggggggttggaactagatgatcctaaaggtcccttccaacccaaagcattctgtgattctatttattcctatttcttcctgtgctccctagggatttttgatctatttattactcatcacatgaacagtttaagagggactacaactaacttgactttcaaaagcctttgatacagttatttctggaccactcaaagaactacaggacagttttaggagcagtgcatgactcagaattttaatacrtacacagtttgaaactcactcacattacctgacactaacaaaaaaaaaaaaacccaccttgtagtttccttaatactcaggatcacaagtagcattgtacttatttaccagaatcagaactgaagccgtagtaaacagccagctagagaatataacacttttatacaatctcagccacctcattttaaaaatttcttctccttaaggatatccaagaattacttttaggtatgtctataaaatcccttatgccctactgatctattgttcatatttgctccagtaactcatcttttgacc

SEQ ID NO: 38219 - DNA, 600 bp, Chicken  19866894269057_2
acagtttgaaactcactcacattacctgacactaacaaaaaaaaaaaaacccaccttgtagtttccttaatactcaggatcacaagtagcattgtacttatttaccagaatcagaactgaagccgtagtaaacagccagctagagaatataacacttttatacaatctcagccacctcattttaaaaatttcttctccttaaggatatccaagaattacttttaggtatgtctataaaatcccttatgccctactgatctattgttcatatttgctccagtaactcatcttttgacctcsctctctcatactgtccttgatctggaagagcatgcaccttgcaaagcacttcagcataaatgggactttctgccttaattagttcttggcaccttgctcatgcatggctctggcaacccacacattctctaaatcactcattaaagaaacaatatgcaggaaatgaacagctgttatatttagagctgcaatgctgagtaaaagtgttttattctttttatcatttaaattaaacatgcctgtttaaatcccgcagtgacttcccattcacctcctacagcaatcagaatcacatgttta

SEQ ID NO: 38220 - DNA, 600 bp, Chicken  19866894269058_1
gaagacacgagattcatgcatagaaagagatatcagtacagtgttactgtactgatagacagccacagaaagatcactgtaagaaattgcttagaagtacaactgagacgaaatataaaaggctgattgttgtccttaatgtaaagaaacaacttagaatcagctggtagagagaaaactagtgcaataacgtaaggattaccttaattctggtatgttctgttcatctgtgaagagctttaattagagatttcgcttttgagactagattgtgtccatgtgcaacagtgttaatctgawaccataaattgaaagcagttgttttggttatcacaaataaagcaatttgtggatgtgttcaagcatgtcgtgggtggcttaaccggcttatacaaggacaaaagtgatcaaagaaagcaggttagaaagacgttttttkagtgcttggcctaacaagtggagtcagggtttttaaatcctgctgttttttcttgcctgtagtaattcagcttgtctctggtcttgggataaagcaaacctgggggttccagtactttcagttgcagtgcatttacagcttctaaaatttcttgcagattg

SEQ ID NO: 38221 - DNA, 600 bp, Chicken  19866894269058_2
tgtaaagaaacaacttagaatcagctggtagagagaaaactagtgcaataacgtaaggattaccttaattctggtatgttctgttcatctgtgaagagctttaattagagatttcgcttttgagactagattgtgtccatgtgcaacagtgttaatctgawaccataaattgaaagcagttgttttggttatcacaaataaagcaatttgtggatgtgttcaagcatgtcgtgggtggcttaaccggcttatacaaggacaaaagtgatcaaagaaagcaggttagaaagacgttttttkagtgcttggcctaacaagtggagtcagggtttttaaatcctgctgttttttcttgcctgtagtaattcagcttgtctctggtcttgggataaagcaaacctgggggttccagtactttcagttgcagtgcatttacagcttctaaaatttcttgcagattgaaatgcagtttattgtagttccagttggtaaatggtatgtctgacttgctgtgacctgttctgtgttctgtgaaacgctgacttgagcaatgtgaagttgaatgcaagttgacagcacctcgacatccagtgcagtttt

SEQ ID NO: 38222 - DNA, 600 bp, Chicken  19866894269060_1
ggaaggtactttgtaaaggtacagagtaaatgtatgcagaaatagtaaagagtaaatggatgcagaaagaaagatgagagtatctaagagggtgcctcaccatcactgtgatcagcagcaatcgtactagttagatcagagactactgtggaaagatgtccacaataagcccatcgtgagatcagttctaaacacagatcacatatggcatgccttcagagtacctcattctttctgtggtgtctcccgggagtgtggaagaatcaagtggaatgaaatgtagagaagaaggccctttcrctactgtgattcttatgaatctaattcactatttatttatttatgaggaatccagcttacatacagagataatgttagacagtgaaaggtttttactttacagaagggcatatcccatctcccacaaaggcacactgatccactgaatcgggaagttcagaatatgttgtcttttgtaggaacaaaagtcaaaggctcagacaaaaagaaataaatcccattagcttgagagttcattaaaatcctaatgtttatcatttctctttacaataaaaacaacaaaattggaatttttttcct

SEQ ID NO: 38223 - DNA, 600 bp, Chicken  19866894269071_1
aaggttagcacagccttcatagttatctacgatctggcaactggggagaatgctaaggtgaacccaattgtcctgttcttggctgagatagagctaagtgcagcacagtggctgctgtggtgctgtgttctggacttgtgatggaaacaatgttgatagcataccaatgttttaattattgcagagcagtgtttacacagagccagagtcatgtttcagcttcttgtgttgccctcccagtaaggagttgagggtgcacaaggagctgggaggcaacagaaccaggacactgacccaaaytggccaaagggatgtccagtaccatatggcatcatgctgaactatagaagtgggaggagttggtatgcaacactcataaatatccgtgccagcagaggtgacccattgtttcaaagctgctatgatgacattgtggctaggaaaatactgtccatgcaggccatctttcatcggcccgaacagatggaagtcagaaggtgccaaatctggactatacagtgagcatggtaggacaatatgctccatggtcttcactcccactgtttccaatgcattgaagctgatattcagctctataca

SEQ ID NO: 38224 - DNA, 600 bp, Chicken  19866894269072_1
tctgatctgtcaggtgctgctgttccatcatttccttgtactttcccttctccttgcctactcagtcatcttcctctgcccctgcttcagtgctgagctctctaggacagggcccatcttttttactcagacattcaatactccatctggagatgtcctgcttcttgattaagattcctatgagcgatggtgatatgaatagtgaatcattaggatcgactctctctgttatactattactccaggcattcgctgcagctcctgttagtaatttgtctttaactttgcttcagcacctcrgttcagacggtagaaaacgtgtaatgctagttagctgtaatcggggttgccactggaaacactggtagataatctatagaaataagtgtcataattccccacttcagaatgaagatgttggtttctctagacttaaatttttaacccattttactcaaatttaatgtaatgtagccatttaactttcgttttattccagctgctaacccctcacctagttcaaatgattcatccctactgcattcactgcccaggaatgttggctttcaacaaactacagcaaataatgtaaaataaaca

SEQ ID NO: 38225 - DNA, 600 bp, Chicken  19866894269084_1
gtatagggttaaaagtggcagaggacctaacttcagaagatgctcctgggtgagctcctcagagccaggccagccagagagattgcagaatggatgaaacaggttctgcctgtgcctgtgcagtgatgagaccctgtatataccccattcagatatatatatatactatatatatggagactatatggactgtatatagtccaatagtctccatccagagtatctttagctgtacaagctaagcacctctggttcaaggagattatctttcaagtctgtgttagtgtaaatgacagtgtwtgtgtcatacatacactcctacctgtcccagatccagctcactgtccctggggaggagggagctggacacagcagcaggagcttgtaagcagtactcacacttgtaaccagtccaggagcagttgtctaaagttaaaagtacgcagtgtgctgttggttggactgctgcaggcccctatctaaccctgtttctggggactaaaggttcctgtggaaggaatgctatttgctcacaggtgaaagttttagcatccagaagggatgaagagaggcatacattctgtccagtgaatctttatt

SEQ ID NO: 38226 - DNA, 600 bp, Chicken  19866894269091_1
cacagtttgcagatgtgtacagacagcctaatgaggggagaccaaggagcttacacaacttctccagagggcaacttgatgaggaagtgaattgaaacccagcagtccagcccatctgccttggcattcaaacacgagagcgctggagcgagctgggatggagaaaaagaggaagacatggcagatctgcgtgcagggtagctctggtcaagcatcacttgcctgagatggaaccatctctgcacttgagctgagtcctctgccaccactgactcattcctggccaagatgtcctggggsctctcaaccccagcactcagaagaagtctccatgagggaacgggtgttccatgtagccaaggaagaaaggcaatctttgttgccaggggataagctgaggtcaagaagggggactttcattctctggagagatgtggattaggtagatggtgcgctcactgcagaagcaaggrgttggatggttgtagctgagaggaagtgtctagcctggcttctctgacaacatatacagtgtctaacattactctcttctacatacttttaacatcaactctgtttacaattccttttcctcaaaga

SEQ ID NO: 38227 - DNA, 600 bp, Chicken  19866894269091_2
agacatggcagatctgcgtgcagggtagctctggtcaagcatcacttgcctgagatggaaccatctctgcacttgagctgagtcctctgccaccactgactcattcctggccaagatgtcctggggsctctcaaccccagcactcagaagaagtctccatgagggaacgggtgttccatgtagccaaggaagaaaggcaatctttgttgccaggggataagctgaggtcaagaagggggactttcattctctggagagatgtggattaggtagatggtgcgctcactgcagaagcaaggrgttggatggttgtagctgagaggaagtgtctagcctggcttctctgacaacatatacagtgtctaacattactctcttctacatacttttaacatcaactctgtttacaattccttttcctcaaagatctcttctagttagacctacaaagagtctggactgacctagttttgattttttgcaaccctctttgatgcagcaaaatagaaatggtcctcccaaggactcccaaggcagttttatcagaaaaatggaaatggaacagtgaagatttctggaacctgtagctcattttttctc

SEQ ID NO: 38228 - DNA, 599 bp, Chicken  19866894269098_1
  misc_feature (1)..(191): n is any nucleotide
nnnnnnnnnnnnnnnnnnnnnnnnnnnnnnnnnnnnnnnnnnnnnnnnnnnnnnnnnnnnnnnnnnnnnnnnnnnnnnnnnnnnnnnnnnnnnnnnnnnnnnnnnnnnnnnnnnnnnnnnnnnnnnnnnnnnnnnnnnnnnnnnnnnnnnnnnnnnnnnnnnnnnnnnnnnnnnnnnnnnnnnnnnnnnnngtgttccagagccgtggagatgtggcactgaggaatgtgggcacgggggggtggttggggttggggatcccagaggtcttttccaacctgagcgattctatgatcctgragtcttggtgcaagtggtggattttgttgggctttcaggctggtggtggcatagagctggccaagcatgcctggmgaatgctggccttgttttagtttcctttttgcctggtgtgatggtgcaaggttggggtgaggaaggtttagtggctgtggggtccccagcatcgtatcctcaggtatatggtcatcctatcctcaggtatatggtcaaatgtgccccatctccaggctgtgctgacttccaaacctcagccccaggcatctgtcagctccccctgcccagctgctgggctctgc

SEQ ID NO: 38229 - DNA, 599 bp, Chicken  19866894269098_2
  misc_feature (1)..(116): n is any nucleotide
nnnnnnnnnnnnnnnnnnnnnnnnnnnnnnnnnnnnnnnnnnnnnnnnnnnnnnnnnnnnnnnnnnnnnnnnnnnnnnnnnnnnnnnnnnnnnnnnnnnnnnnnnnnnnnnnnnnngtgttccagagccgtggagatgtggcactgaggaatgtgggcacgggggggtggttggggttggggatcccagaggtcttttccaacctgagcgattctatgatcctgragtcttggtgcaagtggtggattttgttgggctttcaggctggtggtggcatagagctggccaagcatgcctggmgaatgctggccttgttttagtttcctttttgcctggtgtgatggtgcaaggttggggtgaggaaggtttagtggctgtggggtccccagcatcgtatcctcaggtatatggtcatcctatcctcaggtatatggtcaaatgtgccccatctccaggctgtgctgacttccaaacctcagccccaggcatctgtcagctccccctgcccagctgctgggctctgctctgggaaaggtccctccttcattgcaggagggggatgctcatrgaaacccaagggatgggaccgggatgtgacg

SEQ ID NO: 38230 - DNA, 600 bp, Chicken  19866894269098_3
tggtggcatagagctggccaagcatgcctggmgaatgctggccttgttttagtttcctttttgcctggtgtgatggtgcaaggttggggtgaggaaggtttagtggctgtggggtccccagcatcgtatcctcaggtatatggtcatcctatcctcaggtatatggtcaaatgtgccccatctccaggctgtgctgacttccaaacctcagccccaggcatctgtcagctccccctgcccagctgctgggctctgctctgggaaaggtccctccttcattgcaggagggggatgctcatrgaaacccaagggatgggaccgggatgtgacggcagcgcctgccccatctgtttcccagacatctctgtgtttgcttctgcagggagaaggctgtctggtgtggctttgttatgggagaggagatgagagccgccttgccccaaaccatggggcagcagcagagccttatcctgtacaaatcaggatccgcaaagagcagctcagcgtcgcgctcgctctccccaaagccacatttattgctgctcctctttgcagctgaggataaccctgtaaggttgggctgtggagtcgtgctgcctt

SEQ ID NO: 38231 - DNA, 600 bp, Chicken  19866894269100_1
ttgtgtcacaggaggcaaaatcgggcagatgggaaagctcttctgtaagatccattggaactgttcagacttcaaacgtacctgaaactgatgtttggattcttcatgagagtttttgttcagagcagacctgttctgtgtatgcttcactggtgtactgaaacttaggttgtggagcagctgaaataatagaatctcattttctgttttgatgcatggcaatttatggcaacgtgagaaacacccagttgtaccctatggtgcactttaattggaaaaactgtaggggatgctgtgatrtattaaatgtcttggaaaatcagcagttagttctgagtacaaattcgtggtcacttttctcaggaaaataatgcataacatacagtgcataactccataacactcctctggagcttaaagcatatccctgcagctttctgcaatcacctttcccagctctctgcttacctctgttcacttaaacccatttcttggaattttgtcttttcatagcttcatctcccctcctgggctgcaggaatagtaacagctctttacctctgytagaagcatgcttttgtctttttgtcttctccttta

SEQ ID NO: 38232 - DNA, 600 bp, Chicken  19866894269100_2
actttaattggaaaaactgtaggggatgctgtgatrtattaaatgtcttggaaaatcagcagttagttctgagtacaaattcgtggtcacttttctcaggaaaataatgcataacatacagtgcataactccataacactcctctggagcttaaagcatatccctgcagctttctgcaatcacctttcccagctctctgcttacctctgttcacttaaacccatttcttggaattttgtcttttcatagcttcatctcccctcctgggctgcaggaatagtaacagctctttacctctgytagaagcatgcttttgtctttttgtcttctcctttaactgttttgccaaagcaaaactgtggaaggggacctcagtgctttaagtatacggtgagaatgcagagattacaagttggaaaaccagaaatgcaaacgaccatcaggatggattgcagtccctgaaatttcaggtaaccgtgttgtaacatttgatctgaaagatctgttaatttaccccctggctgtcaccaaacataagcaatatcatgtgccttgtaacaacctcaacaacttctctgtaaagctttggaactataatgt

SEQ ID NO: 38233 - DNA, 599 bp, Chicken  19866894269102_1
  misc_feature (1)..(36): n is any nucleotide
nnnnnnnnnnnnnnnnnnnnnnnnnnnnnnnnnnnnaaacagttttatcaaaaagataaattaaagataaatgtcagaatagggtcactttattagcacaattttttttctattttcttttttttttctgtggcattttccatgcttacccttttgtaagcatttgagttaaggatttggcatggtattggaataaacattaaaatctcagagaacagctgggtgataaattcttatatcaattcctgtttcacaagtggtatcttgttattcctaatttgcaggaccatacaaaaattyggtaatggtaaagattaggcataaaattaagcattcccagtatgctaggatgctatacagagtaatgtgctgctgttactgaacctggcacataaagagcaactgcagatctctgtgtcctgaactgcatgctgctgtgttgctgtagccataaaaccaaggaggaaaacctctagaacagttaccctgcaatgtttgaatggataaacctgtaaatcactgggttgctgccttcaccccaggatagtgagaaaataagagagagcagatacgaaccatctttccctgacaaggttgtt

SEQ ID NO: 38234 - DNA, 599 bp, Chicken  19866894269104_1
  misc_feature (1)..(115): n is any nucleotide
nnnnnnnnnnnnnnnnnnnnnnnnnnnnnnnnnnnnnnnnnnnnnnnnnnnnnnnnnnnnnnnnnnnnnnnnnnnnnnnnnnnnnnnnnnnnnnnnnnnnnnnnnnnnnnnnnnncactatcaaaacataccatttaaacagctgacaactacacagtatgtcaaacagtaatctcaatagcttcatacaaggtgagagggccacacaatacgactacatcgtacttcaatacgcagaaaataaacacagcaacagaggagaacatttctccccttttctatctgcaattttgtcactcrgttttctcagaaaaaatgaagctgtaggtgacaaggcagcattgtttttctcctcccatagaaaaaggctattccagtcataaagtttatgactcctcccatgcaaccttttaggctttccatcaaattctcaccaacgtgtacaaaagcacgtgtaagaaataagcagtcatagcagctcaataaaaatattaccaggaaatgtcatgcaatctcactgacttttatcagttccttgatcatttagcttcagtcaattagcagatgattatagttccatacattacttaaatacgcga

SEQ ID NO: 38235 - DNA, 562 bp, Chicken  19866894269106_1
ccagaagctgcctggacctagtcttgctctgtttcctcctgccacttctcacaagggcattttgctaaaagcacaactgtaagccactttttcctccatgtttactttgagctccacacctatgagtacaagtctcacatggaccttcaggagatgctccaatgtctctctggacctcaggagacttaacctttaagacctgaagcttctcagtcttttgagaaggtggttccaccaatgccagcaagggaaatgctgaaagtggatattcaacttacattttgaaatgcaaatagaatraactgatgctgagaaattagctggctataggtgagcaagctaacagctcaacttctaaaaaaagaagtagatttgaagcaaacataatattgttacagaactgaagggtgttatttctttcagtgtgattagaatgcaataacatctagtcatagacttttgatttttcaatcaaatattattctttagaaatgggttatcgtaaagctaaatttcacaggcaaaaagtttgcactgtcaaaacaacaatgctaccccaaaa

SEQ ID NO: 38236 - DNA, 600 bp, Chicken  19866894269108_1
agttattgactactgtttgacaaaacccaggggtgtgaggaggtttgggatacaagggagaattagaaacaggctggattttgccttcttagatcccttaacacttcaggaccttgtgcagcatactgggtttgtagttactgatcagtacaggtaatttctgatcaactacctttacagcaatatagctatattgccttttttaccctgctctgccagacctttagtctcagcaaagggaaaaataaatgtacatttgcatgacaagagagagaccaaagccatggctggtgattgagygaggtctaggccagctgtgcctcttggtgctgatggtatggygaatattaatgcaagtattattcaggttatgaatccagctgccctttcttgtcgtaagggcactattttccataagagctccattggtagtcctaacatctgctgagatccatcctaagtatgattagttttcattatgtttctgtctagttcataatggggcatagagcattctgagttgtgctgcaggtaatgtttcaaaatgaaataaaaggaattaaatgcaatgcagatgttacagcacgtcagtctctattt

SEQ ID NO: 38237 - DNA, 600 bp, Chicken  19866894269108_2
gtttgggatacaagggagaattagaaacaggctggattttgccttcttagatcccttaacacttcaggaccttgtgcagcatactgggtttgtagttactgatcagtacaggtaatttctgatcaactacctttacagcaatatagctatattgccttttttaccctgctctgccagacctttagtctcagcaaagggaaaaataaatgtacatttgcatgacaagagagagaccaaagccatggctggtgattgagygaggtctaggccagctgtgcctcttggtgctgatggtatggygaatattaatgcaagtattattcaggttatgaatccagctgccctttcttgtcgtaagggcactattttccataagagctccattggtagtcctaacatctgctgagatccatcctaagtatgattagttttcattatgtttctgtctagttcataatggggcatagagcattctgagttgtgctgcaggtaatgtttcaaaatgaaataaaaggaattaaatgcaatgcagatgttacagcacgtcagtctctatttcagtgcctgccagaagaagggacaatgatgaacgatggtggg

SEQ ID NO: 38238 - DNA, 599 bp, Chicken  19866894269109_1
  misc_feature (1)..(146): n is any nucleotide
nnnnnnnnnnnnnnnnnnnnnnnnnnnnnnnnnnnnnnnnnnnnnnnnnnnnnnnnnnnnnnnnnnnnnnnnnnnnnnnnnnnnnnnnnnnnnnnnnnnnnnnnnnnnnnnnnnnnnnnnnnnnnnnnnnnnnnnnnnnnnnnnnntctttaatcaaactcactgtaacacaacagaaaagcactatcactaatggctggttgcttacctttgagtgtcccaggctttaacagcaaccctaggtatctcactagcatcaggagcaaagactgtatgaacaaatgtaattttacatatttyccaagctgatttgcaaagctgactgctgggcacatctttaccacccaccagaagagccagaaawcccaaagcagtgacacgtttgcatagcaacatcccctccctcaggggggcagataggtaaactatctgctctgcttgcagaataccaacaatccatgcacttctgcttgcttccaacattaaccttcccctcygcacacyctcacgcaacaaaaggggttcccaaagctaaggctggtgtctgattacactgaaaccaccagtgtagaagcagagctgcaaagggaatgaaagaa

SEQ ID NO: 38239 - DNA, 599 bp, Chicken  19866894269109_2
  misc_feature (1)..(82): n is any nucleotide
nnnnnnnnnnnnnnnnnnnnnnnnnnnnnnnnnnnnnnnnnnnnnnnnnnnnnnnnnnnnnnnnnnnnnnnnnnnnnnnnnntctttaatcaaactcactgtaacacaacagaaaagcactatcactaatggctggttgcttacctttgagtgtcccaggctttaacagcaaccctaggtatctcactagcatcaggagcaaagactgtatgaacaaatgtaattttacatatttyccaagctgatttgcaaagctgactgctgggcacatctttaccacccaccagaagagccagaaawcccaaagcagtgacacgtttgcatagcaacatcccctccctcaggggggcagataggtaaactatctgctctgcttgcagaataccaacaatccatgcacttctgcttgcttccaacattaaccttcccctcygcacacyctcacgcaacaaaaggggttcccaaagctaaggctggtgtctgattacactgaaaccaccagtgtagaagcagagctgcaaagggaatgaaagaaagcatggcagtacaccagcactgggcctgaacacatcagggctagatacaagctatttctgtgg

SEQ ID NO: 38240 - DNA, 600 bp, Chicken  19866894269109_3
tggttgcttacctttgagtgtcccaggctttaacagcaaccctaggtatctcactagcatcaggagcaaagactgtatgaacaaatgtaattttacatatttyccaagctgatttgcaaagctgactgctgggcacatctttaccacccaccagaagagccagaaawcccaaagcagtgacacgtttgcatagcaacatcccctccctcaggggggcagataggtaaactatctgctctgcttgcagaataccaacaatccatgcacttctgcttgcttccaacattaaccttcccctcygcacacyctcacgcaacaaaaggggttcccaaagctaaggctggtgtctgattacactgaaaccaccagtgtagaagcagagctgcaaagggaatgaaagaaagcatggcagtacaccagcactgggcctgaacacatcagggctagatacaagctatttctgtggggccaaactaaaattagctttatgtggcaatgaagggcagacatgcacaccctacttcctagggaaaaaatgactaacactcttcattcaccctgttatccccttctctacatcatttccatgcagaatattct

SEQ ID NO: 38241 - DNA, 600 bp, Chicken  19866894269109_4
ttacctttgagtgtcccaggctttaacagcaaccctaggtatctcactagcatcaggagcaaagactgtatgaacaaatgtaattttacatatttyccaagctgatttgcaaagctgactgctgggcacatctttaccacccaccagaagagccagaaawcccaaagcagtgacacgtttgcatagcaacatcccctccctcaggggggcagataggtaaactatctgctctgcttgcagaataccaacaatccatgcacttctgcttgcttccaacattaaccttcccctcygcacacyctcacgcaacaaaaggggttcccaaagctaaggctggtgtctgattacactgaaaccaccagtgtagaagcagagctgcaaagggaatgaaagaaagcatggcagtacaccagcactgggcctgaacacatcagggctagatacaagctatttctgtggggccaaactaaaattagctttatgtggcaatgaagggcagacatgcacaccctacttcctagggaaaaaatgactaacactcttcattcaccctgttatccccttctctacatcatttccatgcagaatattctgaactgc

SEQ ID NO: 38242 - DNA, 599 bp, Chicken  19866894269111_1
  misc_feature (1)..(106): n is any nucleotide
nnnnnnnnnnnnnnnnnnnnnnnnnnnnnnnnnnnnnnnnnnnnnnnnnnnnnnnnnnnnnnnnnnnnnnnnnnnnnnnnnnnnnnnnnnnnnnnnnnnnnnnnnncttttgtatatgattatttgtaacagatttccctaattaattattaggctttttcctattatcatgacacatgcaatactagtaatattatgataccaatatcataacggtgtggtagtgtcaaaccattttctagttcacttaaattattttaatataacaccaccaaaatccaggattttacagtaaatatrcaaaaatacacgtagacacagaatcttaaaaggaaatcagcaatgaaakaattgattaattaaaatgaattttaataatgttttaactgcataataagctacagtagtacattaaggaactgattttttgrtgacaaatagatgttttttttcactgaatgygttgatytttacttatttatttttttaggaattgctttcctaaagtctgtgttagcatctgcattgaatagtggttgtactgtggtttgcttatgacttactctgtgtttaaatatatggtttcataaagagtattg

SEQ ID NO: 38243 - DNA, 599 bp, Chicken  19866894269111_2
  misc_feature (1)..(57): n is any nucleotide
nnnnnnnnnnnnnnnnnnnnnnnnnnnnnnnnnnnnnnnnnnnnnnnnnnnnnnnnncttttgtatatgattatttgtaacagatttccctaattaattattaggctttttcctattatcatgacacatgcaatactagtaatattatgataccaatatcataacggtgtggtagtgtcaaaccattttctagttcacttaaattattttaatataacaccaccaaaatccaggattttacagtaaatatrcaaaaatacacgtagacacagaatcttaaaaggaaatcagcaatgaaakaattgattaattaaaatgaattttaataatgttttaactgcataataagctacagtagtacattaaggaactgattttttgrtgacaaatagatgttttttttcactgaatgygttgatytttacttatttatttttttaggaattgctttcctaaagtctgtgttagcatctgcattgaatagtggttgtactgtggtttgcttatgacttactctgtgtttaaatatatggtttcataaagagtattgtggcttttcaaccaaagatattgtggttacccattctgaaatgccaaaa

SEQ ID NO: 38244 - DNA, 600 bp, Chicken  19866894269111_3
gatttccctaattaattattaggctttttcctattatcatgacacatgcaatactagtaatattatgataccaatatcataacggtgtggtagtgtcaaaccattttctagttcacttaaattattttaatataacaccaccaaaatccaggattttacagtaaatatrcaaaaatacacgtagacacagaatcttaaaaggaaatcagcaatgaaakaattgattaattaaaatgaattttaataatgttttaactgcataataagctacagtagtacattaaggaactgattttttgrtgacaaatagatgttttttttcactgaatgygttgatytttacttatttatttttttaggaattgctttcctaaagtctgtgttagcatctgcattgaatagtggttgtactgtggtttgcttatgacttactctgtgtttaaatatatggtttcataaagagtattgtggcttttcaaccaaagatattgtggttacccattctgaaatgccaaaaaaatctctctcttctactcctgttagaaaaatcaaagacatcttacagtataacaaaataattccttgctggtgattgatcta

SEQ ID NO: 38245 - DNA, 600 bp, Chicken  19866894269111_4
tattatcatgacacatgcaatactagtaatattatgataccaatatcataacggtgtggtagtgtcaaaccattttctagttcacttaaattattttaatataacaccaccaaaatccaggattttacagtaaatatrcaaaaatacacgtagacacagaatcttaaaaggaaatcagcaatgaaakaattgattaattaaaatgaattttaataatgttttaactgcataataagctacagtagtacattaaggaactgattttttgrtgacaaatagatgttttttttcactgaatgygttgatytttacttatttatttttttaggaattgctttcctaaagtctgtgttagcatctgcattgaatagtggttgtactgtggtttgcttatgacttactctgtgtttaaatatatggtttcataaagagtattgtggcttttcaaccaaagatattgtggttacccattctgaaatgccaaaaaaatctctctcttctactcctgttagaaaaatcaaagacatcttacagtataacaaaataattccttgctggtgattgatctaacatgtagaattacttaattgcgaatctgga

SEQ ID NO: 38246 - DNA, 600 bp, Chicken  19866894269111_5
atgacacatgcaatactagtaatattatgataccaatatcataacggtgtggtagtgtcaaaccattttctagttcacttaaattattttaatataacaccaccaaaatccaggattttacagtaaatatrcaaaaatacacgtagacacagaatcttaaaaggaaatcagcaatgaaakaattgattaattaaaatgaattttaataatgttttaactgcataataagctacagtagtacattaaggaactgattttttgrtgacaaatagatgttttttttcactgaatgygttgatytttacttatttatttttttaggaattgctttcctaaagtctgtgttagcatctgcattgaatagtggttgtactgtggtttgcttatgacttactctgtgtttaaatatatggtttcataaagagtattgtggcttttcaaccaaagatattgtggttacccattctgaaatgccaaaaaaatctctctcttctactcctgttagaaaaatcaaagacatcttacagtataacaaaataattccttgctggtgattgatctaacatgtagaattacttaattgcgaatctggaccaactt

SEQ ID NO: 38247 - DNA, 600 bp, Chicken  19866894269111_6
catcttacagtataacaaaataattccttgctggtgattgatctaacatgtagaattacttaattgcgaatctggaccaactttgttgatctggccagttgtggattcttggattatcagtatttgaaatctgccatattacaatatgtgtgtacaagtatgaggcttccatctttcagtaacatgaatgcatgcaatgatttgccctgccttcaaaatgtttgctagcatatgttgcagaggtgaggataaagggcacagagcttattatgtaattactatgcacacagctctgatgcytgattatggtgaaaattggaattatgccagtggactcattttgatgatgctttctgttgtactagctttaacctttgaagatttaatcctgactgtgtatcacaggtgatasacagtattcaattccaagttctgaaaaggcattttcccacataataaaggctttgtgcatacatgcctgatcacctgccttcttttagggtatgggtctacacatactatttggacataggttaacaaatgagtggaagagacttacattagccattttcctgttgcatggctacttacagctatatc

SEQ ID NO: 38248 - DNA, 600 bp, Chicken  19866894269111_7
attatcagtatttgaaatctgccatattacaatatgtgtgtacaagtatgaggcttccatctttcagtaacatgaatgcatgcaatgatttgccctgccttcaaaatgtttgctagcatatgttgcagaggtgaggataaagggcacagagcttattatgtaattactatgcacacagctctgatgcytgattatggtgaaaattggaattatgccagtggactcattttgatgatgctttctgttgtactagctttaacctttgaagatttaatcctgactgtgtatcacaggtgatasacagtattcaattccaagttctgaaaaggcattttcccacataataaaggctttgtgcatacatgcctgatcacctgccttcttttagggtatgggtctacacatactatttggacataggttaacaaatgagtggaagagacttacattagccattttcctgttgcatggctacttacagctatatcataagtataaaactgttcatagaaatttcactttcatgaaactaagctattgttttctccctcttaagaactatacaatagtaaatatcagacacagcagaggacagtcagt

SEQ ID NO: 38249 - DNA, 600 bp, Chicken  19866894269114_1
tgactggagaggggctgggagcagcagggatgctgaagttcaggatggcactcacagtcatccctcaggcgtgattttacagcacgtgttgttgctttgccacaggtcaaagttgggaataggaggaagcttcctttgctgagggaggtgctggacgcagcctctgacgtagtctggcagagctctggggtctccctgctccttactgctcccccaggctcatcctcctcccgctgatcggcagagggcacccgcaacctggagagagtcctggagacgcactggctctgcagtttccamtagcgagcaggggagggaaacgggacggagctcctgctttggggtacgtttctctgccgtttgggaagaactcctggctgggagctgcttgcttcagccgtgctgggggaacggctgtatgggctgctctgcaaaaagagccacagaatccctttgcctgcccacctggctcatgcacacagacctgactgtccctgctcctctctgctgccagaagctgaagcagatgttgtggacgtggtcagtggctgaatcagaggtaacaggtgtgtggagacagactgccccttctgcccctcc

SEQ ID NO: 38250 - DNA, 600 bp, Chicken  19866894269116_1
ttatgatttgctggagacaggaggtctacgctcgcaggtgatcagctctgctccagacacacagagcacttccagctggctgtggggacacggctccacagcccgggcactcaccctgcagggcagcagctaactgctccaacagcatccccacccacacagagggaaggtgggaagcgggcaagcaccgaagcaccaccagggagctgcccgtttgcttttcataaccacggcctctgagagcagccctgcagcacagccgtgtggggacatgcagagtctctctcaaaaaaaaaacamccaacaaccaaaaacacaaaacagcacaaaagaaaagcaacacagtgcaagcggctcaaagtacgtcttacactaaggctgcagaaggccaacattaggcagaactgacatcatcctatggatcctgcagccaaatcagcagcagattcctcttttcagatggtacacaaaaaaagcaatgatagtttcattgtggaaataattgagatggtttttctttgatggttgagaagtctgataatgaccattttgcacgtgtaaggttcaattaatcaaactagataatatggtgtggcttga

SEQ ID NO: 38251 - DNA, 600 bp, Chicken  19866894269119_1
agcagcagctgttggacccaggtgcttcatggggatcaggtgaggccctttcagggcaggaaccacacaaacagtcagtagtaggttcttagagctcaagggatgaggacggctgcagtttgaagggatgatttccaggaagaagaagccaaaaaccaaagcagcaaaaataaaataacttttcaccaccaaactaccatggcaatcagtgtccaagaagaacaattagacctgtgcaacactgagcaactgcaaaggggcacaattatcaaagagcagaacagcagaagaaggcaggasacagcagaacaaggctggtgattctgcagcagacaacaatcttcatattgctggcctggaataaaatgtagctttattcagataaagctctccttaaaatctgggagggtactgagcaagtaaaaatgargacctcacactccagcccttccatctccctaacraacacccagacacagaggacaaaatgttgcccagggagaactttccccactgcactccatgtaggttcacagagacgccaaggcattcctgatgttcaaatccaggcagcagctcacttataggagcagcacaata

SEQ ID NO: 38252 - DNA, 600 bp, Chicken  19866894269119_2
atttccaggaagaagaagccaaaaaccaaagcagcaaaaataaaataacttttcaccaccaaactaccatggcaatcagtgtccaagaagaacaattagacctgtgcaacactgagcaactgcaaaggggcacaattatcaaagagcagaacagcagaagaaggcaggasacagcagaacaaggctggtgattctgcagcagacaacaatcttcatattgctggcctggaataaaatgtagctttattcagataaagctctccttaaaatctgggagggtactgagcaagtaaaaatgargacctcacactccagcccttccatctccctaacraacacccagacacagaggacaaaatgttgcccagggagaactttccccactgcactccatgtaggttcacagagacgccaaggcattcctgatgttcaaatccaggcagcagctcacttataggagcagcacaatacagtgtgcacgtctgctttaggattcttctgtttttttctgcatctcttcagagcaccagaaacatatgacataatctgaatatttatggcacgctgtgtaaaagcagaagctgtacatctcattacagg

SEQ ID NO: 38253 - DNA, 600 bp, Chicken  19866894269119_3
caaaaataaaataacttttcaccaccaaactaccatggcaatcagtgtccaagaagaacaattagacctgtgcaacactgagcaactgcaaaggggcacaattatcaaagagcagaacagcagaagaaggcaggasacagcagaacaaggctggtgattctgcagcagacaacaatcttcatattgctggcctggaataaaatgtagctttattcagataaagctctccttaaaatctgggagggtactgagcaagtaaaaatgargacctcacactccagcccttccatctccctaacraacacccagacacagaggacaaaatgttgcccagggagaactttccccactgcactccatgtaggttcacagagacgccaaggcattcctgatgttcaaatccaggcagcagctcacttataggagcagcacaatacagtgtgcacgtctgctttaggattcttctgtttttttctgcatctcttcagagcaccagaaacatatgacataatctgaatatttatggcacgctgtgtaaaagcagaagctgtacatctcattacaggagttcacccttgtgctggagtaacctgaattccc

SEQ ID NO: 38254 - DNA, 599 bp, Chicken  19866894269122_1
  misc_feature (1)..(18): n is any nucleotide
nnnnnnnnnnnnnnnnnntggtgggaaagtgtcgccacggatcttgcaacattcagataaaacatgaagcccacacgaagcggagtgtttttgcagcagtggcatgctcaggaaaaacaggggagcacctctccgtgctgtttttgcactgggatgccccacagactgtgccctgggctcgaggcaagcccttgcaaagtggataatagctgctctgtctgcccccgccgacacgcagagcctgggctggcaccgctcgcctgctaggggaggcacaactatgcagaacaaaacagcttyccagcccacaaaaatcttgtagacgccaatatacttcatcagccaacgttttcatgaggattaggttgggtcgtttgataaaaggcatgaggtagatacaggaacctttgtgtgttgatcgtcckctatgccagggcgaatttgcattagcagggctgtgttctcatgcaatgaaaggcagcacaggggctctttggatggtcaggaggccgatgacagccgtgctcactcagggccctgcattaaagccatccatgagttgcagggttccctccgggcagcactgatggaggggccac

SEQ ID NO: 38255 - DNA, 600 bp, Chicken  19866894269122_2
cacctctccgtgctgtttttgcactgggatgccccacagactgtgccctgggctcgaggcaagcccttgcaaagtggataatagctgctctgtctgcccccgccgacacgcagagcctgggctggcaccgctcgcctgctaggggaggcacaactatgcagaacaaaacagcttyccagcccacaaaaatcttgtagacgccaatatacttcatcagccaacgttttcatgaggattaggttgggtcgtttgataaaaggcatgaggtagatacaggaacctttgtgtgttgatcgtcckctatgccagggcgaatttgcattagcagggctgtgttctcatgcaatgaaaggcagcacaggggctctttggatggtcaggaggccgatgacagccgtgctcactcagggccctgcattaaagccatccatgagttgcagggttccctccgggcagcactgatggaggggccacagccgatgggaaacccaatgagggctgcagcatggagctggggaggggcttggcagtgtgggcagagagagttagataaacagagattatgcttaagatatttttctttcattttgatttatgact

SEQ ID NO: 38256 - DNA, 600 bp, Chicken  19866894269126_1
ctgggaaacaaatcaggcaagtgttcttgcaaacattttcttcttctctttctccaaaaaaggatatgtgtacttacagcaatctcatttataatgggtaatgctctcttgccatgttattaatgtgataaatactcttttctattccaatcatcccataatttggagagtctatagacaaaaaccctaacacagaatagcacttggaccaggactctgtttactgactgttaaaaaatgtacttatagacatgcacagaaactgtttactgttaattgacccttacagtatatcaggtyagaagggatctttcagtgtcatttagatcagcctcccagctagatctagttgctctgagcgctgtcaagtctccggggatggaggtactgtagtgcctctggccaaccaatttacgatgaaaaaatttttgtcctatgtggtcagaattttccatgttacaacttctgttgatagcctcttgtcctgcccctgtggcctctaagaatagtctgatttagtctcctttataccttcttttagataactgaagacagcaaagctgtcttatggctaaacaaattcttttctttgagccctcc

SEQ ID NO: 38257 - DNA, 599 bp, Chicken  19866894269129_1
  misc_feature (1)..(84): n is any nucleotide
nnnnnnnnnnnnnnnnnnnnnnnnnnnnnnnnnnnnnnnnnnnnnnnnnnnnnnnnnnnnnnnnnnnnnnnnnnnnnnnnnnnnatcccatattaaccttctttccgactgaacaatcctcgtgtatgtagttctacatcttagatcattgcttttgagtcttttccagttctttgttgtctaccatatcctttctggcagggccagtactacacattcacactcaacacatggacaaagctcagatttacggagaggcacaatatggactctgttttattcattattcctttcctaaaraatcctaacatgctatttgcttttagactgccgctcagccttcagctgaccttctcatggactcttcttcgagcttaatatttctctttcccatatttctccgttatcctaccccttatccatctttcagttgttgcagcaagccacatcttctccaatttagacagttattccaatgttaagccaggtaagtcagacctgcatcatttcccctctacaaaaaaagtcctttgcaaacagagatctgtgggacactacatttccagccacaaaaggtacccaggaaaagcaagttctag

SEQ ID NO: 38258 - DNA, 600 bp, Chicken  19866894269133_1
ctctctgcttaggattcacagcactgcaaacttttctggactttcccaggtgtgactcacagcatgctggcacagtgctgcttgggattcagccgtatgtctggattcaatatctttcctcccagctaatcagccaaagactttttttcaaatacattttgaaactaaaatcatctcgcatttgcttgcagctacataagatagaacaaattgtcgtctgatgtacatttgcatatctctactgaagccagtgaaattatatggatttatatagataagtatttgcccactcgcctgccrtacagaaggcaaaatctagaattcctattaaaatgtttcaaaaacctaygtcttgttacattttgtgctaggaatctgcagatgtcagctaatgtcagctaatgaaaataaacttcaaagggaagaatcatctgaattaattgggcgctaaatcatcacctcagctaagttctgttaggaaatggttgctttgcgctgtgctgttaggtgggtatcagccttttagcagctctactgttggatgcatctttctgtggctcccctcttgaaacaagcaataaatagcagaaactgctgctc

SEQ ID NO: 38259 - DNA, 600 bp, Chicken  19866894269133_2
gtgtgactcacagcatgctggcacagtgctgcttgggattcagccgtatgtctggattcaatatctttcctcccagctaatcagccaaagactttttttcaaatacattttgaaactaaaatcatctcgcatttgcttgcagctacataagatagaacaaattgtcgtctgatgtacatttgcatatctctactgaagccagtgaaattatatggatttatatagataagtatttgcccactcgcctgccrtacagaaggcaaaatctagaattcctattaaaatgtttcaaaaacctaygtcttgttacattttgtgctaggaatctgcagatgtcagctaatgtcagctaatgaaaataaacttcaaagggaagaatcatctgaattaattgggcgctaaatcatcacctcagctaagttctgttaggaaatggttgctttgcgctgtgctgttaggtgggtatcagccttttagcagctctactgttggatgcatctttctgtggctcccctcttgaaacaagcaataaatagcagaaactgctgctcrtaaaccttgagatctaaggcagccctcgtttccatgttaataaagtat

SEQ ID NO: 38260 - DNA, 600 bp, Chicken  19866894269133_3
acagaaggcaaaatctagaattcctattaaaatgtttcaaaaacctaygtcttgttacattttgtgctaggaatctgcagatgtcagctaatgtcagctaatgaaaataaacttcaaagggaagaatcatctgaattaattgggcgctaaatcatcacctcagctaagttctgttaggaaatggttgctttgcgctgtgctgttaggtgggtatcagccttttagcagctctactgttggatgcatctttctgtggctcccctcttgaaacaagcaataaatagcagaaactgctgctcrtaaaccttgagatctaaggcagccctcgtttccatgttaataaagtattcaaaataaactctaaggtactggtggtttttttcttgctttyctctgacagacagatttctctyatttttcaacagtgaattaaaactagaggtgagatgtgtttgtaactgagactcctgttattgataaatgagggagaaagattgctgttatcaagaaacaaggaaaaggaggagccgaggaaacccagttgttgtggattttaacataattctgagatttcttttaaatggtttgtaaaaactccct

SEQ ID NO: 38261 - DNA, 600 bp, Chicken  19866894269133_4
tgtcagctaatgaaaataaacttcaaagggaagaatcatctgaattaattgggcgctaaatcatcacctcagctaagttctgttaggaaatggttgctttgcgctgtgctgttaggtgggtatcagccttttagcagctctactgttggatgcatctttctgtggctcccctcttgaaacaagcaataaatagcagaaactgctgctcrtaaaccttgagatctaaggcagccctcgtttccatgttaataaagtattcaaaataaactctaaggtactggtggtttttttcttgctttyctctgacagacagatttctctyatttttcaacagtgaattaaaactagaggtgagatgtgtttgtaactgagactcctgttattgataaatgagggagaaagattgctgttatcaagaaacaaggaaaaggaggagccgaggaaacccagttgttgtggattttaacataattctgagatttcttttaaatggtttgtaaaaactccctggctctggttggctgtatgtcagctgaactatagcctggaggagaaaggtaacgtgctggaaggcagtacagtgaaaatgtcttcagccaa

SEQ ID NO: 38262 - DNA, 600 bp, Chicken  19866894269133_5
tcaaagggaagaatcatctgaattaattgggcgctaaatcatcacctcagctaagttctgttaggaaatggttgctttgcgctgtgctgttaggtgggtatcagccttttagcagctctactgttggatgcatctttctgtggctcccctcttgaaacaagcaataaatagcagaaactgctgctcrtaaaccttgagatctaaggcagccctcgtttccatgttaataaagtattcaaaataaactctaaggtactggtggtttttttcttgctttyctctgacagacagatttctctyatttttcaacagtgaattaaaactagaggtgagatgtgtttgtaactgagactcctgttattgataaatgagggagaaagattgctgttatcaagaaacaaggaaaaggaggagccgaggaaacccagttgttgtggattttaacataattctgagatttcttttaaatggtttgtaaaaactccctggctctggttggctgtatgtcagctgaactatagcctggaggagaaaggtaacgtgctggaaggcagtacagtgaaaatgtcttcagccaatccagtattcccctggaatcct

SEQ ID NO: 38263 - DNA, 599 bp, Chicken  19866894269136_1
  misc_feature (1)..(110): n is any nucleotide
nnnnnnnnnnnnnnnnnnnnnnnnnnnnnnnnnnnnnnnnnnnnnnnnnnnnnnnnnnnnnnnnnnnnnnnnnnnnnnnnnnnnnnnnnnnnnnnnnnnnnnnnnnnnnnaaaaagtccctccccctgctttccttcatgaagcatacagatgtggtacttagggacataatttaatgggcaatattagtgataggtggacagaaggctagataatcttagaggtcttttccacaccttaatgattctatgattctgtgatatgcaaacactatgtataatgcacacatttggtcacaaktcctcaccatctgactgagtgaaagttaggaaggaactttaaaaggaagatatgctggtgttacttaaatttataaagtcttctcaggatttttaacatatattcttcctctacaaaggtaacaccactcagttacacaagtaggttcaactattacacttataaacacagtaaagaaaacaatgcaaataattttttccttcttcaaaaagccaatcaaatctagtagttattcacagatgcrgatgggttgttctgttttccttaagctcattacaaaagcgaataaggaaattacc

SEQ ID NO: 38264 - DNA, 600 bp, Chicken  19866894269136_2
ttctatgattctgtgatatgcaaacactatgtataatgcacacatttggtcacaaktcctcaccatctgactgagtgaaagttaggaaggaactttaaaaggaagatatgctggtgttacttaaatttataaagtcttctcaggatttttaacatatattcttcctctacaaaggtaacaccactcagttacacaagtaggttcaactattacacttataaacacagtaaagaaaacaatgcaaataattttttccttcttcaaaaagccaatcaaatctagtagttattcacagatgcrgatgggttgttctgttttccttaagctcattacaaaagcgaataaggaaattacctcttctacctacatatgtattcaatatcagctctatctagaagcagcatggtttcattagtatctgtcacaacattagcattatattwgaaatggctttaagccaatatcccaggtacaacagccccaaaacctgaggaaggccagatacaggctctgcaacacaaagcatctttgcattttattaattgatgtcatttgttagaaaatttttatttttattatctatcacggtctttttcatat

SEQ ID NO: 38265 - DNA, 600 bp, Chicken  19866894269136_3
gatttttaacatatattcttcctctacaaaggtaacaccactcagttacacaagtaggttcaactattacacttataaacacagtaaagaaaacaatgcaaataattttttccttcttcaaaaagccaatcaaatctagtagttattcacagatgcrgatgggttgttctgttttccttaagctcattacaaaagcgaataaggaaattacctcttctacctacatatgtattcaatatcagctctatctagaagcagcatggtttcattagtatctgtcacaacattagcattatattwgaaatggctttaagccaatatcccaggtacaacagccccaaaacctgaggaaggccagatacaggctctgcaacacaaagcatctttgcattttattaattgatgtcatttgttagaaaatttttatttttattatctatcacggtctttttcatataaaacatggctagcaatgtatttttctaggttacattactgaagacataatgatattcataaagttaaaaaaagaaaaagaaaaaaggatcactgaattatattattacgcaatataaatatttgcccagaagtgtttctcta

SEQ ID NO: 38266 - DNA, 599 bp, Chicken  19866894269138_1
  misc_feature (1)..(76): n is any nucleotide
nnnnnnnnnnnnnnnnnnnnnnnnnnnnnnnnnnnnnnnnnnnnnnnnnnnnnnnnnnnnnnnnnnnnnnnnnnnnaacatatcagttcaacttttataaatgaactcaattcatatgcatgtatatacatttactatctgaataatttggctatgtttaaaataaatactttccaggaaacatttacacaaataaaaattctatatgtgatttaagtgtattttaagtgtaatagagtcttcgttctaaatatctgtaaaataaagtcagagagagtgttcaagtttgaagaatgcaartgtttgtggtacatcacaagaagagagcacattgacatctaacactgctagctaatgacaagggaaaaatatggggtaatgcttgcctggattaaagagctacaaacagcaccttcagtgctggatgaatactgtgacctgcaactggctttttcaccactggaaaaatttacacacaggagagggagaccttgggttgccattaagcagccagaagagacaaaggaaggaactacttaactgttacattttgctctctaaaacttcttcctacctggtacttcagtatctagttgatc

SEQ ID NO: 38267 - DNA, 600 bp, Chicken  19866894269141_1
agttgccagagcaattctccacacggagactgacaattgttgaacacttctgcaagggaactttatgaccataagttcacatgagcagtatctcacaactggacttggtgatctttgtgggtccattctgatggaactcgtccattgtaagacctagacttcctgcttttcctggcacctctggtcctgtctggctggggttaatctgatgcatgcaaacaaagcgctcaggttgctttgactgatgtaagacctatttatctgtctcacttctacatcaaaagcatgtaattacctaasctctggggaaactgccacttgactggatgggatttttgcatgggaatgagcagcaggtgcaaaataataataaaacaaakaaatcaaatggcaatgaagtagctgggcatacattaatattcagaacaagatcaccctttataacatttgcagcatcacaagggactttgtaggcaatacgttttctagacctacctaggagttctatacttacaataacccctgggtaataacctccaacagtcacattttgggttcttgttgtagcagctaggcccaccgttagaattaatactgaca

SEQ ID NO: 38268 - DNA, 600 bp, Chicken  19866894269141_2
atgagcagtatctcacaactggacttggtgatctttgtgggtccattctgatggaactcgtccattgtaagacctagacttcctgcttttcctggcacctctggtcctgtctggctggggttaatctgatgcatgcaaacaaagcgctcaggttgctttgactgatgtaagacctatttatctgtctcacttctacatcaaaagcatgtaattacctaasctctggggaaactgccacttgactggatgggatttttgcatgggaatgagcagcaggtgcaaaataataataaaacaaakaaatcaaatggcaatgaagtagctgggcatacattaatattcagaacaagatcaccctttataacatttgcagcatcacaagggactttgtaggcaatacgttttctagacctacctaggagttctatacttacaataacccctgggtaataacctccaacagtcacattttgggttcttgttgtagcagctaggcccaccgttagaattaatactgacacaatgaggagagtcacagttacgtagagggaatttctttttcttctattgaacgaccctaaaaacacacatatacaacag

SEQ ID NO: 38269 - DNA, 600 bp, Chicken  19866894269146_1
atggtcaaagaaaatgcttaacatcacagcatgttagccagataacctaactctgtacacactgcctattcacttcaatgcacaaagtgttttcttactgtgtgagatggcacagaatgaggtttaatggtgggattcccaacagctgtgactttggtttgtttctgcaggtgatccacccactcatgcaaatcttgttggttgttacatgacactagtatcctttcaatcatagttcctaggtgatagaaaaaataagatgtaggaaaccacagaagaacaatttagtcaaactgacaygataacacagatgcacatttcataaaacattatattcctcaattactatgcacgtatttatttattattaattgataattaagcacgattgttattataagtaatagatataagacataggtccaccctcagctccagagggtgaatccagtagctttatacttctccatctttcccaggaaagctaacatatagtctacaacgtcacccgtgagtctgtaagcttcagcataggaaaaataataaagtattgttcagagaaggtcataaggtcagtcacaatctaatatgaaagatgaa

SEQ ID NO: 38270 - DNA, 600 bp, Chicken  19866894269154_1
cagtgtgagtattttatttcacattggtgaatgtagagtattacacattccatatgactttgagttcttattagtttcattttgcaaatagtttttattatcagaaattgcatcatctgatatactatcaaatttaagagttttttcctctttgttagccttccaatcaattaaaatttctactaccctttattttatgtatgattgaaattcagattagctaattttacagtagcttgcaaccaaagtcacatgaggtattcggtcttgtcacagtttactccaattttatttttgttygcttgttttgaatttacaattttgctggaattttatgaaaaagaataaatattaataggtaacacacataattaaaatatagtgttttctcatattatacaaggccttttcatagagtaaagggaagctggtactcatcaggagtaattcaacacctgccagcactgggtattaatgaacatagtaaatctgagttactttggatctccaagaatacttttctgtgtgattataagcactaagtatataacaaaattcctaaaaagatcacactcctggtttcagtctaatgtttttttg

SEQ ID NO: 38271 - DNA, 599 bp, Chicken  19866894269162_1
  misc_feature (1)..(246): n is any nucleotide
nnnnnnnnnnnnnnnnnnnnnnnnnnnnnnnnnnnnnnnnnnnnnnnnnnnnnnnnnnnnnnnnnnnnnnnnnnnnnnnnnnnnnnnnnnnnnnnnnnnnnnnnnnnnnnnnnnnnnnnnnnnnnnnnnnnnnnnnnnnnnnnnnnnnnnnnnnnnnnnnnnnnnnnnnnnnnnnnnnnnnnnnnnnnnnnnnnnnnnnnnnnnnnnnnnnnnnnnnnnnnnnnnnnnnnnnnnnnnnnnnnnnnncatcatggagggacgtcattaacagggacatcatgggggagcacatgcactttyccagccccgatgggacacgtgggtgaagcatagaggccaggagacatgggaagctgttcaggaagaccttgcctgctctattgcttccataggatttcctgcaaggctttgctttcattcctttttcactttcttttaaactgacattgttccagcccagcctgtgtcatgtctagcaccctctctgtggagaggcagccagcagagcagggaataattcctccatcccctcccctccccctgccaaccagggcatggcctttctgagcttctgacggtgcagctcagacctacctctg

SEQ ID NO: 38272 - DNA, 600 bp, Chicken  19866894269162_2
tttcttttaaactgacattgttccagcccagcctgtgtcatgtctagcaccctctctgtggagaggcagccagcagagcagggaataattcctccatcccctcccctccccctgccaaccagggcatggcctttctgagcttctgacggtgcagctcagacctacctctgctttatgagaccagctcatttttaggtcagcagtactatatgctgtcagctccttgggcccagtgcatgggatgcatacaagcaaacatctgggagatatctaggtcgctcctgcttccagccccgtccycaccaaggatgtcccttgcagtggtgtagcagcatcgcagcagccctgtttgcaccctctgtttcagagggtgcctgaatccctcccaggccggcctcctactcctcacctcctgatggcactgggcattactggcccttggatttcagagatgtccaatgtggtctcacctctcccctgtcccaggtctgctggaggtaacgtctggaggcagygggctgcacatcgaacctgaagatgctgagctcgtccttaggctccacagcactttctccctcgtgtgctatggggacggcacgc

SEQ ID NO: 38273 - DNA, 600 bp, Chicken  19866894269162_3
tcagctccttgggcccagtgcatgggatgcatacaagcaaacatctgggagatatctaggtcgctcctgcttccagccccgtccycaccaaggatgtcccttgcagtggtgtagcagcatcgcagcagccctgtttgcaccctctgtttcagagggtgcctgaatccctcccaggccggcctcctactcctcacctcctgatggcactgggcattactggcccttggatttcagagatgtccaatgtggtctcacctctcccctgtcccaggtctgctggaggtaacgtctggaggcagygggctgcacatcgaacctgaagatgctgagctcgtccttaggctccacagcactttctccctcgtgtgctatggggacggcacgctggtctgggagcgggatggtcagcctctcactgccgtgctggagcacagggacggggtcttcatcagcaacctcaccctcaggaacatgacaggccgtcacacgggggagtatgcgtgcttctacagccctgaccaggctccagagcgagcagagaggaaagccctttacatctacgttccaggtaagggacagcacatccttacctctgcatgg

SEQ ID NO: 38274 - DNA, 600 bp, Chicken  19866894269163_1
aaatgtctgtttatactttctgctgggaaatcaacttggaaaaacagatgcacaacgcattgcatgcagactccaagtcattcttacatatagagcactactgagcctgcagagaactagaagcagccttgttacaaaacagttcagattgtcacttgtaagaatttcaaacatgaaaaattcctaaaaaggctttatagtgctttttgaccttgtgaacacagtcctaaataatatttgaattctgaaaaacatgcaacctactgagaaactgaggttcagcttaaccacagatatttycaaatatgtgttgagtagcttcaactcaaaattctcagaaataataattattaatgcaagatgactttgtttttaaactttcatgctttcatttcaaagtgagtaattcttttaggtcactctaatcttccaagtccatgaactgagaaaactcagttacttgtactgacctctttgtatgtcataactcttttaatttgcatggcaaattgaacaaaatattaaaattagggaaatagtttttacctacattcatcactcccccataagattagattctggtaactctcactggtattt

SEQ ID NO: 38275 - DNA, 600 bp, Chicken  19866894269164_1
aggaattgttatctgtagctaatgaactgacgtaatcaatacagtgactgtctggagacttctacaagtagccacttctattgatcctctaggctattcatagatgggaaccttttcttaatactcatctgtttcaaagtgtatatcctatcagctcctaggtggaacttagaaaggcctttgtttgcacgtggaggagaagtttcagcagccaaaaaactaactgaacacttgagctgggtgcatggcttttcttgttcagcagtctgactttgtttggtgcctaagctttcaggacaygtttctcagaaaccgcatgcaaaggtttcaaagtaggcttttacagagactctcaaactgatgtgccaaatgtgatttgttttccttttgcctgggagatcagtctaacagctgggatagaaagtccaatcagaaggcaattaccaaatgcaggtttctctcccttcagtgcagtgcctcttttctgtcaagtggtggtggtgtgtgctgctccacgtgctgctgcctctggggcagtcctgcaggggtgaccaccactgcctgccatcagcctggtttggcttcccatggacgagggca

SEQ ID NO: 38276 - DNA, 600 bp, Chicken  19866894269170_1
cttatcctatttcagagctgtcatgcaaacaaacccaacttaaaaaaaaaaaattaaaaatcattacagaggtatgcatcctgtcaaccctctgtcttggctacttctcactgtatgtgtaaggagaaatcccttctcctgattgcgcttctctttcaggtatattgacttctttttaatctctaattcattatttctctggctccccaaaatgctctggtctgctctggttgcccaataaaccactactcccttccctaccatgcataggtagtacttacttttccagggctatggaaytcttgttttcattgatattttcttcttcaactaatctagaaggggaggattgttcttttctgtaaagtctgttctgtgaagcatgctgtgctgctaggacacccccttgtctttttccacatgygtatgccttagcaaagtagtcattgcaactctttcctccacaatttaagtatctgattgttttcaatattatttcttactcttgtatatcatctgagtcagcttttaaggaaggctgagccagaaaacttcaacaggcgttaatatcaatttcatttatttatttatttgccaagc

SEQ ID NO: 38277 - DNA, 600 bp, Chicken  19866894269170_2
agaaatcccttctcctgattgcgcttctctttcaggtatattgacttctttttaatctctaattcattatttctctggctccccaaaatgctctggtctgctctggttgcccaataaaccactactcccttccctaccatgcataggtagtacttacttttccagggctatggaaytcttgttttcattgatattttcttcttcaactaatctagaaggggaggattgttcttttctgtaaagtctgttctgtgaagcatgctgtgctgctaggacacccccttgtctttttccacatgygtatgccttagcaaagtagtcattgcaactctttcctccacaatttaagtatctgattgttttcaatattatttcttactcttgtatatcatctgagtcagcttttaaggaaggctgagccagaaaacttcaacaggcgttaatatcaatttcatttatttatttatttgccaagccagctcttattagaaatcttcaccatgccaagaagttactctctgggaagccttttcatgtccctgatcaaaatgcagggacactggcttctgcaaggtaagcagtatgagctcctgtgtgatt

SEQ ID NO: 38278 - DNA, 600 bp, Chicken  19866894269175_1
ctttgcagttctatctcctgctattagaatcctaacctagtgtctgaagataagattttgtttcccttctgatggcacacgtccttttcttccattggttctactactcggcgtgggatagaaaacaataggagcctactgtagtgtagtcctgagcttttctgtaagaatctgaatacggttttaagtagtaaaccgagatgtcctcctatcatgctctgcaatagcaaacatgccagttttatgtgtagatgtaattactcagagaagaaagtatgatttggcacggtgtcccagctktgtcggtaaggaagctctctacttcctcaactccaccactgtgtgcacagcctgacacaaagcaagcgcatttctctacattgtatctcacttcacaaaagtgaactctttgttgttttccacccatctttcacaaccatttccagttagccctttgtcagaatctgtatgcctcagatcggtttgtggtattagttacgtagcaaggaagttggagggcaatgatctgcaggggtacggtattttgatcagcttgtagagctgctgaaattgtttgctgccacaattgagctgccacaa

SEQ ID NO: 38279 - DNA, 580 bp, Chicken  19866894269175_2
gtatctcacttcacaaaagtgaactctttgttgttttccacccatctttcacaaccatttccagttagccctttgtcagaatctgtatgcctcagatcggtttgtggtattagttacgtagcaaggaagttggagggcaatgatctgcaggggtacggtattttgatcagcttgtagagctgctgaaattgtttgctgccacaattgagctgccacaagcaggaataagtgattccacgtaagcccttctgtttttcgaggctgaaaaactgatttctcaggcctaaaataagcacattycccccccccctcttaaaatagtcctgcttggattaaaaaccaaaaagtatctcagacattcaagcttgactacttttcacggtgtggtaacagcatgaaacttcttttacattctgggagaccatctcaaaaaccttgttttcttttaaccttgttcacttttaacactgacttgcttggcacaaagaaaaaggtaagattctgggtgaggtgttttgctccgttttttatttttttttcatgttctctggactcaaatgcaagcctaattacaaagaga

SEQ ID NO: 38280 - DNA, 599 bp, Chicken  19866894269180_1
  misc_feature (1)..(181): n is any nucleotide
nnnnnnnnnnnnnnnnnnnnnnnnnnnnnnnnnnnnnnnnnnnnnnnnnnnnnnnnnnnnnnnnnnnnnnnnnnnnnnnnnnnnnnnnnnnnnnnnnnnnnnnnnnnnnnnnnnnnnnnnnnnnnnnnnnnnnnnnnnnnnnnnnnnnnnnnnnnnnnnnnnnnnnnnnnnnnnnnnnnnncagtaatggtttaaccacatttctccacgggccctgtctgtaggactcctactgtacaacggcaatgcaggtgctttggcagctaatgagcaaatagatgctcagttttgtattgcgtstttctcaaaagcacagctatgttagcagagttgcaaattatccctgaaaatagtgcaaactyagtgtgaaytgggtccacaggagcactggagtccctcttacttggcacataaaatacatttagataaatatagtaacaataatattcaatacatcgtagttaacttcaaacttcagtcgccatgaaattaaatatcaacaaatgcactgaaaaataatgaattaaggtacaaaaactgaattattaaaccaaatcattagagatgaaggarattttattctttagaaaaaaaaatat

SEQ ID NO: 38281 - DNA, 599 bp, Chicken  19866894269180_2
  misc_feature (1)..(119): n is any nucleotide
nnnnnnnnnnnnnnnnnnnnnnnnnnnnnnnnnnnnnnnnnnnnnnnnnnnnnnnnnnnnnnnnnnnnnnnnnnnnnnnnnnnnnnnnnnnnnnnnnnnnnnnnnnnnnnnnnnnnnnncagtaatggtttaaccacatttctccacgggccctgtctgtaggactcctactgtacaacggcaatgcaggtgctttggcagctaatgagcaaatagatgctcagttttgtattgcgtstttctcaaaagcacagctatgttagcagagttgcaaattatccctgaaaatagtgcaaactyagtgtgaaytgggtccacaggagcactggagtccctcttacttggcacataaaatacatttagataaatatagtaacaataatattcaatacatcgtagttaacttcaaacttcagtcgccatgaaattaaatatcaacaaatgcactgaaaaataatgaattaaggtacaaaaactgaattattaaaccaaatcattagagatgaaggarattttattctttagaaaaaaaaatatcagtagtggaataccttagaagtttttcttcagagtgataaaaggttgaaatattatttaga

SEQ ID NO: 38282 - DNA, 599 bp, Chicken  19866894269180_3
  misc_feature (1)..(110): n is any nucleotide
nnnnnnnnnnnnnnnnnnnnnnnnnnnnnnnnnnnnnnnnnnnnnnnnnnnnnnnnnnnnnnnnnnnnnnnnnnnnnnnnnnnnnnnnnnnnnnnnnnnnnnnnnnnnnncagtaatggtttaaccacatttctccacgggccctgtctgtaggactcctactgtacaacggcaatgcaggtgctttggcagctaatgagcaaatagatgctcagttttgtattgcgtstttctcaaaagcacagctatgttagcagagttgcaaattatccctgaaaatagtgcaaactyagtgtgaaytgggtccacaggagcactggagtccctcttacttggcacataaaatacatttagataaatatagtaacaataatattcaatacatcgtagttaacttcaaacttcagtcgccatgaaattaaatatcaacaaatgcactgaaaaataatgaattaaggtacaaaaactgaattattaaaccaaatcattagagatgaaggarattttattctttagaaaaaaaaatatcagtagtggaataccttagaagtttttcttcagagtgataaaaggttgaaatattatttagacttaagtaa

SEQ ID NO: 38283 - DNA, 600 bp, Chicken  19866894269180_4
aatagatgctcagttttgtattgcgtstttctcaaaagcacagctatgttagcagagttgcaaattatccctgaaaatagtgcaaactyagtgtgaaytgggtccacaggagcactggagtccctcttacttggcacataaaatacatttagataaatatagtaacaataatattcaatacatcgtagttaacttcaaacttcagtcgccatgaaattaaatatcaacaaatgcactgaaaaataatgaattaaggtacaaaaactgaattattaaaccaaatcattagagatgaaggarattttattctttagaaaaaaaaatatcagtagtggaataccttagaagtttttcttcagagtgataaaaggttgaaatattatttagacttaagtaatcaaaggcaatttgataacttgaagtgcttttggactttgtagcgtgcatttatcagggcaggaaatgtaactaacatagctgatgaaataaaactgccacgggattctttcagtcagggcagcactgagaaaccgaggttgaggatctcccttagtatgggcagtctggctacagagcgtggtgccacacgcagttactgct

SEQ ID NO: 38284 - DNA, 600 bp, Chicken  19866894269180_5
tagaagtttttcttcagagtgataaaaggttgaaatattatttagacttaagtaatcaaaggcaatttgataacttgaagtgcttttggactttgtagcgtgcatttatcagggcaggaaatgtaactaacatagctgatgaaataaaactgccacgggattctttcagtcagggcagcactgagaaaccgaggttgaggatctcccttagtatgggcagtctggctacagagcgtggtgccacacgcagttactgcttttgaggctggcttaagcatactgggagctgaaaaaagtcaycgtttctcaaaccttttagacgttgggggaagtgggaaagtatgcatctcacagacccaacacattctttgtgttagaaacattagtttgatttaactaagtgtgtttcgtagtaagaaaaaatcactttttctgagattatgtggaaagaaatagtgcagtgactgcagtggaaggaagcctcaccagaaaagccaggcttaatgaagcatggaattatacccgctgccccactgaaacttgtagggaccactctgttagaagtgcatgtgatgatcttcctgacttcttctgaacaaa

SEQ ID NO: 38285 - DNA, 599 bp, Chicken  19866894269189_1
  misc_feature (1)..(11): n is any nucleotide
nnnnnnnnnnntgtaagtactgtcttacagcatggcttcctttggacactcactgcctgtgctcttgccttctgttaaagctcacaggcttcttgtaagggatgagtggctgttaccagataggttgttgtggtttaaccagacaggtgacccagcgccacacagtcatttgcttcccccccccccccccttcccagtgggatggagagagagtcaggaataaaaaaagtagatctcatggattgagatataactattgatccagatagagaaaagaaacaggacaatagttacgataayatacatacatatatatatatgtgcatgcatatgacaagtgatgcacaagtagttgctcaccgccccctgactgatgcccagctagtcccctgagcagtggaggagagagaggtgaactcccatccacttcaaaactccttcttcatgatggcatatggtatggaatatccctttgtccactttaagtcagctgtcctaattctgttccctcccagctccttgggccttttgctgagaatggccttggctctgtacaacaactgcttagcagcaactataaacattggtgtgttatcaac

SEQ ID NO: 38286 - DNA, 600 bp, Chicken  19866894269190_1
tgcaggaccaatggagaaagggttaaaagggtcagctcacagtgccacagagcacagtgtgcctggtttaatcacacagccagacagcagggagatgaagaacagaccgaagataacaaagaacaaacctaaagataaggtgacaacaaagatgaagaacagagctggaggcataaaacacccagggatggatgacagcgggactcttttggcaaaaattatgagaccagataatgaggcagaagatcccaaactgcccataacagatctgtcaaaaagcagtttcttggagccagtcargaggaagcagtgagaggcagtgaagactcaacatccaatatccttagcccatggcacacatcagtgatccccaaaaccccatgtttgtgaggaggcgggtgggagtgtgtgcagtcccctactccaaggtttgtaagataaaatcactctctctacctttcctttccaggaaaatgctttgccaccccttcttccagacaggacctcacaccagccacactcccagcaggatgtgggaggggtgatcacacgaccatggggcatctcagccaagggaaccctttgggaacccctcaattt

SEQ ID NO: 38287 - DNA, 600 bp, Chicken  19866894269190_2
acactcccagcaggatgtgggaggggtgatcacacgaccatggggcatctcagccaagggaaccctttgggaacccctcaatttcctaggggtggcactgaggtgaggagatagggttaggtgtccatctgtatcttcacaatgaagtctccagagagagctgaaagatgcccagatcatgcattccctacaagagggtctctcaggcagttctcctaagtagctgtgagcccacagccccagggagtccccaaaaaccccagcagcttctattgcacaacctcccacaggagatgcacrcacaccagtgtccacaagtccccctgtcccatccaaactcggtgagggagtgactacagagtcaccacacgcccctccttcccattagctcctcttcgacacacaactccaaagttctccatctcaagaggacgcttccaggcttaggacgggcaattaaagatgttatttacaatggcccctagagatggctctgctccagtctagcacagggatgagcccctcagttcagatctctgggctgtgtcctcaggtgccatggggctgttgtggtgtcccctacggcaacgtgtggtactt

SEQ ID NO: 38288 - DNA, 599 bp, Chicken  19866894269194_1
  misc_feature (1)..(183): n is any nucleotide
nnnnnnnnnnnnnnnnnnnnnnnnnnnnnnnnnnnnnnnnnnnnnnnnnnnnnnnnnnnnnnnnnnnnnnnnnnnnnnnnnnnnnnnnnnnnnnnnnnnnnnnnnnnnnnnnnnnnnnnnnnnnnnnnnnnnnnnnnnnnnnnnnnnnnnnnnnnnnnnnnnnnnnnnnnnnnnnnnnnnnnnagttgggcttcctgcctcaccctgctttctgcagtaatcatcccttaatgtggtagtctcccatggagatgcttgcatgctctcagacagagtttgatgtttgggtggtcctgtgtrgaacaaagaattggactcggtaagcctagtgagtcccttccaactcaggatattctgtgattccagggatgtcagacttgcgttagatggcacatttttgttttttacatagccaggaagtccttkggccacaggagcaagaaagctgtttctcattccagccccagatctcacagatacagccagccagctgcaattgcaacaactgtgcctaaaggtggctggcaccctcatgatgatcagtttaagacagcagagcagtgggagatcagcccgtgctcctcctgcaggcctcaccg

SEQ ID NO: 38289 - DNA, 599 bp, Chicken  19866894269194_2
  misc_feature (1)..(57): n is any nucleotide
nnnnnnnnnnnnnnnnnnnnnnnnnnnnnnnnnnnnnnnnnnnnnnnnnnnnnnnnnagttgggcttcctgcctcaccctgctttctgcagtaatcatcccttaatgtggtagtctcccatggagatgcttgcatgctctcagacagagtttgatgtttgggtggtcctgtgtrgaacaaagaattggactcggtaagcctagtgagtcccttccaactcaggatattctgtgattccagggatgtcagacttgcgttagatggcacatttttgttttttacatagccaggaagtccttkggccacaggagcaagaaagctgtttctcattccagccccagatctcacagatacagccagccagctgcaattgcaacaactgtgcctaaaggtggctggcaccctcatgatgatcagtttaagacagcagagcagtgggagatcagcccgtgctcctcctgcaggcctcaccgtcagctccagccattagcctggatagcagcagttaaaagccgaactgaactggaagcaggaaaaaaatcccaggcacccagcacccatccagtagtggacctgcctccctctcaacattttaactc

SEQ ID NO: 38290 - DNA, 504 bp, Chicken  19866894269194_3
gagcaagaaagctgtttctcattccagccccagatctcacagatacagccagccagctgcaattgcaacaactgtgcctaaaggtggctggcaccctcatgatgatcagtttaagacagcagagcagtgggagatcagcccgtgctcctcctgcaggcctcaccgtcagctccagccattagcctggatagcagcagttaaaagccgaactgaactggaagcaggaaaaaaatcccaggcacccagcacccatccagtagtggacctgcctccctctcaacattttaactccagatagcrcaagctactgctttcggcctgcacaagataaaaggtgcgacaagccgacctgcggttgccatggagaccaaaatctttaccagcgccatggtaacggactacaggatgtgctatgaaaagcttgctgcacacccgagttgagctttttcgtatttttaaaccaattaactgagagcacagttaaattagtttctgtttaaagaa

SEQ ID NO: 38291 - DNA, 600 bp, Chicken  19866894269195_1
agctgggtgtttaatgccccgaacaatttgatgcatgactgcatgaacttgcacagagaactctctggaggttttcctctcgcagacacagcacatcacccatcagtggctcaaccaaggcagccctgatatttttcacagctccctctcccaagcccctgtgtgcttaacagctgttgcacaacaggtcgttttcagcctatttttgttaacctgcccatcctgttctactcccgagacccaaacttgggatcaccatctcagctctttccttcacttcaggactttgtttctgtttcwaattgataacaattgtctgcaaaaaaatgacagaaaacttcaggttccagtccagcacctccctgagttttgggatgttctgggagggtggctccttccttcctttggtgttaatttaacatctgtggttgaggcgagatgaagtgctgggccctcagcagcccagcagaaggggccttggctgtgctgtgtgttcggctggtttgccaaaaaaaagaacaggataccaggaggcactgttaattttggttgaaatgttagcgtttctgttttctcagtgctgccagtggcttgcagcgg

SEQ ID NO: 38292 - DNA, 600 bp, Chicken  19866894269201_1
gaggacagtaatgctttgattcctttgagggtgactcttggaaatgagagtttctattgatgcagcccttctgcagaatgcagatgtagccagaactaaaagactcactatgaactgtagcaaatgcatgcgtaaaaatacttctttgtctcttctgctttcggtcatccacatactcacatacactgtctttgcagctacaaggtcattgttttatagtcaagtgatccaagggattgatttattactgatgaagtgaggtttgattgatttttgatttacgtgaagacgggaaagaayggggagtgggaggtggaaggcagctgcagagtcaagtacaaagcaacctgtaactatgaaactcacaacaagtgagccaaacactaccataactcacatcagttcatatggctggctgtaacagggcagcagtagctaattgcacccctgaatcagtgttacactcagcatttccttaatctgtggaactgtgccctcagtgaggagggacctcattgatgtacttyttgacaagaatgcttcaggagctgacctgaaaaaaggagtcacagaagctatacagtgtggataagctgggtt

SEQ ID NO: 38293 - DNA, 600 bp, Chicken  19866894269201_2
tccaagggattgatttattactgatgaagtgaggtttgattgatttttgatttacgtgaagacgggaaagaayggggagtgggaggtggaaggcagctgcagagtcaagtacaaagcaacctgtaactatgaaactcacaacaagtgagccaaacactaccataactcacatcagttcatatggctggctgtaacagggcagcagtagctaattgcacccctgaatcagtgttacactcagcatttccttaatctgtggaactgtgccctcagtgaggagggacctcattgatgtacttyttgacaagaatgcttcaggagctgacctgaaaaaaggagtcacagaagctatacagtgtggataagctgggttcaggatagggcatttcttcagatatacccatgttggcttgaatccatcattgcctgtcctgtcagcttgaagcagtatgctctgacaaatgggttggctatgatctttcctggaaatactgcatgacatgagggatttggttgcagctgagcagcaggttgttaatacctggtgggaattgtcaccagccatgctctagtggcctcccccaggtctgtgttatgcaa

SEQ ID NO: 38294 - DNA, 599 bp, Chicken  19866894269209_1
  misc_feature (1)..(55): n is any nucleotide
nnnnnnnnnnnnnnnnnnnnnnnnnnnnnnnnnnnnnnnnnnnnnnnnnnnnnnntgacaaatacattctttttctaagcttttctgcccattgccaccccagggctcagtcccacagcagctgggggctcaccagcccctaacatctcaccataaggacttaacctggggcgaggagccctgaaggggctgagcagcatggtaaggacctgtgtgttgttaatgtgctgctacgtagatctctggggagccctgacatgcaggggtttggtttctttgcctggtagctgtgtctatacragtatcctcatccaaatctacttgcatctatgctcctgcaacgtataaagcagcataactttgctgagctctgggtgagtaaatttaattctacctccccctagtgattgcattggtgcatgaagagaaaggaaaarccgagctcagcaaaacttctttattctcttccaagcaaacaaaacacatatgtggggagcagtgcagcgatgttgagaggagagatggtaaaatagactgtagggtccagatgtttgtgcctatgttctgttctctagggaacctgctctagctgggggttg

SEQ ID NO: 38295 - DNA, 600 bp, Chicken  19866894269209_2
ccctaacatctcaccataaggacttaacctggggcgaggagccctgaaggggctgagcagcatggtaaggacctgtgtgttgttaatgtgctgctacgtagatctctggggagccctgacatgcaggggtttggtttctttgcctggtagctgtgtctatacragtatcctcatccaaatctacttgcatctatgctcctgcaacgtataaagcagcataactttgctgagctctgggtgagtaaatttaattctacctccccctagtgattgcattggtgcatgaagagaaaggaaaarccgagctcagcaaaacttctttattctcttccaagcaaacaaaacacatatgtggggagcagtgcagcgatgttgagaggagagatggtaaaatagactgtagggtccagatgtttgtgcctatgttctgttctctagggaacctgctctagctgggggttggattaggagacctccagaggccccttcccatcctctatgaccctgtgattctgcaaagsagcgtaaagattcccaatggtgactgtaaaccacrtcaggtgcactggragtgcccgcctctgcacacagccagggcag

SEQ ID NO: 38296 - DNA, 556 bp, Chicken  19866894269209_3
ctttgctgagctctgggtgagtaaatttaattctacctccccctagtgattgcattggtgcatgaagagaaaggaaaarccgagctcagcaaaacttctttattctcttccaagcaaacaaaacacatatgtggggagcagtgcagcgatgttgagaggagagatggtaaaatagactgtagggtccagatgtttgtgcctatgttctgttctctagggaacctgctctagctgggggttggattaggagacctccagaggccccttcccatcctctatgaccctgtgattctgcaaagsagcgtaaagattcccaatggtgactgtaaaccacrtcaggtgcactggragtgcccgcctctgcacacagccagggcagcactggctctgtggctggcagaacactgccacgggtccacggctttgtgtgtaagactgggctggtgccatctgggagctcctgggggctttgcaggtggtttccccaaaatggcttccctgcccccattaaaggggctggggtctggtcccacactgcctcttgtagggaaaccgg

SEQ ID NO: 38297 - DNA, 521 bp, Chicken  19866894269209_4
cctccccctagtgattgcattggtgcatgaagagaaaggaaaarccgagctcagcaaaacttctttattctcttccaagcaaacaaaacacatatgtggggagcagtgcagcgatgttgagaggagagatggtaaaatagactgtagggtccagatgtttgtgcctatgttctgttctctagggaacctgctctagctgggggttggattaggagacctccagaggccccttcccatcctctatgaccctgtgattctgcaaagsagcgtaaagattcccaatggtgactgtaaaccacrtcaggtgcactggragtgcccgcctctgcacacagccagggcagcactggctctgtggctggcagaacactgccacgggtccacggctttgtgtgtaagactgggctggtgccatctgggagctcctgggggctttgcaggtggtttccccaaaatggcttccctgcccccattaaaggggctggggtctggtcccacactgcctcttgtagggaaaccgg

SEQ ID NO: 38298 - DNA, 507 bp, Chicken  19866894269209_5
ttgcattggtgcatgaagagaaaggaaaarccgagctcagcaaaacttctttattctcttccaagcaaacaaaacacatatgtggggagcagtgcagcgatgttgagaggagagatggtaaaatagactgtagggtccagatgtttgtgcctatgttctgttctctagggaacctgctctagctgggggttggattaggagacctccagaggccccttcccatcctctatgaccctgtgattctgcaaagsagcgtaaagattcccaatggtgactgtaaaccacrtcaggtgcactggragtgcccgcctctgcacacagccagggcagcactggctctgtggctggcagaacactgccacgggtccacggctttgtgtgtaagactgggctggtgccatctgggagctcctgggggctttgcaggtggtttccccaaaatggcttccctgcccccattaaaggggctggggtctggtcccacactgcctcttgtagggaaaccgg

SEQ ID NO: 38299 - DNA, 600 bp, Chicken  19866894269224_1
ccagctctgcagcaaagcatgtctgccattgagctcatcagagaacggaaaaacaggaaaacaaactctggcccgattccgacagaaaatgggccgaagaagcctgaaataccaaacatgctagaaatcctcaaagacatgaacagtgtgaaactacgctcggtgaaaaagtaagatgtttgtttatatttacttacttttgcattaacagtttgcttttatggctgagaactgttctagcttgggggagatgacagtgtaacatttgacaaacgagaatagaaatgaattcatgacttyttaatctttgggctacgctgaggtttctcawttacctttccagatcatcrggagatacaaaaccgaaggtagctgaccccacagatcctgcagctttaatagcagaagcactcaaaaagaagtttgcttaccgataccgaagggatagccaaagtgaaagtgacaaagtaattcccaagtctgaaacgaacacraagaccgaagtggtgctggtgagtattgtgcttctgattgcttggacaaatcatcatttgctcgttgcctggtaagcccaatamatctttctgccaacagacagaa

SEQ ID NO: 38300 - DNA, 600 bp, Chicken  19866894269224_2
agctcatcagagaacggaaaaacaggaaaacaaactctggcccgattccgacagaaaatgggccgaagaagcctgaaataccaaacatgctagaaatcctcaaagacatgaacagtgtgaaactacgctcggtgaaaaagtaagatgtttgtttatatttacttacttttgcattaacagtttgcttttatggctgagaactgttctagcttgggggagatgacagtgtaacatttgacaaacgagaatagaaatgaattcatgacttyttaatctttgggctacgctgaggtttctcawttacctttccagatcatcrggagatacaaaaccgaaggtagctgaccccacagatcctgcagctttaatagcagaagcactcaaaaagaagtttgcttaccgataccgaagggatagccaaagtgaaagtgacaaagtaattcccaagtctgaaacgaacacraagaccgaagtggtgctggtgagtattgtgcttctgattgcttggacaaatcatcatttgctcgttgcctggtaagcccaatamatctttctgccaacagacagaaataccaaggaattaacaaacctacccacaaa

SEQ ID NO: 38301 - DNA, 600 bp, Chicken  19866894269224_3
aaacaggaaaacaaactctggcccgattccgacagaaaatgggccgaagaagcctgaaataccaaacatgctagaaatcctcaaagacatgaacagtgtgaaactacgctcggtgaaaaagtaagatgtttgtttatatttacttacttttgcattaacagtttgcttttatggctgagaactgttctagcttgggggagatgacagtgtaacatttgacaaacgagaatagaaatgaattcatgacttyttaatctttgggctacgctgaggtttctcawttacctttccagatcatcrggagatacaaaaccgaaggtagctgaccccacagatcctgcagctttaatagcagaagcactcaaaaagaagtttgcttaccgataccgaagggatagccaaagtgaaagtgacaaagtaattcccaagtctgaaacgaacacraagaccgaagtggtgctggtgagtattgtgcttctgattgcttggacaaatcatcatttgctcgttgcctggtaagcccaatamatctttctgccaacagacagaaataccaaggaattaacaaacctacccacaaaactccatgaagtactgctg

SEQ ID NO: 38302 - DNA, 600 bp, Chicken  19866894269224_4
tacttttgcattaacagtttgcttttatggctgagaactgttctagcttgggggagatgacagtgtaacatttgacaaacgagaatagaaatgaattcatgacttyttaatctttgggctacgctgaggtttctcawttacctttccagatcatcrggagatacaaaaccgaaggtagctgaccccacagatcctgcagctttaatagcagaagcactcaaaaagaagtttgcttaccgataccgaagggatagccaaagtgaaagtgacaaagtaattcccaagtctgaaacgaacacraagaccgaagtggtgctggtgagtattgtgcttctgattgcttggacaaatcatcatttgctcgttgcctggtaagcccaatamatctttctgccaacagacagaaataccaaggaattaacaaacctacccacaaaactccatgaagtactgctgatatgttaggatttgtggcagtcacattttgtttctagtatcagctctcaggattgtgcgctggtttggctcaagatttaaaaatcccttctcaagttttcttctttaaacaagaatctcctgctgcaatgaaatgtggtatgg

SEQ ID NO: 38303 - DNA, 600 bp, Chicken  19866894269224_5
atagaaatgaattcatgacttyttaatctttgggctacgctgaggtttctcawttacctttccagatcatcrggagatacaaaaccgaaggtagctgaccccacagatcctgcagctttaatagcagaagcactcaaaaagaagtttgcttaccgataccgaagggatagccaaagtgaaagtgacaaagtaattcccaagtctgaaacgaacacraagaccgaagtggtgctggtgagtattgtgcttctgattgcttggacaaatcatcatttgctcgttgcctggtaagcccaatamatctttctgccaacagacagaaataccaaggaattaacaaacctacccacaaaactccatgaagtactgctgatatgttaggatttgtggcagtcacattttgtttctagtatcagctctcaggattgtgcgctggtttggctcaagatttaaaaatcccttctcaagttttcttctttaaacaagaatctcctgctgcaatgaaatgtggtatggtaaatacttgattcctgtgggctcataccagaaacaaatgtgaactgtgtttgcctgttactaccaaccttaaccactgtggga

SEQ ID NO: 38304 - DNA, 600 bp, Chicken  19866894269248_1
gatagaagcattaattaacaactgctccttgcaatgtttgattttttttttttctcaacatgcacagagttatttttaaaccatttgctgcatactcctaaatagatctgcttttagacttgctgatggagcagcagttcaggagtggcatatgcagacatgtctgttatggggcagcatgactttaatcatacatgtacaccttacagtgaagctcctgatgttctgctgccccacatctatatggtgaggcagctggacactgcagcttcagtgcttttgttgtggtgctggcagtgkccctgctgcttttcagctgtcacaggcaacatgagtacatgtgcatgtgcgttcctgtaacactccataggtataagagggcaataaagtaaaattgcttggaaaagagttctgaaatttctgggaacttgggttgtatctcttgctgttagtgtgagaagctgttcacactgctgcgccgtgcctcagggctcagccctgccccatccatcaagactgagagactccccagcactgcagatgaatctctgttcactgtttctgccttgaccttaacagtcccagcttttatagataact

SEQ ID NO: 38305 - DNA, 599 bp, Chicken  19866894269250_1
  misc_feature (1)..(74): n is any nucleotide
nnnnnnnnnnnnnnnnnnnnnnnnnnnnnnnnnnnnnnnnnnnnnnnnnnnnnnnnnnnnnnnnnnnnnnnnnncctggattttattccggtttggtcactgactttaacaggctgaagagactgcctctttgtctgttccccctcctccctcccataaataattatagtcacaactttttataaataacatttgcactgcaggaatattacactaacctgcagacacgctgtcaggtttaactaacatttaaagagcacactgagcagggcaaagtactgttaaaagtcatcaagtgcygggttttgagctgtacagaaacagcactgctttgagctyctcagttttatattttacagccacgctcttatcaaaacgtgccgcataactgccagcttcagagttcccrtgcatgagccccagctgaggtccygccacactccctgctaagcgtttcctcttaggctgttgctctgcacacattagagggcattggctttgatgaagaaagcgtgaggattattaaaaggactttctactaaaaggacttattactaaaaaaggactttctttgcaattcttacaaggaaagcraagaa

SEQ ID NO: 38306 - DNA, 599 bp, Chicken  19866894269250_2
  misc_feature (1)..(35): n is any nucleotide
nnnnnnnnnnnnnnnnnnnnnnnnnnnnnnnnnnncctggattttattccggtttggtcactgactttaacaggctgaagagactgcctctttgtctgttccccctcctccctcccataaataattatagtcacaactttttataaataacatttgcactgcaggaatattacactaacctgcagacacgctgtcaggtttaactaacatttaaagagcacactgagcagggcaaagtactgttaaaagtcatcaagtgcygggttttgagctgtacagaaacagcactgctttgagctyctcagttttatattttacagccacgctcttatcaaaacgtgccgcataactgccagcttcagagttcccrtgcatgagccccagctgaggtccygccacactccctgctaagcgtttcctcttaggctgttgctctgcacacattagagggcattggctttgatgaagaaagcgtgaggattattaaaaggactttctactaaaaggacttattactaaaaaaggactttctttgcaattcttacaaggaaagcraagaacattcaaastgaaagtggcagaagtgttcttaggaagtt

SEQ ID NO: 38307 - DNA, 600 bp, Chicken  19866894269250_3
caggctgaagagactgcctctttgtctgttccccctcctccctcccataaataattatagtcacaactttttataaataacatttgcactgcaggaatattacactaacctgcagacacgctgtcaggtttaactaacatttaaagagcacactgagcagggcaaagtactgttaaaagtcatcaagtgcygggttttgagctgtacagaaacagcactgctttgagctyctcagttttatattttacagccacgctcttatcaaaacgtgccgcataactgccagcttcagagttcccrtgcatgagccccagctgaggtccygccacactccctgctaagcgtttcctcttaggctgttgctctgcacacattagagggcattggctttgatgaagaaagcgtgaggattattaaaaggactttctactaaaaggacttattactaaaaaaggactttctttgcaattcttacaaggaaagcraagaacattcaaastgaaagtggcagaagtgttcttaggaagttagttccccctccttctcccgtatctatttcagattagcttatgctttccttgcaaaagaaaatctaagaca

SEQ ID NO: 38308 - DNA, 600 bp, Chicken  19866894269250_4
tctgttccccctcctccctcccataaataattatagtcacaactttttataaataacatttgcactgcaggaatattacactaacctgcagacacgctgtcaggtttaactaacatttaaagagcacactgagcagggcaaagtactgttaaaagtcatcaagtgcygggttttgagctgtacagaaacagcactgctttgagctyctcagttttatattttacagccacgctcttatcaaaacgtgccgcataactgccagcttcagagttcccrtgcatgagccccagctgaggtccygccacactccctgctaagcgtttcctcttaggctgttgctctgcacacattagagggcattggctttgatgaagaaagcgtgaggattattaaaaggactttctactaaaaggacttattactaaaaaaggactttctttgcaattcttacaaggaaagcraagaacattcaaastgaaagtggcagaagtgttcttaggaagttagttccccctccttctcccgtatctatttcagattagcttatgctttccttgcaaaagaaaatctaagacatacacagacactatggagcaggct

SEQ ID NO: 38309 - DNA, 549 bp, Chicken  19866894269250_5
agtgcygggttttgagctgtacagaaacagcactgctttgagctyctcagttttatattttacagccacgctcttatcaaaacgtgccgcataactgccagcttcagagttcccrtgcatgagccccagctgaggtccygccacactccctgctaagcgtttcctcttaggctgttgctctgcacacattagagggcattggctttgatgaagaaagcgtgaggattattaaaaggactttctactaaaaggacttattactaaaaaaggactttctttgcaattcttacaaggaaagcraagaacattcaaastgaaagtggcagaagtgttcttaggaagttagttccccctccttctcccgtatctatttcagattagcttatgctttccttgcaaaagaaaatctaagacatacacagacactatggagcaggcttagcagcaattagagaaaacaggcctgcttttctcttgaagatgtttttcagtattaacacaacatagctatgggaaaagatttagtcctagacttaaaaaaagccctta

SEQ ID NO: 38310 - DNA, 535 bp, Chicken  19866894269250_6
agctgtacagaaacagcactgctttgagctyctcagttttatattttacagccacgctcttatcaaaacgtgccgcataactgccagcttcagagttcccrtgcatgagccccagctgaggtccygccacactccctgctaagcgtttcctcttaggctgttgctctgcacacattagagggcattggctttgatgaagaaagcgtgaggattattaaaaggactttctactaaaaggacttattactaaaaaaggactttctttgcaattcttacaaggaaagcraagaacattcaaastgaaagtggcagaagtgttcttaggaagttagttccccctccttctcccgtatctatttcagattagcttatgctttccttgcaaaagaaaatctaagacatacacagacactatggagcaggcttagcagcaattagagaaaacaggcctgcttttctcttgaagatgtttttcagtattaacacaacatagctatgggaaaagatttagtcctagacttaaaaaaagccctta

SEQ ID NO: 38311 - DNA, 599 bp, Chicken  19866894269251_1
  misc_feature (1)..(27): n is any nucleotide
nnnnnnnnnnnnnnnnnnnnnnnnnnncaaggatcggctgtaacctgctgcaggtccacagggtttgttctctgtctggctatgactcacaaatacttagaacattgcaaaattatgtctctaataaaattaaaaattaatacctatatatatatctttctgaggatttaacagttcctatctgttggtcaaccttctcagtccattttcatttcagttcatgctaggaaagggaatgagactactaggaaacactggaaaattattgggctaggagagttagaaagctaaatagggttrtatcagatcatccaatctcacctgagcagacagaagaaaaacataatcatgagaggtaataagcaatgaaaatgtgttgatttgatgtgtcctgccaagcaccttccagcttaggggctctgaaactgtggctgctgaatttagtctccactttcccttcagccggttcctttctcttgactattcacttaatgcacatttgtcacrcagactaaaacttccactgggtgtgatacactggaagaggccttattaagttccacagagaggaaaagtgagaaatcacaagccagctctgt

SEQ ID NO: 38312 - DNA, 600 bp, Chicken  19866894269251_2
ttcatttcagttcatgctaggaaagggaatgagactactaggaaacactggaaaattattgggctaggagagttagaaagctaaatagggttrtatcagatcatccaatctcacctgagcagacagaagaaaaacataatcatgagaggtaataagcaatgaaaatgtgttgatttgatgtgtcctgccaagcaccttccagcttaggggctctgaaactgtggctgctgaatttagtctccactttcccttcagccggttcctttctcttgactattcacttaatgcacatttgtcacrcagactaaaacttccactgggtgtgatacactggaagaggccttattaagttccacagagaggaaaagtgagaaatcacaagccagctctgtttacaacccattttcctcatgcagtgtttgcttctctcaatatgagtctatggtagtgtgaattagaatcttctgtaacatatgtataccattctgcaagattgcttcccacccagcagttcttctacctgatgttagtygttcccaatgagtggcacatttgtctaaaaagctgtcccgtttttctttcagagcattgttgaaaact

SEQ ID NO: 38313 - DNA, 600 bp, Chicken  19866894269251_3
tttagtctccactttcccttcagccggttcctttctcttgactattcacttaatgcacatttgtcacrcagactaaaacttccactgggtgtgatacactggaagaggccttattaagttccacagagaggaaaagtgagaaatcacaagccagctctgtttacaacccattttcctcatgcagtgtttgcttctctcaatatgagtctatggtagtgtgaattagaatcttctgtaacatatgtataccattctgcaagattgcttcccacccagcagttcttctacctgatgttagtygttcccaatgagtggcacatttgtctaaaaagctgtcccgtttttctttcagagcattgttgaaaactgtggagatagatagtttttttttagttataatctctgccacagtgcttgccatccctctcagttcagtatcattttcagatttcataaagcgtatcccccaacttcaacctaatactttgtgcttgtatattgtggtagaggttaaactataggagcaggttcttcattgtcctataacacagtagtctgatttaatgcgtgcggtagtctgtgctctgggattgaatcagg

SEQ ID NO: 38314 - DNA, 599 bp, Chicken  19866894269254_1
  misc_feature (1)..(20): n is any nucleotide
nnnnnnnnnnnnnnnnnnnnaagaaaacatttctagagcttttggccgatcatgatctcacaagtccaagcttaattccagaacaaagctattctgcttcagggtcctcatcttcactcagtcaattgatataatctcaatgccttcaaccagccatggatcagatcaccgtcataacaaaaataaccctatgtcagttaagcttatatttcttcagagcaccacatgtcatttaaaacttaattcttgcggcgggtttctaggtgtaatagtcatgagtaaaaaacttcccacatatawtgctaacataatttagcatttgtactaataaagaacatataaaatgacatatgacaggaacgggagtctcacaaagcgttggttcttcctaaagtctctgatttccactcaaatttttccagttataggaaaattctaattagttcacccaacatgtggttaaggttttcccttaaaatttttaataaggatttcttggatcttcatcattacttttaattgattgcttaaaatctgaccaacacaatactcaaagattagttagtgaaggttgttgggaagaagaggctttaaaaagc

SEQ ID NO: 38315 - DNA, 600 bp, Chicken  19866894269259_1
attaacctgttcatttttagattgttccatcttaagttatcatgacacgatgcatacaaggtcagtttatagtacatataagttacttccatttgattgtgtactttaaagtttggattgtcttctcagcaaatttcattattgaacaagaagtgaagatgtagatcgccagtttccagttctggtcagcactatgtcatggtctgagaataatatgcttatcatttcatcgttagtttcacaaacctgtcaattttttggatacagtagaaggaaatatcaatgatgcatgaaaatgcyccttaggaaatagtttttctgtatttaaacttagcttatgtgtatttattgtccatatgcatacaacttttccaataatctttgtgtattatggaatccaaatttaacaaaatattatagtctcaacatgtctgtagatctaaactaacattctaatcaagaattctcagtagaggtagttaaaacagttaataaatttgtgttctgtggcaagtcttcaggctggctagctttgccctagttatattaaatatttaatcgccggctcagtttttgatttgtccttgcagttaagaaaac

SEQ ID NO: 38316 - DNA, 599 bp, Chicken  19866894269263_1
  misc_feature (1)..(99): n is any nucleotide
nnnnnnnnnnnnnnnnnnnnnnnnnnnnnnnnnnnnnnnnnnnnnnnnnnnnnnnnnnnnnnnnnnnnnnnnnnnnnnnnnnnnnnnnnnnnnnnnnnntagattttgatgtattttcatctaagtatatttatacttaatatcagtattagttgaaatccagcacagtatcaataaatgcattcagtccattgttgtagtcccatgtctggcttcaaagataaaattataggtaggaataaatagatttagaacttaataggttgatttttaaaagtataatggccactgtcatggttytgtgatttttttaattggtattccacatcataacatcatgtagtgcactgggaattaaagagttaatgctccaattctgggcactcgtccaaaagagaactatattccccagaagactgttcgctgttctgttatgatccctgctcagggggaacacatataaggccaaagtaggtcacctgacatccctcttttcaatcatcaggttctcttgctgctgctcgtcctgaccacatgccataagtgtaaggccttcagctttttagacactctttctctcattatatttattagcttca

SEQ ID NO: 38317 - DNA, 599 bp, Chicken  19866894269276_1
  misc_feature (1)..(40): n is any nucleotide
nnnnnnnnnnnnnnnnnnnnnnnnnnnnnnnnnnnnnnnncgtccccacgggcacctccacgggtccccctctggcattgccatgggatgctcacggcccggggttgtcgtgcagccagctgccccggggctctacctcctcccaggcatctcaagtgcatcctgtgcaggaaatgagattgaagaagattttttccgggccctgcccactaattgtatctgaaggaggaaatagccctcttgctaatgattacatgtaatctgccatgtaggcacagcaaaacgggcagagagctgcaractgttcccagaagaagcagcccctgcccacagcagtgagcaaacccatgctgcactgctgcccctggtgcttgtgggcccccccccctccagggttgtgtctgctcacagcrcccagctgggcgaggttagacaggcacaggggaaaaaagccctggcagacatttcagatgcttaaatacagtgttcagagaaagcaaatgagtcatttggactggaataaaaacacaaaaattataattctctgcttcaatgctatcaaaacgatttcccaataaaacatgtggctccggtagcag

SEQ ID NO: 38318 - DNA, 600 bp, Chicken  19866894269276_2
agccagctgccccggggctctacctcctcccaggcatctcaagtgcatcctgtgcaggaaatgagattgaagaagattttttccgggccctgcccactaattgtatctgaaggaggaaatagccctcttgctaatgattacatgtaatctgccatgtaggcacagcaaaacgggcagagagctgcaractgttcccagaagaagcagcccctgcccacagcagtgagcaaacccatgctgcactgctgcccctggtgcttgtgggcccccccccctccagggttgtgtctgctcacagcrcccagctgggcgaggttagacaggcacaggggaaaaaagccctggcagacatttcagatgcttaaatacagtgttcagagaaagcaaatgagtcatttggactggaataaaaacacaaaaattataattctctgcttcaatgctatcaaaacgatttcccaataaaacatgtggctccggtagcagaattgctcagygtytccaaggcaagtgcacttgtaagatctcattctgattagcaccaaaccccagacctccgagtgcccaaatcccccccagtacccacagcgtggtgctgct

SEQ ID NO: 38319 - DNA, 600 bp, Chicken  19866894269276_3
gaagaagcagcccctgcccacagcagtgagcaaacccatgctgcactgctgcccctggtgcttgtgggcccccccccctccagggttgtgtctgctcacagcrcccagctgggcgaggttagacaggcacaggggaaaaaagccctggcagacatttcagatgcttaaatacagtgttcagagaaagcaaatgagtcatttggactggaataaaaacacaaaaattataattctctgcttcaatgctatcaaaacgatttcccaataaaacatgtggctccggtagcagaattgctcagygtytccaaggcaagtgcacttgtaagatctcattctgattagcaccaaaccccagacctccgagtgcccaaatcccccccagtacccacagcgtggtgctgctaccatgggaacgccctgcccatggtagggcacccacccacacaggtggtgtgtggatcagagctatgggacccttccacccacacmtgggagctgtggggtgggggagcttgcacaacagctccatcctcagctggtgagacagcccaaacccagttggccactgtgctccatccrcatgcagagcccaatgcttcg

SEQ ID NO: 38320 - DNA, 600 bp, Chicken  19866894269276_4
gaagcagcccctgcccacagcagtgagcaaacccatgctgcactgctgcccctggtgcttgtgggcccccccccctccagggttgtgtctgctcacagcrcccagctgggcgaggttagacaggcacaggggaaaaaagccctggcagacatttcagatgcttaaatacagtgttcagagaaagcaaatgagtcatttggactggaataaaaacacaaaaattataattctctgcttcaatgctatcaaaacgatttcccaataaaacatgtggctccggtagcagaattgctcagygtytccaaggcaagtgcacttgtaagatctcattctgattagcaccaaaccccagacctccgagtgcccaaatcccccccagtacccacagcgtggtgctgctaccatgggaacgccctgcccatggtagggcacccacccacacaggtggtgtgtggatcagagctatgggacccttccacccacacmtgggagctgtggggtgggggagcttgcacaacagctccatcctcagctggtgagacagcccaaacccagttggccactgtgctccatccrcatgcagagcccaatgcttcggtg

SEQ ID NO: 38321 - DNA, 493 bp, Chicken  19866894269276_5
aatgagtcatttggactggaataaaaacacaaaaattataattctctgcttcaatgctatcaaaacgatttcccaataaaacatgtggctccggtagcagaattgctcagygtytccaaggcaagtgcacttgtaagatctcattctgattagcaccaaaccccagacctccgagtgcccaaatcccccccagtacccacagcgtggtgctgctaccatgggaacgccctgcccatggtagggcacccacccacacaggtggtgtgtggatcagagctatgggacccttccacccacacmtgggagctgtggggtgggggagcttgcacaacagctccatcctcagctggtgagacagcccaaacccagttggccactgtgctccatccrcatgcagagcccaatgcttcggtgtactcagtactaccagcaggcacagacctgagtgccagcccaaggcagagcaggggcaccaagagcacagagcttgcag

SEQ ID NO: 38322 - DNA, 403 bp, Chicken  19866894269276_6
ccggtagcagaattgctcagygtytccaaggcaagtgcacttgtaagatctcattctgattagcaccaaaccccagacctccgagtgcccaaatcccccccagtacccacagcgtggtgctgctaccatgggaacgccctgcccatggtagggcacccacccacacaggtggtgtgtggatcagagctatgggacccttccacccacacmtgggagctgtggggtgggggagcttgcacaacagctccatcctcagctggtgagacagcccaaacccagttggccactgtgctccatccrcatgcagagcccaatgcttcggtgtactcagtactaccagcaggcacagacctgagtgccagcccaaggcagagcaggggcaccaagagcacagagcttgcag

SEQ ID NO: 38323 - DNA, 600 bp, Chicken  19866894269277_1
aacttcatgttcttcttgtgttggagtctccagaactggactcagtactccaagtggggtctcatgagagcagtgtagaggggcagaattacctccctcaacctgctggtcgtgcttctcttgatgtaatccaggttggcgttctgggctgtaagtgcatgttgctagctcctgttaaatctttcatctatcaacactcccaaattcttctcctcagggctgctctcaggccattctctgcccagcctgtatctgcactttgtattgccctgacctaggtgcaggaccttgcacttggcyttgtttaacttcatgaggttggcatgatcccacctctcaagcctgtccaggtccctctggatggcaccccttcccttgtagcatgtcagctgcaccactcaccttggtatcatctgcaaacttgctgagggtgcattcaatcccactgtccatgttgcctacaaagatgttaagtagcaccagtcccaacaccagtccctgaggaacgccacttgtcacaggtctccacttggacactgagccactgaccgcaactctctgagtgtgaccatccagccaattccttatccagcaagtgat

SEQ ID NO: 38324 - DNA, 600 bp, Chicken  19866894269298_1
tgtaggagatggtccgagataaggcactggtctgaggaaaagcactgttagtttactgccttcactcctgatgaaacctcagaggaagctattgaaaaaacaaggctgatggagactatgcttaaggcaggagctgcagcccttcccatctaagcaccaaatccagcacttgcagcagcaaagcccttggaaagctttcttgcagcaagcacagcagccatataactgcctgccaaccagctgcacatggaggaaagtttctagccagacacctccagcaagtatggggttggaagcatrcaggctgtgtatgcctgacccccagcaatcccaccctgcagctcagataagtcagcacagatattcaccagctgcccagggctttgctttcaatagctaggaagtgcagagccttggaaggaggcatcctcaggagtgaagctttcaggaatgcagtgcagacaggagggggaggaagccagactatctcctggccttcaccatgctgcagctctccagcacttcaaaggggcagcaactacagctgcagcaacagctggaccacacgctgctcactgctcacccacagcccaagggaag

SEQ ID NO: 38325 - DNA, 600 bp, Chicken  19866894269308_1
cagctcgtcaatcttttcctgccattgggagtttctttaattgcctataaagtatgagcatttaaagtctcacataagaggcttaggtctaaatgtatcacagttttatagctgggagccaagatatggttcccagtaagagttggactcaaaaatatagcccataagggattaaaggctaaacatagtaaatgaaagtgagttgagtgtgaaccagaatttcagtggcatccttttttcttcagagtgacttgaaatataatgaaacttaatttccattttccagttctcaaaaaagayaatgttttgtgttctggaactgtaatttttcctcagtgaacatgcatggtaaaaagccgtgtggaactactacccttgaatggtagggcattttataaaaagatgatctgtattccagaaattgcactgtaaacaaaagctaccccatgcatttttttttaaggcacgtgatgtgccttattaggtcaggtcgcatcaagacaagtcacaacagaaagcctgacagaatttaatcagaccatacgatttcttattgtaaatgcttatatacatatgggattttctttttccttcctccat

SEQ ID NO: 38326 - DNA, 600 bp, Chicken  19866894269312_1
agagcaaaaataactttaaaatgtgactgtataaattaaacaatatatcaatcagtaatggatgggccattaaggaattccacacacattgctagagagagtcatcctggactttgcaactcacaagaaaggggaacaagaggaacatgaagatttggaatattcaagggcaatggtggaactgtgcaagctgatacataaaagaacattcagagaaagggaactgggaaagaacaaagaagggaatcaacaaaaaagcatcaatgaggcttgtcagtgcacttctccggatgagccttkcacatgatcaccacagtctctactaacctcttattaaaatttttcttaactactgctgtgtataatttcatctctatctcatgtgtgtaagggctgtgcgaactatttgctactgtgagtgaatttgaggtcagcaactggacatgatggtgtaggcactcagggctaatgctatcagttactgtagggacaggggatttcagtgccagccatcatcacatgggaagccacaaaggatcactttggaaagagacgctatgtgaagcaggagcagagaatgactatggtagagcagcaggg

SEQ ID NO: 38327 - DNA, 600 bp, Chicken  19866894269314_1
agcaacgtaagtccacagtgcttcagtccaaatctccatgaatgcttatagtctttatggttttactgcttctggttctaacatttacatagtaccgtcgtgttttgctttaagagatgcctgtacatggagatgctaggtaatccacaacataagctagcaatgaagaagcacagcattagcgtcctttaggagagtgttttggtggaaaaaaaataataatttcctaagaaaacagcattggagggggcagggagaatctagtaaataataccaccagtgcaggaggatagcatgcayttcacacaaggtgttaataaaaatgggaaagtgtttcacgtgtgattctgtaagtaacctaggacaaaggtaacyagagctgaaaactttaaaagatgcaaaaatgtcatattatcccaactgtaacttttagctttagatcagtttttaactacgtcacccagcagaatgcctgtaattgtgtcattgaatgagcrcatgggagaatcttaaaagtaacaagcatagggtacccaaaagcaccagtgctattttataactggacaagaaaatggctggtgttactgtgcgttgtactga

SEQ ID NO: 38328 - DNA, 600 bp, Chicken  19866894269314_2
ttctaacatttacatagtaccgtcgtgttttgctttaagagatgcctgtacatggagatgctaggtaatccacaacataagctagcaatgaagaagcacagcattagcgtcctttaggagagtgttttggtggaaaaaaaataataatttcctaagaaaacagcattggagggggcagggagaatctagtaaataataccaccagtgcaggaggatagcatgcayttcacacaaggtgttaataaaaatgggaaagtgtttcacgtgtgattctgtaagtaacctaggacaaaggtaacyagagctgaaaactttaaaagatgcaaaaatgtcatattatcccaactgtaacttttagctttagatcagtttttaactacgtcacccagcagaatgcctgtaattgtgtcattgaatgagcrcatgggagaatcttaaaagtaacaagcatagggtacccaaaagcaccagtgctattttataactggacaagaaaatggctggtgttactgtgcgttgtactgaggaaatgctcattggattaaaggcatacattcttgagggaagagaaagcattccttaaatgttttcctcggtacc

SEQ ID NO: 38329 - DNA, 600 bp, Chicken  19866894269314_3
tgttttggtggaaaaaaaataataatttcctaagaaaacagcattggagggggcagggagaatctagtaaataataccaccagtgcaggaggatagcatgcayttcacacaaggtgttaataaaaatgggaaagtgtttcacgtgtgattctgtaagtaacctaggacaaaggtaacyagagctgaaaactttaaaagatgcaaaaatgtcatattatcccaactgtaacttttagctttagatcagtttttaactacgtcacccagcagaatgcctgtaattgtgtcattgaatgagcrcatgggagaatcttaaaagtaacaagcatagggtacccaaaagcaccagtgctattttataactggacaagaaaatggctggtgttactgtgcgttgtactgaggaaatgctcattggattaaaggcatacattcttgagggaagagaaagcattccttaaatgttttcctcggtaccctggattatcacctcctttttgagacagaagcagtgcttcttttcagcctgtctgctgcrattgggcaagagtagaaggatataggtattgaggtctgtttcaaattaagcctttaatgccc

SEQ ID NO: 38330 - DNA, 600 bp, Chicken  19866894269314_4
ttagatcagtttttaactacgtcacccagcagaatgcctgtaattgtgtcattgaatgagcrcatgggagaatcttaaaagtaacaagcatagggtacccaaaagcaccagtgctattttataactggacaagaaaatggctggtgttactgtgcgttgtactgaggaaatgctcattggattaaaggcatacattcttgagggaagagaaagcattccttaaatgttttcctcggtaccctggattatcacctcctttttgagacagaagcagtgcttcttttcagcctgtctgctgcrattgggcaagagtagaaggatataggtattgaggtctgtttcaaattaagcctttaatgccccatcccccctaaagcagtgctgtgagtattaagctcccagtaactgtatttcaaaactgtgtgcatatttctctataaatacatgctagactattaaagggtagaaaagggacagcattccacaatggaagaggaatgaagcattaaagcaagttgctgtctccactgtttggcatcgcaactgtgtggtgaaggttaactcacaaattataacatccatctgtataaatacaggtct

SEQ ID NO: 38331 - DNA, 600 bp, Chicken  19866894269321_1
tgaccaatgcacaggagttggggggccatgggggtgtagtccgtgctctggactgctgactctaacatgttgaatgaacttatgcagttgaataatgtacaaaccccagtgctcaggcactgcagtgcactgtcctcacagagctcggtgtctttaaggagttcaggcaggactgacaaaatactcaatgcagtcacacagaacctcgattgttttgtggtgcagcgtgtgagcttgtgtggtggtttaacccagcaggcagctcagcaccacgcagcccttccacactgctccccttcmcagggggacgggggagagagctggggagaaaagaggtaaaactcatggattggaataaaastgttcactaagagatagaaaaggagaaggagagtagttatgggtatagatatgtgtgtgtatatatataatatgaatgtatgtaacaagttgatgcacaagcaattgttcccgagcagtggaagagagagagatgaaccccattcaaaatcccttccacgtgtggccatatgttagagaatatccctttggccagtttaagtcagctgtcctcactctgttccctcccagctccttgga

SEQ ID NO: 38332 - DNA, 600 bp, Chicken  19866894269321_2
ctaacatgttgaatgaacttatgcagttgaataatgtacaaaccccagtgctcaggcactgcagtgcactgtcctcacagagctcggtgtctttaaggagttcaggcaggactgacaaaatactcaatgcagtcacacagaacctcgattgttttgtggtgcagcgtgtgagcttgtgtggtggtttaacccagcaggcagctcagcaccacgcagcccttccacactgctccccttcmcagggggacgggggagagagctggggagaaaagaggtaaaactcatggattggaataaaastgttcactaagagatagaaaaggagaaggagagtagttatgggtatagatatgtgtgtgtatatatataatatgaatgtatgtaacaagttgatgcacaagcaattgttcccgagcagtggaagagagagagatgaaccccattcaaaatcccttccacgtgtggccatatgttagagaatatccctttggccagtttaagtcagctgtcctcactctgttccctcccagctccttggatcctttgctgagaacagccttggctctgtatgacactgcttagcagcagctgtaaacatca

SEQ ID NO: 38333 - DNA, 600 bp, Chicken  19866894269330_1
ctgctgaaacctgggtctgaggtctgacctggcaactcatggctttatccttgatttaatttgttttatttatccttattctatttatttttaatatttaagagtataatttcagattcaaatgtagagaaaggaatgtttgtgtgtgtggaaaaacaggcagagaaatctttctcttcagagcagtcctgggtcagcttcagtcaatctggattttctctttacttttgatttgcttcctgtaggcaccatcactgaactttaaaaacatgaattctacaaatgcacccaggggagttyttcaagatgwtgtgccctgagttataaagccacactgtatatatgttttttttttcacattgacatttattttcttgtaattgctctttgttgatatcttcctacccttctagatcctggatttaaagttatgaggcaaatagaaagcagaaatcatgagaacttgtgtgtttgttatccgcactcgctttccatatcagagttttcagggtgagatgtggtgctattctggctggtgtttgatggataacgagtaagtgggctcaggtgcagcgtgtgatggtgagcctttctggttcc

SEQ ID NO: 38334 - DNA, 600 bp, Chicken  19866894269330_2
ctgggtctgaggtctgacctggcaactcatggctttatccttgatttaatttgttttatttatccttattctatttatttttaatatttaagagtataatttcagattcaaatgtagagaaaggaatgtttgtgtgtgtggaaaaacaggcagagaaatctttctcttcagagcagtcctgggtcagcttcagtcaatctggattttctctttacttttgatttgcttcctgtaggcaccatcactgaactttaaaaacatgaattctacaaatgcacccaggggagttyttcaagatgwtgtgccctgagttataaagccacactgtatatatgttttttttttcacattgacatttattttcttgtaattgctctttgttgatatcttcctacccttctagatcctggatttaaagttatgaggcaaatagaaagcagaaatcatgagaacttgtgtgtttgttatccgcactcgctttccatatcagagttttcagggtgagatgtggtgctattctggctggtgtttgatggataacgagtaagtgggctcaggtgcagcgtgtgatggtgagcctttctggttccaccataaagc

SEQ ID NO: 38335 - DNA, 599 bp, Chicken  19866894269333_1
  misc_feature (1)..(52): n is any nucleotide
nnnnnnnnnnnnnnnnnnnnnnnnnnnnnnnnnnnnnnnnnnnnnnnnnnnntcatatacatcattattatacgtgtatagagagggtaatatatgtgtatagagagggtaatgtaagttagtactacagaagaataggaagaaaccagccatctttagactaagtatccatattcagaaatctaaacaattttcaaaggtcaccgataagcaaagctccacatgttcttacagtcttgaaatcgaaccatagctgtagcttcctacttacagaatacatagtattgcccttcccctctytccccccaaattaaaaatcctactacctcctcttattcaattctactttctttcccagtattagagaatggcatgtctacaagacacagattcaaagagactgagatagtacatggagctcatttagtctctgtaggaggaggaaagaacttacttttcaattaaatgataagacaaacatttcaaggaatcaactctttttcccttaaattatagccctaattcactcattacacataattattaaatttgctcaaagtgattagataggccttacttagaaataaatggggctgcca

SEQ ID NO: 38336 - DNA, 599 bp, Chicken  19866894269347_1
  misc_feature (1)..(244): n is any nucleotide
nnnnnnnnnnnnnnnnnnnnnnnnnnnnnnnnnnnnnnnnnnnnnnnnnnnnnnnnnnnnnnnnnnnnnnnnnnnnnnnnnnnnnnnnnnnnnnnnnnnnnnnnnnnnnnnnnnnnnnnnnnnnnnnnnnnnnnnnnnnnnnnnnnnnnnnnnnnnnnnnnnnnnnnnnnnnnnnnnnnnnnnnnnnnnnnnnnnnnnnnnnnnnnnnnnnnnnnnnnnnnnnnnnnnnnnnnnnnnnnnnnnnttctgtgggattctcaggtggaagccattaacaaaataagaactctctgtcactgygttattggtatttgctagcaatgctcaggctctggtttcacataggttttttcaaagatgcagcagtttcccccctctctgaggctacttataagcatcaaactgctcacgtgtataggaattcctctgttttattagtagaatatcagattactgatttaacaacccatcctagaaaaacctgtcttcttctcagtactgattatttgaatgtgtatagcaaagaaaaatgaatatatttgcttatgcktatatttgctttatctgttcacactgtaaaataagcaaattagtccttt

SEQ ID NO: 38337 - DNA, 600 bp, Chicken  19866894269347_2
gggattctcaggtggaagccattaacaaaataagaactctctgtcactgygttattggtatttgctagcaatgctcaggctctggtttcacataggttttttcaaagatgcagcagtttcccccctctctgaggctacttataagcatcaaactgctcacgtgtataggaattcctctgttttattagtagaatatcagattactgatttaacaacccatcctagaaaaacctgtcttcttctcagtactgattatttgaatgtgtatagcaaagaaaaatgaatatatttgcttatgcktatatttgctttatctgttcacactgtaaaataagcaaattagtccttttatgatgtatttgttattgccttaatggatctagagatttacctcagaataagcacaataagcacagtatgccatcctaataggggtttatccagcagagctttctttccagggcattccaatcacagagcagtatcaatttgacattaatagagagatactaataacaatctcaagcatgagctagaaaaccccctgctgcctaccagtgaggggaattgagttggaaatcttgagaaaaagcacaccat

SEQ ID NO: 38338 - DNA, 599 bp, Chicken  19866894269355_1
  misc_feature (1)..(51): n is any nucleotide
nnnnnnnnnnnnnnnnnnnnnnnnnnnnnnnnnnnnnnnnnnnnnnnnnnnttttttgcaggttctttgttggtgtataaagttaagagttttgtcaatttgcctccaatggaagcaggaaaagtatggagaaaaatcaccggagtccattgcaaacccattctgcatggaagaactgcagtggatctgatggcacaaaaaagcaaagctcaatgacatccaagccatccccgtgtccctcctggtggctccactcacaagctgctgagttccatttcctgtggcacaacaaatctctawtcccasagccaatttcgtggtcaggggtttagttaacctgtagccctgattcctgttgttagcaagatagctttatattatttgtcaggcaaggtgaattgaagagggtgcaaatctgtattaggttccaggcaggagctgtgtaagattgcctttgtgtcactgagaattgtgtctctgtggagcagttcctgggcagtgctcgtgcctgatgctatggaacaggcagtccttcatggtgagactgtaagcactgtgacaaaggtggagtgtgttgaaaggggtaatatcttttattg

SEQ ID NO: 38339 - DNA, 599 bp, Chicken  19866894269355_2
  misc_feature (1)..(45): n is any nucleotide
nnnnnnnnnnnnnnnnnnnnnnnnnnnnnnnnnnnnnnnnnnnnnttttttgcaggttctttgttggtgtataaagttaagagttttgtcaatttgcctccaatggaagcaggaaaagtatggagaaaaatcaccggagtccattgcaaacccattctgcatggaagaactgcagtggatctgatggcacaaaaaagcaaagctcaatgacatccaagccatccccgtgtccctcctggtggctccactcacaagctgctgagttccatttcctgtggcacaacaaatctctawtcccasagccaatttcgtggtcaggggtttagttaacctgtagccctgattcctgttgttagcaagatagctttatattatttgtcaggcaaggtgaattgaagagggtgcaaatctgtattaggttccaggcaggagctgtgtaagattgcctttgtgtcactgagaattgtgtctctgtggagcagttcctgggcagtgctcgtgcctgatgctatggaacaggcagtccttcatggtgagactgtaagcactgtgacaaaggtggagtgtgttgaaaggggtaatatcttttattgggctga

SEQ ID NO: 38340 - DNA, 600 bp, Chicken  19866894269355_3
gacagatatagttagaaaatggaagaactcttggcacacgcccacttcttcggctctataaatgtaatacagatctttacagccatataaaggcaagggagagaaacaaacaccaagccaccaccatctagcaacgcaacaagcaatgctttcaccctctgggagaaggaactgagctggagggcacatctgaagaacttaagagcccaacagttctggatttcatagagcagcacaggagttgtccctacctggacctggacctggaaaactcccatcaggattggtgtaaaatgaggytttcaatgctctgctttctatctctatgtgaaacccaaagccctacatgcctccccagccccagctgcccaccggtgggtcatcaaatcactttctctgaggacagccctgttcacgcctgatggttcacgcctgcaaaagctgtgggttggtctgaaaacctcaagttttggagaagcctgagtggggttggttttcacacattgaacttctccggagtgaaaaactaattcttttttgagcaattccactgtttatctcacagcagatgagaagtcacaatgaactagccttgagtag

SEQ ID NO: 38341 - DNA, 600 bp, Chicken  19866894269380_1
agttctgttctgctttggtacaatcgtgagaattttcagttgtaattacctggggaggggaaggtctctgaaaatggagaagttgttggatatgccttcataggttctgtctttttggtgtgtgtttccgaattgtaaacatagtttttaaactgggaaataacgtgcaagcatctgtatttaaacaaggtgaaataattggtttgagctgatatattttttgaaattaagtactttgctagtaatgaaaaaatgtccttaagaccgttcaaagctgtttttgtaatatccattgttttyctctcctcctattaaggttcttgatgcctcaacacttagctttggtacacgagtcaagtggttcgccatatgtttcattgctggcgttgcatgttctattcttgtaagtaattgttttttactctacactttattaaatattctatggtagaacatcatgtgctcaaagaatgtttgratgttgtgttgagggacatggtttaatgagaaccattggtgatgggtgaatggttggactggatgatcctgtgggtcttttccaaccttagcgattctatgattctgtgatcactgatattc

SEQ ID NO: 38342 - DNA, 506 bp, Chicken  19866894269380_2
atttaaacaaggtgaaataattggtttgagctgatatattttttgaaattaagtactttgctagtaatgaaaaaatgtccttaagaccgttcaaagctgtttttgtaatatccattgttttyctctcctcctattaaggttcttgatgcctcaacacttagctttggtacacgagtcaagtggttcgccatatgtttcattgctggcgttgcatgttctattcttgtaagtaattgttttttactctacactttattaaatattctatggtagaacatcatgtgctcaaagaatgtttgratgttgtgttgagggacatggtttaatgagaaccattggtgatgggtgaatggttggactggatgatcctgtgggtcttttccaaccttagcgattctatgattctgtgatcactgatattcgtacatcatatgtgattgtatttacttgatcctgaatcctaaattttttatccataaacttaatggactgtaaaatgtgttagt

SEQ ID NO: 38343 - DNA, 600 bp, Chicken  19866894269383_1
cagagctccccggtctatcgtgaatatcaggaattagatataccttgaaagagagatttttaaatacgatcctctaaccttggcatgttactatagaaagtgatgattgtggaaagtacaagtctgtggttagtgcaagcactttgctttctgcgatgaccttgatgacggttgatgcttttactatgtaacattctatttcagacgtagtcttggaaagtttaaaattggttgccttggataatcagctaaattatacaatggaacatgctggtgaggaagccaggacctggctctgcygatgtctgtgttgtagaggcaacttgagcratgctgccaggatttataacgatggggccctattgaagttctcaggagggtaattcatgtaatgtgtctttttgcttcacagcccagcaatgaattgaatcactgcctcatattttatgctgctgcaatttcagtggagtagtaaatgggttttgtgactttgccttgtgcctgcatcaatggcctttgtttctttgcttttgcctagggcaaattaatataactctctgctcatttgggcaacccagtgctcatctcctcacacaccac

SEQ ID NO: 38344 - DNA, 600 bp, Chicken  19866894269383_2
gaattagatataccttgaaagagagatttttaaatacgatcctctaaccttggcatgttactatagaaagtgatgattgtggaaagtacaagtctgtggttagtgcaagcactttgctttctgcgatgaccttgatgacggttgatgcttttactatgtaacattctatttcagacgtagtcttggaaagtttaaaattggttgccttggataatcagctaaattatacaatggaacatgctggtgaggaagccaggacctggctctgcygatgtctgtgttgtagaggcaacttgagcratgctgccaggatttataacgatggggccctattgaagttctcaggagggtaattcatgtaatgtgtctttttgcttcacagcccagcaatgaattgaatcactgcctcatattttatgctgctgcaatttcagtggagtagtaaatgggttttgtgactttgccttgtgcctgcatcaatggcctttgtttctttgcttttgcctagggcaaattaatataactctctgctcatttgggcaacccagtgctcatctcctcacacaccaccctggtgagcttattgcttgctttattgct

SEQ ID NO: 38345 - DNA, 600 bp, Chicken  19866894269384_1
ctgtgaaatgcgtgcaatcggcgccaatctttcatagagatcccaatctgaagccgctgggatccctgtgaaaggctaaggcgtgaggaccgaaaccgcgcttcagagcggtgcggcgctgctgtgtgggtgccctcagttcctgtggggaaggcgggaagcgcttcgctcagcgcttctcagccctgagggcagccccccgcccgccccaccgcccctcctaccttggcggcggccttcaccaccttatgcagcgccagcggccggctgggggacgcctcgtgggagttgatgtagtgmagcgctgtccacgccgcccagacggcctcgcggtggctggggttcagcgggtgcatcacgcccggaacctgcggccacgggagccgctccgccgcggcgggcgggaaggagctgaggaggaggagggcggcgggcagcgcggcgcggagccccggcatgctgctggcggagcgctgtaaggcggactccgggcgggacggtactaatagtgggggcacggccctcccttccccgcccgggaagcgctgaggggaactcctcgctcgggtcctgcccttccctcagccctcccacctgccc

SEQ ID NO: 38346 - DNA, 600 bp, Chicken  19866894269393_1
cttgaagatagcatcggtgtgcgctgtctcccaaagcgggacagcaggggacaaagcacatgttgtcagctactggcactgagacctctcccaggcttctgcatggacgtcacactctcctgctttggaaataactgaaataaaacgctgcacagcattgtgttctgccctttcatgagagctgggcagcaggaagggcccctggtgccagctggaaggggcagggagccagtcggagtagggagaagcaagttgctgaggacaccaagcactgcccctcgcctgagcacagcatgggastgcagtgaggtctcycatcacttcccaccttccacagcctgggacgaggctctcagagccagcttgtcccatcagccccatttccatgtgtccctgcccctctgctctttgcccagatttccaccttcttaygttacacaaagtcctgcagaaggtctctttctggcttcggctccgtcccttagataacctcatttctcccccaacactggccctgttcccaggattgctgaagcccctccttagctccctgccttggctgtaaagcacctccagccccagaagcagccctacaaaagc

SEQ ID NO: 38347 - DNA, 600 bp, Chicken  19866894269393_2
ggtgtgcgctgtctcccaaagcgggacagcaggggacaaagcacatgttgtcagctactggcactgagacctctcccaggcttctgcatggacgtcacactctcctgctttggaaataactgaaataaaacgctgcacagcattgtgttctgccctttcatgagagctgggcagcaggaagggcccctggtgccagctggaaggggcagggagccagtcggagtagggagaagcaagttgctgaggacaccaagcactgcccctcgcctgagcacagcatgggastgcagtgaggtctcycatcacttcccaccttccacagcctgggacgaggctctcagagccagcttgtcccatcagccccatttccatgtgtccctgcccctctgctctttgcccagatttccaccttcttaygttacacaaagtcctgcagaaggtctctttctggcttcggctccgtcccttagataacctcatttctcccccaacactggccctgttcccaggattgctgaagcccctccttagctccctgccttggctgtaaagcacctccagccccagaagcagccctacaaaagcccatgacacrcagtg

SEQ ID NO: 38348 - DNA, 600 bp, Chicken  19866894269393_3
aactgaaataaaacgctgcacagcattgtgttctgccctttcatgagagctgggcagcaggaagggcccctggtgccagctggaaggggcagggagccagtcggagtagggagaagcaagttgctgaggacaccaagcactgcccctcgcctgagcacagcatgggastgcagtgaggtctcycatcacttcccaccttccacagcctgggacgaggctctcagagccagcttgtcccatcagccccatttccatgtgtccctgcccctctgctctttgcccagatttccaccttcttaygttacacaaagtcctgcagaaggtctctttctggcttcggctccgtcccttagataacctcatttctcccccaacactggccctgttcccaggattgctgaagcccctccttagctccctgccttggctgtaaagcacctccagccccagaagcagccctacaaaagcccatgacacrcagtgccagctcttcttccaaggagaaggatgtttccctagcagccagccctccaaacaaaactctgagctgagaacacgaggccccttcctctcacaccaccgcattcctggaggagccct

SEQ ID NO: 38349 - DNA, 600 bp, Chicken  19866894269393_4
tctcycatcacttcccaccttccacagcctgggacgaggctctcagagccagcttgtcccatcagccccatttccatgtgtccctgcccctctgctctttgcccagatttccaccttcttaygttacacaaagtcctgcagaaggtctctttctggcttcggctccgtcccttagataacctcatttctcccccaacactggccctgttcccaggattgctgaagcccctccttagctccctgccttggctgtaaagcacctccagccccagaagcagccctacaaaagcccatgacacrcagtgccagctcttcttccaaggagaaggatgtttccctagcagccagccctccaaacaaaactctgagctgagaacacgaggccccttcctctcacaccaccgcattcctggaggagccctgcagaggactaaatgtgcccagagctctgctggcagccctgctgctatgtttgacgccagagcagagctgctgcacaggggtgggctcagcagagctaacaggaataaggcactgatagcatcatgggacagaaagcagttggcctggctcacactcagaggaaaaacctatggcaca

SEQ ID NO: 38350 - DNA, 600 bp, Chicken  19866894269396_1
tggtgagaaaacaaagagcgattctgatctgttccataaccaactcccctgtatcttggaaatgatgatgaatgtgcacagcctggttcatagcacgtgcagagagaaaactgccaaagatattattttaagtaatgctctgacaagggagaagtggaatggcaccgcctgaggccttaccagggtatcagtgcaaacaggagctcggggtggctggagaaaggggaacatgcaagtagacaacagatcacatcccttgagagtaggatgcaatgatggctagattttgagtaaaacagscaaggagagaaaagactttttatgtcctctcactgtataaacgcatatatacacttctgcagaaaaagatcacattgtcccgaggactgtggggaaaaatgaaaattactctttgttgtggttctcattggacactgcagggcagtgagaagcaaataccctaaaattccgctttctgtgctttcagtgctttcaggcagtagggatgttctgcagggagccacagccatggcagaatttatacattcatcactggatataggacacccttcccattttagtgttgctggaccccttggc

SEQ ID NO: 38351 - DNA, 600 bp, Chicken  19866894269397_1
gttactcttggttagttacaggtacaggctgcagagcttgtcacacgttcttccttcctgggaagcaccaccaggccgtgtgtgcccactctaggagtctgtgcggtagctccgatggctgtcccctatgagctgcgtcttttcagttgcatttgtcggctgaagcacaataggagtttctccatctaaacagaggaaggagacagaaattactttaagaatccttcacttgctgccaaagtcagacttctttttggcaccacggcatttcatctgctgtcctggcttacggcttaatcytggcttcagagaccgctgtgtgcctgctgaagagacagcgatgttcacaccgcatccacagatgctctcacaccttgtccaggcataacagcagatttcagagtggctattgctgctgttattaaattgggcagtggctttacctggtgctgtgcggaggctggcagataagggtccctgcctgttccagtcacaagtgcttgttcctgcaaatgtcggaacacactgagcgctgctgtgactcagcaagcactgaccttggcagcgtgtgcaggagtgggccaggaatgaggcttgagg

SEQ ID NO: 38352 - DNA, 600 bp, Chicken  19866894269397_2
gcaaaaagagagttaaaagaaaaaaaaaaaaaaaaaaggtgtgagcaataatgtgcttgagagtgaagaaatcagatatcccgaaagccagcaagctatataaaaatgttaaattgcattctgaactcctatgtaatatgttttcagtaggattttgagaactattgttttgatgagtctggaactgccaaaaacccatacgatcactatatgacttcttagtgctttgtgctttctcattccattccgttacatgcttggtttcccaatatatctgtaaaaaaatacatttgttgcagrgtgaagttcagcccttgcagagctccccaatggctgtttgttcactctgatgatgaacaagatttatctgcctttctcctggacttctttccaagccacctttttggaggggaggggggtacttggggctcagagagtgccttttaagggttcagcaattttggtgaaggtgctttcgtatgaaaatctttgaactctctctctcttgaaattaacacgggcttcagagtaattgaatacaaattatgcctttttttccccatatgatggagcgcttaggaaaaaaatcataatctgaca

SEQ ID NO: 38353 - DNA, 599 bp, Chicken  19866894269400_1
  misc_feature (1)..(125): n is any nucleotide
nnnnnnnnnnnnnnnnnnnnnnnnnnnnnnnnnnnnnnnnnnnnnnnnnnnnnnnnnnnnnnnnnnnnnnnnnnnnnnnnnnnnnnnnnnnnnnnnnnnnnnnnnnnnnnnnnnnnnnnnnnnnncctcggatctgcagcccacagctgtgtggtgggcagtggctatctcaacacctccatcctacttactgtggaagatgaaagctaactccgtcccagcacattatgatacaattagttcaaagataaaaattacccttaatttcctgtgagcgtacagatgttgatgcaatttgtyatgctgtcaaaatttattgcaactgtgggtagaaggtagaaaatcttttgctcctgttctgttgctatctgtagcagaattggggcagatgagatgtaagaaatagagatggttcctkttmgaggaggtaaactttgcacttttaacttgccaagcatgcaactttcatagctgggatacttttttcattatttctgtcttagatataaattgttctttgccagaactgaagtgttcacttgcagcacatctaatgaacaaatttggttcagatgactttgtaaatgaattttatgtgg

SEQ ID NO: 38354 - DNA, 599 bp, Chicken  19866894269400_2
  misc_feature (1)..(7): n is any nucleotide
nnnnnnncctcggatctgcagcccacagctgtgtggtgggcagtggctatctcaacacctccatcctacttactgtggaagatgaaagctaactccgtcccagcacattatgatacaattagttcaaagataaaaattacccttaatttcctgtgagcgtacagatgttgatgcaatttgtyatgctgtcaaaatttattgcaactgtgggtagaaggtagaaaatcttttgctcctgttctgttgctatctgtagcagaattggggcagatgagatgtaagaaatagagatggttcctkttmgaggaggtaaactttgcacttttaacttgccaagcatgcaactttcatagctgggatacttttttcattatttctgtcttagatataaattgttctttgccagaactgaagtgttcacttgcagcacatctaatgaacaaatttggttcagatgactttgtaaatgaattttatgtggaaagtttcagatgaaggagctctataacatcttatttaacaccaatttaattcaccaggatgcaagtttgccacatgcatgcgcatattaaataaaactcaattttttgaggtataat

SEQ ID NO: 38355 - DNA, 599 bp, Chicken  19866894269400_3
  misc_feature (1)..(4): n is any nucleotide
nnnncctcggatctgcagcccacagctgtgtggtgggcagtggctatctcaacacctccatcctacttactgtggaagatgaaagctaactccgtcccagcacattatgatacaattagttcaaagataaaaattacccttaatttcctgtgagcgtacagatgttgatgcaatttgtyatgctgtcaaaatttattgcaactgtgggtagaaggtagaaaatcttttgctcctgttctgttgctatctgtagcagaattggggcagatgagatgtaagaaatagagatggttcctkttmgaggaggtaaactttgcacttttaacttgccaagcatgcaactttcatagctgggatacttttttcattatttctgtcttagatataaattgttctttgccagaactgaagtgttcacttgcagcacatctaatgaacaaatttggttcagatgactttgtaaatgaattttatgtggaaagtttcagatgaaggagctctataacatcttatttaacaccaatttaattcaccaggatgcaagtttgccacatgcatgcgcatattaaataaaactcaattttttgaggtataatccg

SEQ ID NO: 38356 - DNA, 600 bp, Chicken  19866894269401_1
acataagggcaggaaatgctgtcatcagatagcagcacatggaagcattcaaagagaaatttggctgagaaactcctcaagaaggaataatgggcatccccgtggacactaaaattcaatcccacaacacctggaatcctaccagtttttaagctgcaaatacggccctgaattcttcccataaactgcacagtagagggtttcattttaggaaaaattcagcgcttctcagaaagattccaactctcctgttcgtctccaaagactatgaaactttaaatgaataagagttaatacaasgactatttcaaattatttcactacaccatagaaagagaattgctcaagttggagaagaccttcaaaatcatcaagtccagcctcaacctaaccagactactcttgcaaacaatgcaaaccgtgagggattcagtctcagtgtcacacataacattttgtcttatgtgtttgttggacataatcagggaatgccagagcttttgcaatacagccttctcatttccaaatgcatatgcyctgtccagataatcagaaaaggggaacacagccatgctcagaagaaggtctgtaaacagaatc

SEQ ID NO: 38357 - DNA, 600 bp, Chicken  19866894269401_2
ttccaactctcctgttcgtctccaaagactatgaaactttaaatgaataagagttaatacaasgactatttcaaattatttcactacaccatagaaagagaattgctcaagttggagaagaccttcaaaatcatcaagtccagcctcaacctaaccagactactcttgcaaacaatgcaaaccgtgagggattcagtctcagtgtcacacataacattttgtcttatgtgtttgttggacataatcagggaatgccagagcttttgcaatacagccttctcatttccaaatgcatatgcyctgtccagataatcagaaaaggggaacacagccatgctcagaagaaggtctgtaaacagaatctcaactatgaagcaactctacaccacaaatttacatctagatagatgagaggctttacrtgagatttataagccatcagcagatacgcattatcatactatatacggagacaaattttatcatcaaagaactaccattaccatgcaagactttgaatctgggaaaaaaaatggttcctatatactacaggtgttggtaccaatcatgaaatcaaaccactgtccacacaatatcgct

SEQ ID NO: 38358 - DNA, 600 bp, Chicken  19866894269401_3
cttcaaaatcatcaagtccagcctcaacctaaccagactactcttgcaaacaatgcaaaccgtgagggattcagtctcagtgtcacacataacattttgtcttatgtgtttgttggacataatcagggaatgccagagcttttgcaatacagccttctcatttccaaatgcatatgcyctgtccagataatcagaaaaggggaacacagccatgctcagaagaaggtctgtaaacagaatctcaactatgaagcaactctacaccacaaatttacatctagatagatgagaggctttacrtgagatttataagccatcagcagatacgcattatcatactatatacggagacaaattttatcatcaaagaactaccattaccatgcaagactttgaatctgggaaaaaaaatggttcctatatactacaggtgttggtaccaatcatgaaatcaaaccactgtccacacaatatcgctgctgacacacccattgtccacattcgaatccaaccactcaccatccttactctgcattcacaacctttacttgcaccatggatacatacaacatgaagcagtctgtcagctcctagcaggag

SEQ ID NO: 38359 - DNA, 599 bp, Chicken  19866894269406_1
  misc_feature (1)..(54): n is any nucleotide
nnnnnnnnnnnnnnnnnnnnnnnnnnnnnnnnnnnnnnnnnnnnnnnnnnnnnntctagaataattctttggtaggaagaatgtaataaatgttcacatgctgtcagatacaatctttcagaaaaaaaaaaaaaaagaatggtttaaaacattagaaccttcagatgttagctgatggttttatgaaaaaaaaaaaaatcttgaattatagtttcttgattactcaaggctagcccaccctaaagcactttaagaaacctcaggagaacatgctgctaataacattgtctcaagggtaaytattaaagtgcttgagttcaattcacaataggctgtttcaayatactactatcctccgtctraaaagaayagaataaaaaaaaaaaagaaagaaaaaggaaaaaaagaataaaataatgctttttactacatgatgcctttgcccatctcagataactattaaactatatgtagacacctgagaatagcccacacctattcaataccaagaagcaattcagtaaatggaataccagtctctgccttttgagatcctagccaatcttctagattcaaaatccttgctgtatttatttctc

SEQ ID NO: 38360 - DNA, 599 bp, Chicken  19866894269406_2
  misc_feature (1)..(12): n is any nucleotide
nnnnnnnnnnnntctagaataattctttggtaggaagaatgtaataaatgttcacatgctgtcagatacaatctttcagaaaaaaaaaaaaaaagaatggtttaaaacattagaaccttcagatgttagctgatggttttatgaaaaaaaaaaaaatcttgaattatagtttcttgattactcaaggctagcccaccctaaagcactttaagaaacctcaggagaacatgctgctaataacattgtctcaagggtaaytattaaagtgcttgagttcaattcacaataggctgtttcaayatactactatcctccgtctraaaagaayagaataaaaaaaaaaaagaaagaaaaaggaaaaaaagaataaaataatgctttttactacatgatgcctttgcccatctcagataactattaaactatatgtagacacctgagaatagcccacacctattcaataccaagaagcaattcagtaaatggaataccagtctctgccttttgagatcctagccaatcttctagattcaaaatccttgctgtatttatttctcaacagcataataaatcttgattcattttctgccaggtagtgc

SEQ ID NO: 38361 - DNA, 600 bp, Chicken  19866894269406_3
aattctttggtaggaagaatgtaataaatgttcacatgctgtcagatacaatctttcagaaaaaaaaaaaaaaagaatggtttaaaacattagaaccttcagatgttagctgatggttttatgaaaaaaaaaaaaatcttgaattatagtttcttgattactcaaggctagcccaccctaaagcactttaagaaacctcaggagaacatgctgctaataacattgtctcaagggtaaytattaaagtgcttgagttcaattcacaataggctgtttcaayatactactatcctccgtctraaaagaayagaataaaaaaaaaaaagaaagaaaaaggaaaaaaagaataaaataatgctttttactacatgatgcctttgcccatctcagataactattaaactatatgtagacacctgagaatagcccacacctattcaataccaagaagcaattcagtaaatggaataccagtctctgccttttgagatcctagccaatcttctagattcaaaatccttgctgtatttatttctcaacagcataataaatcttgattcattttctgccaggtagtgcasctttgaaagaaaagctttt

SEQ ID NO: 38362 - DNA, 600 bp, Chicken  19866894269406_4
ggtaggaagaatgtaataaatgttcacatgctgtcagatacaatctttcagaaaaaaaaaaaaaaagaatggtttaaaacattagaaccttcagatgttagctgatggttttatgaaaaaaaaaaaaatcttgaattatagtttcttgattactcaaggctagcccaccctaaagcactttaagaaacctcaggagaacatgctgctaataacattgtctcaagggtaaytattaaagtgcttgagttcaattcacaataggctgtttcaayatactactatcctccgtctraaaagaayagaataaaaaaaaaaaagaaagaaaaaggaaaaaaagaataaaataatgctttttactacatgatgcctttgcccatctcagataactattaaactatatgtagacacctgagaatagcccacacctattcaataccaagaagcaattcagtaaatggaataccagtctctgccttttgagatcctagccaatcttctagattcaaaatccttgctgtatttatttctcaacagcataataaatcttgattcattttctgccaggtagtgcasctttgaaagaaaagctttttgcaacca

SEQ ID NO: 38363 - DNA, 600 bp, Chicken  19866894269406_5
tactactatcctccgtctraaaagaayagaataaaaaaaaaaaagaaagaaaaaggaaaaaaagaataaaataatgctttttactacatgatgcctttgcccatctcagataactattaaactatatgtagacacctgagaatagcccacacctattcaataccaagaagcaattcagtaaatggaataccagtctctgccttttgagatcctagccaatcttctagattcaaaatccttgctgtatttatttctcaacagcataataaatcttgattcattttctgccaggtagtgcasctttgaaagaaaagctttttgcaaccatcctcattgcatcctgacagtgaggtcactcttcagaaataggagttcttggtttgaatcagtgagtcagtgaacacgaaaggtgagacttcagtaccagctaagacagtgaaatctgatgatgattctttaggacatatatgtctgtaactttttctcagatgtgataatacctctgaatgactcatcttcctatctggtggcgagatacatttatatagtgatacgaacatgcattttcaatataatatattctatgtatttcttggtgaa

SEQ ID NO: 38364 - DNA, 600 bp, Chicken  19866894269408_1
caaaaccagcgtgaccagcaggtcagggaagtgattgtccccgtctgctctgcccttatgaagccccacctgcactactgtgtcatggcttgggatccccagtacaggaaggatggagagctgctggaatgggtccagaggagggcgtgaggattatgagagggctggagcacttctacgaggaaaagctgaaggagttgggcttgtttagcttgaagaagagaaggctgcagggagacctcattgcagccatccagtaccttaagaggcctacaggaaagctgaggagggactctttakcagggagcatagtgataggacaaaggtaacaactttaaactaaaagaagggagacttagattagttgtcaggaagaaattctttacttggagggcagtgaggcactgacagagctgcccagagaagctgcaggtgccccatccttggaaacattcaaggccaggttggatgggtggcctgatccagtgggaggcgtccctgcccatggcaggggcttggaattagatgggctttgaggtcccttccaacccaaagcattctgtgattctacaacctgacccatagctctccactttgaag

SEQ ID NO: 38365 - DNA, 599 bp, Chicken  19866894269411_1
  misc_feature (1)..(201): n is any nucleotide
nnnnnnnnnnnnnnnnnnnnnnnnnnnnnnnnnnnnnnnnnnnnnnnnnnnnnnnnnnnnnnnnnnnnnnnnnnnnnnnnnnnnnnnnnnnnnnnnnnnnnnnnnnnnnnnnnnnnnnnnnnnnnnnnnnnnnnnnnnnnnnnnnnnnnnnnnnnnnnnnnnnnnnnnnnnnnnnnnnnnnnnnnnnnnnnnnnnnnnnnntggatgccccatccctggaggtgttcaggccggttggatggggccctgggcagcctggtctgatattaaatgtggaagttggcggccctgcctgtggcrggggggttggagattcatgatccttgaggtcccttccaacctgggccattctgtgactctgcgagatctgaactcaggtagacataaggtatctcatggcttctacaccatacatagaattttctttcaagatgctaatgaaaaaatcccacacctcaatgacatgcttgagaaatctctgatctcaaaaacccatctattctccactgtaaccctgaactaatcacatayacagcctgaaacacctggacttaggtaggttcatagtacaattcatactttgcattgcaaaagggatg

SEQ ID NO: 38366 - DNA, 600 bp, Chicken  19866894269411_2
cggttggatggggccctgggcagcctggtctgatattaaatgtggaagttggcggccctgcctgtggcrggggggttggagattcatgatccttgaggtcccttccaacctgggccattctgtgactctgcgagatctgaactcaggtagacataaggtatctcatggcttctacaccatacatagaattttctttcaagatgctaatgaaaaaatcccacacctcaatgacatgcttgagaaatctctgatctcaaaaacccatctattctccactgtaaccctgaactaatcacatayacagcctgaaacacctggacttaggtaggttcatagtacaattcatactttgcattgcaaaagggatgtaagggacagagaaagaagaatacagtagtatcatgagcttgagactgaagtaaaycatcaagcagatggctaactgtagtgttccaaaaatgagaatatttcaggaaacataaataccaagatggatcatccatttccagattctatatttttatgtccagataaattttctgggctgagtagagagaaattcaagagtatcctcatgtcagagagtttaatttaagcaaa

SEQ ID NO: 38367 - DNA, 543 bp, Chicken  19866894269411_3
actctgcgagatctgaactcaggtagacataaggtatctcatggcttctacaccatacatagaattttctttcaagatgctaatgaaaaaatcccacacctcaatgacatgcttgagaaatctctgatctcaaaaacccatctattctccactgtaaccctgaactaatcacatayacagcctgaaacacctggacttaggtaggttcatagtacaattcatactttgcattgcaaaagggatgtaagggacagagaaagaagaatacagtagtatcatgagcttgagactgaagtaaaycatcaagcagatggctaactgtagtgttccaaaaatgagaatatttcaggaaacataaataccaagatggatcatccatttccagattctatatttttatgtccagataaattttctgggctgagtagagagaaattcaagagtatcctcatgtcagagagtttaatttaagcaaaactactgaggaaacaataaaaggaagtgagaaaatgcagctattaaagtggtattaatgaaaaggat

SEQ ID NO: 38368 - DNA, 600 bp, Chicken  19866894269412_1
ttgtgtccttgaaattattttttcaagagcttaccctgtgtgacacagatgcctttgatttttcatggagatatttgctttaaaatagagagggtttggaagtataagggtttaaaacattgaatatgtgccatagctgactttttaatttttgaagtatggagatgcaagtggtgtcccatgcatttgttaacctctgcgtaaagactagcaaattaaagaaaacaaatgaaggtaattcacagttttactttgtttttgcttaggcattttattccaaaaaaaagttagtagagtacwttttttttttctttttttcaaaaagcagaacaccacctgtatagtatattaagcagctttaagtaggggaaacaaacaaacaaagaaaaaaactacagaggatatttcccaattaatcatttaaatcggagaggaccattccatcatctctgctcacacggttttcaagtcttgtacatcttaggtgctgcactagttgcaaatcatccctgtttcaccaagttgaaggaaaggcctcccttctacccaggatgacttggcagtgacacaggctgtatgtgttcttgtaatggctttgtg

SEQ ID NO: 38369 - DNA, 600 bp, Chicken  19866894269413_1
ataacttgacattttcaaacaagaaatctcattctctcttgcttatataatcagagtttacgcattttttgcaaggatcacttaccacctgcctttatgctttcagtatattttcctaaatttaacagcaaaggtcctactcctagcaaagcatctgaaacttctgacactgaatagtgaaataatttatattcattaagagcttcaacatgagcagtgttaccatgtaaactttcaaagcctaacatcagatataaataacatgcacatctacagcacatttatgttttccattgtaaygtttacctcagattaattacatgtattaatccagcctagtgtgtcatattacataatttataaacttcactgggccataatttaaattcagcagttttgtctgtacagaccctggcagctccaccaaaactgttaagggcctatctttttttatttattgtgtgagaaatacacagggaaatgcagagctccagtttcattgaatggaattcatcattatcataattattaaagccctaatcacagaccctgactgtattccattacgcccattagagaataaagaattcttgttccata

SEQ ID NO: 38370 - DNA, 600 bp, Chicken  19866894269417_1
acattcttaaagcacagggctctcttacaccaacttggtacagagaacagcagtgtaatttttctctgcagctggagtaatggcaatgacaacaaaaaaaacctattttagcctcaggctcaatggacagaatcaacagcccgtggaataagatctgcaagacaaacatagaaggaaagaagctgagcgaagtgttggtagtttaaggactataatgttagagagtgatgtctaaacttttaaataacagtgctgaggaaatcatctacgtactgttgcagctaattgctacccactgtyaaaaccaggagaatctgaagtgcagcttgaggaagaataaagagaaattaaaatatagactgtgctgtaccaaataactaacgtgtttttcctggtatttggaaagcttgacactttaaacctgcatatgaaactcagattagataaayttaccatgaaacatggagattaaaacttagctttggttatgcagagtacatgtggtaartaatgtatcttccttgtctcttagaccctgaagatgcttaacagtaatacagagaacccctacttaatctggaacaacggaacaagagctga

SEQ ID NO: 38371 - DNA, 600 bp, Chicken  19866894269417_2
aagatctgcaagacaaacatagaaggaaagaagctgagcgaagtgttggtagtttaaggactataatgttagagagtgatgtctaaacttttaaataacagtgctgaggaaatcatctacgtactgttgcagctaattgctacccactgtyaaaaccaggagaatctgaagtgcagcttgaggaagaataaagagaaattaaaatatagactgtgctgtaccaaataactaacgtgtttttcctggtatttggaaagcttgacactttaaacctgcatatgaaactcagattagataaayttaccatgaaacatggagattaaaacttagctttggttatgcagagtacatgtggtaartaatgtatcttccttgtctcttagaccctgaagatgcttaacagtaatacagagaacccctacttaatctggaacaacggaacaagagctgaattacttgagttcttggaatctcaacaagaaagcatgattaagagagtaagatgttccgtatttcaaaaatgaatcaatagtaatgggatttaaatagtaatgggaccataaaagatcaatagtaatgggatttaaaactgtttcatgt

SEQ ID NO: 38372 - DNA, 600 bp, Chicken  19866894269417_3
actataatgttagagagtgatgtctaaacttttaaataacagtgctgaggaaatcatctacgtactgttgcagctaattgctacccactgtyaaaaccaggagaatctgaagtgcagcttgaggaagaataaagagaaattaaaatatagactgtgctgtaccaaataactaacgtgtttttcctggtatttggaaagcttgacactttaaacctgcatatgaaactcagattagataaayttaccatgaaacatggagattaaaacttagctttggttatgcagagtacatgtggtaartaatgtatcttccttgtctcttagaccctgaagatgcttaacagtaatacagagaacccctacttaatctggaacaacggaacaagagctgaattacttgagttcttggaatctcaacaagaaagcatgattaagagagtaagatgttccgtatttcaaaaatgaatcaatagtaatgggatttaaatagtaatgggaccataaaagatcaatagtaatgggatttaaaactgtttcatgttttggtacatctgcttataatacagtggtatcggtgagcggaaaactttgacgggtatc

SEQ ID NO: 38373 - DNA, 600 bp, Chicken  19866894269418_1
ctcagaacccataaaggctgtggagtctcaattcttggaaatattcaaaacctgactgaacacagccctgagaaacttgatctaactttgaagctgcatgtaaatacaaaatccattgttggtcctactttgactgggttcttggaataggtgacttttgaggatcattttcaacctaaattattacacagtgctatagttttcagaacagaaaaagaaattttttttttaatttttattacagaagactaaaatttatgagtatgcatttattttacttgacaaatattctaatattakctcatcagtctaaaaaaaaaatatttttcagtaaaatttaaattatgaaaacatctccwacttttatttattaagtcaacatcctttaaagatacatttctacaacagcatcatagataataatgtcttcatagcatagcaaaatattcataatgacaaaaaaaaatatatgataaaagaaaattacaaagaaaagaaaaagaaaaaaaagggaaatctcatcccctaggagaatgttctgtcaccataaatattggcattaaatttttcagcagtctttccaaaataaggaaacaatga

SEQ ID NO: 38374 - DNA, 583 bp, Chicken  19866894269418_2
acacagccctgagaaacttgatctaactttgaagctgcatgtaaatacaaaatccattgttggtcctactttgactgggttcttggaataggtgacttttgaggatcattttcaacctaaattattacacagtgctatagttttcagaacagaaaaagaaattttttttttaatttttattacagaagactaaaatttatgagtatgcatttattttacttgacaaatattctaatattakctcatcagtctaaaaaaaaaatatttttcagtaaaatttaaattatgaaaacatctccwacttttatttattaagtcaacatcctttaaagatacatttctacaacagcatcatagataataatgtcttcatagcatagcaaaatattcataatgacaaaaaaaaatatatgataaaagaaaattacaaagaaaagaaaaagaaaaaaaagggaaatctcatcccctaggagaatgttctgtcaccataaatattggcattaaatttttcagcagtctttccaaaataaggaaacaatgaaagatcatttgaataaattctactgctaggtgtaacaccata

SEQ ID NO: 38375 - DNA, 600 bp, Chicken  19866894269420_1
ctatacaaatcaaaagcttaagttttcagagatttcagagtcaagtcaggtcatatttggctccttttacttaaagatctgtcagaaaagtgctacatgtttcaaaaccatcattctatgaatgacacatgctgaagacaagcacatgtggtgcattgctactaaagaacagtaagcttcagcattgtgtctcagagagacttgggaaatttctgtatttcagatttgctcttttctgaaacgtcatttttatgaaatactgggagagcagcatttcaaccagactacgaagtctattcwattctacgctgatgacataatcatttatctatgccaagcaccacaatatgacaatggtttgtgataagggcttaaactaatatgcagaatcatcttctcaagtgccaaggaatattaaagatgttatcctactggcaggttctcatcaagggactgacatagatgaggaaccagaggctaatccccattgtgtaccataggatattgccactttcgtactttgtgtctgccttgtggaactgattcacggagtaattaccacagagataagccttttctggaacatacacaattaattct

SEQ ID NO: 38376 - DNA, 600 bp, Chicken  19866894269422_1
ctgtgtccaactagctgaggcttggactaatgagtgaattgtagttgcttgttaggctggggaagaacttgaggctatggcaaatattcatccagactttcagagactgggacttttcagtgcctacaacaggtgagagtcttattcagcattccctccatccttcatagaatcattgaattacagaatcaaccttctggatgctgagtgttctttgggcagactgacagtgaagaagtagcttttgtgagcacagcctagtacatgtgtcgggcttaaacagtaaaaggggtaggatgrgaaaatggaaagtaggttttattgtagaccagatgaaatgcgctggaagtaagggttacagggagagcaggttctttctagtctcctattacagggcatgggtacacccagggacaagatgagaaaacagatttggatatgctttatgcagatggcagcattcgatataaaatacatcagcaatactcaaacactaataggttttgtttcagtcactgtagaagggctgtgtcaggaaccatgtcagttaaaacgctatgaagacatttgaggtggaggggtagggaaagaggacaaatr

SEQ ID NO: 38377 - DNA, 600 bp, Chicken  19866894269422_2
gaaaatggaaagtaggttttattgtagaccagatgaaatgcgctggaagtaagggttacagggagagcaggttctttctagtctcctattacagggcatgggtacacccagggacaagatgagaaaacagatttggatatgctttatgcagatggcagcattcgatataaaatacatcagcaatactcaaacactaataggttttgtttcagtcactgtagaagggctgtgtcaggaaccatgtcagttaaaacgctatgaagacatttgaggtggaggggtagggaaagaggacaaatraataaaggatcctgctttcatatgctttaaaggactgttcttatttgtgaaactggaatagcagtattttcaaatttttgtgaaaatgggatttgaatcacgagcacagggtttttcaatgtgtgccagacatttacaggatctgtgtaggtcttgaaaataagaagaactgaagagatcctattattgcagagaagttttcatgtcagtggtcacttcatcttggtgagaccatacttaccagaacacttggaattatcttgtaagctaagaatacagaggaaagggttcattgtaaac

SEQ ID NO: 38378 - DNA, 600 bp, Chicken  19866894269424_1
tcctgctcccatctccacagcccaacacccttaaacccaatcacgtcttagagcctttgttggcaagcagatctctgaaaggccttctcacctctaccctttctattgctcttatctcttcccacatgagtagtagcaatgggatccccatgactgaagcttcccatactctctcagtgcctttagcctcaaacaagctacctacccccagctcttggcaataaactctcccctagagaagggtgccatcatcttcctgtgtcccccccaacgtagccatccactccaccttctaccatractgtatgtgtagaacagaaacatctctgctctttctgctctaagggtctgaattaataytacccattacaccctctgacaccttctggacttaccacttccatctcatttggcaaacattcagtttgacgttttccaaaagtttccagaatttttggaaagttcaataataactgtttaactgtttgggaaaattatataactttcaagttaaataaacaacttacatttatttttcccttttctttccttttcatctttcctttgtaggcctccttcagagcaacaaactttggcaga

SEQ ID NO: 38379 - DNA, 600 bp, Chicken  19866894269424_2
tggcaagcagatctctgaaaggccttctcacctctaccctttctattgctcttatctcttcccacatgagtagtagcaatgggatccccatgactgaagcttcccatactctctcagtgcctttagcctcaaacaagctacctacccccagctcttggcaataaactctcccctagagaagggtgccatcatcttcctgtgtcccccccaacgtagccatccactccaccttctaccatractgtatgtgtagaacagaaacatctctgctctttctgctctaagggtctgaattaataytacccattacaccctctgacaccttctggacttaccacttccatctcatttggcaaacattcagtttgacgttttccaaaagtttccagaatttttggaaagttcaataataactgtttaactgtttgggaaaattatataactttcaagttaaataaacaacttacatttatttttcccttttctttccttttcatctttcctttgtaggcctccttcagagcaacaaactttggcagaagygctggctttatgccaagacatgcttccacatctcagtgtgagattcaggaagagcca

SEQ ID NO: 38380 - DNA, 600 bp, Chicken  19866894269424_3
gtatgtgtagaacagaaacatctctgctctttctgctctaagggtctgaattaataytacccattacaccctctgacaccttctggacttaccacttccatctcatttggcaaacattcagtttgacgttttccaaaagtttccagaatttttggaaagttcaataataactgtttaactgtttgggaaaattatataactttcaagttaaataaacaacttacatttatttttcccttttctttccttttcatctttcctttgtaggcctccttcagagcaacaaactttggcagaagygctggctttatgccaagacatgcttccacatctcagtgtgagattcaggaagagccaacctggattgctcaatgcaaacatcttttaaggcctccttactacaaaaatgatgagttgggatgttgagatgtacatcaaaaacgccctcattgtttacaccctctttcaatgaaagacaaaactaagggtggtgtccctcatcaccttccttgcataggagcagatgtttgagtgatggacacaacgcaggtaaaattgaaatacataaaatgcagttgaatttgtacaatttgaacgcag

SEQ ID NO: 38381 - DNA, 599 bp, Chicken  19866894269427_1
  misc_feature (1)..(58): n is any nucleotide
nnnnnnnnnnnnnnnnnnnnnnnnnnnnnnnnnnnnnnnnnnnnnnnnnnnnnnnnnntttcccatcatcagagcacacatttttttataaaccacattctttcatgttctttgcaggtacggtgtgtgtatgtgtatctgtgtatttatgtattcacacactcatgtttatatataagaaaatatgtaaaacatataaagttaccaattgcctacttcacagatctaagacaaactcctaataagctctggtgtcttttcagaacttaccatgttccttacaggtccttcccaaacaayggtgtctgttagctccaaggcatatggtatacatagtagtgtgtttctgtgctggtgcctgcagtgactacaccaatacagtgacggatgccactacagtgctgaggcagttggtctcctgttttgggcctccagttattttttctgttcttctttaaaccacagaaatagcagcataggcacttcaaaaggactcaagaaagatccaagccactgtaatctcctttgtaactccactaacagctgttcacagaaagctcatgctgcttctgttgtttgaacacttcaagtagttgttt

SEQ ID NO: 38382 - DNA, 600 bp, Chicken  19866894269429_1
gccagacaaaacctgccacattgaagctattcagtaagtctttttttttggcagccttgaaacagctctctgttgagtaccctcaagctaaaaccacaaacaccaattgaccccagactttctactaccagtccaactgctctcactacacaagagactttagaaacagctatagagcctactcttgccttcttgactcactcaggaagcacccagcagaacaaaagaaaactcagagaagtccagaaagctctcctccaccaccgtgaaacctcctgtaaaccacctgcccctcccacmgaggtattacctcttctattgcctgcagctgctttccactctgctggctaacagagtggatgagaagcagttacttttcactgagacagcacatcagatgtcttgccttaattcattagtccccacagtgaaacgttttcgttatatcttcttcayctgattttcagtaaaaataaagaaaaatkagggcgtccaagaaagaatttcactcagagttgtctctgggagcacaactgtttgcctttgttctcagtgatgttatctggatgaattctagttacaaggatctagttgcctaag

SEQ ID NO: 38383 - DNA, 600 bp, Chicken  19866894269429_2
actttagaaacagctatagagcctactcttgccttcttgactcactcaggaagcacccagcagaacaaaagaaaactcagagaagtccagaaagctctcctccaccaccgtgaaacctcctgtaaaccacctgcccctcccacmgaggtattacctcttctattgcctgcagctgctttccactctgctggctaacagagtggatgagaagcagttacttttcactgagacagcacatcagatgtcttgccttaattcattagtccccacagtgaaacgttttcgttatatcttcttcayctgattttcagtaaaaataaagaaaaatkagggcgtccaagaaagaatttcactcagagttgtctctgggagcacaactgtttgcctttgttctcagtgatgttatctggatgaattctagttacaaggatctagttgcctaagccattgtcttagaacttttaatgtagaattaaatcctgtgccaaagtactcttacctgtaatggttattaattgtaattagcaaattagtcaattttacctccaagtagagtattagtagttgttagaaaactctcaataaatcggcttgtgttat

SEQ ID NO: 38384 - DNA, 600 bp, Chicken  19866894269429_3
tgccttcttgactcactcaggaagcacccagcagaacaaaagaaaactcagagaagtccagaaagctctcctccaccaccgtgaaacctcctgtaaaccacctgcccctcccacmgaggtattacctcttctattgcctgcagctgctttccactctgctggctaacagagtggatgagaagcagttacttttcactgagacagcacatcagatgtcttgccttaattcattagtccccacagtgaaacgttttcgttatatcttcttcayctgattttcagtaaaaataaagaaaaatkagggcgtccaagaaagaatttcactcagagttgtctctgggagcacaactgtttgcctttgttctcagtgatgttatctggatgaattctagttacaaggatctagttgcctaagccattgtcttagaacttttaatgtagaattaaatcctgtgccaaagtactcttacctgtaatggttattaattgtaattagcaaattagtcaattttacctccaagtagagtattagtagttgttagaaaactctcaataaatcggcttgtgttattcctctcactcttggatgattccattgtg

SEQ ID NO: 38385 - DNA, 600 bp, Chicken  19866894269432_1
tagtagcacctgtttcctactttgtaccatttgctatgtgcaaaataagacttggaggctttattgtttgaggagcctgatttggatcatttgccaatttctaataccccatgacagcactgaacacagaggagagggatttcaaactgaccacacaggtgaaagaaataatgcaaactgagatgctattcagtacatcctgagaataatgcgtgttcttgggatgtagaaggtaaacttgaatccttgcagttgataatatctttcaatttctgcgtgcttaataattgctagggtgtsatacagaaaatgggtgcatcatctcccctcttctctccttgaggagaggaataacctagcaagctatatcattccaagtggtggattggtttagaaagtgaagtaactcagcagttgtaggctgtacatctaaacctcacacctgctctgcaggtactctaacccagagcataagtgccaaacagctaacacaaacacttccttacagagagcttctcgacatctgtcatcgatttgccctattgctgtaatgagcgtctaggtgccagactctctgctgtgtttaatcgtcttgagggt

SEQ ID NO: 38386 - DNA, 600 bp, Chicken  19866894269432_2
tcgacatctgtcatcgatttgccctattgctgtaatgagcgtctaggtgccagactctctgctgtgtttaatcgtcttgagggttttccaacttctctgtgtttatttcaggcaggttgctgtacctcgtctagttccatgggtatgagtggtcctagatcaggtagctgcacactcaggagaataaggaattggtgagagtgagtagtgaggcagatgcaacatggagccaggagtgaaaaagcagccatgctttgggctacgttttcctctgctgtcacctgaagtgctgacagattycagggtattttatttttgtagaccattctctgcttgtatttcctggctacctgttgatctctcctccttttccaaaggctcagctctgtctcagtaagggacttatttagtgaagcccaaagtgaaggatgcatgttatctgtgaaacttgtagatgtttctttaatgtacgtgtaacttttctgaaatttcctttgacgaaggctctatgcacctgtgtggttgctaggagatagcatttgaagtgttttgtggtatagcagagtttgcctcttttgggggattgttgtcatgggaacc

SEQ ID NO: 38387 - DNA, 600 bp, Chicken  19866894269436_1
atatacgtcctctgtggctgcagctgcagtgatggctcccacaatgccccctataaggcctggcatgccatggaggttgtggatgccacaggtgtcctgaatgtgtaacttggactccaaaataggctgaaggaaagggaggtagagagaaatcagaggaatgagtgtagccctggaaagaattagttcctttcatggaggactggagagataagtagagaaagaagagtggtattatgtgtcccattctagagctaaggacttgtagaaaaatatttgaaatgagctcagaacaaaatragagctctcctccactctcctgttaggagactgagccttacttggcattttgaggcagaaaatggagtcagaagtgcatctccataagggacaatggaaagcgggaaccctcaaagggaggtgaatccattcctggtctcctcaacagaaccagggctgcgggctcccagagcagcactcaccgtgaggtagacataccccactgtggacacaatgccacagatgaacccaacaatgagggagccatatggggtcaacatcatctctgcgctggtgcccacagccactccaccagccagc

SEQ ID NO: 38388 - DNA, 600 bp, Chicken  19866894269436_2
gtctcctcaacagaaccagggctgcgggctcccagagcagcactcaccgtgaggtagacataccccactgtggacacaatgccacagatgaacccaacaatgagggagccatatggggtcaacatcatctctgcgctggtgcccacagccactccaccagccagcgttgcattctggatgtggacctgcaggaataaccactctgtcttggcatctcagagaaatcacagctgttcaaagtgcgtgcaaacggaaaagcaagagtatcagctctgaaaatgattccagaggaaatactgrggcccactttcctgctcactggtgaaaaacaagaggagaagaacaggcagcctctgtctgtagcgcaggcacacatagactcccactctccgtaccacacacattctttgcatccaccaatctgggaggggagttgtgatgagatggaaattgtctcacccatgtgtcacgccagctctgctgtcacacacggtgcacccacacacataacacatacaagtcagccccccacttgctcacaagctgctgcacaggccctgctcagcttcctgggagagtgctgccaaacatggctctgca

SEQ ID NO: 38389 - DNA, 600 bp, Chicken  19866894269437_1
acccatttgcataggatcaagtgactaaatcaaatgaggccgaggacagatagcggttcagggcctttcatgtgcctccagtactgagtagggacaacacaactccaggtttgcctacagccacgtgtaaactttcacctgtgcaatatcaggacacccagcttcatgcaatcacacagcacagggtttccagatttggagttctgaaacccactgcaatcaatgagtaattgctgcaatccacagagggctgcttccattaatcagaagacttgcagcaggtttgtgaaactgtgactygtatccatcaaacagagctgggttaacaagcactgtgaatcaatttactggccgtgaacagtagtccgcactgaaatattaataactcaaccatttaatctttttaaatgccaaaaggggacagtaaaatctactgaatggattgtgtgtataagcaaatgcgaaaagaaaggatgaagaaatcacaattgttccttccctgagactttgtaagtcaagtttcagcctagagcaattctttactgctggattataaactcctggaagtcaggatttataatggggctgctaacagaccct

SEQ ID NO: 38390 - DNA, 600 bp, Chicken  19866894269453_1
acgccttattcccacagcactgatagctctctgctgggtcattcctcccagccagcagacacagctctttctgcattagtctccattggaagaggcagctgtggtaccacctgcctacagctacagccagtgacagcaggattgctgctcaaacagagagagaacagaccagagaggacaagacagatgttttccagtcacctggacttcgtcctggactattcaatgaactggcccagtgggctcaaaaaaagtaacgattccctttgggaacttgggtggaacaggtagagcgtcagytgaaaagccaacagaagtagtacttatccctaagaaggcaaaaaagggaagggactcaattcatgattgcatttctcagaataagaagattaattataaaaaataacaaggatgaaaaaaccacccaaaacaaagacgtgcagtaattcaggtggatttgtcaaaagcaaatcattacttacaaaaataccgttatttctttctgcagtaaaagaattaccataggggagaagcaaggcatgaacaggaattcagtaaagcctttgacactcctcttgcacaaacatgttacaaaccctt

SEQ ID NO: 38391 - DNA, 599 bp, Chicken  19866894269454_1
  misc_feature (1)..(78): n is any nucleotide
nnnnnnnnnnnnnnnnnnnnnnnnnnnnnnnnnnnnnnnnnnnnnnnnnnnnnnnnnnnnnnnnnnnnnnnnnnnnnnataagcattgttgtaatttggccactgcttttgtttcatgtctgtcttagaagctagattaacagagaccgctcttcctgatgtaattcccattagggctttgaggatgcgtgctttatgaagcattataaaggttcaaaacctcaatcatggtgtcgttttcattggcatagcatatattctaaaatagacactctttttcttgaacccaaggatgtgagrttgttgtttcaagcaaactgaatgaccccctttagcacggcttgacttgcctgtccaggctgtgaatggaacggccttgctgaggaaagcagtttgcatttaaaggatcagaagatgctggatgacttgaaatgaaatgttatctgttcgtgatgctcaggcttccaggtcatactggtcaaaagagaacctaattgttggtttgtttccataaagcgttctgtctggcttggaggttttggaggttatgtaggaagccaggctgggtttgtacagacaccagatgccctacttacttt

SEQ ID NO: 38392 - DNA, 600 bp, Chicken  19866894269454_2
gctgtgaatggaacggccttgctgaggaaagcagtttgcatttaaaggatcagaagatgctggatgacttgaaatgaaatgttatctgttcgtgatgctcaggcttccaggtcatactggtcaaaagagaacctaattgttggtttgtttccataaagcgttctgtctggcttggaggttttggaggttatgtaggaagccaggctgggtttgtacagacaccagatgccctacttactttctagaaactgtaattttagtttctgttggttagtgtgctgaactggagctttgtccatyggggctcccagcctggccgtgctacagacgcactgtgggcatgctggctgtgctgcggctccccgcgtgcccctgtgccggccccttggtgtgcaggggctgctgccagagctgtgggaactttgctgctgctgctactgctgctttcatgccagctcactgagcgtttcccacgtatggatgagagagatgattgtgttagagttctgtatgttttatcaacgtcatgcttaaaggataggggacatttatatcttcctatctaacaaatagcaatctctctgcatgaacggggtattt

SEQ ID NO: 38393 - DNA, 600 bp, Chicken  19866894269466_1
ctccatttcacttctggttgttgtgaaggtggaacgtgctctaggaaggagatgttaaatgaaagctaatgctattttctggactttgtattgctaatagctgttgatgtttatgtaaaattaatttgtatattatgttgtctctgttaggattttgcctcgaattgatgaactaaattcaaaggtttctatgcctgtagattaaaaggctctgctccaggatttagggttaaacagccttgtgtgggctgctgtgtgggtagcagactgtcggtctctcaggaaagagggaggtaactstcaaataattgcatgaaccattaagaagtttactgaaaattccactgtgtacttcagaaacgaactcctgcaaaatgwcratcctgtgacaatgtaggaattcagctgattrgaagatgaattacggttgtcctctcttgtattgtttttgctcgttgcaccttctcagcagcctgaaatcatttctgaattgttggctttttgtttgcaaatatttctgccctgaaatagatacattttttactgcagtgaggcttgccaggtcattgtaaccagggagctaagaaggcaggcagtttc

SEQ ID NO: 38394 - DNA, 600 bp, Chicken  19866894269466_2
ctggactttgtattgctaatagctgttgatgtttatgtaaaattaatttgtatattatgttgtctctgttaggattttgcctcgaattgatgaactaaattcaaaggtttctatgcctgtagattaaaaggctctgctccaggatttagggttaaacagccttgtgtgggctgctgtgtgggtagcagactgtcggtctctcaggaaagagggaggtaactstcaaataattgcatgaaccattaagaagtttactgaaaattccactgtgtacttcagaaacgaactcctgcaaaatgwcratcctgtgacaatgtaggaattcagctgattrgaagatgaattacggttgtcctctcttgtattgtttttgctcgttgcaccttctcagcagcctgaaatcatttctgaattgttggctttttgtttgcaaatatttctgccctgaaatagatacattttttactgcagtgaggcttgccaggtcattgtaaccagggagctaagaaggcaggcagtttctagggttctctctatagaatcttttctcagtgtgcagctgcaatccggatcaggtttgcacagtcatactgaatgctg

SEQ ID NO: 38395 - DNA, 600 bp, Chicken  19866894269466_3
ggactttgtattgctaatagctgttgatgtttatgtaaaattaatttgtatattatgttgtctctgttaggattttgcctcgaattgatgaactaaattcaaaggtttctatgcctgtagattaaaaggctctgctccaggatttagggttaaacagccttgtgtgggctgctgtgtgggtagcagactgtcggtctctcaggaaagagggaggtaactstcaaataattgcatgaaccattaagaagtttactgaaaattccactgtgtacttcagaaacgaactcctgcaaaatgwcratcctgtgacaatgtaggaattcagctgattrgaagatgaattacggttgtcctctcttgtattgtttttgctcgttgcaccttctcagcagcctgaaatcatttctgaattgttggctttttgtttgcaaatatttctgccctgaaatagatacattttttactgcagtgaggcttgccaggtcattgtaaccagggagctaagaaggcaggcagtttctagggttctctctatagaatcttttctcagtgtgcagctgcaatccggatcaggtttgcacagtcatactgaatgctgct

SEQ ID NO: 38396 - DNA, 600 bp, Chicken  19866894269466_4
atgtaaaattaatttgtatattatgttgtctctgttaggattttgcctcgaattgatgaactaaattcaaaggtttctatgcctgtagattaaaaggctctgctccaggatttagggttaaacagccttgtgtgggctgctgtgtgggtagcagactgtcggtctctcaggaaagagggaggtaactstcaaataattgcatgaaccattaagaagtttactgaaaattccactgtgtacttcagaaacgaactcctgcaaaatgwcratcctgtgacaatgtaggaattcagctgattrgaagatgaattacggttgtcctctcttgtattgtttttgctcgttgcaccttctcagcagcctgaaatcatttctgaattgttggctttttgtttgcaaatatttctgccctgaaatagatacattttttactgcagtgaggcttgccaggtcattgtaaccagggagctaagaaggcaggcagtttctagggttctctctatagaatcttttctcagtgtgcagctgcaatccggatcaggtttgcacagtcatactgaatgctgctgaagaatagaacaagcatcacctgtgtgtgtt

SEQ ID NO: 38397 - DNA, 600 bp, Chicken  19866894269466_5
attacggttgtcctctcttgtattgtttttgctcgttgcaccttctcagcagcctgaaatcatttctgaattgttggctttttgtttgcaaatatttctgccctgaaatagatacattttttactgcagtgaggcttgccaggtcattgtaaccagggagctaagaaggcaggcagtttctagggttctctctatagaatcttttctcagtgtgcagctgcaatccggatcaggtttgcacagtcatactgaatgctgctgaagaatagaacaagcatcacctgtgtgtgttttaggctytgtagaggcagatctatgactgcatattactgccacctgtgctgctgctctcagctgctgtggtcagactcatagcagctaagctttcaaataaaacaccagcaaataagcagtgaagtgtttatagaatattatagggtagttgaaggcctgttccagtgctgtttccagtgctgctggaaaatcctagaagactttattctgtagtttgagtacacaaataatcattgcaatttagacactgaaagggtctttcatttaatatttttaaagctacatggtgcaatttagaaaatgcaa

SEQ ID NO: 38398 - DNA, 600 bp, Chicken  19866894269469_1
cagtccgaccaaagcacatttggggatcttttttatttcatggttttgtgcaaaggctttaatgattgaagcctttggtaagtagccgagacttgttaccctgccgtacttggagtggtttcaaagctctgtttgtatattctggtttttgtatgactttaaacattatttatttctcgtgctgtacatatgtaaagttttaaagagttttggttttgagttccagtttttataagccttgagatgaaaataaagagctctgtatgaatcagtgaagtctcattattaacctactgtggrcccttccagagcagcagtacktgaacactggtttcctcagtctctctaccatctgccacaccacccagcttaaggaaatmtctcatggtgctctgcccagccctgactgaagctggtggcacagctccagcagcaagactctgcaaattaaataaatacccctaagctgttgggagatttacatgaaattatttggttaaccttttcctatgaaaactaaagcagccattgactgcaagaatgaggagcttaggacgagaggtgatggcctcaaactgcactggggaggttcaggctggc

SEQ ID NO: 38399 - DNA, 600 bp, Chicken  19866894269469_2
ggggatcttttttatttcatggttttgtgcaaaggctttaatgattgaagcctttggtaagtagccgagacttgttaccctgccgtacttggagtggtttcaaagctctgtttgtatattctggtttttgtatgactttaaacattatttatttctcgtgctgtacatatgtaaagttttaaagagttttggttttgagttccagtttttataagccttgagatgaaaataaagagctctgtatgaatcagtgaagtctcattattaacctactgtggrcccttccagagcagcagtacktgaacactggtttcctcagtctctctaccatctgccacaccacccagcttaaggaaatmtctcatggtgctctgcccagccctgactgaagctggtggcacagctccagcagcaagactctgcaaattaaataaatacccctaagctgttgggagatttacatgaaattatttggttaaccttttcctatgaaaactaaagcagccattgactgcaagaatgaggagcttaggacgagaggtgatggcctcaaactgcactggggaggttcaggctggctattaggagacacttcttttt

SEQ ID NO: 38400 - DNA, 600 bp, Chicken  19866894269469_3
agtagccgagacttgttaccctgccgtacttggagtggtttcaaagctctgtttgtatattctggtttttgtatgactttaaacattatttatttctcgtgctgtacatatgtaaagttttaaagagttttggttttgagttccagtttttataagccttgagatgaaaataaagagctctgtatgaatcagtgaagtctcattattaacctactgtggrcccttccagagcagcagtacktgaacactggtttcctcagtctctctaccatctgccacaccacccagcttaaggaaatmtctcatggtgctctgcccagccctgactgaagctggtggcacagctccagcagcaagactctgcaaattaaataaatacccctaagctgttgggagatttacatgaaattatttggttaaccttttcctatgaaaactaaagcagccattgactgcaagaatgaggagcttaggacgagaggtgatggcctcaaactgcactggggaggttcaggctggctattaggagacacttctttttgggaagagtggtgaggcagtggcagaggctgtctagggatgtggtggggtcaccatccc

SEQ ID NO: 38401 - DNA, 599 bp, Chicken  19866894269473_1
  misc_feature (1)..(56): n is any nucleotide
nnnnnnnnnnnnnnnnnnnnnnnnnnnnnnnnnnnnnnnnnnnnnnnnnnnnnnnntgtattgttatcatgtgtatacatagttttctagccagtaggaggtccagatttgtacatattgatatctttgattacactttcaagcccagctttccaagaagcataaattacattgcaaacagcaagctcaggagttgcacactgaaaaattgttgtgtgatgtgatattctaatttattttaattgtcattcaataattgctgccagtcagacaatcctttcctaatagtttagaatctgytggaaaggagggagaagttactgtaggacaacagcaagctacacattacccagacaatgctgtctttagttaagataaacagcagtaagatataaaatatgctacgaataaaaacaaagaataacaaattatgatagaaaaactaaaatatatactacaaaatcccaggaagggacattttcattttaagtggcctgaaatttagttcactgaagtctatggttgaagttggggcctscaacgtaaccccatacagatcctaaccttcttgttgaaagtatactccagtttctggtatt

SEQ ID NO: 38402 - DNA, 494 bp, Chicken  19866894269473_2
ttaattgtcattcaataattgctgccagtcagacaatcctttcctaatagtttagaatctgytggaaaggagggagaagttactgtaggacaacagcaagctacacattacccagacaatgctgtctttagttaagataaacagcagtaagatataaaatatgctacgaataaaaacaaagaataacaaattatgatagaaaaactaaaatatatactacaaaatcccaggaagggacattttcattttaagtggcctgaaatttagttcactgaagtctatggttgaagttggggcctscaacgtaaccccatacagatcctaaccttcttgttgaaagtatactccagtttctggtattcatggaaatttacagacttatttacgtaactttactaggtgacgtggaataaaaatttgcttagttggctcagggaggttgagctttcaagaagatatgagtatgggaaaatctgagtcttgccttcttacta

SEQ ID NO: 38403 - DNA, 599 bp, Chicken  19866894269485_1
  misc_feature (1)..(82): n is any nucleotide
nnnnnnnnnnnnnnnnnnnnnnnnnnnnnnnnnnnnnnnnnnnnnnnnnnnnnnnnnnnnnnnnnnnnnnnnnnnnnnnnnnatcttaacaaactgtgagtccttatctagtatggtgagtatagggaggtctctgctgcatatgacatagactaaaaaggcactagaagctttacatagctgattctaggaaaataaaaataccaggcccactatgtttcatattagcaaatggtagacaacataaaatttcagaaagttatgtccagtggttatttaggtacatcaacagagaccaamagatccgcagcggtattcgagacgtgagtttttgtcaaacgtgtgcccataatgaatgattccacgtttcatgacaaattatggtggttaataaaagcaaatatgaattatgtcagccaatccttcaacatactgctcctcttttcttgatgtttactagttttctctcaaatgtctcatttgtctctgctgagtacttcacacaatcagtttgtagcttacataytgatagactggcaaaacatttgttttctagtaaacagcacagacagaatttgataatgtgcctggcaaatgaa

SEQ ID NO: 38404 - DNA, 600 bp, Chicken  19866894269485_2
agcaaatggtagacaacataaaatttcagaaagttatgtccagtggttatttaggtacatcaacagagaccaamagatccgcagcggtattcgagacgtgagtttttgtcaaacgtgtgcccataatgaatgattccacgtttcatgacaaattatggtggttaataaaagcaaatatgaattatgtcagccaatccttcaacatactgctcctcttttcttgatgtttactagttttctctcaaatgtctcatttgtctctgctgagtacttcacacaatcagtttgtagcttacataytgatagactggcaaaacatttgttttctagtaaacagcacagacagaatttgataatgtgcctggcaaatgaatttccagggtgatttcataagggagaggaaaacaccattttcatttaagctaacagaacttcaggttctttttcatcaacttgatacctaggaagccttctgtgtttgtattacatttcccacacctcaaattctgattactcaaaaccgaagaaataacctaaatttaaatacagacataaatagatgctatctctttaagctgcaggatccccagatgtgatgca

SEQ ID NO: 38405 - DNA, 456 bp, Chicken  19866894269489_1
cacctggaagccaacatctcaacaggtccatttcaaatattggggaaaataaatatccagagtatatctgtaattttgttataaattgcacggaggagagttttgtttgaccttgggtacagcctgcacaagtggtgaagtagcagtgtaagtaaagttggaaaataatgataataatttagatctgtcaatctttaacccaaaatggatgatcaaagtagaacagatatgaattacagtagtgtacagcaattgcactcgaagggtacagaatactggagaggtagtttttcaggaacrtttgaaattccagcactattgaagagttctggggctgacctttctgcagcaaaagccaaaactaagtggcttaggctttgtagattagtgtttcaaatatcctgtgtatatttctgtttagtatggcgagctgagtacatcttttcttacaaatat

SEQ ID NO: 38406 - DNA, 599 bp, Chicken  19866894269492_1
  misc_feature (1)..(80): n is any nucleotide
nnnnnnnnnnnnnnnnnnnnnnnnnnnnnnnnnnnnnnnnnnnnnnnnnnnnnnnnnnnnnnnnnnnnnnnnnnnnnnnngaataataacataaaagttttgttataaaagatttcatcaatatctgaaatcattatgaatacaagaagtgatgttctgctgggtggtacttaaaaatccagtaagtgcctagaaaaccctactgtctcttctcataagaagtccaagaaatcaatattaattcaggcttacccaaacactgctgttctgcttggggttcttcattatggctggtgtgtrgttgtcatttctgatggtgagtgaggcccctcattttctctctctgcagaaatctatcactgctctttacagctacccactgccagttaaagcatrgcagtagggctgtgggtttagattttgctgtttttctcggtggtgagcaggtttctcatttatttaagccctcattctgcagccatccaacgtgcccatgcctctttgagaaaccttgctgtgttcggtgcaccttgggagactcctcagtgaggctgaagatgcgatggattaatccaaggggcagagaatatacagagctc

SEQ ID NO: 38407 - DNA, 600 bp, Chicken  19866894269492_2
gttttgttataaaagatttcatcaatatctgaaatcattatgaatacaagaagtgatgttctgctgggtggtacttaaaaatccagtaagtgcctagaaaaccctactgtctcttctcataagaagtccaagaaatcaatattaattcaggcttacccaaacactgctgttctgcttggggttcttcattatggctggtgtgtrgttgtcatttctgatggtgagtgaggcccctcattttctctctctgcagaaatctatcactgctctttacagctacccactgccagttaaagcatrgcagtagggctgtgggtttagattttgctgtttttctcggtggtgagcaggtttctcatttatttaagccctcattctgcagccatccaacgtgcccatgcctctttgagaaaccttgctgtgttcggtgcaccttgggagactcctcagtgaggctgaagatgcgatggattaatccaaggggcagagaatatacagagctctggttttctctgtggtttggcctgaacttgcttttgttttgagagttctttaagtgttctttgttctgtctcatatgaaggtgtgactgcagacgat

SEQ ID NO: 38408 - DNA, 600 bp, Chicken  19866894269501_1
gtcactgcccaaagcacggctgttacagtgagcggcgcagtactgcgctcagaacgactgctctgctggctggctgggggaggaggggagagcctgcctaacccagggcttagcagttctttttcgccaaggataactcgtctgtctgtgcctcagacctttttagctcaggaacacataattgaggtgtgcaagaaatagcgtttattttccctgcgggagattaaaggcactttgcagccacatcctcgcagtaacacacggtaagttaatggtttgcagaagcagttgctggctggyggaggttttttttgccagctccatctgccttggttactggttacaaggtatttatatacccccccgtttcatcaagcagagatcgagggctggctctgtactgcaggaacattggaagcaaccatctccaacaaagcagctccttcccctcgcaccgccctggttcccctgcctattgcctggaggggcagcctgtgctgagcacagtgatgtgctgtggggtgaagggaggcagcacggtggcactgagctgatccctgtgagcaggtaatgggttgtggctgagcactgaccgcatgc

SEQ ID NO: 38409 - DNA, 424 bp, Chicken  19866894269501_2
gggctggctctgtactgcaggaacattggaagcaaccatctccaacaaagcagctccttcccctcgcaccgccctggttcccctgcctattgcctggaggggcagcctgtgctgagcacagtgatgtgctgtggggtgaagggaggcagcacggtggcactgagctgatccctgtgagcaggtaatgggttgtggctgagcactgaccgcatgctgctgtctcccaacacctttctgttggtccatggagaacccagtgcaggttctggatgctctgctgcccttccctgtggttgcccrtttacaggtggtgtcactgccccaagcagctattggctgtaccaaccatgctccttatcttctcttccctcttatctgctgtgggaaagttggtgggtcactgtgttatggctacagaatgaga

SEQ ID NO: 38410 - DNA, 600 bp, Chicken  19866894269502_1
ttgcaaaagcctccgtgccaaatggttgacaccactcatagatgttcattctgtggagctttgaggcaaactggaggcttggcaattacttctccccaagtgtagagagcatgtgagcgaactctgatggtggtacaggttgagccactggtggacccaggcatgagatgagctctttggctgcctggtgctgcatgtagagcagtgctgtgattccttctgaagctaagcactgaaggaagtagcctcagctcagacggaaggctataagcaattagagagatgccactgtcagccagyagaactggatccagatagaatgtctgtctgtagccacaggcttccaccagtttgagctaactggcaggcattgcagtggtgcagatgaaggagttcctactttctcacctaagagctgaacgttggaagtatcagcctctgccaaaagggcgatgacaaacacctggagagtgataacattttaagccatcactgtcacttctgtagcagctgacccctctctatttaaaataaataaataaatcaaagtaggaaactgtagttttctttatcctggagcacttccacactgccagtgga

SEQ ID NO: 38411 - DNA, 600 bp, Chicken  19866894269503_1
aataggcatttctcacccttgtaaaaccagcttgcttttgaaccaatgcctcttttcaagaactttagcttactattatggcatgaaggtcaagaccgtgttgttctgactgagatgagcacagcagctttcacagtgggcagtgaaacacgttgctcttgtgcttaacattttgaactaaaaagatgaaatgcagcatgagaaggcatcattttctgcgtgagtctttgatgtgttttgtcttttagcctcactattgttgggttgggctaatattgaatgcttactctcacatgatgmccttatttgacaggactgcttgcttctgctgatcttaagtttcccggcaaggtacgtaggcaatttcaacttgaacttttcaatagaagaaacagagagacrggttatcaaatggaacaaacaaatgatgggcctgtatgtgaacaaggcaggtcagctcaacccagacacaatggaggtaaactgtggcacgggcaggttgggagcaaccaccagaacagctggaaaaggttatattaaaacctctctgatctgaatagagggattactacaggttataaaaagmgtctgcacrttgta

SEQ ID NO: 38412 - DNA, 600 bp, Chicken  19866894269503_2
gttctgactgagatgagcacagcagctttcacagtgggcagtgaaacacgttgctcttgtgcttaacattttgaactaaaaagatgaaatgcagcatgagaaggcatcattttctgcgtgagtctttgatgtgttttgtcttttagcctcactattgttgggttgggctaatattgaatgcttactctcacatgatgmccttatttgacaggactgcttgcttctgctgatcttaagtttcccggcaaggtacgtaggcaatttcaacttgaacttttcaatagaagaaacagagagacrggttatcaaatggaacaaacaaatgatgggcctgtatgtgaacaaggcaggtcagctcaacccagacacaatggaggtaaactgtggcacgggcaggttgggagcaaccaccagaacagctggaaaaggttatattaaaacctctctgatctgaatagagggattactacaggttataaaaagmgtctgcacrttgtaagcatgcaattacttcagaagagcaatccacctctaattgacccaaaaaggcagttggctggtcagacagctggtcgaggacaatggggcaaacggccttga

SEQ ID NO: 38413 - DNA, 600 bp, Chicken  19866894269503_3
ctctcacatgatgmccttatttgacaggactgcttgcttctgctgatcttaagtttcccggcaaggtacgtaggcaatttcaacttgaacttttcaatagaagaaacagagagacrggttatcaaatggaacaaacaaatgatgggcctgtatgtgaacaaggcaggtcagctcaacccagacacaatggaggtaaactgtggcacgggcaggttgggagcaaccaccagaacagctggaaaaggttatattaaaacctctctgatctgaatagagggattactacaggttataaaaagmgtctgcacrttgtaagcatgcaattacttcagaagagcaatccacctctaattgacccaaaaaggcagttggctggtcagacagctggtcgaggacaatggggcaaacggccttgaaagcagacctgcataagattaggttatgtatttttctcayccatcctgtgcagagatgtcctgcccatcctctggctggctgcaggagytgctgttcacctgctttcctaggaacggtgagcacacctgaaataatgcacttatttggcaactgtgggtcagaacataaggctayagtgcagtt

SEQ ID NO: 38414 - DNA, 600 bp, Chicken  19866894269503_4
gatgmccttatttgacaggactgcttgcttctgctgatcttaagtttcccggcaaggtacgtaggcaatttcaacttgaacttttcaatagaagaaacagagagacrggttatcaaatggaacaaacaaatgatgggcctgtatgtgaacaaggcaggtcagctcaacccagacacaatggaggtaaactgtggcacgggcaggttgggagcaaccaccagaacagctggaaaaggttatattaaaacctctctgatctgaatagagggattactacaggttataaaaagmgtctgcacrttgtaagcatgcaattacttcagaagagcaatccacctctaattgacccaaaaaggcagttggctggtcagacagctggtcgaggacaatggggcaaacggccttgaaagcagacctgcataagattaggttatgtatttttctcayccatcctgtgcagagatgtcctgcccatcctctggctggctgcaggagytgctgttcacctgctttcctaggaacggtgagcacacctgaaataatgcacttatttggcaactgtgggtcagaacataaggctayagtgcagttatcytagag

SEQ ID NO: 38415 - DNA, 600 bp, Chicken  19866894269503_5
aacaaggcaggtcagctcaacccagacacaatggaggtaaactgtggcacgggcaggttgggagcaaccaccagaacagctggaaaaggttatattaaaacctctctgatctgaatagagggattactacaggttataaaaagmgtctgcacrttgtaagcatgcaattacttcagaagagcaatccacctctaattgacccaaaaaggcagttggctggtcagacagctggtcgaggacaatggggcaaacggccttgaaagcagacctgcataagattaggttatgtatttttctcayccatcctgtgcagagatgtcctgcccatcctctggctggctgcaggagytgctgttcacctgctttcctaggaacggtgagcacacctgaaataatgcacttatttggcaactgtgggtcagaacataaggctayagtgcagttatcytagaggagtgggagctgctctcgattcacaagccacagtggtgaaacgtgaaatctctcttccgtagctgacatgttacacatgacttctgctggaagacctctgtgacatatcgaagtcatctggatgggctgcctgaaagaatgggtgag

SEQ ID NO: 38416 - DNA, 600 bp, Chicken  19866894269503_6
cgggcaggttgggagcaaccaccagaacagctggaaaaggttatattaaaacctctctgatctgaatagagggattactacaggttataaaaagmgtctgcacrttgtaagcatgcaattacttcagaagagcaatccacctctaattgacccaaaaaggcagttggctggtcagacagctggtcgaggacaatggggcaaacggccttgaaagcagacctgcataagattaggttatgtatttttctcayccatcctgtgcagagatgtcctgcccatcctctggctggctgcaggagytgctgttcacctgctttcctaggaacggtgagcacacctgaaataatgcacttatttggcaactgtgggtcagaacataaggctayagtgcagttatcytagaggagtgggagctgctctcgattcacaagccacagtggtgaaacgtgaaatctctcttccgtagctgacatgttacacatgacttctgctggaagacctctgtgacatatcgaagtcatctggatgggctgcctgaaagaatgggtgaggtggggttggggtaactgggctcttcccaaactcaggtgtggcaaatgt

SEQ ID NO: 38417 - DNA, 600 bp, Chicken  19866894269503_7
ataaaaagmgtctgcacrttgtaagcatgcaattacttcagaagagcaatccacctctaattgacccaaaaaggcagttggctggtcagacagctggtcgaggacaatggggcaaacggccttgaaagcagacctgcataagattaggttatgtatttttctcayccatcctgtgcagagatgtcctgcccatcctctggctggctgcaggagytgctgttcacctgctttcctaggaacggtgagcacacctgaaataatgcacttatttggcaactgtgggtcagaacataaggctayagtgcagttatcytagaggagtgggagctgctctcgattcacaagccacagtggtgaaacgtgaaatctctcttccgtagctgacatgttacacatgacttctgctggaagacctctgtgacatatcgaagtcatctggatgggctgcctgaaagaatgggtgaggtggggttggggtaactgggctcttcccaaactcaggtgtggcaaatgttaaggactgtaagcatacttacacattacttgcaaggagaaattcagcaccctacaggaaggattgcacaagtactcttattttag

SEQ ID NO: 38418 - DNA, 600 bp, Chicken  19866894269503_8
gcacrttgtaagcatgcaattacttcagaagagcaatccacctctaattgacccaaaaaggcagttggctggtcagacagctggtcgaggacaatggggcaaacggccttgaaagcagacctgcataagattaggttatgtatttttctcayccatcctgtgcagagatgtcctgcccatcctctggctggctgcaggagytgctgttcacctgctttcctaggaacggtgagcacacctgaaataatgcacttatttggcaactgtgggtcagaacataaggctayagtgcagttatcytagaggagtgggagctgctctcgattcacaagccacagtggtgaaacgtgaaatctctcttccgtagctgacatgttacacatgacttctgctggaagacctctgtgacatatcgaagtcatctggatgggctgcctgaaagaatgggtgaggtggggttggggtaactgggctcttcccaaactcaggtgtggcaaatgttaaggactgtaagcatacttacacattacttgcaaggagaaattcagcaccctacaggaaggattgcacaagtactcttattttagtggaaggatgtcc

SEQ ID NO: 38419 - DNA, 600 bp, Chicken  19866894269506_1
gtgtcacctatgaggttcagtgaggagagatggaacttctccaggtctgagaggatgatcttcctcctgccaccactctcttcagcatcctccactgccttctgaggctctgtgctgggactttcattcttctcatcctccttcagtgcatcctccagccccaaagccggcagctcccactccagcatctcaccagtgcccgcagcatcctccacttcaccagtgcccacacccttctctatcttgggctccctgggtggctgtggtgaagtgggtggggttccaggctcctcctgctcrggggatgcacagggtctcccagcatccaagagcacatcgtcagtgacagcatcctaggcccagaagggtagcagaggagtgatgagtgtgaggccatacccaagcattccctcccgctatttgaccccattcatggccacttaccccatcaggcagcatggagagtttgttcgggagcagcactgggggctcacttgggggcagctccatgctaagggtgtcggggaagtgaagtgagcaatagaagtgacctgggaaggacggtgcaaacccacacgatgaggaagcaacgaggctgtg

SEQ ID NO: 38420 - DNA, 599 bp, Chicken  19866894269509_1
  misc_feature (1)..(166): n is any nucleotide
nnnnnnnnnnnnnnnnnnnnnnnnnnnnnnnnnnnnnnnnnnnnnnnnnnnnnnnnnnnnnnnnnnnnnnnnnnnnnnnnnnnnnnnnnnnnnnnnnnnnnnnnnnnnnnnnnnnnnnnnnnnnnnnnnnnnnnnnnnnnnnnnnnnnnnnnnnnnnnnnnnnnnnggtggggtcaccttttgaccgtggccacctggacaaaagccaccacgtccctccttaccagccggatcttctctgagggccgatagccatctggcccatcgtacacgatcttctggagactgcaggaagctttyaccaagcacttgggcccgaggttgctgttgttggaggaaaagttggccttgtagtcgggctgctgctgcaccatgggccggacygtggccgtggtgaccacgcgggacgctggtgcctcctcggggcttttggcctccttgaaaaacttctcatacttgtccaagtaggcagggcgctcgggcagcaggtagtagtgggtgctgctgaccttctgcccatccttcacaatgggcaggatgcagggtcccttggagcagtccttgccctgcgcctggatcactttgggggtggcgtattt

SEQ ID NO: 38421 - DNA, 599 bp, Chicken  19866894269509_2
  misc_feature (1)..(82): n is any nucleotide
nnnnnnnnnnnnnnnnnnnnnnnnnnnnnnnnnnnnnnnnnnnnnnnnnnnnnnnnnnnnnnnnnnnnnnnnnnnnnnnnnnggtggggtcaccttttgaccgtggccacctggacaaaagccaccacgtccctccttaccagccggatcttctctgagggccgatagccatctggcccatcgtacacgatcttctggagactgcaggaagctttyaccaagcacttgggcccgaggttgctgttgttggaggaaaagttggccttgtagtcgggctgctgctgcaccatgggccggacygtggccgtggtgaccacgcgggacgctggtgcctcctcggggcttttggcctccttgaaaaacttctcatacttgtccaagtaggcagggcgctcgggcagcaggtagtagtgggtgctgctgaccttctgcccatccttcacaatgggcaggatgcagggtcccttggagcagtccttgccctgcgcctggatcactttgggggtggcgtatttggggtccagggcgaagctctgcgtggtgggcatgggtttccctggcgaygtggatagrcaggagcagagggcagcccgctgctg

SEQ ID NO: 38422 - DNA, 600 bp, Chicken  19866894269509_3
ttgtagtcgggctgctgctgcaccatgggccggacygtggccgtggtgaccacgcgggacgctggtgcctcctcggggcttttggcctccttgaaaaacttctcatacttgtccaagtaggcagggcgctcgggcagcaggtagtagtgggtgctgctgaccttctgcccatccttcacaatgggcaggatgcagggtcccttggagcagtccttgccctgcgcctggatcactttgggggtggcgtatttggggtccagggcgaagctctgcgtggtgggcatgggtttccctggcgaygtggatagrcaggagcagagggcagcccgctgctgtggggagcccacctgcagggccatggggctgggcgtccgygaagtgggctgagacagcgggtcccgaggggggatttggggtggccggtcctcttcgccccccgaggctggggacagctctccagaccaacgcccgggttcattgcggcgcagcggccgaggmggaatggggacgcggggtgggatttggggtttgtcgtcagccaggcaggcggatggcccccggggcacgttgaacctcttcatgcactcctgctgcagctcc

SEQ ID NO: 38423 - DNA, 600 bp, Chicken  19866894269509_4
ggctgctgctgcaccatgggccggacygtggccgtggtgaccacgcgggacgctggtgcctcctcggggcttttggcctccttgaaaaacttctcatacttgtccaagtaggcagggcgctcgggcagcaggtagtagtgggtgctgctgaccttctgcccatccttcacaatgggcaggatgcagggtcccttggagcagtccttgccctgcgcctggatcactttgggggtggcgtatttggggtccagggcgaagctctgcgtggtgggcatgggtttccctggcgaygtggatagrcaggagcagagggcagcccgctgctgtggggagcccacctgcagggccatggggctgggcgtccgygaagtgggctgagacagcgggtcccgaggggggatttggggtggccggtcctcttcgccccccgaggctggggacagctctccagaccaacgcccgggttcattgcggcgcagcggccgaggmggaatggggacgcggggtgggatttggggtttgtcgtcagccaggcaggcggatggcccccggggcacgttgaacctcttcatgcactcctgctgcagctcctggaagatc

SEQ ID NO: 38424 - DNA, 600 bp, Chicken  19866894269509_5
gggcttttggcctccttgaaaaacttctcatacttgtccaagtaggcagggcgctcgggcagcaggtagtagtgggtgctgctgaccttctgcccatccttcacaatgggcaggatgcagggtcccttggagcagtccttgccctgcgcctggatcactttgggggtggcgtatttggggtccagggcgaagctctgcgtggtgggcatgggtttccctggcgaygtggatagrcaggagcagagggcagcccgctgctgtggggagcccacctgcagggccatggggctgggcgtccgygaagtgggctgagacagcgggtcccgaggggggatttggggtggccggtcctcttcgccccccgaggctggggacagctctccagaccaacgcccgggttcattgcggcgcagcggccgaggmggaatggggacgcggggtgggatttggggtttgtcgtcagccaggcaggcggatggcccccggggcacgttgaacctcttcatgcactcctgctgcagctcctggaagatctctgtagtctgcgtcaggctgggctgcttggtgtctttggggggcagaaagaggttgtcctccagc

SEQ ID NO: 38425 - DNA, 600 bp, Chicken  19866894269509_6
cccttggagcagtccttgccctgcgcctggatcactttgggggtggcgtatttggggtccagggcgaagctctgcgtggtgggcatgggtttccctggcgaygtggatagrcaggagcagagggcagcccgctgctgtggggagcccacctgcagggccatggggctgggcgtccgygaagtgggctgagacagcgggtcccgaggggggatttggggtggccggtcctcttcgccccccgaggctggggacagctctccagaccaacgcccgggttcattgcggcgcagcggccgaggmggaatggggacgcggggtgggatttggggtttgtcgtcagccaggcaggcggatggcccccggggcacgttgaacctcttcatgcactcctgctgcagctcctggaagatctctgtagtctgcgtcaggctgggctgcttggtgtctttggggggcagaaagaggttgtcctccagccccgctgcccgctcgccctcgtccacgaagccgtagttggtctcaccccgctcgcgtgcgctgggaaggccagcacggctgccctgccgccccagggggctgttgatggagcacacctcgaag

SEQ ID NO: 38426 - DNA, 600 bp, Chicken  19866894269514_1
tgtaagcgatatattctctaagatgatatagggcaggctctgttactgtgtgttatatgttcttactgaactgaatgtcttcttcctgttctactcatattgccacttatctgtagctcaagaaatcatttatttaactggtgcatttatagaatggagaatataccacatgctgttaattttttcctgtctcctgatttctctctatttgaattagagctgcagagctctgcaaaggctttaaaaacaacagagggacatgggtgaaggggctaaatatatgtggtgtctctaagtatyccctggtcagatggaatctgactgcttctaatagagcagtgggtgaacaatcccaatttaaccctatggcaaagcggctttgcctcctagtcacagtaggttctctcagtcagaatgatgtgctccatcccagaatttacttaaactctgctaaactgtagagataatttaaaatgtggagttttstgttacggatcagatcctcagctagatctggaataattcaattaaaagcagtggaactacagagatttctatcagttgtggtaacactataaacctcttgtaaataaagcctgc

SEQ ID NO: 38427 - DNA, 600 bp, Chicken  19866894269514_2
ctgtctcctgatttctctctatttgaattagagctgcagagctctgcaaaggctttaaaaacaacagagggacatgggtgaaggggctaaatatatgtggtgtctctaagtatyccctggtcagatggaatctgactgcttctaatagagcagtgggtgaacaatcccaatttaaccctatggcaaagcggctttgcctcctagtcacagtaggttctctcagtcagaatgatgtgctccatcccagaatttacttaaactctgctaaactgtagagataatttaaaatgtggagttttstgttacggatcagatcctcagctagatctggaataattcaattaaaagcagtggaactacagagatttctatcagttgtggtaacactataaacctcttgtaaataaagcctgcattgttaatgctgtcagtggtgaagcaaattctctaaccagtggcacacagacaacctgggcaagctgatgaatttcacaagtcatctctgaacttttcctcagagtggtcacaatcagatggataccacacagagctgagatcttacacaagtaaaggacataaggtattttctaaagaagagag

SEQ ID NO: 38428 - DNA, 600 bp, Chicken  19866894269515_1
agcttatatgcacagatgtatatttatgtatccttaagcaactgatatcaaagtatggaataaattactaccacagtaaataaactgaggaaccaataagcaattaaatatctctgttaagttctgagaataagtgatctgtgagccaccgtgccacttgtagaggatttttgtcaagcagattcacttctcattgaaaataaaatatttatcatatcatattatgatgtagtaacaggtgtcgtactgaaatgatgcacgaacagtgttttattggctgaagtgtggtataatgtaaartaggatatgaaaaaatacttattgctggtgtctttggatagttattgggcattcaaggccaggctggatgtggctctgggcagcctggtctgctggttggcgaccctgcacatagcagggggttgaaaccagatgtgcattgtggtccttctcaacccaggccattctatgattctatgaagtcgcagaagactattggggttttgcttcaaaactgtgctaacacaattgaaaccttcattgtggctacttgtccggaaatgttggtgttcactggggacaaaaagccaaagcaggtgt

SEQ ID NO: 38429 - DNA, 600 bp, Chicken  19866894269515_2
atacttattgctggtgtctttggatagttattgggcattcaaggccaggctggatgtggctctgggcagcctggtctgctggttggcgaccctgcacatagcagggggttgaaaccagatgtgcattgtggtccttctcaacccaggccattctatgattctatgaagtcgcagaagactattggggttttgcttcaaaactgtgctaacacaattgaaaccttcattgtggctacttgtccggaaatgttggtgttcactggggacaaaaagccaaagcaggtgttaggagttgggggrggggaaagctgcaagcaaaagaataagcacaactgggcactgtgcaaattcaagctgccttttggcaccctcagcctgagggtacagaggcagcctctggctctgtattttcctaaactggtgcattttccattagttgaaaggccatatggggacatggccagcatgaattcactgcctctgtatgttttgtattctttatgaaagcatccttactggatgctaagctgatggactgggcactaagccagtgtgttaatggttgctctggatgatcttagtggccttttccaaccttaa

SEQ ID NO: 38430 - DNA, 600 bp, Chicken  19866894269519_1
actggcctatacaactgtgtgcaacccatattcacatgagatgtacatgcatacaaagcttgccataaaacgaagtgaatatttagctaacaaactgcctagttggtctgttttttgttttttttttttctgtttttgtttgtttgttttttgtttggtttgtttttgttttttttttttaagagacaatgaaagagcagcaaagaggacacaaaaagaaatttcagtaactataccacagtaactagagctgtaccaatagtacctcttagtggtcacggtaatctgcttccaagaaakggaacaagaaggaaaaacaagtcatgagtggaaatgttagtgagcttcagggaaaaaaaaattaaaaaggagaaggatttggtaggttggaccttgaaggcagtgtttcagatagcttgtttgaagagatgaatgtgaacagacacagctcaaactacgctgtgccacgtgcacacgctttccacaagtcctgctactgtaattcccccaggtcttgaaaattcacatttgatgtgtttaaaagacaagaacctgttggaaacatttcaaatatgtacaggcagtttcaaaccaagttaa

SEQ ID NO: 38431 - DNA, 600 bp, Chicken  19866894269519_2
acatttgatgtgtttaaaagacaagaacctgttggaaacatttcaaatatgtacaggcagtttcaaaccaagttaatcaatcttcatattcctttttacccaagctgcagaaggggcaaatgggaaatgggacacatatcaatttgcagtttatctggacacctaaaaataacaaagcatatcttcagcatccctgcacttaatttctgctagctgtgaagaattgtcagtgagctagatgatcagtttctaaagatgcggactctgaagatgacagaagcatgtgcgaactgtctacakggctgagaaacacctctcttttcccagctgggtcactgattayttgtgcaaatcatgcaaaggcaccatctctggagcctacagttaaggaaaagttaataagcacaagggataaagaacacacaggttattctggagagattcctgagttgaccatcttacaactaaaggaatcaaaaagggaaacagtgaraattcaagtaaaatcttcacaaactcagtcataaaagtgtcataaaaggaaaatggagcaaaaacaaagcctgcagccactcctccacctcaccaagacaatctaca

SEQ ID NO: 38432 - DNA, 600 bp, Chicken  19866894269519_3
caaatatgtacaggcagtttcaaaccaagttaatcaatcttcatattcctttttacccaagctgcagaaggggcaaatgggaaatgggacacatatcaatttgcagtttatctggacacctaaaaataacaaagcatatcttcagcatccctgcacttaatttctgctagctgtgaagaattgtcagtgagctagatgatcagtttctaaagatgcggactctgaagatgacagaagcatgtgcgaactgtctacakggctgagaaacacctctcttttcccagctgggtcactgattayttgtgcaaatcatgcaaaggcaccatctctggagcctacagttaaggaaaagttaataagcacaagggataaagaacacacaggttattctggagagattcctgagttgaccatcttacaactaaaggaatcaaaaagggaaacagtgaraattcaagtaaaatcttcacaaactcagtcataaaagtgtcataaaaggaaaatggagcaaaaacaaagcctgcagccactcctccacctcaccaagacaatctacagaagtcgcatggtaccatgcaacattgtccagcctcaataagc

SEQ ID NO: 38433 - DNA, 600 bp, Chicken  19866894269519_4
ctgcacttaatttctgctagctgtgaagaattgtcagtgagctagatgatcagtttctaaagatgcggactctgaagatgacagaagcatgtgcgaactgtctacakggctgagaaacacctctcttttcccagctgggtcactgattayttgtgcaaatcatgcaaaggcaccatctctggagcctacagttaaggaaaagttaataagcacaagggataaagaacacacaggttattctggagagattcctgagttgaccatcttacaactaaaggaatcaaaaagggaaacagtgaraattcaagtaaaatcttcacaaactcagtcataaaagtgtcataaaaggaaaatggagcaaaaacaaagcctgcagccactcctccacctcaccaagacaatctacagaagtcgcatggtaccatgcaacattgtccagcctcaataagcttagcatccatccaatttaatataggaaataagttcactgctggctgaatytaaaacgatgtccaaatgtcttctgtcatttaactacaatctggtgtgttaaatttccctctgactctacctcatgcctgtaaatcttccagccagtca

SEQ ID NO: 38434 - DNA, 587 bp, Chicken  19866894269519_5
gttaataagcacaagggataaagaacacacaggttattctggagagattcctgagttgaccatcttacaactaaaggaatcaaaaagggaaacagtgaraattcaagtaaaatcttcacaaactcagtcataaaagtgtcataaaaggaaaatggagcaaaaacaaagcctgcagccactcctccacctcaccaagacaatctacagaagtcgcatggtaccatgcaacattgtccagcctcaataagcttagcatccatccaatttaatataggaaataagttcactgctggctgaatytaaaacgatgtccaaatgtcttctgtcatttaactacaatctggtgtgttaaatttccctctgactctacctcatgcctgtaaatcttccagccagtcattaactgcttggttaaggactggcacctcatatattgtcacttaattatgttatgctacattgggcttcctaggaggcactcatttagcacaaaaacacctctaaagaaaaccatgtagacaaaccgcccaagccagaaacgatgaagagtgctgttgacaggagaatagaaatgacaactaaaacag

SEQ ID NO: 38435 - DNA, 600 bp, Chicken  19866894269534_1
ctcacattacagtaagtgatgtcctttctctcgtactttatttatttatttgtttaatctctgtagtcttcagtaaatggcacatccttccatagaatcttccactgtcatagtttgagagatatcaaagctgatcaagtaaaaacataggattaaataggtaagtttattttcacttttcacaaggtgtacctagattttcatttatgcttttatactaattatatatataactatatatattatatttaactatgtagatatgtggttatatataatgtagttatatataaaactacrtatatatgtattatatatataactatattatatttatgcttttatagtaattatgaacctgtatatctgtcatttgatattctgatatgaatagatgcttacaggaacaatggaaaaaaagaaaattgtagcagactgatatctgtattttaacttttctttggttgkctgttattcacatttattaggatcattatctatcagattcaataggtgataattgctgtgaaaagttgaaatattttagaaaatcatatcratgtactgcttatttgagaatgactggtaagtaatcaatgt

SEQ ID NO: 38436 - DNA, 600 bp, Chicken  19866894269534_2
attttcacttttcacaaggtgtacctagattttcatttatgcttttatactaattatatatataactatatatattatatttaactatgtagatatgtggttatatataatgtagttatatataaaactacrtatatatgtattatatatataactatattatatttatgcttttatagtaattatgaacctgtatatctgtcatttgatattctgatatgaatagatgcttacaggaacaatggaaaaaaagaaaattgtagcagactgatatctgtattttaacttttctttggttgkctgttattcacatttattaggatcattatctatcagattcaataggtgataattgctgtgaaaagttgaaatattttagaaaatcatatcratgtactgcttatttgagaatgactggtaagtaatcaatgtatgtaaataaagaaatagaaaaatattctgtaaaatggacttggttctatttagtgtaacatcagaagtatatttttgttgtacaaacattattcatgtgttctgaacagtttatttaagaaatatttccttacttctctatagcagtaattcatatctgttttaaaa

SEQ ID NO: 38437 - DNA, 577 bp, Chicken  19866894269534_3
gatatgtggttatatataatgtagttatatataaaactacrtatatatgtattatatatataactatattatatttatgcttttatagtaattatgaacctgtatatctgtcatttgatattctgatatgaatagatgcttacaggaacaatggaaaaaaagaaaattgtagcagactgatatctgtattttaacttttctttggttgkctgttattcacatttattaggatcattatctatcagattcaataggtgataattgctgtgaaaagttgaaatattttagaaaatcatatcratgtactgcttatttgagaatgactggtaagtaatcaatgtatgtaaataaagaaatagaaaaatattctgtaaaatggacttggttctatttagtgtaacatcagaagtatatttttgttgtacaaacattattcatgtgttctgaacagtttatttaagaaatatttccttacttctctatagcagtaattcatatctgttttaaaatgaaaatgttttctgatcagctaattttcctaaatttagaatgagatatgaaatcacaaattactccc

SEQ ID NO: 38438 - DNA, 600 bp, Chicken  19866894269535_1
cctctacagttcaccactgataaaatatggctttgctttcagtaaagcagtgccttgtttacaaagtagtgaagggactggtgaaaaagacaagattgacagagtgaaagaaagggtagcatttggctggtagaaatgttagggtctcgacagaaggcatctcgctgacttgaaggctgcaggtgaaacttcaagaattggttgtttgcccacgtttttactgaacagcgattcaagaactggagtatccctgccagttatagtcaaaagtatggaaccatgctcttgttttatgaataytatatgctcttgctcttgtttaaataagcgcaaaataacctttaccacctgtttttcacactgcctaactgaaggagtctatattggtttgcatggtgtttcttttttaatcaagactgttttttccccaggattatgtcagatctatataggatgtatgtttgcaagagactaaagacctgtgtgcttttatttcatgacatctgaagtattaggcacaatatcatgtaacatcccactacagtgagttcattggcaaactatttcattgatccatctgctactacttgcttgatgttt

SEQ ID NO: 38439 - DNA, 600 bp, Chicken  19866894269545_1
tgcctagggcattgccagtatgggactaggacttgctgtgatcggccaccgcagggggtcacgtgccttcacattgctccagcctctgcttctgtggttttctgaaggtgaaaatacctcattccttcctgaaggctttgggaacagcttagacaaatgcccatcagggataggaagatggagtaacttggccttgagttggtaaaagattagatatatccttaaagtaatttctagagaattacagtcacattcctatgaatcttagaaggggttttaatagggctgcagaggtgatcygtgcagttctataaatctgtactttttatataatggcaagaaatttaagatgatatgccacaattagttcttctctgatttagagacgtagaaaacaaggacttctacagaatatagaaataccctttttcacttaactagcttaagaactaagttattattaatagtgaaggaattattatgctaaaattatggacatttcagccagcaaaaactaaaagattactgaaaagaaaaaaaaatgctagcacaaatggtctgaaaatctttggctttgtgccaatctatcataaaacggaa

SEQ ID NO: 38440 - DNA, 600 bp, Chicken  19866894269546_1
acaaaatgattgatactgcagcaactcatcggagtaaatgcagatattacagatgagtgcagcatgaaaatacaggaaagcaatagaatgcccatcaccagcaaccttaaagcagagaaatggtttagatgtactcagttctatggtgggctttcaactttttaaaaatggttctacagaaaagaacatgtgttacgtaaaatatctatgtttatatgcactaatatttttaaaagaatgggagactttgaaataggactgcagttgaaaagtagtggaatatttttgtgctgtatagtrataatcttcacgctaaaacagttcagatgtaccataactcaaaaggccactggtcatcagcagcagagtgggatccaacaccacaatattgagaaagcattacatgatgactggggcaaacattattatctcttacatatttttaaacatatatgaaaatacacaaatatagataaatgtaattaaaaacaaaatgtagaactgaaaataaaaactcagtgcttccttatgcatgagttatggagtagattaactagttaaacaactgatgttgcagattgttctatgaaagtaacttgc

SEQ ID NO: 38441 - DNA, 600 bp, Chicken  19866894269548_1
atgaaataaaggcttgaattgaaattgtttctgaagaattttctgcagtaacaatttgatgctgcattggaacatggcttctcagtaaaatgatgcctctaacatctgagaatagccaatagtaattaaaatgcaaatacatatgtagtgggggtgatggagttgaataatgcttcctggccttctaaacttcaatcctgtggggcaaaacaagattgggtagaataaaacattgtggaaagattaataaatactgtagcatctccagatgaaatttgttcccatagttgcgtaatatcrgctctactctgtcacaaatggactctgctcaatattgcaactttgcttatgctatatgaaatggtatctgaatggacatgtctttattaagatactgcttcacgttctgcattgatacgcatctactgtctgagtgctgagagaatgcacttattttgcatacatgcttaatatcttgtaaatagtctgtctccattcatttaatcttcattgattccaaccattattctttcatacttagaaatatgcagtaatgggtccacgagacttgcaaacttgaagtcttcacagaagatccag

SEQ ID NO: 38442 - DNA, 401 bp, Chicken  19866894269548_2
cacaaatggactctgctcaatattgcaactttgcttatgctatatgaaatggtatctgaatggacatgtctttattaagatactgcttcacgttctgcattgatacgcatctactgtctgagtgctgagagaatgcacttattttgcatacatgcttaatatcttgtaaatagtctgtctccattcatttaatcttcattgattccaaccattattctttcatacttagaaatatgcagtaatgggtccacgagacttgcaaacttgaagtcttcacagaagatccagaattgccagatrtaattgtttcttttatactcctggtctttcagcaatatcactaagctgattactgcttggctctggcttatgtaacactgcagtgctcctctgaacattaa

SEQ ID NO: 38443 - DNA, 600 bp, Chicken  19866894269551_1
gagacacggctcttccctgcttcccatgatcaggaaatgtttgcagggctttggctttttgctgcttgtcactgcatttctttgctttgggtcagctggtggagcagctccactgtccttcacgtgtccctgtgcatggagacacggccagaacaggagcagtgcctgttatctgtgtgctgcttggtctgactgggctttgttcctgtgctgtgcatggggaagaggcagtggctgctctggctgttccttctatggagatctatggtggcacaacaccttttcccttccagcctgagytggacatctgtgacccatgctgggtgagcagctctggacaagatccggttggccctggggatcttttcagctcttaaaagcaagcactactgtgctttcctttctgtcctctgcctccctcctgcacagggctgattatgctgagcagcgtccatgctgagtataagcactgccattttctaatagctgactccagggccttttggagaagctgcattttttgaaagctctctgttagatacagcttttggtccaattgctccccaaagagctctgaacttaattaagctggaatcgcta

SEQ ID NO: 38444 - DNA, 600 bp, Chicken  19866894269554_1
tggaactcctggactgagtccagcacaggactactaaaacaatacagggattgaaacatctgtcatatgagaaaaagctaagggagctgtacctgttcagcttgaagaagacaaagctcagagaagatatgatcaatttgtataagtttctcaagggagactgtcaagagaatggacccagagtctcctcagcagagggctacaactgagagacctgggaccactgagcctgagaaagagaagactgagatgggatcttataaatgcttataagataactaaaaggcaggtgtcaattgratgggaccagtctccttttagtggtacccagcaacaggacaaggagcagtaggaacaaactggaacagagacagtttatatgaacatgagaaaaacccttactttgagggtgacaaagcattggaacaaactacccagaatctggtaatgttcaaaacttgcctgaataatttcctctgcaatctagtctagcaaccatactttagcagggatgttggactagatgacatcaagaggtcccttctaatctttatctcttcaagattaaagaataaaaaaactatatcagtaagtattttt

SEQ ID NO: 38445 - DNA, 600 bp, Chicken  19866894269559_1
tttacattaaaaatgcattgtaaaagcttctgttgtttgaagcaatactgtttatttcattaagcagaccaggacttgattcttttttctgtgcccaagagctgctcttgcagcagtgaaatggagcgctgttctgtgcagtttgtcacaggtgttgtgaggatggctctgtacttgatggatttttgtcctctgtggcatttggtttaatctggttttaaagaattgtgatgatcaattaaagtctacttcagttcttaaaacaaatggtttctattcccaggcaagctaagggtttgragataacttttcatttcagtcagagtgcaggcatggtgtattttgacctcatgacttaagcttggtattacttagctatcctyggttcatggaaatgagctttgcactagcaaaacagatttcttttgtgttacagtaaaaccaatacrgcagtgctttttataagaggatgtatgtgtgtatacagaatgtcttgggttggagggggaccttaaagcccctcttgtgccaatcctccgctgtgagctggctgccccccccaccagctcrgactgyctggggccccatccaacctggcct

SEQ ID NO: 38446 - DNA, 600 bp, Chicken  19866894269559_2
tttttctgtgcccaagagctgctcttgcagcagtgaaatggagcgctgttctgtgcagtttgtcacaggtgttgtgaggatggctctgtacttgatggatttttgtcctctgtggcatttggtttaatctggttttaaagaattgtgatgatcaattaaagtctacttcagttcttaaaacaaatggtttctattcccaggcaagctaagggtttgragataacttttcatttcagtcagagtgcaggcatggtgtattttgacctcatgacttaagcttggtattacttagctatcctyggttcatggaaatgagctttgcactagcaaaacagatttcttttgtgttacagtaaaaccaatacrgcagtgctttttataagaggatgtatgtgtgtatacagaatgtcttgggttggagggggaccttaaagcccctcttgtgccaatcctccgctgtgagctggctgccccccccaccagctcrgactgyctggggccccatccaacctggccttgagtgcctcyagggatggggcatctgcagcttctctggacagctgtgccagggcctcaccaccataaacgacttcctcctaa

SEQ ID NO: 38447 - DNA, 600 bp, Chicken  19866894269559_3
aggtgttgtgaggatggctctgtacttgatggatttttgtcctctgtggcatttggtttaatctggttttaaagaattgtgatgatcaattaaagtctacttcagttcttaaaacaaatggtttctattcccaggcaagctaagggtttgragataacttttcatttcagtcagagtgcaggcatggtgtattttgacctcatgacttaagcttggtattacttagctatcctyggttcatggaaatgagctttgcactagcaaaacagatttcttttgtgttacagtaaaaccaatacrgcagtgctttttataagaggatgtatgtgtgtatacagaatgtcttgggttggagggggaccttaaagcccctcttgtgccaatcctccgctgtgagctggctgccccccccaccagctcrgactgyctggggccccatccaacctggccttgagtgcctcyagggatggggcatctgcagcttctctggacagctgtgccagggcctcaccaccataaacgacttcctcctaatacctaacctaaatctcccctattttaatttaatactgttcctgatgtgagaagtcaatctccctc

SEQ ID NO: 38448 - DNA, 600 bp, Chicken  19866894269559_4
tttctattcccaggcaagctaagggtttgragataacttttcatttcagtcagagtgcaggcatggtgtattttgacctcatgacttaagcttggtattacttagctatcctyggttcatggaaatgagctttgcactagcaaaacagatttcttttgtgttacagtaaaaccaatacrgcagtgctttttataagaggatgtatgtgtgtatacagaatgtcttgggttggagggggaccttaaagcccctcttgtgccaatcctccgctgtgagctggctgccccccccaccagctcrgactgyctggggccccatccaacctggccttgagtgcctcyagggatggggcatctgcagcttctctggacagctgtgccagggcctcaccaccataaacgacttcctcctaatacctaacctaaatctcccctattttaatttaatactgttcctgatgtgagaagtcaatctccctcctgtttttaagtttcctttaagtagtgaaaggctacggttaggtctcctgggcctacttttcaagcctcttcaaatccctttggatggaatccccttttgctgtgtaaaaacaaactgaac

SEQ ID NO: 38449 - DNA, 600 bp, Chicken  19866894269559_5
ttcccaggcaagctaagggtttgragataacttttcatttcagtcagagtgcaggcatggtgtattttgacctcatgacttaagcttggtattacttagctatcctyggttcatggaaatgagctttgcactagcaaaacagatttcttttgtgttacagtaaaaccaatacrgcagtgctttttataagaggatgtatgtgtgtatacagaatgtcttgggttggagggggaccttaaagcccctcttgtgccaatcctccgctgtgagctggctgccccccccaccagctcrgactgyctggggccccatccaacctggccttgagtgcctcyagggatggggcatctgcagcttctctggacagctgtgccagggcctcaccaccataaacgacttcctcctaatacctaacctaaatctcccctattttaatttaatactgttcctgatgtgagaagtcaatctccctcctgtttttaagtttcctttaagtagtgaaaggctacggttaggtctcctgggcctacttttcaagcctcttcaaatccctttggatggaatccccttttgctgtgtaaaaacaaactgaacagttgt

SEQ ID NO: 38450 - DNA, 600 bp, Chicken  19866894269559_6
catttcagtcagagtgcaggcatggtgtattttgacctcatgacttaagcttggtattacttagctatcctyggttcatggaaatgagctttgcactagcaaaacagatttcttttgtgttacagtaaaaccaatacrgcagtgctttttataagaggatgtatgtgtgtatacagaatgtcttgggttggagggggaccttaaagcccctcttgtgccaatcctccgctgtgagctggctgccccccccaccagctcrgactgyctggggccccatccaacctggccttgagtgcctcyagggatggggcatctgcagcttctctggacagctgtgccagggcctcaccaccataaacgacttcctcctaatacctaacctaaatctcccctattttaatttaatactgttcctgatgtgagaagtcaatctccctcctgtttttaagtttcctttaagtagtgaaaggctacggttaggtctcctgggcctacttttcaagcctcttcaaatccctttggatggaatccccttttgctgtgtaaaaacaaactgaacagttgtgtcccagtcatcttcaggccacctggcagcaaaaa

SEQ ID NO: 38451 - DNA, 591 bp, Chicken  19866894269564_1
atgcaaatacatgctttgtgtctgtttacatattttaagattactttacctaggaggaattaaagaaggatttgggttggaagggagcctagagcccacccacctcaaccccagctgcgggcagggctgcccgccaccagctcaggctgcccagggccccatccatcctggccttgagcacctccagagatggggcaccacagcttctctgggcagctgtgccagcgcctcactgccctctcagtgaaagatttccctgacatctaatctaaatcccccccctcctttagtttaagccarttcttctcatgctattcctatctgcccatgcgaaaagtggatttctcttctgtttaaacttacctttaagtattggaaagctgcatcaggaattgaatgggaaaatgctgtgcaactacagtaaaaaagaaataaaaactccaatgtgtgaagacagtaaattttttcagataaagtttttcttctcttgtgttcatatttaaaaaaacaatgcagtgagcatctctgaagagccatgaattatatccagctttagtgcagaaccttccacacagatctattgggttgcag

SEQ ID NO: 38452 - DNA, 600 bp, Chicken  19866894269567_1
tgcacagcttttcctctctccatcttccattaccaaagagcacctcaaatctctccttgctaaaatatcacttggttaaaaaaagaactggcaaccttgcttttaaaattaccttctttatacaacttgatgctttaaagcagaagctcacctagcaaggacttaccttagacaagctccatctgcagggaaaacttattcctctgtgtctgcagacttggcacgcattttcagctgcaatagtcagcccagatctcagcacagctttaccaaccacagaaagccagctcatggccaccmtgtttgtttttctctcttctgaaacactgcacttctgcaagaagcaacggttacaatcacacaatcacagaactgtaggggccggaagggatccctagagatcatcgagtccaactcccccctctgctcaacaggttccrtacagcaggctgcacaggtgggcatccagctgggtctggagtatctccagggaaggagaatccacagcctccctgggcagcctgttccagtgctccgtcasctcactgtgaacaagttcctkctcacgtcggtgcagaacttcctgtactccagtttagg

SEQ ID NO: 38453 - DNA, 582 bp, Chicken  19866894269567_2
cagaagctcacctagcaaggacttaccttagacaagctccatctgcagggaaaacttattcctctgtgtctgcagacttggcacgcattttcagctgcaatagtcagcccagatctcagcacagctttaccaaccacagaaagccagctcatggccaccmtgtttgtttttctctcttctgaaacactgcacttctgcaagaagcaacggttacaatcacacaatcacagaactgtaggggccggaagggatccctagagatcatcgagtccaactcccccctctgctcaacaggttccrtacagcaggctgcacaggtgggcatccagctgggtctggagtatctccagggaaggagaatccacagcctccctgggcagcctgttccagtgctccgtcasctcactgtgaacaagttcctkctcacgtcggtgcagaacttcctgtactccagtttagggccatttcccccctctcctgaccccacagaccactgcaaaaaggctggccatgtccttttgactcccacgcttccgatacttagaaacattattaagatcccctcagtcttctttccgcaag

SEQ ID NO: 38454 - DNA, 481 bp, Chicken  19866894269567_3
agtcagcccagatctcagcacagctttaccaaccacagaaagccagctcatggccaccmtgtttgtttttctctcttctgaaacactgcacttctgcaagaagcaacggttacaatcacacaatcacagaactgtaggggccggaagggatccctagagatcatcgagtccaactcccccctctgctcaacaggttccrtacagcaggctgcacaggtgggcatccagctgggtctggagtatctccagggaaggagaatccacagcctccctgggcagcctgttccagtgctccgtcasctcactgtgaacaagttcctkctcacgtcggtgcagaacttcctgtactccagtttagggccatttcccccctctcctgaccccacagaccactgcaaaaaggctggccatgtccttttgactcccacgcttccgatacttagaaacattattaagatcccctcagtcttctttccgcaag

SEQ ID NO: 38455 - DNA, 460 bp, Chicken  19866894269567_4
agctttaccaaccacagaaagccagctcatggccaccmtgtttgtttttctctcttctgaaacactgcacttctgcaagaagcaacggttacaatcacacaatcacagaactgtaggggccggaagggatccctagagatcatcgagtccaactcccccctctgctcaacaggttccrtacagcaggctgcacaggtgggcatccagctgggtctggagtatctccagggaaggagaatccacagcctccctgggcagcctgttccagtgctccgtcasctcactgtgaacaagttcctkctcacgtcggtgcagaacttcctgtactccagtttagggccatttcccccctctcctgaccccacagaccactgcaaaaaggctggccatgtccttttgactcccacgcttccgatacttagaaacattattaagatcccctcagtcttctttccgcaag

SEQ ID NO: 38456 - DNA, 600 bp, Chicken  19866894269570_1
gcattactattggaaagccaaaagtgaaaggagagtggctcgcctggtgggatccgtatttgagtgtctggctgtagtatgtttacagttccaattatgctgatcttggaattctaagggtctgcctccacgttttccaagaaccttaaccaatcctgacttgtttctttaagagaattcaacatcagactagactgatcgagtattagcaatgtgtatcttgcagagctggaacctgggttcactggcatcccaaagccctgttttaactcagtcactggctgtggccttaatgcctgygctgctggatgaagtcattcagtctgttagaaaaytggaacagattataacaatatatgtttaatctgtgcaccaaaaatrgtgggtgctcattgctgctctacgatgaaaagggtgtctgttagggatgctccagctcttcatatgatgattttgttttactgcctgtatgccagcgttttctctgcttttctctggtgttttgctccgagctttgtgaggtgctaagattagtgctgttttgcttttgtcaaaatctttcatgtttgctgtgacagataggtgaaaaagtagtatttg

SEQ ID NO: 38457 - DNA, 600 bp, Chicken  19866894269570_2
tggctcgcctggtgggatccgtatttgagtgtctggctgtagtatgtttacagttccaattatgctgatcttggaattctaagggtctgcctccacgttttccaagaaccttaaccaatcctgacttgtttctttaagagaattcaacatcagactagactgatcgagtattagcaatgtgtatcttgcagagctggaacctgggttcactggcatcccaaagccctgttttaactcagtcactggctgtggccttaatgcctgygctgctggatgaagtcattcagtctgttagaaaaytggaacagattataacaatatatgtttaatctgtgcaccaaaaatrgtgggtgctcattgctgctctacgatgaaaagggtgtctgttagggatgctccagctcttcatatgatgattttgttttactgcctgtatgccagcgttttctctgcttttctctggtgttttgctccgagctttgtgaggtgctaagattagtgctgttttgcttttgtcaaaatctttcatgtttgctgtgacagataggtgaaaaagtagtatttgttctgctccagcatgcaaggaatccagcrcagaca

SEQ ID NO: 38458 - DNA, 600 bp, Chicken  19866894269570_3
tttacagttccaattatgctgatcttggaattctaagggtctgcctccacgttttccaagaaccttaaccaatcctgacttgtttctttaagagaattcaacatcagactagactgatcgagtattagcaatgtgtatcttgcagagctggaacctgggttcactggcatcccaaagccctgttttaactcagtcactggctgtggccttaatgcctgygctgctggatgaagtcattcagtctgttagaaaaytggaacagattataacaatatatgtttaatctgtgcaccaaaaatrgtgggtgctcattgctgctctacgatgaaaagggtgtctgttagggatgctccagctcttcatatgatgattttgttttactgcctgtatgccagcgttttctctgcttttctctggtgttttgctccgagctttgtgaggtgctaagattagtgctgttttgcttttgtcaaaatctttcatgtttgctgtgacagataggtgaaaaagtagtatttgttctgctccagcatgcaaggaatccagcrcagacactgaggacaattagtcctatgttgtgggataaaaagcagacatgct

SEQ ID NO: 38459 - DNA, 600 bp, Chicken  19866894269570_4
gaaaaytggaacagattataacaatatatgtttaatctgtgcaccaaaaatrgtgggtgctcattgctgctctacgatgaaaagggtgtctgttagggatgctccagctcttcatatgatgattttgttttactgcctgtatgccagcgttttctctgcttttctctggtgttttgctccgagctttgtgaggtgctaagattagtgctgttttgcttttgtcaaaatctttcatgtttgctgtgacagataggtgaaaaagtagtatttgttctgctccagcatgcaaggaatccagcrcagacactgaggacaattagtcctatgttgtgggataaaaagcagacatgctaaagttgtagagggacttttttcctgtacgtgctccttgggggatctctgcatatagcactgtggcttcctacatgactttttaagattatttaactgctgtctgcctttcaattgctgacctgtggttagctttgtttctcttgtacaaatacaacacactgcactggcttcatttcattgctttttttttcctttttgttccctcagtgtttttctcacattttaatagttccatttgagtttagc

SEQ ID NO: 38460 - DNA, 600 bp, Chicken  19866894269570_5
ctgtaaggtattaatatgaaaatctgtgggtttttttcctgttgaaattcagctgttggctgtagtgtttaatattgctctaggaagacatgtaaactatagtaacaaataacacagccacttaaaaatgtggcttctgtgaatgtccttctttctcttttcatgtcagaaatggttttgtctgctgataaatttctgaatcacctttcttgagaagttattctgctgtgactttactgcagcagaaagtccagccttaaatctgcaggtagaacatctgcaatggtgtgcctgtgtgamattttaagtgatgaactgcgtgattaaaaacacagaatatctttgtaaaagttgttccttgttttatgtaaatcaactttttactactccagatgaggggggaaaagtgtggggagggaaaggaactagcaaaacaaggaacatagaattgaagttttaactctataaatatcagcacttcaaaagtgagttataagatccagcttggtaactaagatcagcttcaggaaggatggaacaaattgtttgctgactttgcttctatamctagagaaatgtatttagcagcttttattttga

SEQ ID NO: 38461 - DNA, 468 bp, Chicken  19866894269570_6
ggtagaacatctgcaatggtgtgcctgtgtgamattttaagtgatgaactgcgtgattaaaaacacagaatatctttgtaaaagttgttccttgttttatgtaaatcaactttttactactccagatgaggggggaaaagtgtggggagggaaaggaactagcaaaacaaggaacatagaattgaagttttaactctataaatatcagcacttcaaaagtgagttataagatccagcttggtaactaagatcagcttcaggaaggatggaacaaattgtttgctgactttgcttctatamctagagaaatgtatttagcagcttttattttgaagattatattgtgtctaaatacatggtatattgtagttctgatggtcctgcttcaaagtctgctgagatttactcctttttgaatgtcatgaacaatttctttacttggatgaaccataattatttgcagaagtg

SEQ ID NO: 38462 - DNA, 576 bp, Chicken  19866894269572_1
ttctatttagcaaacaccaagtctttacaggaatgaacatttgtgaaactggagttctattgccaagaaatggtgcagaatagacccaaattgcaaagcaactgcaatcagccgtccttgcttggacaggaccagagggtacctcagcacctgcactgttcatatgccattgcttctttatactgatgtcaggattattttcctggcagtttaaagataagttttttgggtagaggtggggatgaagggtatgcaaagatgaatcgatgtcacagccctgcataacgaccgaacttgtarggaaaatccttgcatgtaatgctaacaaatggggagtgctggctcagagcagatcaggctctgggattgctgagctctctgtcacacaccagctgcgctcctccggcccatccctgacaaaacacccaaaaaagtcccacatagcatggctcagatttccagcttagctgaagaactcctcactggtgatcaggcggacactacagcagcccgagttctcgtgaagggcagacagatgggattaaaatccagaagtagctgaaggacagaagcgag

SEQ ID NO: 38463 - DNA, 600 bp, Chicken  19866894269575_1
aaggttctgagctcactggctatgcaggcaaatttgaggaagaggcatggcatcatgttcttaagcatcggacttgctttatttatgactgctttgtttaattgtttcagggtcatttttaattagattgagggaaggaagaatggttcctgtttaaaaaaaataaaaattaaaaaagacagaaaccccctccaccaccaaaaactcccactcttctcccagtcagctgacctgaaaagcaattctgctggagccagacaaattaagaacccatttcctcaactgcagtaactgcagagmtagctattaggatctcagatatttcctgaaacataggatatttagcacatgtcctcccagtagactgcaggcagtcactctgcccctgtaattgcattgctgccaggctaaacccaagctaataaaccctgcttgtagattataagtgacttgcagcagggcagctcatatcagttacagagagctcaaacctattgatatcagccactaggccctgctttagaagygcactggctcctgctgcactcgttcaaacctttctgtcagagcgctgctgttggcttcgatgctattgttcca

SEQ ID NO: 38464 - DNA, 600 bp, Chicken  19866894269575_2
tgacctgaaaagcaattctgctggagccagacaaattaagaacccatttcctcaactgcagtaactgcagagmtagctattaggatctcagatatttcctgaaacataggatatttagcacatgtcctcccagtagactgcaggcagtcactctgcccctgtaattgcattgctgccaggctaaacccaagctaataaaccctgcttgtagattataagtgacttgcagcagggcagctcatatcagttacagagagctcaaacctattgatatcagccactaggccctgctttagaagygcactggctcctgctgcactcgttcaaacctttctgtcagagcgctgctgttggcttcgatgctattgttccatgggtgggtgataaaagcggtcttgggrgsagagaaatttttcagtaaggaagtggtatcttagcactaggttaacaaacaaytcaaatttcatagaggtgttcatagaacaaacaactcaaatatccaggggtggttttatttttatccttctttatctttatattcatcaggtcagtggttttaaattcagaatatcctgatttctccatcagaaagaatttaaa

SEQ ID NO: 38465 - DNA, 600 bp, Chicken  19866894269575_3
aaacataggatatttagcacatgtcctcccagtagactgcaggcagtcactctgcccctgtaattgcattgctgccaggctaaacccaagctaataaaccctgcttgtagattataagtgacttgcagcagggcagctcatatcagttacagagagctcaaacctattgatatcagccactaggccctgctttagaagygcactggctcctgctgcactcgttcaaacctttctgtcagagcgctgctgttggcttcgatgctattgttccatgggtgggtgataaaagcggtcttgggrgsagagaaatttttcagtaaggaagtggtatcttagcactaggttaacaaacaaytcaaatttcatagaggtgttcatagaacaaacaactcaaatatccaggggtggttttatttttatccttctttatctttatattcatcaggtcagtggttttaaattcagaatatcctgatttctccatcagaaagaatttaaaactatggctttgtgctctgaaggtcctaagtaaggcagctaggtgcttcaggaacaaacctcagcagataggaggttgagttgtttttatacagcacgtgg

SEQ ID NO: 38466 - DNA, 600 bp, Chicken  19866894269575_4
acataggatatttagcacatgtcctcccagtagactgcaggcagtcactctgcccctgtaattgcattgctgccaggctaaacccaagctaataaaccctgcttgtagattataagtgacttgcagcagggcagctcatatcagttacagagagctcaaacctattgatatcagccactaggccctgctttagaagygcactggctcctgctgcactcgttcaaacctttctgtcagagcgctgctgttggcttcgatgctattgttccatgggtgggtgataaaagcggtcttgggrgsagagaaatttttcagtaaggaagtggtatcttagcactaggttaacaaacaaytcaaatttcatagaggtgttcatagaacaaacaactcaaatatccaggggtggttttatttttatccttctttatctttatattcatcaggtcagtggttttaaattcagaatatcctgatttctccatcagaaagaatttaaaactatggctttgtgctctgaaggtcctaagtaaggcagctaggtgcttcaggaacaaacctcagcagataggaggttgagttgtttttatacagcacgtggaa

SEQ ID NO: 38467 - DNA, 600 bp, Chicken  19866894269575_5
ccctgtaattgcattgctgccaggctaaacccaagctaataaaccctgcttgtagattataagtgacttgcagcagggcagctcatatcagttacagagagctcaaacctattgatatcagccactaggccctgctttagaagygcactggctcctgctgcactcgttcaaacctttctgtcagagcgctgctgttggcttcgatgctattgttccatgggtgggtgataaaagcggtcttgggrgsagagaaatttttcagtaaggaagtggtatcttagcactaggttaacaaacaaytcaaatttcatagaggtgttcatagaacaaacaactcaaatatccaggggtggttttatttttatccttctttatctttatattcatcaggtcagtggttttaaattcagaatatcctgatttctccatcagaaagaatttaaaactatggctttgtgctctgaaggtcctaagtaaggcagctaggtgcttcaggaacaaacctcagcagataggaggttgagttgtttttatacagcacgtggaagagattgaagtctggtctttactaagcccactgcaactttgaagtgaatctgc

SEQ ID NO: 38468 - DNA, 599 bp, Chicken  19866894269585_1
  misc_feature (1)..(8): n is any nucleotide
nnnnnnnnaggagagcttttgtttcctcggcttctttcagaattgcctcctcactgtaagcctcaatgtgtgttcagctgaccatacgcctccacaacaaccacctgcatggtttaggggtatcctgactccataggtagtgtttccaccatgccagacaagagctgtccctgtgcacacagccgtaccaacacactgcaaaataaaacggcacacaatgagcccaatgagctgctgcagccaatgcgtggtttgacagtacagtggggacctctgccaacacagcactgctggtctggraagatcatcagacaccatagcaaagcaagaagctcctgtgctgtgctctgtgtgaaatcaagctcacagtaaggctcttcacacccatccaacacgtggttgttttgctgctactgataagcaaggctggacattgctggccagctcagagggagatagcttgagctctgggtgtttgttggctttcctctggtaacagagataagcaatgctctttcagacctggctccctcatatctctctggtggaattctgcttgcttcactgcaaggtgaaggcagtgctgcactcgccggggc

SEQ ID NO: 38469 - DNA, 600 bp, Chicken  19866894269591_1
tatttatttaataagccgccagctcacaaattgcaaaacttctgcagtttctcttatcttccacagaaccactgagatggcaaaatatattctctgtctcaacaattcagtctatatttgcatgaggaaattggaaagcgagttgtttttcttcgtttgcatgacaataccccgagcgcaacacaatcggccgtttaatttgcggtagttgtgtgcgagaggagcggcccggcgggttggctcagttttgttgctgatgtcgttggcatcatgattaaaattgatttataagtaacggcraagaaatccaaacgatgtgtttattgcgagtgggggcaccgggttcccatctcctcctgaagttctgctgaatacgttttcagggttgagcttctcatccgtcagctgcttttgggtgggaaatggcagatgcaggaatgagaataggcagcaacagcagcaatgagtgctgctcctctgatggcagtgtcctcggggtgtcctgatgggatgcacacgtgggctctgtgccgtcagactgttcttcacctgattcttgttttgtcacttcactttggatgcagcagtgcctctttgctg

SEQ ID NO: 38470 - DNA, 600 bp, Chicken  19866894269596_1
cctggtttttgatttgtaacaaaagaaaagtatccagttagatttctcaagcacgtgccaaccataaagggttgccagacttcaaccttcctcctgacatcatctgaaaggctgtgtaattccctgcagcaaaatatccacagaggtcatggcagcttgcttaagcagatgaaatccgttcgctgtcctctatacacttgcatttggaggagtgcttatgataatcatctaattcagggtatggaaaagttcacagagcattcataaacaaatggtgaatgatgctggctagagagattwaagtgaaggtgtaatctagtggcaaaataaactgcaaggacgagctttctttagtttgcagacccmaagttgtctcttttactttccatccagaaaaaratctcatcaaaaactaacaaaacaaaccaaaaaatcagatcactttacctcttccaatatcatgtaatcatacaccatctatcaaaaaataggatctccatgctacacatatttacttcccatgtgttcaaaaacatttatatatttcatcactgttaacccacttatttcagttagcttgaggagctcattttattatgt

SEQ ID NO: 38471 - DNA, 600 bp, Chicken  19866894269596_2
aagggttgccagacttcaaccttcctcctgacatcatctgaaaggctgtgtaattccctgcagcaaaatatccacagaggtcatggcagcttgcttaagcagatgaaatccgttcgctgtcctctatacacttgcatttggaggagtgcttatgataatcatctaattcagggtatggaaaagttcacagagcattcataaacaaatggtgaatgatgctggctagagagattwaagtgaaggtgtaatctagtggcaaaataaactgcaaggacgagctttctttagtttgcagacccmaagttgtctcttttactttccatccagaaaaaratctcatcaaaaactaacaaaacaaaccaaaaaatcagatcactttacctcttccaatatcatgtaatcatacaccatctatcaaaaaataggatctccatgctacacatatttacttcccatgtgttcaaaaacatttatatatttcatcactgttaacccacttatttcagttagcttgaggagctcattttattatgttcatcttatggaacaacagagttgttgatttaatacaattcaaactttcatcatactgataaggca

SEQ ID NO: 38472 - DNA, 600 bp, Chicken  19866894269596_3
tcatctgaaaggctgtgtaattccctgcagcaaaatatccacagaggtcatggcagcttgcttaagcagatgaaatccgttcgctgtcctctatacacttgcatttggaggagtgcttatgataatcatctaattcagggtatggaaaagttcacagagcattcataaacaaatggtgaatgatgctggctagagagattwaagtgaaggtgtaatctagtggcaaaataaactgcaaggacgagctttctttagtttgcagacccmaagttgtctcttttactttccatccagaaaaaratctcatcaaaaactaacaaaacaaaccaaaaaatcagatcactttacctcttccaatatcatgtaatcatacaccatctatcaaaaaataggatctccatgctacacatatttacttcccatgtgttcaaaaacatttatatatttcatcactgttaacccacttatttcagttagcttgaggagctcattttattatgttcatcttatggaacaacagagttgttgatttaatacaattcaaactttcatcatactgataaggcaaagatatatgtgacagaacacctcttagctttc

SEQ ID NO: 38473 - DNA, 599 bp, Chicken  19866894269598_1
  misc_feature (1)..(81): n is any nucleotide
nnnnnnnnnnnnnnnnnnnnnnnnnnnnnnnnnnnnnnnnnnnnnnnnnnnnnnnnnnnnnnnnnnnnnnnnnnnnnnnnnatccttgttcttttctattgatcagaaaaagtcaattttatttatagtaaaatataacttatttctcaagagttctctgtgaacacctggagaagtgaacttctcctagatcattgtcagatcattctctgaacattcactgtaaaaaaaaaaaaaaaatcacactgaattttggaaacaacttcaaacttgcatttcttggactctagtaataatgayactgagaaggcttcacttgcaaattacattaagtgcagaatttagatttgcagcatgaagtgactatcttcattgcttgaccttgcaatggtgcacagcatacggatgttctttttctatctggctacaaaataaataacctctattacatttagttccttagggcaactactatactaccacatgtggctaaacatggtgttctgatggtttgtgttcttttctgttayaaattacccacagtcatccccattttccaaaagaagagttaaatatttattcttcttgatcatcttaaa

SEQ ID NO: 38474 - DNA, 600 bp, Chicken  19866894269598_2
aaaaaaaaaatcacactgaattttggaaacaacttcaaacttgcatttcttggactctagtaataatgayactgagaaggcttcacttgcaaattacattaagtgcagaatttagatttgcagcatgaagtgactatcttcattgcttgaccttgcaatggtgcacagcatacggatgttctttttctatctggctacaaaataaataacctctattacatttagttccttagggcaactactatactaccacatgtggctaaacatggtgttctgatggtttgtgttcttttctgttayaaattacccacagtcatccccattttccaaaagaagagttaaatatttattcttcttgatcatcttaaaaatttgcaataatttatctgaggtaaattttgtcactgtgttatttgattttacagtgtttaaagaccaacactgaaggctcctgcgaaaatagctgcaccaaaccaaaccactatagcaatgatatacacttcatattgatggtttccaacttgtcccccacaagcaacacttaccccgatgccgaagttagctctttattttggtttccacttatacattctttttcca

SEQ ID NO: 38475 - DNA, 600 bp, Chicken  19866894269605_1
aaatgcaagcataattagaagggtctgaaaatcttccactgaggagctgaagcagctgaggtgatgagcaagcagacaaaaaggaccagaccgtgcacctctgatgggaccttgtcagagagggcctcacctgctttgtgtgatgtctgctcacccggcctgcaggaaggcttctggtgacacattaaatttactgaatgcaatttcttgtgtatgaagatatcaagatatcataatacctcagctaattactgtgatagggcatctgtggcaggaactcagaactcagaacacacagtkcacaagggcctctagttttctgacctgcccagtgactacagccttccttgtgctgtagctaattgcctttagcaacagtaaactctggtgygtggggacagaagagctggtgaggagcaggtagggctgcaggccaattctctgcatttccaatgcccacagacatctctggagataccttgatgtgtagttgtattctgacagttgaaaaattactctcacaagcttgatgaggatttcagagagtctttaaagtgccttcatggatgctcacctttttgttgttctctagcagtccgg

SEQ ID NO: 38476 - DNA, 600 bp, Chicken  19866894269605_2
cgtgcacctctgatgggaccttgtcagagagggcctcacctgctttgtgtgatgtctgctcacccggcctgcaggaaggcttctggtgacacattaaatttactgaatgcaatttcttgtgtatgaagatatcaagatatcataatacctcagctaattactgtgatagggcatctgtggcaggaactcagaactcagaacacacagtkcacaagggcctctagttttctgacctgcccagtgactacagccttccttgtgctgtagctaattgcctttagcaacagtaaactctggtgygtggggacagaagagctggtgaggagcaggtagggctgcaggccaattctctgcatttccaatgcccacagacatctctggagataccttgatgtgtagttgtattctgacagttgaaaaattactctcacaagcttgatgaggatttcagagagtctttaaagtgccttcatggatgctcacctttttgttgttctctagcagtccggatatactacatgcatatactacagtccagatatactacatgcaatcattttttgacaacttggggtcttcttcagtgatcctgtgcccaac

SEQ ID NO: 38477 - DNA, 600 bp, Chicken  19866894269605_3
gagcagaaggagtgcaaggcagcagtcatttgtaatcttgtaagacagcaaacacatcacaggtgacaattttgtcaataagccctgatgcaaatagtagggaaaggaaaaaaaacatgctatcatcatacaggaaaacaggcagctgcaggatacattgcaaatgcagcttatgtagaatgtgaaagtaaaaaacaatgcctgaactgagaactgagacatgattctttaaattctgttccttcgcttgataaatatatcaagctaaattaagccatgatgtaactgcaacaaagttastgtgcttatgttgaggataaattactgccataaattatcaaaataaatgacaattgtgtctgttcgtgccagaaatcaatctggccaattacaacagaaattctttgacatccaaagctaaatttacrttccattttctatgcaacatcctaagcttgagctttgatgtgcaaagatatgcctgtgctctgggatccaagcctctgatccttccctctaagactcactctactacctacatcaacaggactgcacaacattcccattctgctgtccatttcccttcagatattttcctgc

SEQ ID NO: 38478 - DNA, 600 bp, Chicken  19866894269605_4
tacaggaaaacaggcagctgcaggatacattgcaaatgcagcttatgtagaatgtgaaagtaaaaaacaatgcctgaactgagaactgagacatgattctttaaattctgttccttcgcttgataaatatatcaagctaaattaagccatgatgtaactgcaacaaagttastgtgcttatgttgaggataaattactgccataaattatcaaaataaatgacaattgtgtctgttcgtgccagaaatcaatctggccaattacaacagaaattctttgacatccaaagctaaatttacrttccattttctatgcaacatcctaagcttgagctttgatgtgcaaagatatgcctgtgctctgggatccaagcctctgatccttccctctaagactcactctactacctacatcaacaggactgcacaacattcccattctgctgtccatttcccttcagatattttcctgctccatgctacctgcctacrtgtgctggaagaaaggagtttgcagtgtgcgtaggaagaatcatagaatcatagaatatctcaagttggaagagactcataaggatcattgagtccaacacctggctct

SEQ ID NO: 38479 - DNA, 492 bp, Chicken  19866894269605_5
aattactgccataaattatcaaaataaatgacaattgtgtctgttcgtgccagaaatcaatctggccaattacaacagaaattctttgacatccaaagctaaatttacrttccattttctatgcaacatcctaagcttgagctttgatgtgcaaagatatgcctgtgctctgggatccaagcctctgatccttccctctaagactcactctactacctacatcaacaggactgcacaacattcccattctgctgtccatttcccttcagatattttcctgctccatgctacctgcctacrtgtgctggaagaaaggagtttgcagtgtgcgtaggaagaatcatagaatcatagaatatctcaagttggaagagactcataaggatcattgagtccaacacctggctctaggcaggaccacccaaaaatcagaccctacgtctcagaagcggtgtccaaatgctcagggctgtgcccactgccctgggcagc

SEQ ID NO: 38480 - DNA, 600 bp, Chicken  19866894269607_1
tgagagctgacagtggagcagatacccaaatgctatcacagagaacatattgtgaaccaatttaaaacatttccatactatttttgactcttatctcctcaatagtgtcattaactttaaagtttcagcctcagctctcagcagtggtatcatttacaactgctgcttctgctactggctgaggaaattaaaatgcaattaaaaacattacagagaacagatttgcagaatgttgattgtgggttgacattaccatgagaaacagtattgatttgtcatgttaattaatgggagtattgmcatgaaaaatttttactattattttaaagagttaagaagctaaaaatacagttcatttctaagacttcagctccttaggtgggtctaggtgtcttttattttattttgctttattttattttatcggaaaatctaccctatcttgaactgcatgcctcatatgtacacaagggaaacacattctgaaaataattgaggttaagagaatggttatttcctaacctttctgacatactgagagtaggcattctttctgttatacttcactttcagctgcttttgttttgtgcagagcatcct

SEQ ID NO: 38481 - DNA, 599 bp, Chicken  19866894269608_1
  misc_feature (1)..(47): n is any nucleotide
nnnnnnnnnnnnnnnnnnnnnnnnnnnnnnnnnnnnnnnnnnnnnnngaaaaacaaagaaactacaggcaaagctcagcctattctattgctgcagttatccaagtgtttgaattagcaaatcctatgatttgggaaaaaacaaacaaacaaacaaacaaaaaaaaccagcaaaaccaactgccttacactacatgggacaacttccactccagtaacaaagcacgttaaaatctcttgtttgggctgctgtcccatgaaaactatggaggtaggttggtttaattacacgtcagggccrtagcaagtacgtaccaaaaggcagtatcatgaagtcccaatatctttaagaactccttcagcttcctctccttttctgccacaatatgaatggccaaataatacccaaacggtgagaaagcaatgacgaggtaaatcaaaatgatggcacgaggaaaattgtcgatctccatcacggccgcctcctccatcgccatggccctcgtcagctccagctgctcccacacggactggttggtcttcagctgccagggaaggaagagcagggctcacaccgtgcctcacgtcccagccctgctc

SEQ ID NO: 38482 - DNA, 599 bp, Chicken  19866894269612_1
  misc_feature (1)..(27): n is any nucleotide
nnnnnnnnnnnnnnnnnnnnnnnnnnnaactgaggctgtccttgtttcaactttcctcctaccaatgcatttaaaatatgatctgaagaaacatggcaggaggtgaggtgtcagtttgtgctttggttctgtggaaatttgtttctgtgctatgattacacagattgggtaatgttactcttgataataggtttttatcatacacactttgccatcagaaactgaaatgaaagcagtatctccttttttcataagcaaatctggagaatgtttgctaaccaatggtgtatttgacatgcrcatgacctatagctagttgtagtcttttatcatttcaaccatgttattcttgctgagggtccttttcagaacctattatattcgctagtgatttagtaatttttttycatcaagattcaaaaaagctgaaagctgtttgatttttaaaatgtgaattttgaaatgctgaagttaaactttattagaaatgaaaatgaaatgtgcttatagtcacagaatcagaagatgtttttttttttttttttaataatatatggaggattcattttgttctttcattacactagagagtgtaaagt

SEQ ID NO: 38483 - DNA, 600 bp, Chicken  19866894269612_2
gtgtcagtttgtgctttggttctgtggaaatttgtttctgtgctatgattacacagattgggtaatgttactcttgataataggtttttatcatacacactttgccatcagaaactgaaatgaaagcagtatctccttttttcataagcaaatctggagaatgtttgctaaccaatggtgtatttgacatgcrcatgacctatagctagttgtagtcttttatcatttcaaccatgttattcttgctgagggtccttttcagaacctattatattcgctagtgatttagtaatttttttycatcaagattcaaaaaagctgaaagctgtttgatttttaaaatgtgaattttgaaatgctgaagttaaactttattagaaatgaaaatgaaatgtgcttatagtcacagaatcagaagatgtttttttttttttttttaataatatatggaggattcattttgttctttcattacactagagagtgtaaagtaactgagagcaaaacaaacaaaaaaaccctcaagctgtaatgagtataaagctgaaaatttctttccatttaatgcaaaaatgttttctgtggaatcgtaacgtattt

SEQ ID NO: 38484 - DNA, 600 bp, Chicken  19866894269619_1
taattggaaaagtgtttgcaggaggtgagttgtgtagaacatagcatgtgaaataaaactgaggaaatgaaatgtgaaaaaataattgccagtctggcttgatgaaaagtagcagtaatacaaacatatttagtgtgggtgtaatgcatcaatggactgtggcttacaggaaaaggcactcggatggaggggacagcagtatactgacagcataatacaaacgttttgtaaatactggttgttcttactagtgaggtgagatctcaccaagagtttcagttaactttcaagttctattgytctcatagcttttgcaataatagcaattttcattattaactaatgtgcataatcatcaactcagaactattaaagcaattgtgtgatctgtgtgagatcgtcttcaaatccaaaaccataaagtctgattatattctcggttaatattatgacccatttgatatttgaaaatcattttgttaatgcactggctttttaaatactgcacagacagcttccatatgctataaattttctgctcaatttggatatgggaattcagttgcctgtgagggttttaagcaaatgctgagaatcaag

SEQ ID NO: 38485 - DNA, 600 bp, Chicken  19866894269625_1
gcaaactctctgtggtgatttcttaagacaaagcatggacagcttagtgcctgccttacatttgctactgaccagtgtcctcagttcgcctttctcctggtccgtgccactttgtgttctgcacgctcagcctctgctgacttctgtatgctaattgcgtgccttaattcattgttaatttgctataagcactagaaccttggaatcctgcggtgccaagctgctttgttctactgtgttttgtgcaggatacagagaggcatttgcttgattcattagtgaatttagggctgtagcttkccactgccaatgccaaaaaagtgggccacaagaggcctggaggtgctgggggagcacagcccagtttgtttatgttttcctgtgcagcatgcacttccagtgggggctgtgcaaacaagcccataaggctcttagcaggcttgtcctgtttgcatggacacacagcacaatctttcatgctttcggtggggatgaggtgggtcctttcatcactcaaacccagtaactggttgagggaaatgtttagaggtgcagtacatttcactgtcacatcaatgcagaggcggccatttcacagtg

SEQ ID NO: 38486 - DNA, 599 bp, Chicken  19866894269628_1
  misc_feature (1)..(180): n is any nucleotide
nnnnnnnnnnnnnnnnnnnnnnnnnnnnnnnnnnnnnnnnnnnnnnnnnnnnnnnnnnnnnnnnnnnnnnnnnnnnnnnnnnnnnnnnnnnnnnnnnnnnnnnnnnnnnnnnnnnnnnnnnnnnnnnnnnnnnnnnnnnnnnnnnnnnnnnnnnnnnnnnnnnnnnnnnnnnnnnnnnnnatgcagagcttggtggcctctctccctgatgtttgagatagcaaagcagcagctggtgaaggcactcaggctaagtatcaagggtgaaaagaaagaagtatcctttgctgtcttttgcasaggagwaatggaaatgtcacagcaacagcaatctgcaggctgcaagacaggcctgagggggctgatggtgacattccccggtggagaataaagtaccagcactgtttgcctgactttggagggaagccaaggatttaacccatggggaataaattatactcataaaatatgaggcatcaactaatgtaattagctcaatttagatgctctattgacatgacactagcacttattactaatgaatacactactagtgaatcattaatgatgggagtatctagctaccgtgctcatgaatg

SEQ ID NO: 38487 - DNA, 599 bp, Chicken  19866894269628_2
  misc_feature (1)..(174): n is any nucleotide
nnnnnnnnnnnnnnnnnnnnnnnnnnnnnnnnnnnnnnnnnnnnnnnnnnnnnnnnnnnnnnnnnnnnnnnnnnnnnnnnnnnnnnnnnnnnnnnnnnnnnnnnnnnnnnnnnnnnnnnnnnnnnnnnnnnnnnnnnnnnnnnnnnnnnnnnnnnnnnnnnnnnnnnnnnnnnnatgcagagcttggtggcctctctccctgatgtttgagatagcaaagcagcagctggtgaaggcactcaggctaagtatcaagggtgaaaagaaagaagtatcctttgctgtcttttgcasaggagwaatggaaatgtcacagcaacagcaatctgcaggctgcaagacaggcctgagggggctgatggtgacattccccggtggagaataaagtaccagcactgtttgcctgactttggagggaagccaaggatttaacccatggggaataaattatactcataaaatatgaggcatcaactaatgtaattagctcaatttagatgctctattgacatgacactagcacttattactaatgaatacactactagtgaatcattaatgatgggagtatctagctaccgtgctcatgaatgctttag

SEQ ID NO: 38488 - DNA, 600 bp, Chicken  19866894269638_1
ccagtaaaaggctggaagaacacctgtgtgtgggttttgatctgtgattaggctcagggtggtggagatggctcttgtaacctttgttagtcaagagtagagctttattctcctgacgtgttgcatgcaaagaacctaaaataatgttttgcatggagctggacctttttgggttggggcagaggtctgcagcttaattctgttttctggatagaatatgtaagaagcagaaactaatggcagtgtgtgtttctaaagtaatgtttgatttgctttggtttaaaaggctgaaaatgagaytgtgggaatgttgagaacagtggccaaaagtcactccaaaatattttagactctgaatcaaagaaattcagtctccttaacccagagactcatgctcaattgtttgcaaagtgttttccagcatttagtataaccagtgtgtaaagcaggagtaatactactgctttccagactctgaccagattattaaaaataataatcacacctgttgctacaagatgtgaggaactacttgagtctccatttaaattcactgaagcattctgacatggaaacctgagccagcagacattttccatt

SEQ ID NO: 38489 - DNA, 600 bp, Chicken  19866894269647_1
caacaacagcaacaacaacaacaaaaaactgtaggcacccctgagcagaataacaaaccataattaaaatgctgtgattttatgattgatttattgtcagaaagcatcatggctttttcatcctaattttacaattatgactgtctccaagcctgactgttcattgatttaattatataaacatatgtttaattttaagcacagaagtagtctcgaatgttttcagaccactaaaagcagttgagtatgttctcaagcatcttgctgagtgtctgtatctttccacaagctatggctatygtttggggaatttggcatctcacagaaaaatgccttctggtcatgttaaacaggctgaatgtaaaataaagtctaaatacaaagtaaatagctgtttcttggtctggggagaggcacatatgtttagaactgggcagtgagttaacctgccaaaatgtaaagccaataaaccaaacttttagtgtactaactccttaaaggaatgagggggagtattacctggggaagggaacaagaagaggaagactgaaagaaagctttgggatgtggtattacactacattaaaactgtacagatca

SEQ ID NO: 38490 - DNA, 600 bp, Chicken  19866894269648_1
gtaaaacagtttaatattaaatgtatcaaagctctaatttcttacatttgattgaacttttttttttttttgtactgacagtcaaacgtttgttacctacagcaaatttataccacctgtaactcaaaaaaaaaaaaggagagctcacattttaatataatatacttaagatcaccttataggcaaatactgaagttcaggcatatgctacagtgtactgatacacacagaaggaataccattacaaccaccactaatgagagccagagattgctcagacatttcaaggtctacctttcytccttctctcaatctgtgaagcccagaaactaaagtgttcctcatttaaagctttcattcataaaacatgctttaattattttatgtgaacttctgttaggacatcccgatattgaaagaaaacttttatttcaatacaattaaatattataattgcttgttgtttacctaaaacctaaattgagcaggttggtaacttcaaccttagatgtgagttttaagacaacctacactgacacctaacatgataataaatccaacagtaaatgaactgcagagtttgctacttgaatcaaataa

SEQ ID NO: 38491 - DNA, 599 bp, Chicken  19866894269650_1
  misc_feature (1)..(90): n is any nucleotide
nnnnnnnnnnnnnnnnnnnnnnnnnnnnnnnnnnnnnnnnnnnnnnnnnnnnnnnnnnnnnnnnnnnnnnnnnnnnnnnnnnnnnnnnnnatttatcaattcttaactgaatcactggttaaggacatgattcaggaaaacccaatagagtaaacagggaaggaatcatgatgaatcaatgaattggcaaaaagcattctttatttaggaatgctaatttgcctagtgtgaatgtattttcaattttttttttttaatatagccttctacaaattgtaatatgtttaatgtatgttgagyctattactttaagtaaacaagatgatcatatgctggttgtaactgctttcaaaactgattatctatttgggattcttcagatttttgtgccaatttgagataaatttgaaagacactaatatttagagcacaagttaggttttacactctcacaagctgattgaacaaaggttcaagtgtcaaagactatatcatattgaattgtgactttcattaactctgaaactaatccaaggaaakcaagttcttaaagaaattccaaattcacttcaaatgtttgaaactaaatttgtgtaata

SEQ ID NO: 38492 - DNA, 600 bp, Chicken  19866894269650_2
caattttttttttttaatatagccttctacaaattgtaatatgtttaatgtatgttgagyctattactttaagtaaacaagatgatcatatgctggttgtaactgctttcaaaactgattatctatttgggattcttcagatttttgtgccaatttgagataaatttgaaagacactaatatttagagcacaagttaggttttacactctcacaagctgattgaacaaaggttcaagtgtcaaagactatatcatattgaattgtgactttcattaactctgaaactaatccaaggaaakcaagttcttaaagaaattccaaattcacttcaaatgtttgaaactaaatttgtgtaatacatttatttacctcaaacaactacatgcaaattgttgttctaattccatctaaaatgaaatagctgcttaaagagtttatatataaaaattagcaaagaagataatattgtctggatctattgaggcattgtttcttaggagtaaggcttaagtacaaaaaagagggtggcttttgtttatttagcagtaaggaattgcaaaacttgttcatgctactactgattcttgtgcttatgttaa

SEQ ID NO: 38493 - DNA, 599 bp, Chicken  19866894269656_1
  misc_feature (1)..(176): n is any nucleotide
nnnnnnnnnnnnnnnnnnnnnnnnnnnnnnnnnnnnnnnnnnnnnnnnnnnnnnnnnnnnnnnnnnnnnnnnnnnnnnnnnnnnnnnnnnnnnnnnnnnnnnnnnnnnnnnnnnnnnnnnnnnnnnnnnnnnnnnnnnnnnnnnnnnnnnnnnnnnnnnnnnnnnnnnnnnnnnnntcattccccattacatatcacttgtttgggacttaggcaggctaactctcatcaatcagaaacatccctcaatccacaggtgttacagtcatacaaacaagggatacttgcacatacattttcygaaatacatcaacattattcagttggtcacacgttgtaccttattaagatttgaagttaaacaatgcaaactaaattcctatttcctaaaatgtgtttttgctcagcaatcatacggtgttgatataaagcttacttttctgagaacatctttcagctgcaggtgatcgggaagcagtctgccagaatacaccagtctctgatcctttgtggactaggagatgggacaaagaaaggaatttagctttttccagctgtacagacatacagctggtgataacatttgcagatgagaaaaaa

SEQ ID NO: 38494 - DNA, 599 bp, Chicken  19866894269661_1
  misc_feature (1)..(122): n is any nucleotide
nnnnnnnnnnnnnnnnnnnnnnnnnnnnnnnnnnnnnnnnnnnnnnnnnnnnnnnnnnnnnnnnnnnnnnnnnnnnnnnnnnnnnnnnnnnnnnnnnnnnnnnnnnnnnnnnnnnnnnnnnnactttgtcattcaaagacattgttatccctcagatgagggtaaaatcatttatttttttttctgtgtaatgttagggagtatgtgtacctcccttctaagaggcctagaattagtaaaaacctctccaacaagctttctctttttctttataagtttatgaaaggcaatcttcacagsacttaagcaaatgaagcatgaaaaaaaaaaaacataaaaaatcataaatatgtagcaattattatttccctcgcttgtctaatattatgaacacttagtttcagaagatggcggaatgacagcacttatttgagaattaacacaattagagagaagattttaatgaccagcttctacataggttgatctgaaagtaatgcctcccatttgtttccctggaaattacaatagtacaacaggaatgtttgattcagcaaattctcagctacaaaacattagttttcaacatagtcactgct

SEQ ID NO: 38495 - DNA, 600 bp, Chicken  19866894269667_1
gaaactgggaaaggatgggggatgcccgggcgatctggtgtcaaagaatgtgggcctgttgataaagaaaacttaaatgcgtttaaatgcagacactgggttttaaacacattctgaactcgtttgtctgtagtgttgcagcaacgggctgcaaaacatttgcattctttgtgtcttgttgttattacacttaatttagttctgcctgtaaaataaccagggaaaaattaccagcaaagtcacatgaacttgattcatcgggttattgtgcactttgaatgggtgtttactttgccctgytaacaggattggaagaagcaaaatacttaaggttttatttaagttagtcaggatgactctacatgtcagcagccaaactgttgcctctctttactcacagctctttattccacagcttgcaaaawaaaaaactactgaaggaaataagtgcttcacatccaacccttacttagaccaaggtgaagcaatgtctgtgggaacactgccagagcaaggaatgagcagctctgttcattccacaaactttgatgtgatgaaatagttatttgggtttctttttggccttgcagcaaaaaggga

SEQ ID NO: 38496 - DNA, 600 bp, Chicken  19866894269667_2
gtctgtagtgttgcagcaacgggctgcaaaacatttgcattctttgtgtcttgttgttattacacttaatttagttctgcctgtaaaataaccagggaaaaattaccagcaaagtcacatgaacttgattcatcgggttattgtgcactttgaatgggtgtttactttgccctgytaacaggattggaagaagcaaaatacttaaggttttatttaagttagtcaggatgactctacatgtcagcagccaaactgttgcctctctttactcacagctctttattccacagcttgcaaaawaaaaaactactgaaggaaataagtgcttcacatccaacccttacttagaccaaggtgaagcaatgtctgtgggaacactgccagagcaaggaatgagcagctctgttcattccacaaactttgatgtgatgaaatagttatttgggtttctttttggccttgcagcaaaaagggatttagtatctttcacagttaatctacaaccagtgttgtctctgctgctgtttctgagctctgaaagtaatgccagacaccctcccctctcccaaggctgttagatgtaaattagaatgcctgagc

SEQ ID NO: 38497 - DNA, 599 bp, Chicken  19866894269668_1
  misc_feature (1)..(194): n is any nucleotide
nnnnnnnnnnnnnnnnnnnnnnnnnnnnnnnnnnnnnnnnnnnnnnnnnnnnnnnnnnnnnnnnnnnnnnnnnnnnnnnnnnnnnnnnnnnnnnnnnnnnnnnnnnnnnnnnnnnnnnnnnnnnnnnnnnnnnnnnnnnnnnnnnnnnnnnnnnnnnnnnnnnnnnnnnnnnnnnnnnnnnnnnnnnnnnnnnntttacctccacaatagaatttatagtctgatattctccagactcaaaacaaaaatagtaaaagaaacagaaaacccctacaaaatcaaaaacccaaccaaaaaaamccataaaattgcactaagagaattagaaccaattctactatgctggagttctagcacaaagaccctatgctgaatctaccatcaccaggtcagcagcactgacaagcagtccagcattgctgttttcctggacaacagcagccaccaaagacaaagagcaatcaggggcccttcaaaaaagctgaaatacagaacagaagtggttcagctctccctgctttctgcaagcacaaaacacacagcttactccactcctcctttctacctcctggaattgatatggctggaggtaactacta

SEQ ID NO: 38498 - DNA, 600 bp, Chicken  19866894269673_1
cttagcagatgcaaaattattgctattattataaaagtataaaataatgtaaaataataaaaataaccaatgttgaggatgtgaaaagaaatcataccctagctgaaacagctacactggcaaaagaaattctggccattcaacttactttctacgagaagctatttgacttattcaacagagttaattgacttgttaattagcaatctacttggcattgggaaaggtaggaatacctcatgccccaaacatttttaaaaaatagaaaacattactcatgatctgaacttttccgtaacrcatacaaactatcttctatgaggaatgaaatttctattacttgattgacgtgctggaaaatagtgaagaaaattacaaaatattgtaaatgaaataactgtaacagctcagtcattcatatgtattagtaatcaataactgagctgaaactctgtaattacaatgcaaaggttctttctgttaaggactaaaatataaatagagttgttcataattttctgaaatgattctgccttttaatatttgacatctctcagtgtagccaactcccaaaagaagaatgatgaactaaggagaaag

SEQ ID NO: 38499 - DNA, 599 bp, Chicken  19866894269675_1
  misc_feature (1)..(53): n is any nucleotide
nnnnnnnnnnnnnnnnnnnnnnnnnnnnnnnnnnnnnnnnnnnnnnnnnnnnncaaaacacacagaccagtgggggaaggatcaaaaatatcttttaaaacaaaaagcatctagagcattccagtgatggtaaattagttctattgtgagagttttacctctgacattccttatcatagtgtgctgaaaaactagcttttctgcttagacctgtagtaagaaaatggaagtagagtttgacgtagagtttgacagctagctgtcttcaaataggaaccagttgtctggaatatgatcttygtggtacagcacaggctgaaccaagcctgttccagacagccttagcagtgatggtctgaagaggatcacaataaatgttaggcaatgctcacttctttcctcctgaggacaaggaattaggctaataaatgatgatttaggctacatagttgtaaacttgtggtgtagttgtagagatcttcactcattagcctccttacagcaggagtgttgcactgagtcacactgactccattatgaatgctaacgccggatactagtgacttctgcattccctgtttccgttctcatcttcagtt

SEQ ID NO: 38500 - DNA, 600 bp, Chicken  19866894269685_1
gtctggtctttgccaagaaagcataaagcattggaaggaaaatgggacttgattgtctttaatggagggttgggaaggcgtggagggagaaagagaattaaggttttaatactaagagccagcattgattctgaatgcttttaaggttgttctgataaaactatttcaaaaacaactccttcagaaatactggtgatcttaacaaaatactgtgatggttggcaaaatactgtgatggctggcatgcttttctgtgaaatatgaaccccacagtagctaacacagaggccattataaacytttgcctcctaaacatccaactgataagcaaaaacattaaaaataaattaaaaaaaaacaaaaaacaaccagaaatagctgtttcctgtcttaatggtttgaatgggattttcttctggagcatacattaggctctaccagtactgccctctgaggacatctcttatggacttgcatctctccttgtgctctgcagaggtgacagatctatgtgtggctggtgtcttgtacatcagtgggaccactgtgcctacaccatgaagtgctctcaaaccactgatagaaacctagtggtgtggc

SEQ ID NO: 38501 - DNA, 600 bp, Chicken  19866894269686_1
tggacatagccagtcacactagcttcattttaaagtatgtgcactcagtaagacatggtttccaggcacatttttaaatatcaagaatagatttgcctgaatattaataaggtaataataataagagcacataaacaaaagctttaagaaatttctctctctttgcctatgatccccttcccactcagagatgcaagagatagcagtcttcctcacaacttcattctagtggatgtgaaagtgctgcctgctttatctcacctcacctgggacattaaggtacaaggtttaggatcctaygcagaggtattttctcccttgagggagcatcccataaccgtcagttargtagatttgatcagtcctctaagtcactaaaatctctcacgtctttcacaagaaacacaagcaccatctctaatggaaacagatcattccccaagtcatagaataaaataatggaatcatagaacggtttgggttggaagggacctccaaggtcatttagctccaacccccccactataggcagggacacctgccactagacaagggtgttcaaagccccatccagcctggccttgaatgcttacagtgagg

SEQ ID NO: 38502 - DNA, 578 bp, Chicken  19866894269686_2
taagacatggtttccaggcacatttttaaatatcaagaatagatttgcctgaatattaataaggtaataataataagagcacataaacaaaagctttaagaaatttctctctctttgcctatgatccccttcccactcagagatgcaagagatagcagtcttcctcacaacttcattctagtggatgtgaaagtgctgcctgctttatctcacctcacctgggacattaaggtacaaggtttaggatcctaygcagaggtattttctcccttgagggagcatcccataaccgtcagttargtagatttgatcagtcctctaagtcactaaaatctctcacgtctttcacaagaaacacaagcaccatctctaatggaaacagatcattccccaagtcatagaataaaataatggaatcatagaacggtttgggttggaagggacctccaaggtcatttagctccaacccccccactataggcagggacacctgccactagacaagggtgttcaaagccccatccagcctggccttgaatgcttacagtgagggggcatccacaacctctctgggcagc

SEQ ID NO: 38503 - DNA, 600 bp, Chicken  19866894269687_1
cacatcttggccctccaaaccatctcatccgtgtctgcctgtctgtcctagatttaaaatatgatactaaaagccctcaggagccaacattcccagagaatgaaacacttcatactaatgcagtcttcttcaatcaattctagaaatgttttaaaaatacctttatttccttaaaataatctgtaggtattaaatatcttcctgttccaacattgctactatatgcatttactaccaagcttagagtgattgacgatactcctctttggttgaaccattcagagactgctccattctccygttttcaccacatagcagaagttttctttgtctttcctacacatcctgaaggtgaatgagtaccacctggattacccagtttctcagctcagcttccaaccaaacctctcaccaggaaaaaagctcaagggatcttgcagtcagttccaggccccgaggcaggagatgatcatttccttggcttcttacgaatatggaggtctcaaacatttatcaacatgagaattttttggatagagaaaataaagcttttggccctgacatatctccagatgctcagtccttggggacatttccaaa

SEQ ID NO: 38504 - DNA, 600 bp, Chicken  19866894269688_1
cataaatcctttggagatatacctaccagtgatgaggttttcacattttaaagacatttagacagcttcagatgctgcagacccctgtgggactgacagtgcctgagctgtacccctcagagcccatcagctccagagaaatcttttgcagattctgtcagatacttattgtttgaatttaggccttaacacagagaaaaaagcacacaaccaaaccttcagccccttagtacatagtgttagacacctggctcctgggttgagaccattatacagatgctccgctgtatatgacaaatwgaccgatgtgctgctgcacaatacactgtgcctatttatgttacatattaagaaacagatcatcatgagtcagcgaataacccagggccagatagcactatctgtaaggaaataaaaaatgagccattgcctggaacaatacaaccggtgctgaattagatgttagtcagccggacagtctggtatcattggatttcgtactgcagatgccatgtgaaaatggtctcaggagagacacaaagatatgcaatatggatgtgattcttgggaatagaaggcagctgagtccttcagtgcaaa

SEQ ID NO: 38505 - DNA, 600 bp, Chicken  19866894269692_1
aagctaaagcctgagaatggaagatctgaggatgtatgcacatgtatttttagaagcattaaggctaaactttgcaccctcagtgttgggatatgtgcagaagttgtacaaatgaaaagaattgtcataaacagatgggagaacttcagacaaaacagacgatcggaactgaaaaaaatgtgctgcccctagctgtcactttgaggacacaagcacaatttttctcaaaggacttcaggacttgaagaaaaatctcttctctacagattgatattggagatgagagttgaagaggtttcraagacagtgcatcttcccatagccaagggaaacgtagctaagaattacattagtgatgcctgtctgaggtttgcttcattaaaagcacataaaaagtaaagaaatgtctcagctttagaatgaagactattacgttttttacttcttaatttctttcttgttcagccacagtctgcaaaactttctttttgtgcaggcagactttgtcttctagaaagttcagtaaacagcagtccccatctgtctcacccttatctctccattctgctattctcagttggtttcaagtgaactttcagg

SEQ ID NO: 38506 - DNA, 589 bp, Chicken  19866894269692_2
tacgttttttacttcttaatttctttcttgttcagccacagtctgcaaaactttctttttgtgcaggcagactttgtcttctagaaagttcagtaaacagcagtccccatctgtctcacccttatctctccattctgctattctcagttggtttcaagtgaactttcaggttgtctgggtaagtaagaacctcaaaagtaggcacaggactgctgatttgtgctgactcaaatcagatcttgatgtctttgagacagctagtgatgttgaggcatgaattgctgcagtatccaagtactrgagacatcaggggaaggtaattcttggaaaccaatgccagctaactgaactaatttcaatgagagctcctatagagagagagcgcttcccttgggagcagttcagagcagtttatactaagctacttctctaaatctctaaaggagtatcgactataaaaggaatctaggtagattagccatatgggcttgaattagtcatctttttttaatcatgtagtgcagcttaagtagtgatgaaaatacaggagaccagactgacatttgtagcaacagagcagggttcattg

SEQ ID NO: 38507 - DNA, 600 bp, Chicken  19866894269693_1
cagcagtgctccctcctccagcaggagctgcgctgccctgtttggcacaaccaccacaaaggttcaggttagtcctgaatttcaggatgttttgctccgtctgatcttatgaaagcaccgagtttctctttatcctcctgcttctgcgagagctcttttgggtctccactttgaacctccaaaacgttggattaaacatcaaagctgggatcaacatctgctttggcctcggtgctcagcgcacgtgccaatgttgatgcctgattgctgatgccaaatcctcatctcggagcacgcagycgggcctgctgggtgatgctgatatgatgctgacttgtcaaggcaatgctggagctgactcctccatgcaaccacaaggcctgctgatgtgctaaggatatgcactgcttygtatgcaggaacgcagaacagagcggccagaagacrgggccgaaagcaagacctrgacaacacagctcctgccagccatggcaccttgctgtgtgcccaccgcaggaccaggaggagcacggccccagcagragtgcagctgccctaggaatcacttctgcgtggtcaactacatcacggctccagcaa

SEQ ID NO: 38508 - DNA, 600 bp, Chicken  19866894269693_2
aaagcaccgagtttctctttatcctcctgcttctgcgagagctcttttgggtctccactttgaacctccaaaacgttggattaaacatcaaagctgggatcaacatctgctttggcctcggtgctcagcgcacgtgccaatgttgatgcctgattgctgatgccaaatcctcatctcggagcacgcagycgggcctgctgggtgatgctgatatgatgctgacttgtcaaggcaatgctggagctgactcctccatgcaaccacaaggcctgctgatgtgctaaggatatgcactgcttygtatgcaggaacgcagaacagagcggccagaagacrgggccgaaagcaagacctrgacaacacagctcctgccagccatggcaccttgctgtgtgcccaccgcaggaccaggaggagcacggccccagcagragtgcagctgccctaggaatcacttctgcgtggtcaactacatcacggctccagcaagaacctgctaagtgagcccctgcccagctgcacctaatccaattgctcaagtacagtcacatcagtgggctgcggtaattaatcactrccagcatgttaatgcctctgaac

SEQ ID NO: 38509 - DNA, 600 bp, Chicken  19866894269693_3
gagagctcttttgggtctccactttgaacctccaaaacgttggattaaacatcaaagctgggatcaacatctgctttggcctcggtgctcagcgcacgtgccaatgttgatgcctgattgctgatgccaaatcctcatctcggagcacgcagycgggcctgctgggtgatgctgatatgatgctgacttgtcaaggcaatgctggagctgactcctccatgcaaccacaaggcctgctgatgtgctaaggatatgcactgcttygtatgcaggaacgcagaacagagcggccagaagacrgggccgaaagcaagacctrgacaacacagctcctgccagccatggcaccttgctgtgtgcccaccgcaggaccaggaggagcacggccccagcagragtgcagctgccctaggaatcacttctgcgtggtcaactacatcacggctccagcaagaacctgctaagtgagcccctgcccagctgcacctaatccaattgctcaagtacagtcacatcagtgggctgcggtaattaatcactrccagcatgttaatgcctctgaaccttgcacgctgaaagcccrggtagctgccttcctat

SEQ ID NO: 38510 - DNA, 600 bp, Chicken  19866894269693_4
cactttgaacctccaaaacgttggattaaacatcaaagctgggatcaacatctgctttggcctcggtgctcagcgcacgtgccaatgttgatgcctgattgctgatgccaaatcctcatctcggagcacgcagycgggcctgctgggtgatgctgatatgatgctgacttgtcaaggcaatgctggagctgactcctccatgcaaccacaaggcctgctgatgtgctaaggatatgcactgcttygtatgcaggaacgcagaacagagcggccagaagacrgggccgaaagcaagacctrgacaacacagctcctgccagccatggcaccttgctgtgtgcccaccgcaggaccaggaggagcacggccccagcagragtgcagctgccctaggaatcacttctgcgtggtcaactacatcacggctccagcaagaacctgctaagtgagcccctgcccagctgcacctaatccaattgctcaagtacagtcacatcagtgggctgcggtaattaatcactrccagcatgttaatgcctctgaaccttgcacgctgaaagcccrggtagctgccttcctatgccctgctccagataagaa

SEQ ID NO: 38511 - DNA, 600 bp, Chicken  19866894269693_5
cgtgccaatgttgatgcctgattgctgatgccaaatcctcatctcggagcacgcagycgggcctgctgggtgatgctgatatgatgctgacttgtcaaggcaatgctggagctgactcctccatgcaaccacaaggcctgctgatgtgctaaggatatgcactgcttygtatgcaggaacgcagaacagagcggccagaagacrgggccgaaagcaagacctrgacaacacagctcctgccagccatggcaccttgctgtgtgcccaccgcaggaccaggaggagcacggccccagcagragtgcagctgccctaggaatcacttctgcgtggtcaactacatcacggctccagcaagaacctgctaagtgagcccctgcccagctgcacctaatccaattgctcaagtacagtcacatcagtgggctgcggtaattaatcactrccagcatgttaatgcctctgaaccttgcacgctgaaagcccrggtagctgccttcctatgccctgctccagataagaaggaattaaggagagcaaggaggaatcccacttacctgagctgcttatttaccaatgtccccataaaggcagcactga

SEQ ID NO: 38512 - DNA, 600 bp, Chicken  19866894269693_6
gtgctaaggatatgcactgcttygtatgcaggaacgcagaacagagcggccagaagacrgggccgaaagcaagacctrgacaacacagctcctgccagccatggcaccttgctgtgtgcccaccgcaggaccaggaggagcacggccccagcagragtgcagctgccctaggaatcacttctgcgtggtcaactacatcacggctccagcaagaacctgctaagtgagcccctgcccagctgcacctaatccaattgctcaagtacagtcacatcagtgggctgcggtaattaatcactrccagcatgttaatgcctctgaaccttgcacgctgaaagcccrggtagctgccttcctatgccctgctccagataagaaggaattaaggagagcaaggaggaatcccacttacctgagctgcttatttaccaatgtccccataaaggcagcactgaacagcctctccctaaggaagccaactcagggcagaactcaacgggctggtgcaacagagaggtgcacagctctcatgcgtgttcccacaggagaatctccaggcaagtcccatcagtggctgcgtgtcgaggcagcgagcagcag

SEQ ID NO: 38513 - DNA, 600 bp, Chicken  19866894269693_7
agagcggccagaagacrgggccgaaagcaagacctrgacaacacagctcctgccagccatggcaccttgctgtgtgcccaccgcaggaccaggaggagcacggccccagcagragtgcagctgccctaggaatcacttctgcgtggtcaactacatcacggctccagcaagaacctgctaagtgagcccctgcccagctgcacctaatccaattgctcaagtacagtcacatcagtgggctgcggtaattaatcactrccagcatgttaatgcctctgaaccttgcacgctgaaagcccrggtagctgccttcctatgccctgctccagataagaaggaattaaggagagcaaggaggaatcccacttacctgagctgcttatttaccaatgtccccataaaggcagcactgaacagcctctccctaaggaagccaactcagggcagaactcaacgggctggtgcaacagagaggtgcacagctctcatgcgtgttcccacaggagaatctccaggcaagtcccatcagtggctgcgtgtcgaggcagcgagcagcaggaatgatgcaatgtggtgggccggctgggcgcgggcaggggc

SEQ ID NO: 38514 - DNA, 599 bp, Chicken  19866894269698_1
  misc_feature (1)..(26): n is any nucleotide
nnnnnnnnnnnnnnnnnnnnnnnnnntttctgctaagcatccattaaagagcatttacatgaaaagcaggtgatctcttccccaatcaagagggaacctaatgctgccaacaaactgcaggtgacacctcgagcctttttgtgtgcaatggggctttttcttccccacaatgcctggaggtgactgcggggcgccttctgtcttccttcctgcttatagaatcatggaaacgttatggttggaaaagaccgctaagaccatcatgttgaaccatcaacccatcatccccattaatgtccytcacccattytgatctccctcagggctctacctgggtaggtttgttctcagtgagccaagaacggtgcctaaaattaaaggacgccattggattaatgggactttagaaacctcagcaggaatcttttggagaaagccaatgtgaaggtctcagcgaggcaggggtcagtactctgtgtgtagtgttgggctttaagccaagcagatggagcaatgttcagccccggtgtctgaaagctgaaggcgatcgcgttttaattgaaattaaagctgtgcctggtaattaatcatgggatcca

SEQ ID NO: 38515 - DNA, 599 bp, Chicken  19866894269698_2
  misc_feature (1)..(16): n is any nucleotide
nnnnnnnnnnnnnnnntttctgctaagcatccattaaagagcatttacatgaaaagcaggtgatctcttccccaatcaagagggaacctaatgctgccaacaaactgcaggtgacacctcgagcctttttgtgtgcaatggggctttttcttccccacaatgcctggaggtgactgcggggcgccttctgtcttccttcctgcttatagaatcatggaaacgttatggttggaaaagaccgctaagaccatcatgttgaaccatcaacccatcatccccattaatgtccytcacccattytgatctccctcagggctctacctgggtaggtttgttctcagtgagccaagaacggtgcctaaaattaaaggacgccattggattaatgggactttagaaacctcagcaggaatcttttggagaaagccaatgtgaaggtctcagcgaggcaggggtcagtactctgtgtgtagtgttgggctttaagccaagcagatggagcaatgttcagccccggtgtctgaaagctgaaggcgatcgcgttttaattgaaattaaagctgtgcctggtaattaatcatgggatccaccaccaaagg

SEQ ID NO: 38516 - DNA, 600 bp, Chicken  19866894269698_3
tgactgcattaggctgtgggcagctgtgcttgagctgggaattcctggagaatttgcacaccctcattaagcacgatgtcaggtgaggtgtgggcatcttccagccttcagcatgacaaatctgtgacatccacaatgattcacccagagtttaatctgagctctgtcctctccaggcactgctgctgctcattgtccctctgtttccagcaaaaagaccaaaggcagatgtgcaactgcagaccctgctgtaatggacacaagcagtgctcaaagagccacagatgccaggcagggttrcagctggcatgaagtgtgtggtgttgcayrgcagcaggagaggtggtttggctcaaacaggtggctccagcatgcagaaaaaggcagatacagcaaagcaacaacttttgccctgagcacagggcatgcaactctcagagagcgagttgcaaagctggaataaatcagccgctaactaaacggcttgcagcagcaaatgaggttaatgcttgcagtgctgacagccactgacatgggggtgggcagtatgctgtgtaagaacaaaagatcagagcccacctctcccttcccaattgtccc

SEQ ID NO: 38517 - DNA, 600 bp, Chicken  19866894269698_4
ttgagctgggaattcctggagaatttgcacaccctcattaagcacgatgtcaggtgaggtgtgggcatcttccagccttcagcatgacaaatctgtgacatccacaatgattcacccagagtttaatctgagctctgtcctctccaggcactgctgctgctcattgtccctctgtttccagcaaaaagaccaaaggcagatgtgcaactgcagaccctgctgtaatggacacaagcagtgctcaaagagccacagatgccaggcagggttrcagctggcatgaagtgtgtggtgttgcayrgcagcaggagaggtggtttggctcaaacaggtggctccagcatgcagaaaaaggcagatacagcaaagcaacaacttttgccctgagcacagggcatgcaactctcagagagcgagttgcaaagctggaataaatcagccgctaactaaacggcttgcagcagcaaatgaggttaatgcttgcagtgctgacagccactgacatgggggtgggcagtatgctgtgtaagaacaaaagatcagagcccacctctcccttcccaattgtcccggggtgaggtttacatcttgctaacaaat

SEQ ID NO: 38518 - DNA, 600 bp, Chicken  19866894269698_5
tgagctgggaattcctggagaatttgcacaccctcattaagcacgatgtcaggtgaggtgtgggcatcttccagccttcagcatgacaaatctgtgacatccacaatgattcacccagagtttaatctgagctctgtcctctccaggcactgctgctgctcattgtccctctgtttccagcaaaaagaccaaaggcagatgtgcaactgcagaccctgctgtaatggacacaagcagtgctcaaagagccacagatgccaggcagggttrcagctggcatgaagtgtgtggtgttgcayrgcagcaggagaggtggtttggctcaaacaggtggctccagcatgcagaaaaaggcagatacagcaaagcaacaacttttgccctgagcacagggcatgcaactctcagagagcgagttgcaaagctggaataaatcagccgctaactaaacggcttgcagcagcaaatgaggttaatgcttgcagtgctgacagccactgacatgggggtgggcagtatgctgtgtaagaacaaaagatcagagcccacctctcccttcccaattgtcccggggtgaggtttacatcttgctaacaaata

SEQ ID NO: 38519 - DNA, 600 bp, Chicken  19866894269699_1
tacactcttgcactctttcccgttcaacatatggtttcattttgaaagaggagacttacagtaaactatcatcagtagactgataaatgctatattcataacagtacatctgttcgatgaagatttctcatgcttactgaatgcttaatggctttctagaatactaactttatttatccgttttgacattgagtaatatatacaggaagagcaattatgattcttactcattcccccaggaattttaggttttcatttattttgtaagtacatgctagtgttcagatacttaacagagayactaagctcacaaacctttgtacttaagaggcaaatgggatcttaattccatctcctgaaggcacacaccaaagaaacaatcaagattcagaatttcacccgaagcagctgataactgctatacaattctcarcgaagtacaagtttaattaccaacccagttaaatatagttctaattagtcagaagttcagtgtctcaaatacagcatggggaatggacagatgttgctagcaatactatgtattacactgaagttaaaagatattcctataaaaaagactatgagaaagcttagcgt

SEQ ID NO: 38520 - DNA, 600 bp, Chicken  19866894269699_2
ttactgaatgcttaatggctttctagaatactaactttatttatccgttttgacattgagtaatatatacaggaagagcaattatgattcttactcattcccccaggaattttaggttttcatttattttgtaagtacatgctagtgttcagatacttaacagagayactaagctcacaaacctttgtacttaagaggcaaatgggatcttaattccatctcctgaaggcacacaccaaagaaacaatcaagattcagaatttcacccgaagcagctgataactgctatacaattctcarcgaagtacaagtttaattaccaacccagttaaatatagttctaattagtcagaagttcagtgtctcaaatacagcatggggaatggacagatgttgctagcaatactatgtattacactgaagttaaaagatattcctataaaaaagactatgagaaagcttagcgtggaaatgggctgaaacatgtctactggggaaggtgtttgtaagtctgmaggaaaaaactgttcagcatgtagacctgatcccacagctcctgctcagtgtgctgactcaaagctgcagttcaacttcaaacct

SEQ ID NO: 38521 - DNA, 600 bp, Chicken  19866894269699_3
ccatctcctgaaggcacacaccaaagaaacaatcaagattcagaatttcacccgaagcagctgataactgctatacaattctcarcgaagtacaagtttaattaccaacccagttaaatatagttctaattagtcagaagttcagtgtctcaaatacagcatggggaatggacagatgttgctagcaatactatgtattacactgaagttaaaagatattcctataaaaaagactatgagaaagcttagcgtggaaatgggctgaaacatgtctactggggaaggtgtttgtaagtctgmaggaaaaaactgttcagcatgtagacctgatcccacagctcctgctcagtgtgctgactcaaagctgcagttcaacttcaaacctggtgttactgaaaagatactctccaggaaacaatctaatcttcagcaaaataaaatctgttggcaatcaggctttgtctgccatatgaaaagcaacttgagtagcaattcctcatcaaaggaagcraattggcctgtgatgcgaacttctgaaatacacatctcctagaatgaccaacagcagagatcagcaatgaattctcactttgaaacctg

SEQ ID NO: 38522 - DNA, 600 bp, Chicken  19866894269699_4
aaagatattcctataaaaaagactatgagaaagcttagcgtggaaatgggctgaaacatgtctactggggaaggtgtttgtaagtctgmaggaaaaaactgttcagcatgtagacctgatcccacagctcctgctcagtgtgctgactcaaagctgcagttcaacttcaaacctggtgttactgaaaagatactctccaggaaacaatctaatcttcagcaaaataaaatctgttggcaatcaggctttgtctgccatatgaaaagcaacttgagtagcaattcctcatcaaaggaagcraattggcctgtgatgcgaacttctgaaatacacatctcctagaatgaccaacagcagagatcagcaatgaattctcactttgaaacctgcagggaaaaggtaaacaacccacagagatgcagaggtcaagttcatcctcctaatgttaatgttttcagctagctaaggacttacaaagctcacacagttgactcacatttccatgatggcagtttaggacttgtttggccactgacagctggattctggctctccattccatgtacacccaaacttctctcttgaagtttagccagtaga

SEQ ID NO: 38523 - DNA, 599 bp, Chicken  19866894269711_1
  misc_feature (1)..(50): n is any nucleotide
nnnnnnnnnnnnnnnnnnnnnnnnnnnnnnnnnnnnnnnnnnnnnnnnnnctggggcccccagtgcaagaaagacctggagagggtccagagtagggccacaaagatgatctgagggctggagcacctcccctgtgaagacaggctgagggagctgggcttgttcagcctggagaaaaagctgtgggctgacttcattgcagcctttcagtacctaaagggagcctacaggaggggagctaactctttacaaggatagataatggcaggacaaggggacatggttttaagttgaaggagkgaagatttaggttggatatyggaggaagctctttactatgagagtggtggggtgctggaacaggctgcccagagaggttgtggatgccctgtccctggagatattcaaggccaggttggacggggccctgggcagcctggtctagtattaaatgtgaacgttggtggccctgcctgtggcaggggcagttggagcttgatgatccttgaggtcccttccaactcaggccattctatgattctatgaatgcaaggtatatgtggggtgagtgtgtgagtgctgtgtgtttgcactgaaca

SEQ ID NO: 38524 - DNA, 599 bp, Chicken  19866894269711_2
  misc_feature (1)..(30): n is any nucleotide
nnnnnnnnnnnnnnnnnnnnnnnnnnnnnnctggggcccccagtgcaagaaagacctggagagggtccagagtagggccacaaagatgatctgagggctggagcacctcccctgtgaagacaggctgagggagctgggcttgttcagcctggagaaaaagctgtgggctgacttcattgcagcctttcagtacctaaagggagcctacaggaggggagctaactctttacaaggatagataatggcaggacaaggggacatggttttaagttgaaggagkgaagatttaggttggatatyggaggaagctctttactatgagagtggtggggtgctggaacaggctgcccagagaggttgtggatgccctgtccctggagatattcaaggccaggttggacggggccctgggcagcctggtctagtattaaatgtgaacgttggtggccctgcctgtggcaggggcagttggagcttgatgatccttgaggtcccttccaactcaggccattctatgattctatgaatgcaaggtatatgtggggtgagtgtgtgagtgctgtgtgtttgcactgaacagatcaaagagcagaactgat

SEQ ID NO: 38525 - DNA, 364 bp, Chicken  19866894269713_1
gaaaggtgggaccttctgtaaacaggtttatccctagaggcaatgggtagggcactacacaagtggcaaatacgttcactgcagggaagctggactagatgacccttaagggtcccttccatctcaaacaattttatggttctgagatgctatgatgggagtgagacataaggcaaataagaatttgagggcaaggaatgtaaaatacatacttatttcttcttcttagagacttccttggaaagatcagttccctgatgtggttcacgtcacagcacgagtggtaagaacttgggtaartaaagagtacaggcaatacagagggaggaatcccttaagccagcattgcagctctgcgttttgg

SEQ ID NO: 38526 - DNA, 599 bp, Chicken  19866894269716_1
  misc_feature (1)..(181): n is any nucleotide
nnnnnnnnnnnnnnnnnnnnnnnnnnnnnnnnnnnnnnnnnnnnnnnnnnnnnnnnnnnnnnnnnnnnnnnnnnnnnnnnnnnnnnnnnnnnnnnnnnnnnnnnnnnnnnnnnnnnnnnnnnnnnnnnnnnnnnnnnnnnnnnnnnnnnnnnnnnnnnnnnnnnnnnnnnnnnnnnnnnnngatttggggatttttttcctgccagcccacttagagacatccgtcagtgatgcaacaaggagctgctagacactgcacaatccctggctgcatcacggcgctgggacctctatttgccyctaggacaaacctgaggctgkagaactgcattcacagcacaagcgatggacagcaggagggtatcagctccaccagaccagctgcccttcctgcctcttttttagcaccgttccttttaataactccacttaatattaacgtgccattacccagagtccttttagaccagcagccttggagttgcttggaaactgctcgctgcaatgcctgcaaggctctgccgagagggctcgcagccagcccgtgtcccgggaacctggcggaacaacgcctgtactctgctggcagcacttaagaa

SEQ ID NO: 38527 - DNA, 599 bp, Chicken  19866894269716_2
  misc_feature (1)..(160): n is any nucleotide
nnnnnnnnnnnnnnnnnnnnnnnnnnnnnnnnnnnnnnnnnnnnnnnnnnnnnnnnnnnnnnnnnnnnnnnnnnnnnnnnnnnnnnnnnnnnnnnnnnnnnnnnnnnnnnnnnnnnnnnnnnnnnnnnnnnnnnnnnnnnnnnnnnnnnnnnnnnnnnnngatttggggatttttttcctgccagcccacttagagacatccgtcagtgatgcaacaaggagctgctagacactgcacaatccctggctgcatcacggcgctgggacctctatttgccyctaggacaaacctgaggctgkagaactgcattcacagcacaagcgatggacagcaggagggtatcagctccaccagaccagctgcccttcctgcctcttttttagcaccgttccttttaataactccacttaatattaacgtgccattacccagagtccttttagaccagcagccttggagttgcttggaaactgctcgctgcaatgcctgcaaggctctgccgagagggctcgcagccagcccgtgtcccgggaacctggcggaacaacgcctgtactctgctggcagcacttaagaacagggacggcgaggggggagc

SEQ ID NO: 38528 - DNA, 439 bp, Chicken  19866894269716_3
gtgccattacccagagtccttttagaccagcagccttggagttgcttggaaactgctcgctgcaatgcctgcaaggctctgccgagagggctcgcagccagcccgtgtcccgggaacctggcggaacaacgcctgtactctgctggcagcacttaagaacagggacggcgaggggggagcagctgcaggatggctccattgcaccccaaggctgcagccgtcccagcaagcacagaacagctgcacacagggacatagagacccaaggtcccaaggctgcgcttcaaagcacacccagaracarggaaagggtgaggtgctggagcagggcgcaggcaaaacctgcttggcctcgccagatttgtttgaccaaatctggaaactgaattcaatcatgaggagagaagggttttgctgttcatgcaagtctcagcatggc

SEQ ID NO: 38529 - DNA, 435 bp, Chicken  19866894269716_4
cattacccagagtccttttagaccagcagccttggagttgcttggaaactgctcgctgcaatgcctgcaaggctctgccgagagggctcgcagccagcccgtgtcccgggaacctggcggaacaacgcctgtactctgctggcagcacttaagaacagggacggcgaggggggagcagctgcaggatggctccattgcaccccaaggctgcagccgtcccagcaagcacagaacagctgcacacagggacatagagacccaaggtcccaaggctgcgcttcaaagcacacccagaracarggaaagggtgaggtgctggagcagggcgcaggcaaaacctgcttggcctcgccagatttgtttgaccaaatctggaaactgaattcaatcatgaggagagaagggttttgctgttcatgcaagtctcagcatggc

SEQ ID NO: 38530 - DNA, 599 bp, Chicken  19866894269725_1
  misc_feature (1)..(43): n is any nucleotide
nnnnnnnnnnnnnnnnnnnnnnnnnnnnnnnnnnnnnnnnnnnacaaagatcattcttacactctgtttcttaagagctaatcattcaactgtaaaatccactcagcccttttgctgatttttcagttacctgcgacatccactggaaatatatatgatctcaaaatgcacaatcctttattatgctgagaccatgatataatttcagatcataatgaaataatgcatcttttagggaaaaatcctatagagaaagaagtgagatttaagtagagctgtctgttaattatcaaaagaaawaaaggagtattttatggagaaggaaacaatgtgcactttgagatcagaaacaaacaccacccaaaaaagttatgacattgctaaaataaatcatccatcaaaatttccattttaaactcacaactcaagaactggcagcaaatccataagctagcacacagcccaggtgcccagaaggtcttctgagttttgctgcagagaccatagagttcgaaaggagcagagccatgagccatctacacagactgcagcttcacatcccrtgatgtacgtagctgtctgctggccaacgagargga

SEQ ID NO: 38531 - DNA, 572 bp, Chicken  19866894269725_2
atttaagtagagctgtctgttaattatcaaaagaaawaaaggagtattttatggagaaggaaacaatgtgcactttgagatcagaaacaaacaccacccaaaaaagttatgacattgctaaaataaatcatccatcaaaatttccattttaaactcacaactcaagaactggcagcaaatccataagctagcacacagcccaggtgcccagaaggtcttctgagttttgctgcagagaccatagagttcgaaaggagcagagccatgagccatctacacagactgcagcttcacatcccrtgatgtacgtagctgtctgctggccaacgagarggagggcagagcccacctgaggctttttttttaacaatttccctagcactgtctgccttgaacagtttataaagcaaactggaagaccccataggcaaggtgtagtgatgaaagacattttgaggtacgtgaggagacctgcattaccttaggtgggtaacggaggcttcctgaagctttcacagctgtccgcagttattcatgtatagctgttattatatacattactcaattgcatt

SEQ ID NO: 38532 - DNA, 539 bp, Chicken  19866894269725_3
aaawaaaggagtattttatggagaaggaaacaatgtgcactttgagatcagaaacaaacaccacccaaaaaagttatgacattgctaaaataaatcatccatcaaaatttccattttaaactcacaactcaagaactggcagcaaatccataagctagcacacagcccaggtgcccagaaggtcttctgagttttgctgcagagaccatagagttcgaaaggagcagagccatgagccatctacacagactgcagcttcacatcccrtgatgtacgtagctgtctgctggccaacgagarggagggcagagcccacctgaggctttttttttaacaatttccctagcactgtctgccttgaacagtttataaagcaaactggaagaccccataggcaaggtgtagtgatgaaagacattttgaggtacgtgaggagacctgcattaccttaggtgggtaacggaggcttcctgaagctttcacagctgtccgcagttattcatgtatagctgttattatatacattactcaattgcatt

SEQ ID NO: 38533 - DNA, 600 bp, Chicken  19866894269730_1
attgcacagggattttggttgcacacaccccagtgaagctctaataactgagcagggtccaggcattgattccagcaggcagcaagcagccgaacactgcctgcgccgcagggctggccccagcccagagctgcctcgactgggaaaacctaggtaggtctgcaggaatgagagcagacaccgtgggtctacctgatgggaaaggatgcactgtgccctgccactcttcagtgcacccggtaaatgtcccctggtgagtctgcactttgcagcccatgatgggaagggatgtagcggtgygtgctgcccatgcccacatttgggtgctggcagctgtacggggagcatcgccccagccacccccaagctctcattcccaccttccctgacggctttccatggggccgtcagtctttccctttcataacccagccaaagcagttgcaacatttccctcgatgcttctcttgctattatgggtagggatttccaaagctttgctaataaaagagtaacagtttctatatctgggaaatggggaaatcaatgggcaggctgttgtaagagacgtaacggctttttgtggcagctcgggcagtt

SEQ ID NO: 38534 - DNA, 541 bp, Chicken  19866894269730_2
atgcccacatttgggtgctggcagctgtacggggagcatcgccccagccacccccaagctctcattcccaccttccctgacggctttccatggggccgtcagtctttccctttcataacccagccaaagcagttgcaacatttccctcgatgcttctcttgctattatgggtagggatttccaaagctttgctaataaaagagtaacagtttctatatctgggaaatggggaaatcaatgggcaggctgttgtaagagacgtaacggctttttgtggcagctcgggcagttctgtaacgygatggagctggagggcaagttggttggtcaacttcatcggcaacatctgctcttgtgagtgatgggacaatgccagtgtgggaccatctcatccccagggggtgtccctctggggctgcgtgtcctaggaaccctcctggctgtgggaaccatggggtgaggtcacccctctgctgccctctccgtgccccccagcccaccctgatgcccccacatcccctctcatcagtgagtgcagtca

SEQ ID NO: 38535 - DNA, 600 bp, Chicken  19866894269740_1
agggtttcacatctgaaagcaggtgacagtctggggcttgtctctgtcaccattgaggtcttgaggtctttccctgctgaccacctgagccagcacatgttgctgaggctgttacgtgtccttatggttattaatgtggagctggaacttacaactgtgatgaatctttaatatactgacggggagaatgaaaaatactgctgcagggatgcctgcacaaacagcagggctgtgacagcttccatgtgtgaagaacaacttgtccatcattacttctgataagtttttttttgtcctttygcctagttatcctgttcccaaatgggcctttttgggggagggggtgttacttagggctgttcttaggggttcttagggctgttgagatggatctgttccaagcaaggaggaggtggccaggctgccttcatgccgtatggacatgtgtgctcagcccaacatggtgctgggtccatccttccccatctgctgaacctgcccttcagtggctcctccacttgtctatttgggggctgccctgcagtttttctaatgaagtaggatgaaaacagtggagcactgaaggggtctggggagaag

SEQ ID NO: 38536 - DNA, 600 bp, Chicken  19866894269740_2
agaagctggagttcctgagcttgtcttattggtaggatgcatgtgtgccagttcaaatgggaaatccttttttggatgcatcaaatgctggtcttgggccagtatgagtgtactcttgggctgagtgaagcaaggcagaggctgttccctgtgcaccaaaacaaaccctgtgagtccaggatatgctcaaggaaacaaagcacacgaagataaatggggctaatcccaccacagcctgcaaacaaacaccactgctcaaaccagagacagataacacaaacaaccctgggaaagcggttyggtgagtgtcaaactgcagggcaaagccaatatattgctccgtgacttccaattagagacttgtggctgtataattaagtttctggtgacactgtatttaaagtcatgtcagtgctttcatttataaatactgcaccgcaggtgcctgagctcccagctagaatctggtgttcagcatctaatccaagaagtgagggctgttttgttttgttttttcttttcggcctgagggaagaaaatccctcaaggcagttaagctgctcaggagagaaaagaattaaatattttcaatacatttta

SEQ ID NO: 38537 - DNA, 494 bp, Chicken  19866894269740_3
ggaatttatcaatagttaatgccctttgtctaagagaggcaggctcatgcaatcttgctgctcagttttaatgcatttctgctgtcttcctttctgtctgtgatgctgccaaaggcagggatgtctgcagaaagtcatgccaaactaagcagcccacgttactcaactagattggtaacttcagcctgaccctgcttccttataatgtaccttcagcgcgtcaatattgggatttagcggcaagtcttgctcatctgtcatatgctaagtaaacaccatgtgttatgtgggtactcaagyctcctatggaaaattgatttgaagatgacaaaatgagtagaaccttttcctttgagcaatgacagtatctccaggaagatctacagtaagcattgtataaaaataggctgattttccaacttaggtacatggaattaccatccaggaaaaatgacatgttaaggtttcatctgggccttggtgagcttgcacac

SEQ ID NO: 38538 - DNA, 599 bp, Chicken  19866894269743_1
  misc_feature (1)..(15): n is any nucleotide
nnnnnnnnnnnnnnnacactgccggtgttaaactgagggctgatacagaatacatttttgttcaaagtgcacttagtatcttattcttcctggctgtgtgtggggttacgtaaaatgtgagttacagagtgtaagttttataatgtgtgcttgggttacaaagtgttgatccatcatcagtgtgttaaactttatttgctctcttttaaattctgcaattttaaggataagagactaagaaagctatataaagcagacataagtgggctccataactaactgtgcttacagatactaacrtatgtaagtcataggaatgtaatgaaaaaagtcacaattcttatgttgtgttgtgattcacaacattatttaaaaaaaaaaaaaagaggctgaaggtgtctgtaggaaaaacaagtttgcttgtcataggtgataaaaacaggtattggtggtttatcgcatagtaacacaatcgtgaaagattaagaatagttgcatctaatgcattgttttcttaattcctgaaggtgctcctatattgttggcaggtaatggtgtctgagttttatgtcactttgcagaaagctgacatgttagag

SEQ ID NO: 38539 - DNA, 599 bp, Chicken  19866894269745_1
  misc_feature (1)..(258): n is any nucleotide
nnnnnnnnnnnnnnnnnnnnnnnnnnnnnnnnnnnnnnnnnnnnnnnnnnnnnnnnnnnnnnnnnnnnnnnnnnnnnnnnnnnnnnnnnnnnnnnnnnnnnnnnnnnnnnnnnnnnnnnnnnnnnnnnnnnnnnnnnnnnnnnnnnnnnnnnnnnnnnnnnnnnnnnnnnnnnnnnnnnnnnnnnnnnnnnnnnnnnnnnnnnnnnnnnnnnnnnnnnnnnnnnnnnnnnnnnnnnnnnnnnnnnnnnnnnnnnnnnnaaaatcaagggggaggtagtctgaagccttgagatacaaggwctgaatggagatggaccagaacaagttgctattgcaagaccaggatttgtcacttgagcaatatggaggctttgagaggtattgctccacataaacacagcagggggacccaaacatatgcrattcactttccttttacataataagggagaaacacttcatctgtcataagaagaagccaacatgtagagacaaaaacaaaaccagaaaacaaaagttgttgtggagtacatctgtcatcattgtaacatcaaaacataatggaacaatacagatgtatatataaaagtacttaaaaa

SEQ ID NO: 38540 - DNA, 599 bp, Chicken  19866894269745_2
  misc_feature (1)..(136): n is any nucleotide
nnnnnnnnnnnnnnnnnnnnnnnnnnnnnnnnnnnnnnnnnnnnnnnnnnnnnnnnnnnnnnnnnnnnnnnnnnnnnnnnnnnnnnnnnnnnnnnnnnnnnnnnnnnnnnnnnnnnnnnnnnnnnnnnnnnnnnnnaaaatcaagggggaggtagtctgaagccttgagatacaaggwctgaatggagatggaccagaacaagttgctattgcaagaccaggatttgtcacttgagcaatatggaggctttgagaggtattgctccacataaacacagcagggggacccaaacatatgcrattcactttccttttacataataagggagaaacacttcatctgtcataagaagaagccaacatgtagagacaaaaacaaaaccagaaaacaaaagttgttgtggagtacatctgtcatcattgtaacatcaaaacataatggaacaatacagatgtatatataaaagtacttaaaaagcctgaaccaaagtcatcagtgtgtttcagaacgttccttggttcagtgacagaactatcttccagaaaaataggaacatgtttctgatacaagtacagaggcttctctgactttcagccct

SEQ ID NO: 38541 - DNA, 473 bp, Chicken  19866894269745_3
aagccaacatgtagagacaaaaacaaaaccagaaaacaaaagttgttgtggagtacatctgtcatcattgtaacatcaaaacataatggaacaatacagatgtatatataaaagtacttaaaaagcctgaaccaaagtcatcagtgtgtttcagaacgttccttggttcagtgacagaactatcttccagaaaaataggaacatgtttctgatacaagtacagaggcttctctgactttcagccctcaaacctcatgtgacagaaaagtttggttctttctggctaaaacagctcaataraatagaatgatataattatttattcttttttccccatgcagttaaagagttctattcaactagatgcagcctggggagagttcatgcaccactgttctttgggcttgtgcctcatgttttcccgcaacagtacccacatttcatgcatttacaatacagctccaggacctctc

SEQ ID NO: 38542 - DNA, 600 bp, Chicken  19866894269749_1
tccctaggcagtgcttcttactgataagggaactttattgatgaagtcataaaagtgggctttaaaataagtgaaatgctgctagttaatttctttctattttaaaaataatcttgtgtgccagaatctctaagggctttcctgcttttaaaaatgtgctctcaagttcttcaactatcttaaataaagtacttggagtattctataacttttactgctgtactggagaatagttgcttgtggaatctgatagaagaggtgtgaactcttacatatggtattttggaaatgtctttttcrgttatttaaactgaaattattttttcagatattgctgcttttccagatagtgtcaacgttttagaagatgtatctggagatatccgaactccagataaactcattgacagagtaaataacacaactgatggcagacatatgtggcttgcaccacttcttcctggtttggtacgtttttcccttatcatcccattctactgatgtgtacagatatggctagaagtatgatggcaagggaaggaatacaaaactttgaggtcaatttgatattagtaagctgtgctaaatgactgcttgtca

SEQ ID NO: 38543 - DNA, 600 bp, Chicken  19866894269751_1
aagatcgttataaatgataatactcaagttcgggatattattctgaaatttgtacctgtgtgtatgttcaatgtaatttctggcaggtaagagaattagaacttttccatcagggctctaagtcagacagacagttttgatgcctctgtaacacagccattcagtgtttgaggtttcaacatgctgacttcaaagaacaatttatataaagtgagctcacttatagctttcttataagcaatttttcttgtttgctaaatcaggatgtggaatttcacagtcagtgaatctggagggaakgtctctgtgtgggtgaaatctagcaaagacctggaataaaacagcagaaaaagaccttccataaacacaagcycaaacatatgcaaggcataactatgcttaatttcctataagtgctgctcaagagtaatattgcaaaaaatgctgttattttccaaactgggaagatggggtctgcgttttttcaatgcattggctcttctttaatggcagattgatatcacatttggcagattatatacattctactgtacccctggtacccaagctctgctataatcagacacatggggctttgac

SEQ ID NO: 38544 - DNA, 600 bp, Chicken  19866894269751_2
taatttctggcaggtaagagaattagaacttttccatcagggctctaagtcagacagacagttttgatgcctctgtaacacagccattcagtgtttgaggtttcaacatgctgacttcaaagaacaatttatataaagtgagctcacttatagctttcttataagcaatttttcttgtttgctaaatcaggatgtggaatttcacagtcagtgaatctggagggaakgtctctgtgtgggtgaaatctagcaaagacctggaataaaacagcagaaaaagaccttccataaacacaagcycaaacatatgcaaggcataactatgcttaatttcctataagtgctgctcaagagtaatattgcaaaaaatgctgttattttccaaactgggaagatggggtctgcgttttttcaatgcattggctcttctttaatggcagattgatatcacatttggcagattatatacattctactgtacccctggtacccaagctctgctataatcagacacatggggctttgacatgtttaatattattaataaaagcactgtttgtattttaaaaggccatacctttgatttaactgagatactta

SEQ ID NO: 38545 - DNA, 600 bp, Chicken  19866894269759_1
gaaagagcatttaaaataagaattaattcaacattagtgaaagagtcctaactgacatgtcagaatgaacaatatatttgtgtgacgagggaattaaggcaatgccaactcttcccagcacctcaaaacatttccttagttccacttttgaaggaatacattttctgaaagaaacacttgataatgatgggccatccagagaaagcctccatcagattccaggcaggaaattaaatactaagtataacactgatttagctgtggatattcctgttgaaacgacaaggttgcttcaaagcraaataccaaggaatgcaatgtcagagaaagaagaactactcctctagaaagtgttatagaaggaatccagtgcctttcaagtaaatcacacactgattgycttactgcctyaaactgtgggtatgttttgtgttccatacatttaagagaaaacagcagatttgcacattagtactccccaagcaaaggttctaaagaaaaaacatagcaactaacacaagaaggtagtgaactattcaacaccaggattctatcaaaacagcttagacaaacctaagaatgcttgttaagaacaaggct

SEQ ID NO: 38546 - DNA, 600 bp, Chicken  19866894269759_2
aatgccaactcttcccagcacctcaaaacatttccttagttccacttttgaaggaatacattttctgaaagaaacacttgataatgatgggccatccagagaaagcctccatcagattccaggcaggaaattaaatactaagtataacactgatttagctgtggatattcctgttgaaacgacaaggttgcttcaaagcraaataccaaggaatgcaatgtcagagaaagaagaactactcctctagaaagtgttatagaaggaatccagtgcctttcaagtaaatcacacactgattgycttactgcctyaaactgtgggtatgttttgtgttccatacatttaagagaaaacagcagatttgcacattagtactccccaagcaaaggttctaaagaaaaaacatagcaactaacacaagaaggtagtgaactattcaacaccaggattctatcaaaacagcttagacaaacctaagaatgcttgttaagaacaaggctgatgcgtttgatcctgactctctgctgaaagttggatggagcactctcttgagctctcctctagccccactttagcaggacactggctatctacgggata

SEQ ID NO: 38547 - DNA, 600 bp, Chicken  19866894269759_3
ttcccagcacctcaaaacatttccttagttccacttttgaaggaatacattttctgaaagaaacacttgataatgatgggccatccagagaaagcctccatcagattccaggcaggaaattaaatactaagtataacactgatttagctgtggatattcctgttgaaacgacaaggttgcttcaaagcraaataccaaggaatgcaatgtcagagaaagaagaactactcctctagaaagtgttatagaaggaatccagtgcctttcaagtaaatcacacactgattgycttactgcctyaaactgtgggtatgttttgtgttccatacatttaagagaaaacagcagatttgcacattagtactccccaagcaaaggttctaaagaaaaaacatagcaactaacacaagaaggtagtgaactattcaacaccaggattctatcaaaacagcttagacaaacctaagaatgcttgttaagaacaaggctgatgcgtttgatcctgactctctgctgaaagttggatggagcactctcttgagctctcctctagccccactttagcaggacactggctatctacgggataacacactcaac

SEQ ID NO: 38548 - DNA, 600 bp, Chicken  19866894269766_1
gtgctgggtttctgtaatctgcttgtgaccttctccattgctttgctatgcctctctataggtgtgtgcctctttccccttctccaaccatttgggctggttttgtgctctcatagacacagaaggatttaccagatgggcacagagcctccatttttctcttttttcccatggctttaagtgctacttttatttggcttctgtataattcagcgctgtgacatttaaaggaatcaaatggagggagaggtctgctcatcccaatccctgctgggttatagcctgggcttttccaggcamtcaggtrggcttagcccagakctttcggatgaagaacatcaccttttaccttcacattaatgtgactttcttgcaaaatgccaaacacaattcatcctccaggaagggctctcctacataattcaatctgttgagagagcaaacattcaaacacgtttcccactgcctggcaggaggaatgagcacagattgctctgtctggaaggccaggtggcaaaggatgtgtgaatattttgggcaccagcaggatccagggtagagcccagagtggttttgccaatgcagaacatttcatttgag

SEQ ID NO: 38549 - DNA, 600 bp, Chicken  19866894269766_2
gtttctgtaatctgcttgtgaccttctccattgctttgctatgcctctctataggtgtgtgcctctttccccttctccaaccatttgggctggttttgtgctctcatagacacagaaggatttaccagatgggcacagagcctccatttttctcttttttcccatggctttaagtgctacttttatttggcttctgtataattcagcgctgtgacatttaaaggaatcaaatggagggagaggtctgctcatcccaatccctgctgggttatagcctgggcttttccaggcamtcaggtrggcttagcccagakctttcggatgaagaacatcaccttttaccttcacattaatgtgactttcttgcaaaatgccaaacacaattcatcctccaggaagggctctcctacataattcaatctgttgagagagcaaacattcaaacacgtttcccactgcctggcaggaggaatgagcacagattgctctgtctggaaggccaggtggcaaaggatgtgtgaatattttgggcaccagcaggatccagggtagagcccagagtggttttgccaatgcagaacatttcatttgagttctctg

SEQ ID NO: 38550 - DNA, 600 bp, Chicken  19866894269766_3
cttgtgaccttctccattgctttgctatgcctctctataggtgtgtgcctctttccccttctccaaccatttgggctggttttgtgctctcatagacacagaaggatttaccagatgggcacagagcctccatttttctcttttttcccatggctttaagtgctacttttatttggcttctgtataattcagcgctgtgacatttaaaggaatcaaatggagggagaggtctgctcatcccaatccctgctgggttatagcctgggcttttccaggcamtcaggtrggcttagcccagakctttcggatgaagaacatcaccttttaccttcacattaatgtgactttcttgcaaaatgccaaacacaattcatcctccaggaagggctctcctacataattcaatctgttgagagagcaaacattcaaacacgtttcccactgcctggcaggaggaatgagcacagattgctctgtctggaaggccaggtggcaaaggatgtgtgaatattttgggcaccagcaggatccagggtagagcccagagtggttttgccaatgcagaacatttcatttgagttctctgtgcgtgtcaccacg

SEQ ID NO: 38551 - DNA, 458 bp, Chicken  19866894269766_4
tcggatgaagaacatcaccttttaccttcacattaatgtgactttcttgcaaaatgccaaacacaattcatcctccaggaagggctctcctacataattcaatctgttgagagagcaaacattcaaacacgtttcccactgcctggcaggaggaatgagcacagattgctctgtctggaaggccaggtggcaaaggatgtgtgaatattttgggcaccagcaggatccagggtagagcccagagtggttttgccaatgcagaacatttcatttgagttctctgtgcgtgtcaccacgtayagagagccaaaagtcaccaaagtctcactgggtagtagagatttgtatgagctcaaggctaggtctgtgttttccagccctactcccagttcctgctaattaaacaaccatctacttctcatttatgcccatgcataaattttgagggaaatagaagg

SEQ ID NO: 38552 - DNA, 600 bp, Chicken  19866894269777_1
cagaagaactgtatggagcctgatttgacaccagtacacgtgccttatatcacacaggtttaagtgtgtaaaagtgcttttgccagtgtgtacgaggaggtcctagaagaattcttagcgggggggttggaactagttgatcttaaaggtcccttccaacccaaaccattctatgatgataatatggctttggtgtcgcagcagtcttctgagtgtagacaaaggcacagcatgagttgcaccgcctcaccgggatttgattattttaaagatctcttcttaataagcatccagccttaycatgtgaagcagttttagcttactgcagtgttgagttaaatgtatttaaagctgtttttcagcagatacatctttcttacgcaggtgtatatctgtaaatatccatcaagcccggcaatgcatcatttcaagtctggatcccaaaacagctgattggtggtggtttattatcagtctttaatttttgtcctctttgggtgccataccgtactggtagttttgaggcaaattgcagttcaagatgcaggcttcattttctttttgctggtttctcgcaagacacttttactgtcagtcttt

SEQ ID NO: 38553 - DNA, 599 bp, Chicken  19866894269796_1
  misc_feature (1)..(22): n is any nucleotide
nnnnnnnnnnnnnnnnnnnnnnatctgattcagagctccatgaaaccactgggtgtcttcgcactgagatggaaggctttagctaactgccctttgctaaactgcttcccagtcagtatggatacttctgtgcaaaagttatcccaaatggagcatggaggggaaaattctgggccctaggcaatggtgttttaagtttcaaaaggagatggaacctcaaccaaacatggtactaatagcgagtttgcatgggggtaatttggaacttggaaatgtctgagaccctttggaggatgccaytgaaagaaaaaaaaacccaaaaagcagcttgtaattgtgactgaaaagcattctgtctctagcataaggcctacaaaagccaaacaggctggtgagcttgcccatcagtcacccattgctatctgacattggtacagcccttggctaatgaaaataatttactgcaccctcgtgaaaataactcactgtccccatttcacgctgaacattcactgttgtggttcaaaactgtgattaactggttggccataaatttccttcccttcccccttcgcctcccacttctgcccgtgtaatgc

SEQ ID NO: 38554 - DNA, 600 bp, Chicken  19866894269799_1
aactctcataaaaactgaaaagaacagccaagaaatgcattaagagacttagcttattaatggccagtcacatatagactcatttttcttgccataggcttttatgatctagcaatagaaaatttttcttcatctttttcagaaataacagagaattccaagaaatggaagctgctgctagtaaaagaagaaaagctgagtatcatcagggttaataactcctacttgagatccatgaatgattacagagttacacttctatatcgaactttccagtgccattagtaatatgctgcctgwctgggacatcggtaccctcatggtgagaagactatttcttcttcacaccaaatagaagagctacaggaacaatggcttctaaggtctcatgcttgtacgttttgacagtagtttgctgggcaagygctctctggtacttaagtataactcgtcctacttcttcctacactggccacagacaggtcagtagcatatcaatagccagaaaaaatgtctcctttggcaacataagaactcgacctataaatccacattcttttgattttctcatcaacgaacctaataaatgtgagaagagtg

SEQ ID NO: 38555 - DNA, 600 bp, Chicken  19866894269799_2
ttcttcatctttttcagaaataacagagaattccaagaaatggaagctgctgctagtaaaagaagaaaagctgagtatcatcagggttaataactcctacttgagatccatgaatgattacagagttacacttctatatcgaactttccagtgccattagtaatatgctgcctgwctgggacatcggtaccctcatggtgagaagactatttcttcttcacaccaaatagaagagctacaggaacaatggcttctaaggtctcatgcttgtacgttttgacagtagtttgctgggcaagygctctctggtacttaagtataactcgtcctacttcttcctacactggccacagacaggtcagtagcatatcaatagccagaaaaaatgtctcctttggcaacataagaactcgacctataaatccacattcttttgattttctcatcaacgaacctaataaatgtgagaagagtgtccctttcttggtcattcttatcagcacaactcacaaagagtttgacgcaaggcaagcaattcgggaaacatggggagacgaaaacaattttaaaggaattaagattgccacgctatttcttctt

SEQ ID NO: 38556 - DNA, 599 bp, Chicken  19866894269802_1
  misc_feature (1)..(71): n is any nucleotide
nnnnnnnnnnnnnnnnnnnnnnnnnnnnnnnnnnnnnnnnnnnnnnnnnnnnnnnnnnnnnnnnnnnnnnnatttttttgacatctttctcttaagaatagagagaaaattacagcagagagtttgggaatatgacattcacctcagatgcagaagtacaatccaaatcccaccatcagtgcatgcactggaggctcgaagccatacctggatcccctgcctgagatggagccggccaccaagctgtcaccttcctgcaggccacccactccccttatgcattggcctccctgcttgtayagtaagagcagttgtcctcagggggaagctgctgctgaccatgtacaaggatgtgctgttatcttggaagtgactgtccattatgaggctcatttcccttgtattgtgtgttggtggagggcagccaactcaggagctgcgcactgaggtccatcctttctccctcctgctgtccatgcactgctcacagtgataacattcccatgtatttctccattagccagcctagcacgcatcctcactccagggagactgacttttgaaaagaaaagtgtgaaaattgactctacttgcccgtg

SEQ ID NO: 38557 - DNA, 600 bp, Chicken  19866894269807_1
tgctcaagaaactgaagtaaaacaaggtttttttttccaagtcatagttcaaaaagacaccaaaattgaacaaaataaatttgtagaaacatacactaagaccctattttagcgattgcagagcttttaccctgtgctaactaatagtctcacatgtaatagttcaacagtactgacaactgcaacataaaatgcaaggaggagtgcaaaactcagatagaactacacaatatgaacgaacatatgttctatagataaagaaatctcagatcattagttttaaaggcctttctttaactmctcaacagccaaaaaaatagatcattccattaaactctagtatttcattaagctcagtgaaggaaaaaatgtgcctgaacaccatgcttagtcaaagtcaagcataagtatagaattcattttcttaagcagtagtgttacaagaaaactgactgtcacagcatttctagtgcaacacgagtgagaaaaaaacaaagcatctcatcagaaaatatgaccatctttttaaagcaaacagcaattcagagatgttgcacttcaaattcccttttactagttaaattatatgcctgtttgtcc

SEQ ID NO: 38558 - DNA, 600 bp, Chicken  19866894269807_2
ccatgcttagtcaaagtcaagcataagtatagaattcattttcttaagcagtagtgttacaagaaaactgactgtcacagcatttctagtgcaacacgagtgagaaaaaaacaaagcatctcatcagaaaatatgaccatctttttaaagcaaacagcaattcagagatgttgcacttcaaattcccttttactagttaaattatatgcctgtttgtcctagtactgctttatcatactcctgtaggtatacatccaggatacaaattttcctgtgaaaaaacaggataccttgggattkttgagcaaaagacaacctcttaggaatgaacaaaagaaccaaaaagacctttatctgtaccctttaatatctaccaggtaaaaccaaaatcaattgaagctgttctaaagaccaagtaaaatacaattgatcaacaagtttaataacaagcagttgatcaatgacagcattggaggaagcacgatgtttttcatccattttaagcagtaattcactatgtaactttttttttttttttttaaacttacctggcataacaaatgggtaaaaattaaatcaaaaccatatggtagaaaataa

SEQ ID NO: 38559 - DNA, 599 bp, Chicken  19866894269811_1
  misc_feature (1)..(116): n is any nucleotide
nnnnnnnnnnnnnnnnnnnnnnnnnnnnnnnnnnnnnnnnnnnnnnnnnnnnnnnnnnnnnnnnnnnnnnnnnnnnnnnnnnnnnnnnnnnnnnnnnnnnnnnnnnnnnnnnnnnncgccccggggagcggctgcccgggccttaagcagcctgcgccgggacacacgtgtgtcgttgtggccggcggcctgagcggagcccttgagagatcgccggggtcagcgcagggagcgtgctgctgtgcgctgttagagctcctcgctaacgaggggcaggcagccggcccgcagcaggcctgstcccctccctgtcctttggcagcgtccttccctcaagctgtgcccgctgcctcagcgtctccaagccaggagcactgcagcacctcgtacttctacgctagaataggcccggggccccatccaacctggccttgcacaccaatccttgagtcgtttctttataaaggctacttactgagccctatcagatacaggttgccatcgttttctatctagttcctttaagacccgaacaacgagcacttgaagtgagccagcggcagctgacagcactgcagcagtagcatgtattccttgag

SEQ ID NO: 38560 - DNA, 599 bp, Chicken  19866894269818_1
  misc_feature (1)..(192): n is any nucleotide
nnnnnnnnnnnnnnnnnnnnnnnnnnnnnnnnnnnnnnnnnnnnnnnnnnnnnnnnnnnnnnnnnnnnnnnnnnnnnnnnnnnnnnnnnnnnnnnnnnnnnnnnnnnnnnnnnnnnnnnnnnnnnnnnnnnnnnnnnnnnnnnnnnnnnnnnnnnnnnnnnnnnnnnnnnnnnnnnnnnnnnnnnnnnnnnnaaatttcaatattgcattcacaagacatcactggtccctcttcagtgctcatttaggagtcagcggtagtgtttggcatcatagcaacattactttccaaaatgggcmtaaactcatcaaatcagctgaattgcagcagttagcatagtttggaactgaagtgtaattcatccattcggcaatgccatagacgctcacaaagggattgttaaaataggtgtgttttgctatatggcatgaaaatcaatttcaccaagagataacagtagccctcctgtgataataagagaaaatccacaaatttgggctatgtggttgaaatgtagaatagccggwcagtgcatccttagaagcatgcattagattggttcaagttaaaattaatgttagcggacatgaatgcattg

SEQ ID NO: 38561 - DNA, 600 bp, Chicken  19866894269818_2
cctcttcagtgctcatttaggagtcagcggtagtgtttggcatcatagcaacattactttccaaaatgggcmtaaactcatcaaatcagctgaattgcagcagttagcatagtttggaactgaagtgtaattcatccattcggcaatgccatagacgctcacaaagggattgttaaaataggtgtgttttgctatatggcatgaaaatcaatttcaccaagagataacagtagccctcctgtgataataagagaaaatccacaaatttgggctatgtggttgaaatgtagaatagccggwcagtgcatccttagaagcatgcattagattggttcaagttaaaattaatgttagcggacatgaatgcattgcgcagtgttcaaaattgaagactccagcagctgaatgtcaaaaagtcattcctgtaagactgatacagactttactttttttgtataagaatagacagaagaggcattgaaattccaattaataacttattatccaagagagagttttgaatcacttcccaggatgtgtcagtcacaaggggatatatatgactcaatgagcttgaaatgcaaactgtgttctttgtaa

SEQ ID NO: 38562 - DNA, 600 bp, Chicken  19866894269820_1
acagtgtgaaactctacatgctttatctctgagtattaaagcttaaaaaccctgaaattccagactgtctaagatgaatttagataaaatttggaaaatacaaagagaaaagtataaaggaaacttttggagacatctaacaaagtccgtagatgacagatcacaggctgagagagctgaggtttttcagcctggagaagagaaagtgaggaagacgtgacagtggactttcagtatctaaaggaaggctggaagaaggaaggggacaggctcttttgcaggatcagttgtgacagacawgggggaatggtttcaaactagaagaggggagattttgattggatataaagaagttttttacaataaaagtgatgaggcactggcataggttgcccacagatgtagtaaaagccccatccttggaggcattcaaggtcaggctggatggggctctgagcacatgryggagctgcaggtgtccctgctcactgcaggggagttggactagatggccttcaagggtctcttccaactcaaaagattctatgatactataatatcagcaatatctggatgatttgcagtcaaatccatcacgtg

SEQ ID NO: 38563 - DNA, 600 bp, Chicken  19866894269820_2
aggctgagagagctgaggtttttcagcctggagaagagaaagtgaggaagacgtgacagtggactttcagtatctaaaggaaggctggaagaaggaaggggacaggctcttttgcaggatcagttgtgacagacawgggggaatggtttcaaactagaagaggggagattttgattggatataaagaagttttttacaataaaagtgatgaggcactggcataggttgcccacagatgtagtaaaagccccatccttggaggcattcaaggtcaggctggatggggctctgagcacatgryggagctgcaggtgtccctgctcactgcaggggagttggactagatggccttcaagggtctcttccaactcaaaagattctatgatactataatatcagcaatatctggatgatttgcagtcaaatccatcacgtggctagtacttacatgcaacggaaatgaaaaggggatttttcacacttaagtatgttctgttatatggaaaaaatactactttttcacttcctgccttctctttgtaattgcaatgatgatccaacatgatctgctcgtgctgagaacagacttagttggtatct

SEQ ID NO: 38564 - DNA, 600 bp, Chicken  19866894269820_3
ggctgagagagctgaggtttttcagcctggagaagagaaagtgaggaagacgtgacagtggactttcagtatctaaaggaaggctggaagaaggaaggggacaggctcttttgcaggatcagttgtgacagacawgggggaatggtttcaaactagaagaggggagattttgattggatataaagaagttttttacaataaaagtgatgaggcactggcataggttgcccacagatgtagtaaaagccccatccttggaggcattcaaggtcaggctggatggggctctgagcacatgryggagctgcaggtgtccctgctcactgcaggggagttggactagatggccttcaagggtctcttccaactcaaaagattctatgatactataatatcagcaatatctggatgatttgcagtcaaatccatcacgtggctagtacttacatgcaacggaaatgaaaaggggatttttcacacttaagtatgttctgttatatggaaaaaatactactttttcacttcctgccttctctttgtaattgcaatgatgatccaacatgatctgctcgtgctgagaacagacttagttggtatctg

SEQ ID NO: 38565 - DNA, 600 bp, Chicken  19866894269821_1
ccgtttccttctctcagcttagtactttttcctaccaccgtcattcaacattttactggaagacagtttttaccagaagcaatacagaaacgcttcccagatgttacttcttcccagtaatgaggctctacacatcttttccaagaagcaacattagcttcttagcttagctttctagaaaagaattgacaggtagcatttctctgcaacatgcatgcttccctctcagaaacacataacacttcatcttaacttagaagtattacagcctttgacacaaggtatgtttcaacatctgargatttcttaaaccaaatacaacaaatgagtgaattagacctattaagagcaaatrcaactttctcctgaaacaagtattatcaaacaactagtaataatctaataacaaattaaaaagaggaaaaataaacaaaaaagcaatgtggagattcaaaatctgattctgaccaaccattgggtacttggtatgaaaaaagaatttaaagtggaatgaagaaaatgacagaatcaattaatgacagaatcacagcaatggttgaacttggcagagaccctctaagtccttctgggctaagccat

SEQ ID NO: 38566 - DNA, 565 bp, Chicken  19866894269821_2
ctggaagacagtttttaccagaagcaatacagaaacgcttcccagatgttacttcttcccagtaatgaggctctacacatcttttccaagaagcaacattagcttcttagcttagctttctagaaaagaattgacaggtagcatttctctgcaacatgcatgcttccctctcagaaacacataacacttcatcttaacttagaagtattacagcctttgacacaaggtatgtttcaacatctgargatttcttaaaccaaatacaacaaatgagtgaattagacctattaagagcaaatrcaactttctcctgaaacaagtattatcaaacaactagtaataatctaataacaaattaaaaagaggaaaaataaacaaaaaagcaatgtggagattcaaaatctgattctgaccaaccattgggtacttggtatgaaaaaagaatttaaagtggaatgaagaaaatgacagaatcaattaatgacagaatcacagcaatggttgaacttggcagagaccctctaagtccttctgggctaagccatgccccagcaagaccaccctg

SEQ ID NO: 38567 - DNA, 600 bp, Chicken  19866894269834_1
caggggtcccaaggcacagtcatgcccttcccttcagcagggagcagagggacctgcgtggagcccggccactgatgctgaggcctggagaggcacctggaggagcctctctcactgctgctgctgctatgatcttcttccttctcctgcaggtgttttcatcttcatctggctggttgtcctctactacccaagggcggaggagaccagcagctccctctcccacatcgtgaggaatgacagaaccatggctgtgtcacagggatagctgctgggccttccgtccctgcctgcctgccytgcctgccagcttccagcccaaaggacatggcttcccgtgagagcgagggctgcatggacagctgggcaccctggccgaccagcccggcccctgctctcacccatgcctcagtttacccattggagggtgtgatctgccctagctgccctttggctcctgggggccagcttggtccaaggagctccacacacctccctcccttctgcatgccctttggaagtcccattccccmgtgtctcctgctggagcccgcaggccagctgcatccagcctgcctggagacatcctcttacccccag

SEQ ID NO: 38568 - DNA, 600 bp, Chicken  19866894269834_2
ggaatgacagaaccatggctgtgtcacagggatagctgctgggccttccgtccctgcctgcctgccytgcctgccagcttccagcccaaaggacatggcttcccgtgagagcgagggctgcatggacagctgggcaccctggccgaccagcccggcccctgctctcacccatgcctcagtttacccattggagggtgtgatctgccctagctgccctttggctcctgggggccagcttggtccaaggagctccacacacctccctcccttctgcatgccctttggaagtcccattccccmgtgtctcctgctggagcccgcaggccagctgcatccagcctgcctggagacatcctcttacccccagcagtagagagggaatggggtactagatcagcccagggatgcacagccagatgcaccctgagctacaccatcccctctacactgtatgcgtatgtgtgcacatcaactcgcagcctctcacagagaactgttgtccaatccacgtctgtgttttagcattaaaactctgctagctagctaagcattatggatttcgcttttgatgtttacaagtgaacagtacttataattttc

SEQ ID NO: 38569 - DNA, 600 bp, Chicken  19866894269835_1
ttcagctgaagctctgaagtacagaagcaggcataactaccagcagctgagcactttgttaattcacagcaggatggacatcaagcccaggaactgatagctgatcctaacaagtgatctggttttgttgccttttgggatgtgttcacttcagaactgtagatttgagctttctgaatgaaaaaacactgcaaattgtgagtgatcccagtgagcactgctggatggtgctggggtccaaggagaggactgaaccaccacaaggagctgagcgctgcaggcactgtacctgtgtttccytgtgtgtttctaccacttgaactgaaagggaattaatatctcaaactgtgtattttccctcacatttaacatctttttttccctcatctgaaccggattgtttttcattttcttggttaacaaagatactgcaggactggcggaccctgcggccctcgctatacgaaaacgcacacagcgaycccagtgcccacaactgacagctgtttgtatttaatattattacgacgcgggaactccgagagccatatccaattcggggatggcgtatttaatctaggaagtattctatgatgtgtc

SEQ ID NO: 38570 - DNA, 600 bp, Chicken  19866894269835_2
aaaacactgcaaattgtgagtgatcccagtgagcactgctggatggtgctggggtccaaggagaggactgaaccaccacaaggagctgagcgctgcaggcactgtacctgtgtttccytgtgtgtttctaccacttgaactgaaagggaattaatatctcaaactgtgtattttccctcacatttaacatctttttttccctcatctgaaccggattgtttttcattttcttggttaacaaagatactgcaggactggcggaccctgcggccctcgctatacgaaaacgcacacagcgaycccagtgcccacaactgacagctgtttgtatttaatattattacgacgcgggaactccgagagccatatccaattcggggatggcgtatttaatctaggaagtattctatgatgtgtcagaaatgctgtgtaaataaataaagtttatttatgggccggaattcatctgtgcgcgccgcgcagcacagccaggccgcgcctctgaagtaccgtagccttcccgccctactgcgcactgcccactaaagcggcggcgggcacgtgaccaggccacgtgacgcacggccgccccctcccctg

SEQ ID NO: 38571 - DNA, 600 bp, Chicken  19866894269837_1
ttgcccagtttgtcttttttatccattttgttggcctagatgtagttggttgcctcttggtcacggaccctgtatggccctggagcttgtgaatgccagagatagtaggtcagggcactgccacctttctgctaccacttcagagggtatggggcagagtcatatgatgagtctgttgtggctgccctggggagatgtgacaacccaaacagcacagcatttctgtttctggacaactgcaaggcctgtgctggccaggttgcaggactggcatagcgaagggcctgcgtttctgctccwaggtgggcttgctgctgtgatagcaggctgatatccagctggttgtgctgctcagccttgctctgtgtcttctratgcagcctgacacagtcacaccaggaccttaggcttgctgggtctgtgatactgttggagggactaggtagtagcttctagagtgaagtgtcaccttcagtaagtactggataaccttgcaggtctgtgagttcttaaaactgcaggcctccagagaggccagagagcgtttctgaggtgyacctcytgcagaagaggaagagggagcccattgtagtgacactt

SEQ ID NO: 38572 - DNA, 600 bp, Chicken  19866894269837_2
tggccctggagcttgtgaatgccagagatagtaggtcagggcactgccacctttctgctaccacttcagagggtatggggcagagtcatatgatgagtctgttgtggctgccctggggagatgtgacaacccaaacagcacagcatttctgtttctggacaactgcaaggcctgtgctggccaggttgcaggactggcatagcgaagggcctgcgtttctgctccwaggtgggcttgctgctgtgatagcaggctgatatccagctggttgtgctgctcagccttgctctgtgtcttctratgcagcctgacacagtcacaccaggaccttaggcttgctgggtctgtgatactgttggagggactaggtagtagcttctagagtgaagtgtcaccttcagtaagtactggataaccttgcaggtctgtgagttcttaaaactgcaggcctccagagaggccagagagcgtttctgaggtgyacctcytgcagaagaggaagagggagcccattgtagtgacacttccaagccagctcttgagctgctcctgggcctggtcacgtraactaatggatccttgttaacttttgagactgtg

SEQ ID NO: 38573 - DNA, 600 bp, Chicken  19866894269837_3
aggttgcaggactggcatagcgaagggcctgcgtttctgctccwaggtgggcttgctgctgtgatagcaggctgatatccagctggttgtgctgctcagccttgctctgtgtcttctratgcagcctgacacagtcacaccaggaccttaggcttgctgggtctgtgatactgttggagggactaggtagtagcttctagagtgaagtgtcaccttcagtaagtactggataaccttgcaggtctgtgagttcttaaaactgcaggcctccagagaggccagagagcgtttctgaggtgyacctcytgcagaagaggaagagggagcccattgtagtgacacttccaagccagctcttgagctgctcctgggcctggtcacgtraactaatggatccttgttaacttttgagactgtgactggcacagcaaaggctctgcactgagtttaacagcggtctttcgtttgttgcagttttatgaggaaagctgcctaggagttacaagtctcccaaggaatccagctgtgatttatgaattggccatcaacagttattatgccagccactgcatgcatccattctaataaatttcctgcatc

SEQ ID NO: 38574 - DNA, 600 bp, Chicken  19866894269837_4
caggactggcatagcgaagggcctgcgtttctgctccwaggtgggcttgctgctgtgatagcaggctgatatccagctggttgtgctgctcagccttgctctgtgtcttctratgcagcctgacacagtcacaccaggaccttaggcttgctgggtctgtgatactgttggagggactaggtagtagcttctagagtgaagtgtcaccttcagtaagtactggataaccttgcaggtctgtgagttcttaaaactgcaggcctccagagaggccagagagcgtttctgaggtgyacctcytgcagaagaggaagagggagcccattgtagtgacacttccaagccagctcttgagctgctcctgggcctggtcacgtraactaatggatccttgttaacttttgagactgtgactggcacagcaaaggctctgcactgagtttaacagcggtctttcgtttgttgcagttttatgaggaaagctgcctaggagttacaagtctcccaaggaatccagctgtgatttatgaattggccatcaacagttattatgccagccactgcatgcatccattctaataaatttcctgcatcttcctt

SEQ ID NO: 38575 - DNA, 600 bp, Chicken  19866894269837_5
ggttgtgctgctcagccttgctctgtgtcttctratgcagcctgacacagtcacaccaggaccttaggcttgctgggtctgtgatactgttggagggactaggtagtagcttctagagtgaagtgtcaccttcagtaagtactggataaccttgcaggtctgtgagttcttaaaactgcaggcctccagagaggccagagagcgtttctgaggtgyacctcytgcagaagaggaagagggagcccattgtagtgacacttccaagccagctcttgagctgctcctgggcctggtcacgtraactaatggatccttgttaacttttgagactgtgactggcacagcaaaggctctgcactgagtttaacagcggtctttcgtttgttgcagttttatgaggaaagctgcctaggagttacaagtctcccaaggaatccagctgtgatttatgaattggccatcaacagttattatgccagccactgcatgcatccattctaataaatttcctgcatcttccttagcagcttgttttactcccatttattgataccatagtcttaacaaaagcagcacatcaattacagtaattgcattcgg

SEQ ID NO: 38576 - DNA, 577 bp, Chicken  19866894269840_1
aatttctgaagattgttcagtgcagaaatgttcattaatgctcagccactagtgatctcttttcacagtaccagaaaattttggctttttttgtccaaggtgagaatgttcataaaatgcctaagattttagttaggagatttaaaagtggaagaaatttgcttcatgaggcatgctcaggaaagaaaacagaataagaaattaatatttcatttttttccggagcaggtaatgagatattaaaggtatccatgtaaaaacaagcaattccttattgctatttcatgtcagtttaaaaayaaaaattgcaaatttctgtactcaaagtgaaataactccatgcattggaacaaaccagctgagttagccctgatgaatatgactggagggaaactgagctctgtataagccaacaatatatcctcactgcaaataaattcaactgcccaaaccgaccccagattgactgtctagaggggggaggtaaacaacacttgaggaaagtgatcattcccctctgctgaataggtgaagccatactggaaagttttaaaatcatacaataagtggaatttca

SEQ ID NO: 38577 - DNA, 600 bp, Chicken  19866894269844_1
tttacactgtaagtcaaacagcttgatcacttcctcaatctttggttcattttgtcagggcaaaaaggaggccgatgaacttcacggtttcacacttgtgaaagtattgaggcttaactccagtctcagtgttttccaactgtgccctttctttgagctgacctccacattttggctgttgtcagtttccagggaagcagatacacttatgactttgttcacctccacaggtactgtggttgggccccgcctttctgtgtgcaaattctgcagctagtctgctcactcaatagctctttstcttccaatagctagcatatgccttgctgtaaaatttacaagcttggctatcatggccactgctttatacaatgtttgtcatgtgcctcagcgtgttacaagtgtccattatggtattcagcacacagaaaaatctcaaaaatagtgtatctgatcatttattctggagagtaatttctagtgaatgagagaagagcaacaattaacatatcctgccagtgcttggcaagcagacaagtcagcaaactggcccacctgccaaatctygtttttcaccatctactgagcagaaatgycttt

SEQ ID NO: 38578 - DNA, 600 bp, Chicken  19866894269844_2
ctgcagctagtctgctcactcaatagctctttstcttccaatagctagcatatgccttgctgtaaaatttacaagcttggctatcatggccactgctttatacaatgtttgtcatgtgcctcagcgtgttacaagtgtccattatggtattcagcacacagaaaaatctcaaaaatagtgtatctgatcatttattctggagagtaatttctagtgaatgagagaagagcaacaattaacatatcctgccagtgcttggcaagcagacaagtcagcaaactggcccacctgccaaatctygtttttcaccatctactgagcagaaatgyctttcaaaacctctttctgagccctatataagtctatatgttttcatttttatttaatttttttcccttaacatctttccttatttgccaagaaaaagaagattcccagctatgcttctggtaaaatggaaatgcatttctaagggcctggggcactgacattaaagaatggaagccttttctccactgaatcttcaaatttatttatttacttaccagtttcagagttctgataacattgcattctaacataaaaggacttaactgtgtg

SEQ ID NO: 38579 - DNA, 600 bp, Chicken  19866894269844_3
tttstcttccaatagctagcatatgccttgctgtaaaatttacaagcttggctatcatggccactgctttatacaatgtttgtcatgtgcctcagcgtgttacaagtgtccattatggtattcagcacacagaaaaatctcaaaaatagtgtatctgatcatttattctggagagtaatttctagtgaatgagagaagagcaacaattaacatatcctgccagtgcttggcaagcagacaagtcagcaaactggcccacctgccaaatctygtttttcaccatctactgagcagaaatgyctttcaaaacctctttctgagccctatataagtctatatgttttcatttttatttaatttttttcccttaacatctttccttatttgccaagaaaaagaagattcccagctatgcttctggtaaaatggaaatgcatttctaagggcctggggcactgacattaaagaatggaagccttttctccactgaatcttcaaatttatttatttacttaccagtttcagagttctgataacattgcattctaacataaaaggacttaactgtgtgctttatatcacttttcacttgcaactcag

SEQ ID NO: 38580 - DNA, 600 bp, Chicken  19866894269844_4
ggccactgctttatacaatgtttgtcatgtgcctcagcgtgttacaagtgtccattatggtattcagcacacagaaaaatctcaaaaatagtgtatctgatcatttattctggagagtaatttctagtgaatgagagaagagcaacaattaacatatcctgccagtgcttggcaagcagacaagtcagcaaactggcccacctgccaaatctygtttttcaccatctactgagcagaaatgyctttcaaaacctctttctgagccctatataagtctatatgttttcatttttatttaayttttttcccttaacatctttccttatttgccaagaaaaagaagattcccagctatgcttctggtaaaatggaaatgcatttctaagggcctggggcactgacattaaagaatggaagccttttctccactgaatcttcaaatttatttatttacttaccagtttcagagttctgataacattgcattctaacataaaaggacttaactgtgtgctttatatcacttttcacttgcaactcagcttgaatattgggaaaaaattctcagaggctgttcaagagccatgtggatgtggcact

SEQ ID NO: 38581 - DNA, 599 bp, Chicken  19866894269847_1
  misc_feature (1)..(46): n is any nucleotide
nnnnnnnnnnnnnnnnnnnnnnnnnnnnnnnnnnnnnnnnnnnnnnaccctgtaacctttaaaacaaaagcaagttatgtcgcactggccacattgcaagcatatacatctatgcacctttttttccagttcaaaaacccaccctccctggatggattgatactttataacagtggcgatggaaatgatttcattgtggttgaattagtaaaagggtacgtatggattgacgtattgacaaaaacaggctattccaaatatacagacaggagaaaaacaaaggaaagttctggatacaastctttgtctgactgagtaattctgactgatgaatgtttcctcgtgttacctttcatgtgcyttattgtgactttttctttcagatgaagctagatgcctggaaaatatgaaaatatgtartaggtgtaataatagcatttacaccaaagctgatagccttctcgtgttctctctctctatgtatgtatttgttgacacaaggagtgctcattattttccagaaactgggtcttcatctcagcacctctaaatttctctgaaattctctgacttaaggctgcttcctcatttggggaagt

SEQ ID NO: 38582 - DNA, 600 bp, Chicken  19866894269847_2
aaacaaaagcaagttatgtcgcactggccacattgcaagcatatacatctatgcacctttttttccagttcaaaaacccaccctccctggatggattgatactttataacagtggcgatggaaatgatttcattgtggttgaattagtaaaagggtacgtatggattgacgtattgacaaaaacaggctattccaaatatacagacaggagaaaaacaaaggaaagttctggatacaastctttgtctgactgagtaattctgactgatgaatgtttcctcgtgttacctttcatgtgcyttattgtgactttttctttcagatgaagctagatgcctggaaaatatgaaaatatgtartaggtgtaataatagcatttacaccaaagctgatagccttctcgtgttctctctctctatgtatgtatttgttgacacaaggagtgctcattattttccagaaactgggtcttcatctcagcacctctaaatttctctgaaattctctgacttaaggctgcttcctcatttggggaagtgttatcatcctgttttaccaccactgctgagaagaacaaggaagtagaaaatattaggctaa

SEQ ID NO: 38583 - DNA, 600 bp, Chicken  19866894269847_3
tttttccagttcaaaaacccaccctccctggatggattgatactttataacagtggcgatggaaatgatttcattgtggttgaattagtaaaagggtacgtatggattgacgtattgacaaaaacaggctattccaaatatacagacaggagaaaaacaaaggaaagttctggatacaastctttgtctgactgagtaattctgactgatgaatgtttcctcgtgttacctttcatgtgcyttattgtgactttttctttcagatgaagctagatgcctggaaaatatgaaaatatgtartaggtgtaataatagcatttacaccaaagctgatagccttctcgtgttctctctctctatgtatgtatttgttgacacaaggagtgctcattattttccagaaactgggtcttcatctcagcacctctaaatttctctgaaattctctgacttaaggctgcttcctcatttggggaagtgttatcatcctgttttaccaccactgctgagaagaacaaggaagtagaaaatattaggctaattaattaattagttcccccttggtatgtaaagaaaaggaaacttccaattttttctctt

SEQ ID NO: 38584 - DNA, 600 bp, Chicken  19866894269851_1
actcttgggcattcaagttttatcctcatttaccacaaactgccatatttctaacagttcctgcatagcacttaaaattcacattacccaaggaataattctagacagacatttgatgttacaaactcttctgtttggtgctcaaccacactccatagcacacaaagagacagcctaccaggaccgagagactgtgtttattcacagctattgaatcacgcccttggcttacaggaattctgcttctattatcatgcattcctgtgatagataaacaaatgatactaatatcttaaaagrtcattttgtctcccaccatgwcttcaacaagagttatgttacaaaagtgtgttaaatacaaaactcagccttggaacactgaggagttggaacaatttttttcttccatgtcccaaatctgccagcagcaatgcacagtttgaaacaagactaagagcagcagaattatactgcactaaaaattatcagcgtctcagtgctcatacattccttagctccccacagttattgggggtgcgttccagtgagagttctaaaaacaaagaattcaacagaaaaggaatttcaagtacaagatat

SEQ ID NO: 38585 - DNA, 600 bp, Chicken  19866894269851_2
atcctcatttaccacaaactgccatatttctaacagttcctgcatagcacttaaaattcacattacccaaggaataattctagacagacatttgatgttacaaactcttctgtttggtgctcaaccacactccatagcacacaaagagacagcctaccaggaccgagagactgtgtttattcacagctattgaatcacgcccttggcttacaggaattctgcttctattatcatgcattcctgtgatagataaacaaatgatactaatatcttaaaagrtcattttgtctcccaccatgwcttcaacaagagttatgttacaaaagtgtgttaaatacaaaactcagccttggaacactgaggagttggaacaatttttttcttccatgtcccaaatctgccagcagcaatgcacagtttgaaacaagactaagagcagcagaattatactgcactaaaaattatcagcgtctcagtgctcatacattccttagctccccacagttattgggggtgcgttccagtgagagttctaaaaacaaagaattcaacagaaaaggaatttcaagtacaagatattgactatacctgatgcttcag

SEQ ID NO: 38586 - DNA, 600 bp, Chicken  19866894269852_1
caggaaagcccaacaagccttagcacaaatcaggcagcgcatcctgccagggcacaaagtccaggagctcagggcagagctgacccaagccctgcagcctcagctgccagcacgcatactggaacccttccacgtgtacaaagggactggcgtgcaaacaacggcagggaaacgccgttctgtgtccacacaggactacttcctgctccccagctctgcacaagagctgaggatagccctggaatccccttctccccgagatgccaagcctggatttgcaatgacgcagcgagctgctcktctgctgccagcttgtggtgctcacagacggctgcggcatggggagccccggcaccatgcaacagggctgccagcacccaccgagtgggaaggcagacccaaaagaggaaggctcacctatgagcaccaaagccaaagccactgagccgcccccaaacacagcgcccttccaccamaagagtttctcagcccaggttcctacgaacygcgttgcttcgcttttcctcccttcccgtgggctgcggtaagacgtgagggggtggctgacgggccaagccaacgcccctcataaatgtggtg

SEQ ID NO: 38587 - DNA, 600 bp, Chicken  19866894269852_2
gttctgtgtccacacaggactacttcctgctccccagctctgcacaagagctgaggatagccctggaatccccttctccccgagatgccaagcctggatttgcaatgacgcagcgagctgctcktctgctgccagcttgtggtgctcacagacggctgcggcatggggagccccggcaccatgcaacagggctgccagcacccaccgagtgggaaggcagacccaaaagaggaaggctcacctatgagcaccaaagccaaagccactgagccgcccccaaacacagcgcccttccaccamaagagtttctcagcccaggttcctacgaacygcgttgcttcgcttttcctcccttcccgtgggctgcggtaagacgtgagggggtggctgacgggccaagccaacgcccctcataaatgtggtgtttttccatttaccatctggaagaggcaaagtccgcctccccayagcccrggctgcaatgcayggcgctgccggtgaaggcagattagtggggctgatcccctccccccgggcagctgagccagcagccagctctgagcagattaaggttatcagacacttgtggcctgggaacag

SEQ ID NO: 38588 - DNA, 600 bp, Chicken  19866894269852_3
ccccagctctgcacaagagctgaggatagccctggaatccccttctccccgagatgccaagcctggatttgcaatgacgcagcgagctgctcktctgctgccagcttgtggtgctcacagacggctgcggcatggggagccccggcaccatgcaacagggctgccagcacccaccgagtgggaaggcagacccaaaagaggaaggctcacctatgagcaccaaagccaaagccactgagccgcccccaaacacagcgcccttccaccamaagagtttctcagcccaggttcctacgaacygcgttgcttcgcttttcctcccttcccgtgggctgcggtaagacgtgagggggtggctgacgggccaagccaacgcccctcataaatgtggtgtttttccatttaccatctggaagaggcaaagtccgcctccccayagcccrggctgcaatgcayggcgctgccggtgaaggcagattagtggggctgatcccctccccccgggcagctgagccagcagccagctctgagcagattaaggttatcagacacttgtggcctgggaacaggagtgcaaaacaacagcatgtcgcaggtccc

SEQ ID NO: 38589 - DNA, 600 bp, Chicken  19866894269852_4
agccccggcaccatgcaacagggctgccagcacccaccgagtgggaaggcagacccaaaagaggaaggctcacctatgagcaccaaagccaaagccactgagccgcccccaaacacagcgcccttccaccamaagagtttctcagcccaggttcctacgaacygcgttgcttcgcttttcctcccttcccgtgggctgcggtaagacgtgagggggtggctgacgggccaagccaacgcccctcataaatgtggtgtttttccatttaccatctggaagaggcaaagtccgcctccccayagcccrggctgcaatgcayggcgctgccggtgaaggcagattagtggggctgatcccctccccccgggcagctgagccagcagccagctctgagcagattaaggttatcagacacttgtggcctgggaacaggagtgcaaaacaacagcatgtcgcaggtcccacaggattaggtctgaaccttacgagcgtgctattgccacctagagaaagtagagcgtcggtggggaacgaaaaccagagcgagggcaaagccacggggcagcagctgggtcctgctggaagcactaaggggtggga

SEQ ID NO: 38590 - DNA, 600 bp, Chicken  19866894269852_5
ggcaccatgcaacagggctgccagcacccaccgagtgggaaggcagacccaaaagaggaaggctcacctatgagcaccaaagccaaagccactgagccgcccccaaacacagcgcccttccaccamaagagtttctcagcccaggttcctacgaacygcgttgcttcgcttttcctcccttcccgtgggctgcggtaagacgtgagggggtggctgacgggccaagccaacgcccctcataaatgtggtgtttttccatttaccatctggaagaggcaaagtccgcctccccayagcccrggctgcaatgcayggcgctgccggtgaaggcagattagtggggctgatcccctccccccgggcagctgagccagcagccagctctgagcagattaaggttatcagacacttgtggcctgggaacaggagtgcaaaacaacagcatgtcgcaggtcccacaggattaggtctgaaccttacgagcgtgctattgccacctagagaaagtagagcgtcggtggggaacgaaaaccagagcgagggcaaagccacggggcagcagctgggtcctgctggaagcactaaggggtgggatgggca

SEQ ID NO: 38591 - DNA, 600 bp, Chicken  19866894269852_6
agggctgccagcacccaccgagtgggaaggcagacccaaaagaggaaggctcacctatgagcaccaaagccaaagccactgagccgcccccaaacacagcgcccttccaccamaagagtttctcagcccaggttcctacgaacygcgttgcttcgcttttcctcccttcccgtgggctgcggtaagacgtgagggggtggctgacgggccaagccaacgcccctcataaatgtggtgtttttccatttaccatctggaagaggcaaagtccgcctccccayagcccrggctgcaatgcayggcgctgccggtgaaggcagattagtggggctgatcccctccccccgggcagctgagccagcagccagctctgagcagattaaggttatcagacacttgtggcctgggaacaggagtgcaaaacaacagcatgtcgcaggtcccacaggattaggtctgaaccttacgagcgtgctattgccacctagagaaagtagagcgtcggtggggaacgaaaaccagagcgagggcaaagccacggggcagcagctgggtcctgctggaagcactaaggggtgggatgggcaaagcgacaccagc

SEQ ID NO: 38592 - DNA, 600 bp, Chicken  19866894269858_1
atgctccttcaggaaacatctgtgtcgatacacctcagtgaggatgctctctgagaaagaaatctgtcaccacgctcttgatttattattatttaatgttgcgctgtccaaataacccaacaagtttgtgctcatctctgaagatgtgtacaggttttgtttgcttgcttggatttacgctgattaaagcagcatttccaaaacactccagtgagtacttctgtagctaatgtaaaaaacattggactttgatctgtggtgtttataaaaggtagtttataatcaggatgtcctatctayttttataaggcaaaatagtacatttaagaaatcagaacttgtaaggaaataaatcttgaatcttaatttaaaatggaaaggcataaaatcattttgttctgtgtaatgtgaagaaagcttgtttccaattctccaaatattttaacaagcaatattctgtatatacaagcttttcaatatcagtggactagttattaaacatgtttgagctcttcccctgctcccagcacactcacacacacacacacatatgtgatattcatgttagcaataaatacattttactgaagggaagaaacc

SEQ ID NO: 38593 - DNA, 549 bp, Chicken  19866894269859_1
tttcaattggataaactgtaggtaagcctctagattacttctttatctttctgtctcacagtaaaaattgcaagtgctttgaaaatttacattggaaaagactgtatgtacatgttctcatcttaaaaaataactactttttggtggcaaggacagatatttacagccaacttgtctcacatcactgtgcattattccagaggtctcctgagtattttaggagtgactcagcagaaactccaaagcatttctcagaaattctttaccatgtatgaacattgaaacttttcctcttttttyctgggagtacaccctgcaacttaacaaatgactgtagcaaaaaaggtttccaatgccgcttgaaagcagacggcgttctaggtttgccatgatcaactgcttcagagttgaggtcagcagtcccccccactcaagacagaatattaccactggttaaagagaggactgtgaggttccaagctccattcccagcagtgttcatgacctaggaattcaaaccatcacccacactttacgcacttcgtttcc

SEQ ID NO: 38594 - DNA, 524 bp, Chicken  19866894269874_1
gcccagtggaaaaaaaaataaagctttaactagcatgaaccctacaaagttcagagaattttgcctggactgatgcttttgctgcaaagtgcaactacatggcacctccctgctgcccacatgcagcccaaacacagagtgaagtgctgtccctgcagagcaggctgctgctcctggctgtgggcttccttctgtgtcacggagggttgctgttggggtttggttttcccccttgagttaacagaatcacactgaacttcggaaggtacctgcctacccagtgacaaatgtcatgtacaragtacagcagtgtctttgtatttattgtctagactgatgggcttattaaaaaaaaaaggctggttttttaaaggcatagaatcttggtgtttttctaatggctttaattgttattttgattttttttttcttgttttcttgtggtaagcaggcaatctgtgtagagcagatcctgaccctctgctgtctgagctctgtgtgctgccctgcagtgtcccagcatt

SEQ ID NO: 38595 - DNA, 599 bp, Chicken  19866894269876_1
  misc_feature (1)..(143): n is any nucleotide
nnnnnnnnnnnnnnnnnnnnnnnnnnnnnnnnnnnnnnnnnnnnnnnnnnnnnnnnnnnnnnnnnnnnnnnnnnnnnnnnnnnnnnnnnnnnnnnnnnnnnnnnnnnnnnnnnnnnnnnnnnnnnnnnnnnnnnnnnnnnnnntccctcctgccttgcctccttgcttcccgagtttgcaacgcttgcaatgtattcatgagattgtcaatgatgttctgtgtggttgttttactgctgtcctatcctggcacaagaggtgagctgagctggtttaagggaggagtggcagcttttatgragttccttttaacttacaggaaaatgagtttaaatggatcaatttcttattactcagtgcagttaaaaagaacattagagaaatttcatcagcattagtttactacattattaataaagttatcattaaaatctcaacagttgctctgcaaagctatttgaactatcacagttatcttttatacttagcatgggaatagctgcagcatctcgaaccgcgctgtggttcccacgtgtttgaaagctggtgtaaatctgccttgtccttctctggtctgtaacatcctgagtgtttaacag

SEQ ID NO: 38596 - DNA, 600 bp, Chicken  19866894269877_1
gtccttaggtttcaagaggaaataattaaggtattgctgtctttgcataaagataacaaggtagtgtaaagcagcaggcttcttgaatgtaatcctgagagaggattacattcagaaggactttccccccatcagccttttgctgcttcaggatcatacagctggctgaagtggcagcaaaagattatgggttaaaaagtgagggaggggggagaaacattcctcctacagcttacaggcagcattgcatcaatccaatgcatataccttggtgtgggtatctttgaagaatggtgatayaatactgctgcaagaaagcttggcagctyatgtgcttctgtctgcagctctgttgctgtcttgctcattggcttgtgcagcacaaagaacaggaaaaagggtggaaaattgtccttgctggtcattagaggctgttttgatgacgaaaaagctctttgggattagtccacagttcctttgaactgtgaaatrctgcctgtgcttgtatctcagacctttcctgctgtctaatgttacagtcagatgtcaatcaaaatcaataaacgaggattagttgtttgtgccttcagattctcatgg

SEQ ID NO: 38597 - DNA, 600 bp, Chicken  19866894269877_2
ggtattgctgtctttgcataaagataacaaggtagtgtaaagcagcaggcttcttgaatgtaatcctgagagaggattacattcagaaggactttccccccatcagccttttgctgcttcaggatcatacagctggctgaagtggcagcaaaagattatgggttaaaaagtgagggaggggggagaaacattcctcctacagcttacaggcagcattgcatcaatccaatgcatataccttggtgtgggtatctttgaagaatggtgatayaatactgctgcaagaaagcttggcagctyatgtgcttctgtctgcagctctgttgctgtcttgctcattggcttgtgcagcacaaagaacaggaaaaagggtggaaaattgtccttgctggtcattagaggctgttttgatgacgaaaaagctctttgggattagtccacagttcctttgaactgtgaaatrctgcctgtgcttgtatctcagacctttcctgctgtctaatgttacagtcagatgtcaatcaaaatcaataaacgaggattagttgtttgtgccttcagattctcatgggtgtcagtcatcacagaaataagctgctg

SEQ ID NO: 38598 - DNA, 600 bp, Chicken  19866894269877_3
taaaaagtgagggaggggggagaaacattcctcctacagcttacaggcagcattgcatcaatccaatgcatataccttggtgtgggtatctttgaagaatggtgatayaatactgctgcaagaaagcttggcagctyatgtgcttctgtctgcagctctgttgctgtcttgctcattggcttgtgcagcacaaagaacaggaaaaagggtggaaaattgtccttgctggtcattagaggctgttttgatgacgaaaaagctctttgggattagtccacagttcctttgaactgtgaaatrctgcctgtgcttgtatctcagacctttcctgctgtctaatgttacagtcagatgtcaatcaaaatcaataaacgaggattagttgtttgtgccttcagattctcatgggtgtcagtcatcacagaaataagctgctgctaaargataatgtgcctttatgaaaatttcaaaagggaattaaatcaacacttgtacatttgcatttgttttctctgataggattcttgatgacatagaagtctatgaagagcagatttcattcaaactggaagagcttgttaccatctcatcttttctgaa

SEQ ID NO: 38599 - DNA, 600 bp, Chicken  19866894269877_4
ttctgtctgcagctctgttgctgtcttgctcattggcttgtgcagcacaaagaacaggaaaaagggtggaaaattgtccttgctggtcattagaggctgttttgatgacgaaaaagctctttgggattagtccacagttcctttgaactgtgaaatrctgcctgtgcttgtatctcagacctttcctgctgtctaatgttacagtcagatgtcaatcaaaatcaataaacgaggattagttgtttgtgccttcagattctcatgggtgtcagtcatcacagaaataagctgctgctaaargataatgtgcctttatgaaaatttcaaaagggaattaaatcaacacttgtacatttgcatttgttttctctgataggattcttgatgacatagaagtctatgaagagcagatttcattcaaactggaagagcttgttaccatctcatcttttctgaattcctttgtgtttaagatgatctgggatggaattgtgggtaagtgctttcagtagcttaagttgaggatgctcgtagaacaatacgcagcattaattttggaatttgaagcttctgctaattattactttgcacagaaacatt

SEQ ID NO: 38600 - DNA, 503 bp, Chicken  19866894269877_5
agagcttgttaccatctcatcttttctgaattcctttgtgtttaagatgatctgggatggaattgtgggtaagtgctttcagtagcttaagttgaggatgctcgtagaacaatacgcagcattaattttggaatttgaagcttctgctaattattactttgcacagaaacattacgttatatggctcgagaacatgtcccagtgttttggtgtccagatgctactgtcatgcttggcaccaaatacaatgcactcatctagtacaaaagagagcttgtttaccaggcacgatgggtataytggcttttgtcatcttgctagagtttctgcaaatatgtagtgtcagtccttatgtggatataatttgagtgcagtttagttctgacactcagacgaggtggtctgtttctgttctgatagccttgatgtggccaagagttcttcactttgatcaaagaagtcttctgagaggcacaaaaatcttacttgcctctgaaggcagt

SEQ ID NO: 38601 - DNA, 600 bp, Chicken  19866894269878_1
ataatttcctcaggagtaataccctgtaagacagcaccaattaaatatattgttatcagtgcttggatacggcatgtcaacagagaaacagagctacagcacaaattcttgagtttcaaaactccccacactctaacgtgatttcttacattcattcctctgtgataaaaactagttcatttatcatctcatggcaagaaaaatcaagcagctcattatggtcccaaagcagtttgggaggcaaggggttcctgcactttgattatcagggggttctcacagagttgcaacaagctaaayggtggcaagccaagacagtgcagccacactcaccctgaaaagcagcatggggataagtgacaccaaacaactagggattcataatgctgtgtgctagggccttgaagtgcaaagcctacaaagtgagacttgggacagtttattttcctgctcccaggatacaaagtgctccaagatctccagagactccagcatttctgttcagtttcatcagcatgaaaataatctgatcagtaaatacactgtccgctgtttaaaagtcacctttggagttgatttcttagtccagtgagtttttat

SEQ ID NO: 38602 - DNA, 558 bp, Chicken  19866894269880_1
tctcttgtctctgtggataaaatgaaaggcataacaccatgccaatgcacatttatatctctgctaacttaagactccatcaaactgaactaaactgacacttctgcctgtcactgaaaataacaaacatactcattcattttgaggagcagaactgaggtggcttcagaaaccctgggtaaggcacaaagcaaggagggattccctgagcgcacctcagtgctgagctggtgcctgcaaaccaaacttccatcaagttcacgttcccatggtctcactttgcttgaacactctaccccytcatacacacattattaatgaattaacagtcatgaaacagcttatctatgcgcttccaytgaatagatttggatataatgagtgccattggaagttcattcccacactgtatataatgatgggagttattaaacatgctaatgttggagcataagcataattgcttataactaagcatcatttcttgtaaagatacagcatttcttttttttttttctttttttctttttttttcaccatttagtactacatatacgt

SEQ ID NO: 38603 - DNA, 499 bp, Chicken  19866894269880_2
tctgctaacttaagactccatcaaactgaactaaactgacacttctgcctgtcactgaaaataacaaacatactcattcattttgaggagcagaactgaggtggcttcagaaaccctgggtaaggcacaaagcaaggagggattccctgagcgcacctcagtgctgagctggtgcctgcaaaccaaacttccatcaagttcacgttcccatggtctcactttgcttgaacactctaccccytcatacacacattattaatgaattaacagtcatgaaacagcttatctatgcgcttccaytgaatagatttggatataatgagtgccattggaagttcattcccacactgtatataatgatgggagttattaaacatgctaatgttggagcataagcataattgcttataactaagcatcatttcttgtaaagatacagcatttcttttttttttttctttttttctttttttttcaccatttagtactacatatacgt

SEQ ID NO: 38604 - DNA, 600 bp, Chicken  19866894269881_1
gctcttttatatatcgacatgaatgcaaaagttgttgccaacagctgtcttaggttctgggcacctgctgcctctcatttcttacatatcccactctatcttcgactcctaaagttggcattgcccgtaaaaatattctgtgctcagttcttaaacagaagatctctaccaatctggcagtctggattcctgagtcattggtcatgctgtagtcagattaattatagagcagcatcactgtctacggcaaggtgatggacatgcaggttcagactgatttcactcaggttctgaaggtgytgccggccctcaggccacttcttgtgtacatccctctgtccaccattaccccctgcrgaaccatattttgattgctaaccactgttttcatattccttcagacgaccatgatggacaagtgaagcgtaggtggtgctgtgaatgagttgggtaaaagaaaatgctgagcattgtccataagtatgaaattctattttgtcacagtattcatgacttcattgatgtgtggggaaaatatcccctgcttgcagaatcagtgttcaaatgtgcagttttcagaagcacaggtgcattgctgat

SEQ ID NO: 38605 - DNA, 600 bp, Chicken  19866894269881_2
tgggcacctgctgcctctcatttcttacatatcccactctatcttcgactcctaaagttggcattgcccgtaaaaatattctgtgctcagttcttaaacagaagatctctaccaatctggcagtctggattcctgagtcattggtcatgctgtagtcagattaattatagagcagcatcactgtctacggcaaggtgatggacatgcaggttcagactgatttcactcaggttctgaaggtgytgccggccctcaggccacttcttgtgtacatccctctgtccaccattaccccctgcrgaaccatattttgattgctaaccactgttttcatattccttcagacgaccatgatggacaagtgaagcgtaggtggtgctgtgaatgagttgggtaaaagaaaatgctgagcattgtccataagtatgaaattctattttgtcacagtattcatgacttcattgatgtgtggggaaaatatcccctgcttgcagaatcagtgttcaaatgtgcagttttcagaagcacaggtgcattgctgatgttgttcccatatccaaccagagcctgcttcaacgcagactgtgtcacttttttttc

SEQ ID NO: 38606 - DNA, 599 bp, Chicken  19866894269889_1
  misc_feature (1)..(2): n is any nucleotide
nntttatgtacagtatggagacatactgtatctaaattttgctattagttgcaaatttctacctaatttcacacagaacatcatccaactcttagctgatattttgtagttgtgtcaaagtggttgacttttgtgcagtaaagctaaaagtgaaatgtaaaagaatgttgttacatttgaggataatggcacattaaccttcttgttaacccagacattactggatttgaaaaagttgaggagataatgaattttcagatattccttatttttcaaaggcactaatattatgtcaaagaraaaaaaaaaaaaaaaaactacttttagtcactttgggaaaaacctacagtgaaccaagtagttgagggcagaggcataatgctgatgtggctagatgagaagccaagttcccacaaaagcagaaccaaaatgaaaagtatgggtaagagcaatgacggacgaaagtcatgaaagagaataatttaaaactgctgcataatagtctctttaaatgctaaggaattacttctggataaaagaaagatgaagatattcctctatagcctgtcactgttgttcccacatactgtgcaggcagt

SEQ ID NO: 38607 - DNA, 600 bp, Chicken  19866894269890_1
tgtgttgacaaagtaataaatcatattggtctccaaaatgcctatcacggctgtgatgttatctaaataatcatgattgtgaacaatatctgtcatcttactgacagattcttctagaaattctgcaattattgaaggacaccaactctagctctgccacaagtgacacttcatttgtatttggtttacttcttactcttttaaagcaataattttatatgttgtatgtttttcatgtcttccttctccataccccgagagaaactgtttatgcatttcaatgcaagcaaagtaattctyatgtgttctcttctggtttttgttttggaaagttttgtaaaaaatattaagatacatttgtggaagtacacagtaaatatattttctagctgggaggagtatttttctttgcagtgccagggaaacaggaaatatttgtattattgaacatctttttccctttttctttttttcttgtgtttgagcatctcataattaatccaaccgctttcagtttttctgtggtcacgacacagaagaggaatgcacttccagtgtcctcccagaagttcttggaagccatgagacgttgtttggggt

SEQ ID NO: 38608 - DNA, 600 bp, Chicken  19866894269893_1
tcacaccccaacagatgtccccatttgttcaggggacagagcggggcccgtgtcccccccagagccctgcagagaggggttgtgatgggacacggacccggcgctgacccatggaacgatggtgagagtcactgctggatgagaaagagctaactcatcccagcagcctgtctgcagaagttcgtgtttttgtcctttttattttaagcaggaaagaatgatctcggcctccagaaaacccacacctgttttacctttttgttgcattcggttgctttgcaaaagaaaggaaagaaaagyaaaaaaaaaaagatactaatttaaatgttgctgtagacgacgttctatttatttttaaggggtaaatatcttctaagtcttaatacttctacagtcratgctatttacagtgtctgtgtccygttggcacagcagttcagtggctggctgagctgctccgccaatggraacaccatcaaactgccttgtaaaacaaaacgtctcccaccatgtattttttttctagtatttcttgattcctttatgtctgtggttaacaaacctgttctgtgttcgggttgttttatgttttgggttgtc

SEQ ID NO: 38609 - DNA, 522 bp, Chicken  19866894269893_2
ccggcgctgacccatggaacgatggtgagagtcactgctggatgagaaagagctaactcatcccagcagcctgtctgcagaagttcgtgtttttgtcctttttattttaagcaggaaagaatgatctcggcctccagaaaacccacacctgttttacctttttgttgcattcggttgctttgcaaaagaaaggaaagaaaagaaaaaaaaaaaagatactaatttaaatgttgctgtagacgacgttctatttatttttaaggggtaaatatcttctaagtcttaatacttctacagtcratgctatttacagtgtctgtgtccygttggcacagcagttcagtggctggctgagctgctccgccaatggraacaccatcaaactgccttgtaaaacaaaacgtctcccaccatgtattttttttctagtatttcttgattcctttatgtctgtggttaacaaacctgttctgtgttcgggttgttttatgttttgggttgtctggttgttttttttttgtt

SEQ ID NO: 38610 - DNA, 497 bp, Chicken  19866894269893_3
tgagagtcactgctggatgagaaagagctaactcatcccagcagcctgtctgcagaagttcgtgtttttgtcctttttattttaagcaggaaagaatgatctcggcctccagaaaacccacacctgttttacctttttgttgcattcggttgctttgcaaaagaaaggaaagaaaagaaaaaaaaaaaagatactaatttaaatgttgctgtagacgacgttctatttatttttaaggggtaaatatcttctaagtcttaatacttctacagtcratgctatttacagtgtctgtgtccygttggcacagcagttcagtggctggctgagctgctccgccaatggraacaccatcaaactgccttgtaaaacaaaacgtctcccaccatgtattttttttctagtatttcttgattcctttatgtctgtggttaacaaacctgttctgtgttcgggttgttttatgttttgggttgtctggttgttttttttttgtt

SEQ ID NO: 38611 - DNA, 451 bp, Chicken  19866894269893_4
tgtctgcagaagttcgtgtttttgtcctttttattttaagcaggaaagaatgatctcggcctccagaaaacccacacctgttttacctttttgttgcattcggttgctttgcaaaagaaaggaaagaaaagaaaaaaaaaaaagatactaatttaaatgttgctgtagacgacgttctatttatttttaaggggtaaatatcttctaagtcttaatacttctacagtcratgctatttacagtgtctgtgtccygttggcacagcagttcagtggctggctgagctgctccgccaatggraacaccatcaaactgccttgtaaaacaaaacgtctcccaccatgtattttttttctagtatttcttgattcctttatgtctgtggttaacaaacctgttctgtgttcgggttgttttatgttttgggttgtctggttgttttttttttgtt

SEQ ID NO: 38612 - DNA, 600 bp, Chicken  19866894269896_1
aggcctgtgctgcggtctggccccgctgtttcacaggatgggctgtgctagttgctgtggtgaaggtcgctgcgggctggtgtcttggagcactggtggaagcctgagttgtctgaaactgtgctgctgcagctgcaatcaataaggtttgtttgtgcaagctgttagaggttttaactccactgctttaaacaacctgcattgaaaagaaaccttccaacaggatattaaaacagctacaggaacggcttttccttacagactgggatttctagccatgcctccatcctacttttacarcatcatttattcagtaagcgttgtttaaaggttaaataaatacacaaaagcactgtaaacttccacgtctgacagaacattacacgtgatcaggttttaaataccactatgccatatttactccacgcactatcagttaggttacacgaagcttagttttgcactacactgacagatcatatcgtagaaactagtgggggaagtttactggcaattagtttgtcggtatttttaagccattagtattctagaccattaagctagaggaaagagttctattatcaggctgactggtaccag

SEQ ID NO: 38613 - DNA, 599 bp, Chicken  19866894269900_1
  misc_feature (1)..(129): n is any nucleotide
nnnnnnnnnnnnnnnnnnnnnnnnnnnnnnnnnnnnnnnnnnnnnnnnnnnnnnnnnnnnnnnnnnnnnnnnnnnnnnnnnnnnnnnnnnnnnnnnnnnnnnnnnnnnnnnnnnnnnnnnnnnnnnnnntgctgttattttagtacctttatgctgtgcagcccctcttagaataaatttgctttaatgcagattaatttactgaagttcatttgtgttattagggttatacaaaatttggatcacattctagccaagtctacaaatgcaatagtttgtgtgaatgtaaaaccactagcrcagagtgacatatgatgtgcccatccctttgcctatctcagcaaataaagcttcaccttgccaggtgccacacattattgccagcatcaccactttagatcatgaacattcagcagagactgaataggaagtccagatggcaagaaagatgcagaaaagtgagagtagtacattggcttggatgctgtgtgatggagagttgtatgttattaagaggaatgctaatatatagaacaaacaatacacttgccttcatgatcttgttatgtataaaaacaaatctttatagaataagcatt

SEQ ID NO: 38614 - DNA, 600 bp, Chicken  19866894269901_1
gttatgcagatgttcaaaaggccaaataaaacaaatagatgggctgcagctgctaggactgcataaagcagagaacatttgctgctgtgatgagaatgctgcatttcagcatgcctagctttttcctgtttgagaaaaacagcatggtgaattagtttaattagtttttatcttattgtgactgtaaattgtgattgctttcatgattgttgaggcttcagaaaaacaagcaaacaaacaaacacaagcttagcctttagtgaggaaagaggagaattagaagtgtcagtgtccctcttrtaggaaggaaaggtgtgttctacagatatacagattttgtgctttgtttcttcagtgagaaatgacagactttcatggaagtatccacaaaagaagtgtcccaccatttggagaatttaatatgttgaagatgcttccaaatatctggtctcccattttaattttaggatgtcctgcagtaaattaaagatcagctttccattggaagttttgtggttggtggaactcaagaaggctcactgcccaatatattcttctaaaaactggatggcatctggagagaaaggttataaattatga

SEQ ID NO: 38615 - DNA, 600 bp, Chicken  19866894269904_1
ctagtcatgaggtatggttctgcttagcatcactatgggtgtcagaatttacccctcccaggaaatctagatttccctaatagtgtaataccttgggaaaatatttcagttctatcctaaggtatgtcctaaggtgtatcagtaatatctatgatgttacagaaatgatataattatgtatggtacaatgccgaagtatgcctgtaatttctatcacaatttattatgaaatgtgatagataaaaagctttctttgccacagtgtaagggtaaggcgacttacttcccatagtttttttwatatatgcttatttctgtaaacaatccttaacccatattcctttgtgaactgtaatgcttgytctctccttcctgtgtgtcatggctcagaagtatcacagatggtgatgctagagcacaatgtgtgaacaatacggtacaggcctgagaagcctgacaggctttgtaagaggttcataaagcttagagtggacattatacttccaggcttcagcagttctaataagtattcatcacaagcaatgttgactgtgtctttggatttctagaacaactctctattacagcagaaatactctg

SEQ ID NO: 38616 - DNA, 600 bp, Chicken  19866894269904_2
aaatctagatttccctaatagtgtaataccttgggaaaatatttcagttctatcctaaggtatgtcctaaggtgtatcagtaatatctatgatgttacagaaatgatataattatgtatggtacaatgccgaagtatgcctgtaatttctatcacaatttattatgaaatgtgatagataaaaagctttctttgccacagtgtaagggtaaggcgacttacttcccatagtttttttwatatatgcttatttctgtaaacaatccttaacccatattcctttgtgaactgtaatgcttgytctctccttcctgtgtgtcatggctcagaagtatcacagatggtgatgctagagcacaatgtgtgaacaatacggtacaggcctgagaagcctgacaggctttgtaagaggttcataaagcttagagtggacattatacttccaggcttcagcagttctaataagtattcatcacaagcaatgttgactgtgtctttggatttctagaacaactctctattacagcagaaatactctgtgttacaaaagtatctgcttattttgacttctttcagaagtcagcacgtataggccaatttt

SEQ ID NO: 38617 - DNA, 600 bp, Chicken  19866894269908_1
ttattttccaaaaataggtaatttgggcatagtaagtatgcctacgtgcattgaaagaaatcatcttacttttcctcccaaaactgacttagtgttaacagcccatgcataagcacaagattagtaaagtcattaacaagaaatatccatgcataagaagtccccttgaaatgcaaacaagtttccctgtagataaagcaagtagcataagatctcatcacttcagagcagagatggaaatgaaaggagagaagggggctctatttctctgatggtagcagtagacatccctgctgtcaytatgctgatcttctgtgtcactgccacttgtccttaattcactagcataccaaatatatacattataagatgtaacygtgcagccacaggccaacggtgatgtagaatatccctagargaaaaaacagtgaaccatgcttacacatttttattgcgtttccagctttatctggaacaggcttctgaaaattcctttcaatactgaaatcatacctttcagttctagttctgctttggaaaaaaaaggaaaaaaaaaagctaaacatgctttatttttttcagtatataaaacatttgatt

SEQ ID NO: 38618 - DNA, 600 bp, Chicken  19866894269908_2
ccaaaactgacttagtgttaacagcccatgcataagcacaagattagtaaagtcattaacaagaaatatccatgcataagaagtccccttgaaatgcaaacaagtttccctgtagataaagcaagtagcataagatctcatcacttcagagcagagatggaaatgaaaggagagaagggggctctatttctctgatggtagcagtagacatccctgctgtcaytatgctgatcttctgtgtcactgccacttgtccttaattcactagcataccaaatatatacattataagatgtaacygtgcagccacaggccaacggtgatgtagaatatccctagargaaaaaacagtgaaccatgcttacacatttttattgcgtttccagctttatctggaacaggcttctgaaaattcctttcaatactgaaatcatacctttcagttctagttctgctttggaaaaaaaaggaaaaaaaaaagctaaacatgctttatttttttcagtatataaaacatttgattgttaatatggtttctgtatctgtcttcatcaatcatgttcccataatctctctacactacaatgaatgatgataaca

SEQ ID NO: 38619 - DNA, 600 bp, Chicken  19866894269908_3
gattagtaaagtcattaacaagaaatatccatgcataagaagtccccttgaaatgcaaacaagtttccctgtagataaagcaagtagcataagatctcatcacttcagagcagagatggaaatgaaaggagagaagggggctctatttctctgatggtagcagtagacatccctgctgtcaytatgctgatcttctgtgtcactgccacttgtccttaattcactagcataccaaatatatacattataagatgtaacygtgcagccacaggccaacggtgatgtagaatatccctagargaaaaaacagtgaaccatgcttacacatttttattgcgtttccagctttatctggaacaggcttctgaaaattcctttcaatactgaaatcatacctttcagttctagttctgctttggaaaaaaaaggaaaaaaaaaagctaaacatgctttatttttttcagtatataaaacatttgattgttaatatggtttctgtatctgtcttcatcaatcatgttcccataatctctctacactacaatgaatgatgataacaaagaacagcaaattatatctacaacagtaattacatcagaa

SEQ ID NO: 38620 - DNA, 600 bp, Chicken  19866894269920_1
ggcatcagcctgatgacagataccctggagctgactcttggtgtcaagtggatggacccctatgaagttgccactgaggaaggactgcttccacctttgcctcgtcaagagacagagcgagccatggagatcctgaaagtgctcttcaatatcacttttgattccagcaagagggaagtggatgaggtaagctcctcaagtgttgcaccacactacatttgcttgtctactggttttctcctcttctggcacatccttgtgttagatgctagcccccatgtagcctctgcttacatgtaygggtagcaagagacttgtgtctggacctttttctttagggctgagaactgcctctgtcccatgtattaagatttctcagcattaaaacctgcaagttgggcattttttcttcttaatgatattaatracttgtgsaagtgggaaagcagaccyccccacataattcacttgtgtgtgtcctgttgcctttcacctctcaacaaggtcagaaggagttcttgatgtcatctctatcttattcctgggcctcttccagcccttgacttggtgctgtagagcaatgaggaaggtatctggcag

SEQ ID NO: 38621 - DNA, 530 bp, Chicken  19866894269920_2
agatcctgaaagtgctcttcaatatcacttttgattccagcaagagggaagtggatgaggtaagctcctcaagtgttgcaccacactacatttgcttgtctactggttttctcctcttctggcacatccttgtgttagatgctagcccccatgtagcctctgcttacatgtaygggtagcaagagacttgtgtctggacctttttctttagggctgagaactgcctctgtcccatgtattaagatttctcagcattaaaacctgcaagttgggcattttttcttcttaatgatattaatracttgtgsaagtgggaaagcagaccyccccacataattcacttgtgtgtgtcctgttgcctttcacctctcaacaaggtcagaaggagttcttgatgtcatctctatcttattcctgggcctcttccagcccttgacttggtgctgtagagcaatgaggaaggtatctggcagcagatggagaatctggaggatatttgcacatatacacactgctatcagtgagcaagt

SEQ ID NO: 38622 - DNA, 522 bp, Chicken  19866894269920_3
aaagtgctcttcaatatcacttttgattccagcaagagggaagtggatgaggtaagctcctcaagtgttgcaccacactacatttgcttgtctactggttttctcctcttctggcacatccttgtgttagatgctagcccccatgtagcctctgcttacatgtaygggtagcaagagacttgtgtctggacctttttctttagggctgagaactgcctctgtcccatgtattaagatttctcagcattaaaacctgcaagttgggcattttttcttcttaatgatattaatracttgtgsaagtgggaaagcagaccyccccacataattcacttgtgtgtgtcctgttgcctttcacctctcaacaaggtcagaaggagttcttgatgtcatctctatcttattcctgggcctcttccagcccttgacttggtgctgtagagcaatgaggaaggtatctggcagcagatggagaatctggaggatatttgcacatatacacactgctatcagtgagcaagt

SEQ ID NO: 38623 - DNA, 504 bp, Chicken  19866894269920_4
acttttgattccagcaagagggaagtggatgaggtaagctcctcaagtgttgcaccacactacatttgcttgtctactggttttctcctcttctggcacatccttgtgttagatgctagcccccatgtagcctctgcttacatgtaygggtagcaagagacttgtgtctggacctttttctttagggctgagaactgcctctgtcccatgtattaagatttctcagcattaaaacctgcaagttgggcattttttcttcttaatgatattaatracttgtgsaagtgggaaagcagaccyccccacataattcacttgtgtgtgtcctgttgcctttcacctctcaacaaggtcagaaggagttcttgatgtcatctctatcttattcctgggcctcttccagcccttgacttggtgctgtagagcaatgaggaaggtatctggcagcagatggagaatctggaggatatttgcacatatacacactgctatcagtgagcaagt

SEQ ID NO: 38624 - DNA, 600 bp, Chicken  19866894269929_1
gctgcagccagagctcccctcttctgcactcagtccccctcagcacgcactttctcttgagtttctgtttgtctttgtgccatttttcctattttaaaacagtgcatgaaatcaagtacaaaaattaatgggcgtgcaatgaagactcctatgcaaagttaaattaaaaaaacaaaaacattgaaaattgagtatttagcctcacttctgccacggggtgaagcgcccaacaccaccagtgtcatagtcgtatattccctctcaaataatgcaacagagaatgcagtttcttccacatgyggggaagaatcttcatccccgcgtgcttcagcttacaacgtttaaagcaggccccaaatgcacgttcaaaatgtatcctcactgaaccaaagccttcttcaaaaacgtctttgtgtaaaaggcggcagtgttacggagtgcactgttgtgcacataaaactccgtgccttttctcagcactgctttcctggcgtgttcaatagtcatacagtggcttacgaagaaatcagtcgtatggccaattcgcatctgctggaattattaaataattaaaaataataaagcattcagcctaaaaaa

SEQ ID NO: 38625 - DNA, 600 bp, Chicken  19866894269930_1
gtcagcatgcggctatacttaagtctttccagttcacatttaagtagcgtagaattgatcctgattgcccatgaaagtagaacagcttgatttgtgacctaatgtttactgtgctataaggagaaacttgatctgtttaaacatctagatattccctcttcccaggtaatgccattcatcacagctgtcagtgcttcttttaaaagagaaatgaccctcaggcatagtataaaactctgtggaagaactatgtataccattgccaaaagaagaaatagttctttttcttttttttttttyctccactgggcttgtacacattgtgaaagtcctacacctacagaattctaagtcaggatttccatttccctycccattcccatataaaggaacttgtattagagacctacatgctgtcctgattttatttatctcagacataagggtagtggatttggacaagctcaggcagttgatgagatatacttaagcagctggttctgagggaaaatcagagtaattcagaaatgcaagagaagacaaagaaaagccctaactccattttccttctcctcctaactttatgaagtgaaaataaaa

SEQ ID NO: 38626 - DNA, 596 bp, Chicken  19866894269930_2
gaaagtagaacagcttgatttgtgacctaatgtttactgtgctataaggagaaacttgatctgtttaaacatctagatattccctcttcccaggtaatgccattcatcacagctgtcagtgcttcttttaaaagagaaatgaccctcaggcatagtataaaactctgtggaagaactatgtataccattgccaaaagaagaaatagttctttttcttttttttttttyctccactgggcttgtacacattgtgaaagtcctacacctacagaattctaagtcaggatttccatttccctycccattcccatataaaggaacttgtattagagacctacatgctgtcctgattttatttatctcagacataagggtagtggatttggacaagctcaggcagttgatgagatatacttaagcagctggttctgagggaaaatcagagtaattcagaaatgcaagagaagacaaagaaaagccctaactccattttccttctcctcctaactttatgaagtgaaaataaaaaaatcacatacttaaccaaatgccagggatgtcttttttttttttttttttccaccagaataaattta

SEQ ID NO: 38627 - DNA, 599 bp, Chicken  19866894269938_1
  misc_feature (1)..(161): n is any nucleotide
nnnnnnnnnnnnnnnnnnnnnnnnnnnnnnnnnnnnnnnnnnnnnnnnnnnnnnnnnnnnnnnnnnnnnnnnnnnnnnnnnnnnnnnnnnnnnnnnnnnnnnnnnnnnnnnnnnnnnnnnnnnnnnnnnnnnnnnnnnnnnnnnnnnnnnnnnnnnnnnnntgtttggttttttttgtttgtttgtttgtttttgtctttttttattaaatatagttagaggaagatgggaaggaaagttttcctttctactgtacatcacctgactccagaaagtgagacgttagaagacaagagcagkagagaagctttagttggtccctgtgtaaaacaggaattttagcactgaactgcatgcggaaatctgggctgaggtgggaaaagtaaggactgcaacttgtggaagtctgagctaagagaccgtccttgcttagctgggatcttccatgatggcttggacacccctactgctcgaacatgagrrgcattctgggaggagcggtgaggcatcatccrtgtgcctggaatcttcatggagagctggagccaaagcttttgccttcttctctggttcctcagctgggctcacgctgagactca

SEQ ID NO: 38628 - DNA, 600 bp, Chicken  19866894269938_2
ttgtttgtttttgtctttttttattaaatatagttagaggaagatgggaaggaaagttttcctttctactgtacatcacctgactccagaaagtgagacgttagaagacaagagcagkagagaagctttagttggtccctgtgtaaaacaggaattttagcactgaactgcatgcggaaatctgggctgaggtgggaaaagtaaggactgcaacttgtggaagtctgagctaagagaccgtccttgcttagctgggatcttccatgatggcttggacacccctactgctcgaacatgagrrgcattctgggaggagcggtgaggcatcatccrtgtgcctggaatcttcatggagagctggagccaaagcttttgccttcttctctggttcctcagctgggctcacgctgagactcactgagcaaaggggtttcagtgcatgtcttcggaagmagacagtaaatacatggtgggactgcctgcactttttgcccattccgactgaaagagaaaaagaaatctaatcaggtgtctgggacagattggaaagcaaagtcttcttggctacttcctctgaggaacagtcttatatctaataga

SEQ ID NO: 38629 - DNA, 600 bp, Chicken  19866894269938_3
tgtttgtttttgtctttttttattaaatatagttagaggaagatgggaaggaaagttttcctttctactgtacatcacctgactccagaaagtgagacgttagaagacaagagcagkagagaagctttagttggtccctgtgtaaaacaggaattttagcactgaactgcatgcggaaatctgggctgaggtgggaaaagtaaggactgcaacttgtggaagtctgagctaagagaccgtccttgcttagctgggatcttccatgatggcttggacacccctactgctcgaacatgagrrgcattctgggaggagcggtgaggcatcatccrtgtgcctggaatcttcatggagagctggagccaaagcttttgccttcttctctggttcctcagctgggctcacgctgagactcactgagcaaaggggtttcagtgcatgtcttcggaagmagacagtaaatacatggtgggactgcctgcactttttgcccattccgactgaaagagaaaaagaaatctaatcaggtgtctgggacagattggaaagcaaagtcttcttggctacttcctctgaggaacagtcttatatctaatagat

SEQ ID NO: 38630 - DNA, 600 bp, Chicken  19866894269938_4
ttagaggaagatgggaaggaaagttttcctttctactgtacatcacctgactccagaaagtgagacgttagaagacaagagcagkagagaagctttagttggtccctgtgtaaaacaggaattttagcactgaactgcatgcggaaatctgggctgaggtgggaaaagtaaggactgcaacttgtggaagtctgagctaagagaccgtccttgcttagctgggatcttccatgatggcttggacacccctactgctcgaacatgagrrgcattctgggaggagcggtgaggcatcatccrtgtgcctggaatcttcatggagagctggagccaaagcttttgccttcttctctggttcctcagctgggctcacgctgagactcactgagcaaaggggtttcagtgcatgtcttcggaagmagacagtaaatacatggtgggactgcctgcactttttgcccattccgactgaaagagaaaaagaaatctaatcaggtgtctgggacagattggaaagcaaagtcttcttggctacttcctctgaggaacagtcttatatctaatagatctaattaggtcatttctctgttttatggtatc

SEQ ID NO: 38631 - DNA, 600 bp, Chicken  19866894269938_5
attttagcactgaactgcatgcggaaatctgggctgaggtgggaaaagtaaggactgcaacttgtggaagtctgagctaagagaccgtccttgcttagctgggatcttccatgatggcttggacacccctactgctcgaacatgagrrgcattctgggaggagcggtgaggcatcatccrtgtgcctggaatcttcatggagagctggagccaaagcttttgccttcttctctggttcctcagctgggctcacgctgagactcactgagcaaaggggtttcagtgcatgtcttcggaagmagacagtaaatacatggtgggactgcctgcactttttgcccattccgactgaaagagaaaaagaaatctaatcaggtgtctgggacagattggaaagcaaagtcttcttggctacttcctctgaggaacagtcttatatctaatagatctaattaggtcatttctctgttttatggtatccatttgtttaaaaagttagtaatccttttataccagtcctatgatgattatttaatggttggctgcttgtgaagcccactgcgcttggtgaatagggatgttttgtagcagagccagtgc

SEQ ID NO: 38632 - DNA, 599 bp, Chicken  19866894269940_1
  misc_feature (1)..(5): n is any nucleotide
nnnnnttttaaaaataattttctttgtaaaaatggggtagcagtgtctaaatggtagcggagtactctattagctgaataacttcttggaaattaatgggattctctaggtacgtaaggctgcagaaacagtctcggaacaaagtaatgacacttttgtcggtgtccttcaacttttcctgtgtgctgcacaagcagaatattctggtgaagaaaagccgttgaccttttttttttctttgcattcttttgaaccttctatttgaaagaaaaagataggttatttattttagagaggagmtctatgcgcttacttctgagactgtcggttgagtgataggaactgtgaggagactgcagtgggaaggaagcctgcaggttggtaagagcgatggctgcatctcagtgtttctgttctccatgctgacaaaacgtctctgtattcatcatctatatttatttaatgtatgcgtttcagtaacatatgccttgatttagcatatttggaagatgctaaatgtaggtgcattgtgctraatgctttttcttaccgaaagcaatgaagattttcaagtacccacattgccattcattattgct

SEQ ID NO: 38633 - DNA, 600 bp, Chicken  19866894269940_2
tctttgcattcttttgaaccttctatttgaaagaaaaagataggttatttattttagagaggagmtctatgcgcttacttctgagactgtcggttgagtgataggaactgtgaggagactgcagtgggaaggaagcctgcaggttggtaagagcgatggctgcatctcagtgtttctgttctccatgctgacaaaacgtctctgtattcatcatctatatttatttaatgtatgcgtttcagtaacatatgccttgatttagcatatttggaagatgctaaatgtaggtgcattgtgctraatgctttttcttaccgaaagcaatgaagattttcaagtacccacattgccattcattattgctcagyataatagaaggtaaattcaatcttcgtgattaagattattttggtcacaagagacaatggaatgaaaatgaatcattttcttgatgttatgctgggtctgtgctgctcatatctgcctttcttttccctaaaatcctattacggacagcactctgaccttttaaacgatcttgctctctgtcaaactcttcttttagataggagacagaaattaggaagaacgtaaatgcaa

SEQ ID NO: 38634 - DNA, 600 bp, Chicken  19866894269940_3
atgcgcttacttctgagactgtcggttgagtgataggaactgtgaggagactgcagtgggaaggaagcctgcaggttggtaagagcgatggctgcatctcagtgtttctgttctccatgctgacaaaacgtctctgtattcatcatctatatttatttaatgtatgcgtttcagtaacatatgccttgatttagcatatttggaagatgctaaatgtaggtgcattgtgctraatgctttttcttaccgaaagcaatgaagattttcaagtacccacattgccattcattattgctcagyataatagaaggtaaattcaatcttcgtgattaagattattttggtcacaagagacaatggaatgaaaatgaatcattttcttgatgttatgctgggtctgtgctgctcatatctgcctttcttttccctaaaatcctattacggacagcactctgaccttttaaacgatcttgctctctgtcaaactcttcttttagataggagacagaaattaggaagaacgtaaatgcaatttctcttcttattgccagtggagagctttcctggatttgaatgaagcgttctttgtgccaaatggtt

SEQ ID NO: 38635 - DNA, 599 bp, Chicken  19866894269949_1
  misc_feature (1)..(55): n is any nucleotide
nnnnnnnnnnnnnnnnnnnnnnnnnnnnnnnnnnnnnnnnnnnnnnnnnnnnnnnaaattactgaaactgttagaggactaaggttttccttctgggagatttttgttcatcatataattatttttacagcgacaaactctgttatcaaaatgttatggaataaaaaataattttagctaatacagataaatcctattaacaccaaattcaccagttttaaagacgtgagccaattaatccaaaaactacaaggagttacagcttctaaagagttcattttcaagaaatctatgatctgrtgggagaaaaaacaggacagtgtggtcaaagtaaatcaaacatacttacagattgcagaggacagtctagttctgctaatcaaaaggccttttatccttatgaaatgagatctcagtataaaacagttatattttctgtagaaaatgagacagtgaacaatgtaaattgacccacataaaaacaaatatttttgtttaatgataatcattttacatttgattatttttccatccaggtgtgaatgaatgtatcacaaagtatgcaacttaaatgagtagaaagcacaccagagtatgtg

SEQ ID NO: 38636 - DNA, 599 bp, Chicken  19866894269955_1
  misc_feature (1)..(239): n is any nucleotide
nnnnnnnnnnnnnnnnnnnnnnnnnnnnnnnnnnnnnnnnnnnnnnnnnnnnnnnnnnnnnnnnnnnnnnnnnnnnnnnnnnnnnnnnnnnnnnnnnnnnnnnnnnnnnnnnnnnnnnnnnnnnnnnnnnnnnnnnnnnnnnnnnnnnnnnnnnnnnnnnnnnnnnnnnnnnnnnnnnnnnnnnnnnnnnnnnnnnnnnnnnnnnnnnnnnnnnnnnnnnnnnnnnnnnnnnnnnnnnnagttctcttcccgcatctcactgactgcatctgtgccagggcctcattgtatgctgacacrgtggtggaagagaatcatgcccttcaatagagctttgcaccacctctctgcccagccttggaagtatggatcttacatcttaggatgcggtgatgtactttatccaggctgcaaaatgaggactgtaggaatgaaatgaaacaagaactaagcagtagaagtagtccacacagatagctgtttaaaaacaaacaaaagcaaataaacaaaaaaagaaacatccaataaaaagtaagaagtgttctgcaagaaagccacagtttaatatcttaatcccaatccttcggtgagaggtaaaa

SEQ ID NO: 38637 - DNA, 600 bp, Chicken  19866894269955_2
ttgcaccacctctctgcccagccttggaagtatggatcttacatcttaggatgcggtgatgtactttatccaggctgcaaaatgaggactgtaggaatgaaatgaaacaagaactaagcagtagaagtagtccacacagatagctgtttaaaaacaaacaaaagcaaataaacaaaaaaagaaacatccaataaaaagtaagaagtgttctgcaagaaagccacagtttaatatcttaatcccaatccttcggtgagaggtaaaaatgcctccagataatagcttaggaactgggaatcrtggatccaacagaaaaactaattggcagtatcttctctacaccatatcctccattaaaacctcactgttctgtaggcagtaattactaatttttgatcccacagcatctaaaatattatcacctctttctgctaacattttcttctgctcccttggtacccactgtccttttccttgaagaagacaaattcarttaaattaaaatcagagcagtgattcatgctctcagtttaccttggagatttagagctgaaaaaggggcttatgtgcttgaaagtctgtaattgttttgcagctcta

SEQ ID NO: 38638 - DNA, 600 bp, Chicken  19866894269955_3
aaaagtaagaagtgttctgcaagaaagccacagtttaatatcttaatcccaatccttcggtgagaggtaaaaatgcctccagataatagcttaggaactgggaatcrtggatccaacagaaaaactaattggcagtatcttctctacaccatatcctccattaaaacctcactgttctgtaggcagtaattactaatttttgatcccacagcatctaaaatattatcacctctttctgctaacattttcttctgctcccttggtacccactgtccttttccttgaagaagacaaattcarttaaattaaaatcagagcagtgattcatgctctcagtttaccttggagatttagagctgaaaaaggggcttatgtgcttgaaagtctgtaattgttttgcagctctatcaatcaaagttacccctgtaaacattgccttgttygaatcccctggatcatcgtaagccacaacatcgcattacaaaaatgaagcgctgttggagattgaaaagaagaaaaaagtgcattcaatccaatattactgagaacctgcttctgctctgtgtctcatttcattagctttatttttacttaaaaaga

SEQ ID NO: 38639 - DNA, 600 bp, Chicken  19866894269955_4
ctacaccatatcctccattaaaacctcactgttctgtaggcagtaattactaatttttgatcccacagcatctaaaatattatcacctctttctgctaacattttcttctgctcccttggtacccactgtccttttccttgaagaagacaaattcarttaaattaaaatcagagcagtgattcatgctctcagtttaccttggagatttagagctgaaaaaggggcttatgtgcttgaaagtctgtaattgttttgcagctctatcaatcaaagttacccctgtaaacattgccttgttygaatcccctggatcatcgtaagccacaacatcgcattacaaaaatgaagcgctgttggagattgaaaagaagaaaaaagtgcattcaatccaatattactgagaacctgcttctgctctgtgtctcatttcattagctttatttttacttaaaaagaccagaaatttgtatgtagacctgatatggcagcagggggcttgcagaggggatagcagcacatctgacttgtgttgagttggccttaattattcaagctcatgagaggcttgacaaacaccagtcattgctgtttctcttcct

SEQ ID NO: 38640 - DNA, 599 bp, Chicken  19866894269956_1
  misc_feature (1)..(148): n is any nucleotide
nnnnnnnnnnnnnnnnnnnnnnnnnnnnnnnnnnnnnnnnnnnnnnnnnnnnnnnnnnnnnnnnnnnnnnnnnnnnnnnnnnnnnnnnnnnnnnnnnnnnnnnnnnnnnnnnnnnnnnnnnnnnnnnnnnnnnnnnnnnnnnnnnnnntgtcaagttaaatgcctcagcattcccattttcaccatatgtttgtaatttttttcttcctgagcagctggcattttcctaggatgctcgggtcgtgcccctattgtctaaccacaatgagcagcattaaaacatttcccaaccaaatagartctgaatgcaatttcttaactaactgcacattattttgtctctctctgtttgtttttggatgcaattcagaaagctgaggactcccttcatgaaatcaatctctctttaaataattgggttttctacttttcttcacacttacttttctaggaaagggattgtgaattaaagcatcactatcaatgatctgcaggaaatctgaagtgcttgagaagaaggggaaaagggtggatgctgctatgagactactgttgggaaggccaagcaggctatgctcagatatatggccttctggctg

SEQ ID NO: 38641 - DNA, 599 bp, Chicken  19866894269971_1
  misc_feature (1)..(75): n is any nucleotide
nnnnnnnnnnnnnnnnnnnnnnnnnnnnnnnnnnnnnnnnnnnnnnnnnnnnnnnnnnnnnnnnnnnnnnnnnnnaaaaagtcctgtttgcatttagcgacagactaggaaagccaagagattaatccaaactgagtcattcaggtccctgacgataacaaactttttctttccaaattgctttccaaataattctcattagaaggcagtgcttttagaagtgaaatgaacaggcactgttgggaggtttcatggttatttcttgaagcacaggctgggagtcagcccatgttgttgtargagactcccaagccagcgtgacacaaagccatggcagctttttgtggggacactaagctactggcagctctgccctggggcttctgggcaaaggaacttctatgctaccaagtcagatttaggcagctgcagagcacgcaaacaactaggagaaaagcctttcagaacacaccatttctggagctggccaagagtattatgagcatgacctgtccttgtgttcagctattagtgctctgtatattagtttggccacagtcyggagaccaccagctggtctcaactactgtggtatagaa

SEQ ID NO: 38642 - DNA, 600 bp, Chicken  19866894269971_2
cttgaagcacaggctgggagtcagcccatgttgttgtargagactcccaagccagcgtgacacaaagccatggcagctttttgtggggacactaagctactggcagctctgccctggggcttctgggcaaaggaacttctatgctaccaagtcagatttaggcagctgcagagcacgcaaacaactaggagaaaagcctttcagaacacaccatttctggagctggccaagagtattatgagcatgacctgtccttgtgttcagctattagtgctctgtatattagtttggccacagtcyggagaccaccagctggtctcaactactgtggtatagaattgttctgctgtgactccaccctgagttttggaaagttgtagccatgatctcagtctccacaccacatcctccatctgcatctgcctggtagggaatctccaccccacctgcaagcatggtcccttcaggggctcattgctgcagcacagaaaaaaagcagataagtttgcatcaggtctgacctgggtctactaggaagcaatcaagcaattgcaagtcttggaggtggctttctcacccaagacacagaacaaaagagaa

SEQ ID NO: 38643 - DNA, 600 bp, Chicken  19866894269972_1
actttgagatgtgtaggaagatgatgaatcatggacttctctacgttctctatccagggcaaagagctcaagagctcaccttctgctctgtcatcacacccagggtcactttagttgccaagaaactgagatattaaaagctccagaagtgctgagcacacagcattttgaaactaatgattgtgaagtttgcttagcaccttaaccacaggctgctatgactgaagctggcatatcctaaatgagaggacacatttaaaaatgtgccctatctcctcagcgttacatgaagcaggctcygggagaggaggggtagactcaagatatccatgttaaaaagtttgtacttttgcaaagtaatacaagaaagactattctcacatgactttgggggaaattctgaatgccctttgtcttcagcttttggctgtatgaaagctttctgcagagtagaactgaggtctttattgtaagtccagagaccagaagagatgagagaaggaccatctttcataagaaatccttaggtagtgtagaagaatgtagaatgtagaacattttcccttgttcttcagtgccatctgccccatctctaccaag

SEQ ID NO: 38644 - DNA, 600 bp, Chicken  19866894269981_1
ttgcatttttattgaccctgagagtattaggaatgcatctcataaagagtctgagatgtgtctgtctgtggtgacagcagcatcacgacaatgtaggccaataaacagtcagaaaatgcagatctccgttttaactcccacaggcagccttttaatttcacatagaccagaatgaagagcctgatataaaactgagttgtaaagacttaacctctttctcctgctacaaacctcagcacagacacaactcagtgttctggggtagatgaatgatgttctttcatatattccatttgtacytctctctctmtatatatacatatatatttttctacatggaacactaaaggtattgcaagcactcctcatgacctttcttcctcactacctccaaacacattcttgtccagggtagcagtatgttatagaaaccagggggatttataataaaagtggtgagtgtaaagttttgaaactctttaaatcttgagcttgaacatctgaactgtgattctgtgaactctgctgatcttaggacttagaagtgatttacagtggtagctggctttctaacaccttccatgttgtctggttcccacc

SEQ ID NO: 38645 - DNA, 600 bp, Chicken  19866894269981_2
attgaccctgagagtattaggaatgcatctcataaagagtctgagatgtgtctgtctgtggtgacagcagcatcacgacaatgtaggccaataaacagtcagaaaatgcagatctccgttttaactcccacaggcagccttttaatttcacatagaccagaatgaagagcctgatataaaactgagttgtaaagacttaacctctttctcctgctacaaacctcagcacagacacaactcagtgttctggggtagatgaatgatgttctttcatatattccatttgtacytctctctctmtatatatacatatatatttttctacatggaacactaaaggtattgcaagcactcctcatgacctttcttcctcactacctccaaacacattcttgtccagggtagcagtatgttatagaaaccagggggatttataataaaagtggtgagtgtaaagttttgaaactctttaaatcttgagcttgaacatctgaactgtgattctgtgaactctgctgatcttaggacttagaagtgatttacagtggtagctggctttctaacaccttccatgttgtctggttcccacctgcagcagta

SEQ ID NO: 38646 - DNA, 600 bp, Chicken  19866894269985_1
agtaaagagaacatagttttgtgctcagtaggccattttagaatatatagagaacatataattttaactccattctaaagtacttatacagaagtaatacagtctgtgcatcagagcacacagaggacagtcatacttcctcagtctttcatttctccaggcactgtttcccacagcatttccctggagaagctggcagctcgtggtttagataggcgtgttctttgctgagtaaaaaactgtctggatggccaggcccagaaagtggtggtgaatggagtcaaatccagctggtgaccrgtcataagtggtgttccccaagggtctgtactggggcctgtcctgtttgatctctttactgatgatctggatgaggggattgagtgcaccctcagtaagtttgcagataacagttctctctgcctgagggaagaaagtccctacagaggtatctggataggctgcatccatgggttgagaccaatcatatgaggttcaacaaaaycaagtgctgggtcctgcactttggtcagaacaaccccatgcaatgctacaagcttggggcagagtggctggatagctgtgcagtggaacattgag

SEQ ID NO: 38647 - DNA, 600 bp, Chicken  19866894269985_2
gtttagataggcgtgttctttgctgagtaaaaaactgtctggatggccaggcccagaaagtggtggtgaatggagtcaaatccagctggtgaccrgtcataagtggtgttccccaagggtctgtactggggcctgtcctgtttgatctctttactgatgatctggatgaggggattgagtgcaccctcagtaagtttgcagataacagttctctctgcctgagggaagaaagtccctacagaggtatctggataggctgcatccatgggttgagaccaatcatatgaggttcaacaaaaycaagtgctgggtcctgcactttggtcagaacaaccccatgcaatgctacaagcttggggcagagtggctggatagctgtgcagtggaacattgaggcactggagaacgttcaaagaagggcaaaaaagctggtgaaggttctggagcacaggtcttatgaggagtgactgagggaaccaggattgtttagtttggagaagaggagactcgggagactttactgttctctacaactacctgaaagcaggctgtgacaaggtgggggtccgcctcttctcccaggtgaatagtgatagcgtc

SEQ ID NO: 38648 - DNA, 600 bp, Chicken  19866894269989_1
cacatcggttattaaaacctgtgttagaaatcaactgcttcactgctgagcaaggcaataaggaattatcttaacatccagtcgactgagtgacagcttaattcattacctgtggagagaactactgtttcctttctctcagtcatctgtactcatggacctggcgatttccttctatcagcaaattccaacatacaatatttgaaatgtcctttaatagcatttgttctactctccttacacagctgataaacagaaccatgatgtatttataatacatataatacataaggactgaayacagaaaacaggttacaatcttttgataaagcaaactacagcaaaagagattttgggctcttcatggggaaaaarggggaggaaacagaactctaaataagatgtggtttcaaycaaaatagaaataattaacaattcaatgccttgtctgtacgctgttagtagatagcaaatcccttgccactcagtaaaacacttgttcttaaagagaacacttctgaatattgaagaatatcactggggaaaacaatttggatgtgggaagcagaaagcgtgggatcttacttggcaacttgaaga

SEQ ID NO: 38649 - DNA, 600 bp, Chicken  19866894269989_2
atccagtcgactgagtgacagcttaattcattacctgtggagagaactactgtttcctttctctcagtcatctgtactcatggacctggcgatttccttctatcagcaaattccaacatacaatatttgaaatgtcctttaatagcatttgttctactctccttacacagctgataaacagaaccatgatgtatttataatacatataatacataaggactgaayacagaaaacaggttacaatcttttgataaagcaaactacagcaaaagagattttgggctcttcatggggaaaaarggggaggaaacagaactctaaataagatgtggtttcaaycaaaatagaaataattaacaattcaatgccttgtctgtacgctgttagtagatagcaaatcccttgccactcagtaaaacacttgttcttaaagagaacacttctgaatattgaagaatatcactggggaaaacaatttggatgtgggaagcagaaagcgtgggatcttacttggcaacttgaagatggtagaggaaatcctgaggaccacaaagtgattcctcaacatctaatacaagacacgctcgttcacaataaaga

SEQ ID NO: 38650 - DNA, 600 bp, Chicken  19866894269989_3
gagagaactactgtttcctttctctcagtcatctgtactcatggacctggcgatttccttctatcagcaaattccaacatacaatatttgaaatgtcctttaatagcatttgttctactctccttacacagctgataaacagaaccatgatgtatttataatacatataatacataaggactgaayacagaaaacaggttacaatcttttgataaagcaaactacagcaaaagagattttgggctcttcatggggaaaaarggggaggaaacagaactctaaataagatgtggtttcaaycaaaatagaaataattaacaattcaatgccttgtctgtacgctgttagtagatagcaaatcccttgccactcagtaaaacacttgttcttaaagagaacacttctgaatattgaagaatatcactggggaaaacaatttggatgtgggaagcagaaagcgtgggatcttacttggcaacttgaagatggtagaggaaatcctgaggaccacaaagtgattcctcaacatctaatacaagacacgctcgttcacaataaagatacaaaaataatttattagaagagaggggaaaagtcttg

SEQ ID NO: 38651 - DNA, 600 bp, Chicken  19866894269989_4
accacaaagtgattcctcaacatctaatacaagacacgctcgttcacaataaagatacaaaaataatttattagaagagaggggaaaagtcttgccagataagaaatacaatgtgagtttcttgaactgtacagaagtttgccatcagcaacagatgatcccagagcccatggatttaaagcaaactggcattttatcatatctcctattggtaacgactcattgaaacttctatcctcccattctacaggttaatgaaaagagttgttagaaatcaaatttccatcttctatctatctytttattttctcttggcatacagcactaactttacttacgtacatagctaacattcttcttcagactgtcatcttgcttgtaagcactgaaaaccctttatttggctgtgctattctccctgtatccctttagagagctactacaaaaataattttccttgctttacttacatctgcttctctcacatcctttttgccatgtcaaacacaggccatttagctttgattgcaagtccctttactgttcccatcccacccacgatgctgatttccaaaggactgcagcacctgcctccatttc

SEQ ID NO: 38652 - DNA, 600 bp, Chicken  19866894269992_1
acaccccaagcaatgctcatggtgccttgaggatatccaaggaaccagcagatgttgctcagtggtatgaggagacaggtctctgcccagagacacgacaggctggggaatggaaacaggccctgcagttccaggatgcttctccctctctgctctgtgcctcgctcagactttctccctcctggggccgccagcggccaggttaataaacaaggataggtgggcttcaggtctgagctggtaaggaccattcttatgtgatgtactctttttttcaggatggtctgaaatgtcttaggmcttttgtttccytccccttctgatgagttggaatttttactgcttttcttgtgatgaacacaaaatcatctgagagggctttagcagggaagaggaggatgaagggaagagggtgagaaactttgccagggaaatgaaccagttgaaatttgtgaaaatgggaactggtgagcaacgtaatgcaactggtaatgttccagaaatgaagattttgttaaaactttgtgtaattgctttgcagttgtggaaattgaaagctgtatggctgaaaaattgccaaagtttctaatgcttctgaag

SEQ ID NO: 38653 - DNA, 600 bp, Chicken  19866894269992_2
atgctcatggtgccttgaggatatccaaggaaccagcagatgttgctcagtggtatgaggagacaggtctctgcccagagacacgacaggctggggaatggaaacaggccctgcagttccaggatgcttctccctctctgctctgtgcctcgctcagactttctccctcctggggccgccagcggccaggttaataaacaaggataggtgggcttcaggtctgagctggtaaggaccattcttatgtgatgtactctttttttcaggatggtctgaaatgtcttaggmcttttgtttccytccccttctgatgagttggaatttttactgcttttcttgtgatgaacacaaaatcatctgagagggctttagcagggaagaggaggatgaagggaagagggtgagaaactttgccagggaaatgaaccagttgaaatttgtgaaaatgggaactggtgagcaacgtaatgcaactggtaatgttccagaaatgaagattttgttaaaactttgtgtaattgctttgcagttgtggaaattgaaagctgtatggctgaaaaattgccaaagtttctaatgcttctgaaggaagtaagaaga

SEQ ID NO: 38654 - DNA, 411 bp, Chicken  19866894269996_1
ataccatacctggggaaccgagctgggacctgctgttattccttctctcctctcaagttggctctctctgctcaacaactgaaagggagagggtccactacagtttggggggtgcaatctctgtgtctttctcccagagagtcactccaccagtcaatctcccgttgacactctctgatggttcttcatctctccacctcctccctaagctccaccacgaggctgagcagtttacttacactttactgcttacacttcatgcaggtggcatccttcccatcctcccttggcagcagtagkctcaggcactccctgcagccagacacctgaatcaccacatttctgggcaggccctctgtctgggtcaccagagtcttcctggaacaagcccactgtctcgtaaaccacgtt

SEQ ID NO: 38655 - DNA, 599 bp, Chicken  19866894269997_1
  misc_feature (1)..(29): n is any nucleotide
nnnnnnnnnnnnnnnnnnnnnnnnnnnnnaaaaacgggtaaagagaggcaagacgaacatgtctggtgtcattattaaataaccaactcaaaagagtccaggataaggaccagggtgtggtgctcagagagaatgtttatgagagtgtccaagtttagcataagagaataggcaggcctggaaaacccacgggaatcaaacgcatctgttgttgtaggcagccccagcaaaacgttactggttcggtggcctggggcaacattcccacccttcacccccagcacccccttctttttttakttttttctggacagcaaagtacaatattagcttgtcggtttctttttgccatcgtcaggctgaggctgggtgagaatattttgtgtctagactaataaatgtttgtaagggttttgcaagactggtttatgggaacagaatcccctttttgttttctgctggaaaaaaaaaaaagcagcattaaaagcaaatgagcgccatcatgcatttgttttaaattgcacattacagcaccgctattttatgtgcaatcaatacataatttggaagaaaaatgcttttaaaattcagagctatcc

SEQ ID NO: 38656 - DNA, 526 bp, Chicken  19866894269997_2
atgggaacagaatcccctttttgttttctgctggaaaaaaaaaaaagcagcattaaaagcaaatgagcgccatcatgcatttgttttaaattgcacattacagcaccgctattttatgtgcaatcaatacataatttggaagaaaaatgcttttaaaattcagagctatccctgagcagctaaggttctcttggaaactgaaggaggagtctgaaattattgttcttttgtttgcatcccccagtgggaaaggcagcacaactcgaaaccacggtgctttgaggcagcgtgaatcattasgaataaagatcacccctttcgtttatgcattagatattaaaactgaatctaggacaaaggtaaaccaaacaggctcctgccttcccaagcagttatcgggttaaataaaatatcaaagggactgtggaaatcttgtgacttcctctactgaaatcaaaaaacaaagatacttcgtgttctgcaaaacatggcctgtctaggtcccaattacaagcatcaacttaat

SEQ ID NO: 38657 - DNA, 600 bp, Chicken  19866894270006_1
tgagaaaaggaccaatatagaaaaatatgaacaccaacagttaaatacaattagagcaacataataaatgatatcaggagaaagaaatgtgcatggagaaaaagcaagcagagaggaatggggtgatgagaaaagaaagcagattggattagcagctccatttctcaggatcataaacaccaaaggatcatagaatggcttggcttgaaaaggaccttaacgataatctagtttcaacccccaaagaaagtgcagtgtgcacaagttgcagtacatcaaaaacagctctgaatagcatgygccaggattgaggcctttggtggttgaaattgctctggtttagaacaggggtaagcaacttgcattctgagtctccccaccctaactcagcagatctgagacagcacccaaaataggggaagctagggattcatgctccaatggcctccagaacatgctgcaggcttcacaaagtgaggaatccacatttaatgacatatgagttcatttaaaaataatagctttctcagttaagtgaattttatttctgaaagctttttttctaatagctacaataagaaaatggtgctaaattaattg

SEQ ID NO: 38658 - DNA, 499 bp, Chicken  19866894270006_2
tggtttagaacaggggtaagcaacttgcattctgagtctccccaccctaactcagcagatctgagacagcacccaaaataggggaagctagggattcatgctccaatggcctccagaacatgctgcaggcttcacaaagtgaggaatccacatttaatgacatatgagttcatttaaaaataatagctttctcagttaagtgaattttatttctgaaagctttttttctaatagctacaataagaaaatggtgctaaattaattgagcagtgtgcatgtacagcaactgactccagaatragtttctctgcaacttgcatgctttttgttgtgagtgatgttgaatttattttagcaggggtccctcaaaggcctctcactccaaacaacatttgctgacataatttgagcatccgaaaagctgtattcaaagagtaagtggtagtgttagggcatgggagtttaattgtgacagtgctgcacagcctgtaacagcatc

SEQ ID NO: 38659 - DNA, 600 bp, Chicken  19866894270008_1
cttatccaaggcactgtgacactttattccaccattacatggcgctgtgccctcaaagcgagcccagtcattagatgcatcactctgaaatgtgaatattattgcccaaaagagaggaacttgagcatcacagatggatgagaagggcttggaaacaggtaacaggattgctaacaacttatgagtaagcacgtaagacgcagcggcacatcgctgtgattgacaagaaccgctatttgcaaattgtacttccatgagcaccaccagcacactcaccaatcaggattccgaaaatgagcrtttttaagacttgcatttctttttgatggcgtcagcctgctgccaagcacaagtcagtacgaaagcatctatcgcatatagcaaaaagctgaagcaaatacaaagggtgctgcaacagtcaactacttamgagggaagaggatattacagtccaaaagagaactttccaacagtgaagtatatgatgcatcatactttaggaataaacacagaacatggaccagacaagttcataataattcctacttgatttttttagtttcccttaatactttttgtgcttaaagattgtaatttgag

SEQ ID NO: 38660 - DNA, 600 bp, Chicken  19866894270008_2
cagatggatgagaagggcttggaaacaggtaacaggattgctaacaacttatgagtaagcacgtaagacgcagcggcacatcgctgtgattgacaagaaccgctatttgcaaattgtacttccatgagcaccaccagcacactcaccaatcaggattccgaaaatgagcrtttttaagacttgcatttctttttgatggcgtcagcctgctgccaagcacaagtcagtacgaaagcatctatcgcatatagcaaaaagctgaagcaaatacaaagggtgctgcaacagtcaactacttamgagggaagaggatattacagtccaaaagagaactttccaacagtgaagtatatgatgcatcatactttaggaataaacacagaacatggaccagacaagttcataataattcctacttgatttttttagtttcccttaatactttttgtgcttaaagattgtaatttgagtttgaaactgcaactattcagaagcactgcataggagtcccattatgagtcaggtactgtacgtaaaggcatgctgagggaaaaggaaaaagcaccccgcacttggggtactttttgtcttaattactgg

SEQ ID NO: 38661 - DNA, 600 bp, Chicken  19866894270010_1
aagactcatcagtgtttaatacattccttagactgaggacctcaaagcaccaatcaactaattatggccttacagcttctttattgctacttctactactacaaaactaaggcatggagaaattcaatgagtagcccaagccagcagaacagtttgaattttgaacctgtactagaatccaaacttagaccataccaacaagttttctttctacccctttcaacacgtttgcttccctaagaaaaaacaggctgcaccatattgattattctgtacttaataatcatgttaatttactgycttttccttaagtttcaccagagtagagatcagttatattggctgtgatatttatgtaaatggaataccttagccaggctactaggctttcacaacgtgagcaggagcactgttaattttcagcaattagatccacctcccaaacgttcgatttttatttcagcagaaaaggatacctactccattaggttattacagactgaaaaaaaaaggcaggcttttgtcagtctacagatgatgctagtctgcaaagcatcagatttagggatttaagctttacctctcactggagagcagcat

SEQ ID NO: 38662 - DNA, 599 bp, Chicken  19866894270011_1
  misc_feature (1)..(208): n is any nucleotide
nnnnnnnnnnnnnnnnnnnnnnnnnnnnnnnnnnnnnnnnnnnnnnnnnnnnnnnnnnnnnnnnnnnnnnnnnnnnnnnnnnnnnnnnnnnnnnnnnnnnnnnnnnnnnnnnnnnnnnnnnnnnnnnnnnnnnnnnnnnnnnnnnnnnnnnnnnnnnnnnnnnnnnnnnnnnnnnnnnnnnnnnnnnnnnnnnnnnnnnnnnnnnnnntgtgtatttttgtttgaatgcctaatattgcattgtggaatttctgtcatgtttggttaaattctgtgttgaaagaagagaaaaatagtaaycttcaaggaaataacagctgctggcttcttcctactttcaccattttaatggaagtgttataactttatgaataagaactttgaattgaaatggtattgatgcgtttygtcacatgctgacatgacagtragtatttcttcatattctctctgaggaagaagcgtttaaaattaccatgtttccttaaatgtaagttaagcaatgaatgtgtattagcgatgtgaacagaaatagggaatgattgtaactgtcacttaaacagattagaaggagctttgttgacttggaaatgccaatt

SEQ ID NO: 38663 - DNA, 599 bp, Chicken  19866894270011_2
  misc_feature (1)..(100): n is any nucleotide
nnnnnnnnnnnnnnnnnnnnnnnnnnnnnnnnnnnnnnnnnnnnnnnnnnnnnnnnnnnnnnnnnnnnnnnnnnnnnnnnnnnnnnnnnnnnnnnnnnnntgtgtatttttgtttgaatgcctaatattgcattgtggaatttctgtcatgtttggttaaattctgtgttgaaagaagagaaaaatagtaaycttcaaggaaataacagctgctggcttcttcctactttcaccattttaatggaagtgttataactttatgaataagaactttgaattgaaatggtattgatgcgtttygtcacatgctgacatgacagtragtatttcttcatattctctctgaggaagaagcgtttaaaattaccatgtttccttaaatgtaagttaagcaatgaatgtgtattagcgatgtgaacagaaatagggaatgattgtaactgtcacttaaacagattagaaggagctttgttgacttggaaatgccaattttaaaagtcaacaaagtgcattatattctctgtaaatcactattaatttccattaacttccttttccctaagctgttcatgaataaattgctcttacagaaatttttg

SEQ ID NO: 38664 - DNA, 599 bp, Chicken  19866894270011_3
  misc_feature (1)..(78): n is any nucleotide
nnnnnnnnnnnnnnnnnnnnnnnnnnnnnnnnnnnnnnnnnnnnnnnnnnnnnnnnnnnnnnnnnnnnnnnnnnnnnntgtgtatttttgtttgaatgcctaatattgcattgtggaatttctgtcatgtttggttaaattctgtgttgaaagaagagaaaaatagtaaycttcaaggaaataacagctgctggcttcttcctactttcaccattttaatggaagtgttataactttatgaataagaactttgaattgaaatggtattgatgcgtttygtcacatgctgacatgacagtragtatttcttcatattctctctgaggaagaagcgtttaaaattaccatgtttccttaaatgtaagttaagcaatgaatgtgtattagcgatgtgaacagaaatagggaatgattgtaactgtcacttaaacagattagaaggagctttgttgacttggaaatgccaattttaaaagtcaacaaagtgcattatattctctgtaaatcactattaatttccattaacttccttttccctaagctgttcatgaataaattgctcttacagaaatttttgcttgggtctttgagattcttgt

SEQ ID NO: 38665 - DNA, 493 bp, Chicken  19866894270011_4
taagctgttcatgaataaattgctcttacagaaatttttgcttgggtctttgagattcttgtcatttatcacagtcaatactccttttgttccccttcattctgaatgtgcagagtattatagaacgaccattgttggtatagtccctgtggtgcaaaatcaagcctacttctctcagcagctttgtcaaatgaactgtacagttttaattttagaagtgccgaagtacatttaagaagaggagagaaaacttatttgaaaacaattgtgatttgaattgtatttgaaaacattgctcayggttgtgagcaatgcaacaagtcgaagtatgattttcttccaaccgttgaagagcaakagatattttaaaagttacaaattctaatttctgtctgggtattacttatcttggaagacttctcattttttgaaaatgcttgttcacgggtttctagatgtacaccagacttagttgtatttatgtcaaggcttg

SEQ ID NO: 38666 - DNA, 435 bp, Chicken  19866894270011_5
ttgtcatttatcacagtcaatactccttttgttccccttcattctgaatgtgcagagtattatagaacgaccattgttggtatagtccctgtggtgcaaaatcaagcctacttctctcagcagctttgtcaaatgaactgtacagttttaattttagaagtgccgaagtacatttaagaagaggagagaaaacttatttgaaaacaattgtgatttgaattgtatttgaaaacattgctcayggttgtgagcaatgcaacaagtcgaagtatgattttcttccaaccgttgaagagcaakagatattttaaaagttacaaattctaatttctgtctgggtattacttatcttggaagacttctcattttttgaaaatgcttgttcacgggtttctagatgtacaccagacttagttgtatttatgtcaaggcttg

SEQ ID NO: 38667 - DNA, 599 bp, Chicken  19866894270013_1
  misc_feature (1)..(12): n is any nucleotide
nnnnnnnnnnnnacagacgcatacaaaagcttagttgctaacggggtatttgcagaagcattaagttcagaaccaaaactccgtataacacgtgagctgagttagtcatccagaataacgatctcaaaaccacatgggctgagcagaggatctcctacttttatccagtgggggaaaaaaatctcaaagccttaatttgaatgtggctgggtacctgcagctttcaggtatgtggatacaactctcaggaagcagaggtggcatcttttgctgctagacagagtcctcacctgctccttkaagaaatggagtgtgactcactctagtccctcaagaagcacttccagaagaagggatactcgtatctgaagcaatggtctactatcagtggagcttgcacacaaaatgcagtggcacactcaacttcaatcacagccctgtgttttaatcacaggagattaaaaaatacactgcatacacatccaaaaactacccaggtgactgctgctcttaaagtcggatgtactagcacgactctctagcttattcttcatttctaggagaaaaaaaaggaactggattctgtccccagttccacg

SEQ ID NO: 38668 - DNA, 600 bp, Chicken  19866894270018_1
actttaatacatttctcttttagcttagatttactaaaagtaataagtacagaatattctgtaactctcttcccttttttctcatggatgaatgagcactgagttttcagaatattacagcttgttttattagtgaagctgatgcaacttcgggatggatgagaatcaattccaaaagtagttgtctgttcagataaaaatctagcattgaagaggcttggtatgcagtttgagagaaattatattagcattgtactttcttttttatgtgtaattttgtttaaattcgtgcagatgcaraagtagctggttctgctgcaactcaaatattttctcatttgaaatgaatgtaaaatgtgcyttgtttttcctttatcctctgtactgagatgcatcatattgcaytgtgtttttggctcaggattttcatggactataattatttgacccctgtgagtgaaatattattttcattaatggaaaagctttggaagagaagagtaaaattgcttgtttgaattatatggagctcttagacttacggtctaattgctggactatgtctatcttcagtaaattctttacaaaactttgtaagcc

SEQ ID NO: 38669 - DNA, 600 bp, Chicken  19866894270018_2
taactctcttcccttttttctcatggatgaatgagcactgagttttcagaatattacagcttgttttattagtgaagctgatgcaacttcgggatggatgagaatcaattccaaaagtagttgtctgttcagataaaaatctagcattgaagaggcttggtatgcagtttgagagaaattatattagcattgtactttcttttttatgtgtaattttgtttaaattcgtgcagatgcaraagtagctggttctgctgcaactcaaatattttctcatttgaaatgaatgtaaaatgtgcyttgtttttcctttatcctctgtactgagatgcatcatattgcaytgtgtttttggctcaggattttcatggactataattatttgacccctgtgagtgaaatattattttcattaatggaaaagctttggaagagaagagtaaaattgcttgtttgaattatatggagctcttagacttacggtctaattgctggactatgtctatcttcagtaaattctttacaaaactttgtaagccagagtaatgctgtctaagcagacctacgtgtgcttttctgatttttaaattgcacaaccaa

SEQ ID NO: 38670 - DNA, 600 bp, Chicken  19866894270018_3
ttcagaatattacagcttgttttattagtgaagctgatgcaacttcgggatggatgagaatcaattccaaaagtagttgtctgttcagataaaaatctagcattgaagaggcttggtatgcagtttgagagaaattatattagcattgtactttcttttttatgtgtaattttgtttaaattcgtgcagatgcaraagtagctggttctgctgcaactcaaatattttctcatttgaaatgaatgtaaaatgtgcyttgtttttcctttatcctctgtactgagatgcatcatattgcaytgtgtttttggctcaggattttcatggactataattatttgacccctgtgagtgaaatattattttcattaatggaaaagctttggaagagaagagtaaaattgcttgtttgaattatatggagctcttagacttacggtctaattgctggactatgtctatcttcagtaaattctttacaaaactttgtaagccagagtaatgctgtctaagcagacctacgtgtgcttttctgatttttaaattgcacaaccaagagcaagactgtgaaattttgtttacagaacactttatcttgaa

SEQ ID NO: 38671 - DNA, 600 bp, Chicken  19866894270034_1
ggtgtatgaactgagaaagccttcaaacccagaatctgcagaagcaactttcaatttggggtattcacccataaatagattaaacaaacttgcttcttctgaacaggatgctcagccctttcaaggcactgctgagctagtttgtatggttttacacatttgatggcactttagttttgaaggaaggatgtagctgcaaaagaaaaggtcccctttctcttacttgtgaaaaagggatagcaaccctgcctggtatttagcaatttgtttcccaacaaatgtcactgaacttcagaccaygagacaattcttttttgtcttacctcctctcttttaagaatgcctgtggttatctgagtttaaataatcctgcatttcaaaccagcaattttccttgtttacgcgttaaaggaaacagatggtgttcccacaaactatctagcccaacattctcaaaacatcgttaaccacttaatccatgcagagcaactaacagggaccaggtttggctctggtgaaacacgtaatggccctactttaaactttcagtactggaaaacaaaggcaattgaacagaaagtttgttccgttcttgccgta

SEQ ID NO: 38672 - DNA, 539 bp, Chicken  19866894270034_2
aggagaaagtttttcacacaggaggtggtgacacactggaacaggttgcccaaggaggttgtggatgccccatccctggaggcattcaaggccaggctggatgtggctctgggcagcctggtctgctggttggtgaaaaggatcactgtggtccttttcaacccaggccattctgtgattcattcaagacagtgtgctacttctcagctctttctgttttgcttcacctgcttaggaagccagttgtgcctatttaaacttcttgggggagaggaacagttatatgactacatgggacakcaagaatgttgcatttyaaatgggtatctgaaaaaactgggaagcgggcacaagctttatcctttctactgaaaacacagtggtttactctcctggcttttacaagctgtatcaagattttcagcgactgaaaatgcacttcctgtaaatagcacctatcatatcgctcagtattgtctagtatttttagtaagcagtagctttaacttacttacatgctatacatgatgatacccaaa

SEQ ID NO: 38673 - DNA, 522 bp, Chicken  19866894270034_3
acaggaggtggtgacacactggaacaggttgcccaaggaggttgtggatgccccatccctggaggcattcaaggccaggctggatgtggctctgggcagcctggtctgctggttggtgaaaaggatcactgtggtccttttcaacccaggccattctgtgattcattcaagacagtgtgctacttctcagctctttctgttttgcttcacctgcttaggaagccagttgtgcctatttaaacttcttgggggagaggaacagttatatgactacatgggacakcaagaatgttgcatttyaaatgggtatctgaaaaaactgggaagcgggcacaagctttatcctttctactgaaaacacagtggtttactctcctggcttttacaagctgtatcaagattttcagcgactgaaaatgcacttcctgtaaatagcacctatcatatcgctcagtattgtctagtatttttagtaagcagtagctttaacttacttacatgctatacatgatgatacccaaa

SEQ ID NO: 38674 - DNA, 600 bp, Chicken  19866894270037_1
tttttaattattatttttttgctcgaaatgaattaattgacctaccttaatcaaaaattatttattagtcacaaatgctccactgtttttaaatgtcccaaaaattttctcagattcttaagcagttagggatgcatgtatacacttactaataaaatgaaaagatcgcagtagataacaggaattgcatatcttcccttttcattcaagtattcattcacaatgtatttaactggagcttttagaatattcctgaagacacgatgcaagttaatctaaatttcaagcagtcattgcaayggacttagatcaatgcatggagtgagtagttgtgcttacgttgtagctgacatgtcttttcttgctcagtgatgtaaatgttacagattcatggctcacgattcacctgatagaatgcaaagctgatggatgtcaaaactttagcgcctggcaattgactgtagttatggagtacattctcaatgatatttttcatctaagtaatgaatgtggtcaactactgatcttctatagcataatagagagttgaagataagaggggaaaaaaggcaagtgttcacaagtaatctaagtgaaatt

SEQ ID NO: 38675 - DNA, 600 bp, Chicken  19866894270037_2
ttgatgaagagcactgttcccagcaattacttttaatgtctctgtctcagtagttaataatgtttgagcttcaggccagataatcatatactctgccatctacattagaaatactgcttagattcatgtggctaattccatagttcttgctgtctttgcagcattcagcatcatagcaacaatatatttgaataagtaggttttgttttgtagattttccaaggttattttagagcatccgtagcttagtgtatgtggagagctgagctaatcaggacattatatctggtgcaaaaggasaaaagaagtatgcgagtggagacaggtaagcttgtggagcttaggcagctttcaaaggggcaatcttttggacttttattaatatgtatatattatatgtacatattatatttctggtctgcccctgaaaatgctgtgttgagatcgtgggaagcaggaaactcaaatctcaggagggaaaaaaaaaaaaatctttgctcaacattgtttttccaggcttttttgtttgtttgtttttgttttgttttgtttttgaatgacttttcaaagaaagaaggctcaagagcatatttgtactgc

SEQ ID NO: 38676 - DNA, 600 bp, Chicken  19866894270037_3
caatatatttgaataagtaggttttgttttgtagattttccaaggttattttagagcatccgtagcttagtgtatgtggagagctgagctaatcaggacattatatctggtgcaaaaggasaaaagaagtatgcgagtggagacaggtaagcttgtggagcttaggcagctttcaaaggggcaatcttttggacttttattaatatgtatatattatatgtacatattatatttctggtctgcccctgaaaatgctgtgttgagatcgtgggaagcaggaaactcaaatctcaggagggsaaaaaaaaaaaatctttgctcaacattgtttttccaggcttttttgtttgtttgtttttgttttgttttgtttttgaatgacttttcaaagaaagaaggctcaagagcatatttgtactgccttctactctacagtaagtctggcaatccattcagtaagcctgcaaactaggactgctttaggaatgccatttgtcccagtggaggttccagaagatgagagcaatcaggaagcagtaagactgccattccgtttcactgatttatgaccatagaagtgataagtgacgtctgtctgaa

SEQ ID NO: 38677 - DNA, 600 bp, Chicken  19866894270046_1
agaaacttttttttctgattaagaattttattttttgtccagtttctatctttattttaacaccatcagtatcagtagtttcttctggtaacatctggatcactatatgatatgcttctgtgcaaaacttgtgaaggtatttaaaaacaaacaatgacaaaaaaaaagtgcaacaactcttcacgcaaaatagtggagaagtaagctgctgtcagagttgtcttggcttatttgaggtcacctttgttatgtcctttcggaggggtaagcatgtagcttacatttatgattatttatttwtttttaatagtgatgtgtgtacatctatcttgtacccgtgttcctatagtgcataaagatgctagtcatacagcaggttgcaatgtgttttgtgtgatacacaaaacaggactgtgcaaaaaacaaacaggagagaaagtttagattttagaatgaggaggagtaaatttacatgagtagtatctggaaagatatctgagtctcagtatgttcactcatatggatgctcctaagtaatgaggttgtatgtaagtcaggtggaagaaaaataattttgattagttaagtttttaatcgact

SEQ ID NO: 38678 - DNA, 600 bp, Chicken  19866894270048_1
ggttggtgaccctgcacacagcagggggttgaaactggatgatcattatggtccttttcaacccaggccattctgtgacagtgacaatcataaagagtcagggagacagcaagacagagctgaagagaatgagcagagcctcgctgtgttgcttgctgtgcttctgcaaggtgcttgtgctccctgacagcaaaggtgacacaaaaacctttgcacgatagagtaatagaacagggctcagtgggccagttttgttcagtccttcctgatggggcgactccagtgcttaggatggagagscaacagtgcccatcatttctgggtgctttgttaagaactctcctgcacagaagttggaaaccacccatcagctcagctctccttaatcaccattcccagttctggtcaccaggtaaagccagggtgggagcacgataaatgtaaaccctttgacttgaaagcaaaagtgagcgctgcagagagctgtttgcttttcattattcacactcttcaggctctggcaaattgcttttcctccgaccatacttcactctaattttttcaagctgaactggtttggatagaataaatatctgctct

SEQ ID NO: 38679 - DNA, 600 bp, Chicken  19866894270050_1
agcctgtgctcattcacacacttcaaaactccactctctgtttggctttaggctggggaataagacctcctgtcactggataagctgtgtttgaagctctatgggagtcaagagctgtgctgtaggaattgaacggcagtaaggcacagaggcagggagttagtctttcatatcagcaaaaaagaaaaaaagaaacagaaatggcaaagacagagcataatcactgcagatatcactgtacagctgtgaagcacctggctttaggagcatctgagagcaacagaaatagcaggaagctgygaactcccattgttctctattaccagatctcgctcctgcctgccctgctatgcacaaagctgcaggcacacgcctgggggttttaaacacatacatctcggttgtcttgaaggggacagaatataagggccacaggcagctgggtttaataagtgtgcaaataggaaacttaaaaggaggaagctactgactatgctgtataaagtgctcaacaagaagacggaccaatgccytttaaattcaataatgttgctcctcctttttktaacagcaggtttagtttagtgccctgccttgccc

SEQ ID NO: 38680 - DNA, 600 bp, Chicken  19866894270050_2
cactgtacagctgtgaagcacctggctttaggagcatctgagagcaacagaaatagcaggaagctgygaactcccattgttctctattaccagatctcgctcctgcctgccctgctatgcacaaagctgcaggcacacgcctgggggttttaaacacatacatctcggttgtcttgaaggggacagaatataagggccacaggcagctgggtttaataagtgtgcaaataggaaacttaaaaggaggaagctactgactatgctgtataaagtgctcaacaagaagacggaccaatgccytttaaattcaataatgttgctcctcctttttktaacagcaggtttagtttagtgccctgccttgcccagggcaccgtgtgctcacagtaccccagcactggggcacagcgcagcaggacacagtggggcacagcaacttgcaagctacaggactgtgaattctgcctcctacaaggtcaagccaccaaaaaaaaaaccaaaaaaaaaaaacaaaaacaaaaaaaaacccttctatccatttctgacagcgtgtcaaaactgtttcacctactttaggaaaatgtcagcgccactcaccag

SEQ ID NO: 38681 - DNA, 600 bp, Chicken  19866894270050_3
agcatctgagagcaacagaaatagcaggaagctgygaactcccattgttctctattaccagatctcgctcctgcctgccctgctatgcacaaagctgcaggcacacgcctgggggttttaaacacatacatctcggttgtcttgaaggggacagaatataagggccacaggcagctgggtttaataagtgtgcaaataggaaacttaaaaggaggaagctactgactatgctgtataaagtgctcaacaagaagacggaccaatgccytttaaattcaataatgttgctcctcctttttktaacagcaggtttagtttagtgccctgccttgcccagggcaccgtgtgctcacagtaccccagcactggggcacagcgcagcaggacacagtggggcacagcaacttgcaagctacaggactgtgaattctgcctcctacaaggtcaagccaccaaaaaaaaaaccaaaaaaaaaaaacaaaaacaaaaaaaaacccttctatccatttctgacagcgtgtcaaaactgtttcacctactttaggaaaatgtcagcgccactcaccagtagcaaagccatgcagagctctttgtggcata

SEQ ID NO: 38682 - DNA, 496 bp, Chicken  19866894270050_4
ctacaaggtcaagccaccaaaaaaaaaaccaaaaaaaaaaaacaaaaacaaaaaaaaacccttctatccatttctgacagcgtgtcaaaactgtttcacctactttaggaaaatgtcagcgccactcaccagtagcaaagccatgcagagctctttgtggcataggtaatgctgctttccctgagccaacaaactgttgtcgtcactggagtgtgactctgcaaacacaggctgtctcatgagtggaggtgtatgaagccaagcgtgtggggggtgctgctgcccacccacaggctgctrtggggctggatggggtgtcccaggctggcagctcccagccctgccccatcgcagaatggatggggcatttctcccacttgtttccttcctctgactccagcaggaggtttaaggctcagtgagaaagagctatgaactagaaaatacacgaatattttcaaggagcggaggtattttgggcatcagtgtctttcat

SEQ ID NO: 38683 - DNA, 600 bp, Chicken  19866894270051_1
aaaataatttactacataagatatcagaatgcaagataacacactataatacaatataattcaatatagttggaattggagctaataaataaaatgagagagagtatctgaaaactgaagctcttactctaatgctgaggtgagatgtgtgcttggggcaagaagaagggaagagagcctggtgctgtaactttgccaggaattttatctcttctcggaacacaaagtcctctgacgtatgtagttcttcttctcttctgggacaggtatctgggactggagcattaactctttaacttyyggtgcactacacaatgttatgatgtggaatactgataaccaaaaatcataaaaccatgacagttactcatatagttctcccagtgaaaggtcaaggggttggaagtacagacagaacttctggctgagtactctaaatgcagctactgtgcaggttctatgagatcacattgttagaaaatgtcttgtgttatggtaactcaaaaacattatcattgccctgtgatatcttcatttcaaggactttcaaaataccaaagcaaaatgcgatctgctctgctcagtttctgcctttcaaga

SEQ ID NO: 38684 - DNA, 600 bp, Chicken  19866894270051_2
aaataatttactacataagatatcagaatgcaagataacacactataatacaatataattcaatatagttggaattggagctaataaataaaatgagagagagtatctgaaaactgaagctcttactctaatgctgaggtgagatgtgtgcttggggcaagaagaagggaagagagcctggtgctgtaactttgccaggaattttatctcttctcggaacacaaagtcctctgacgtatgtagttcttcttctcttctgggacaggtatctgggactggagcattaactctttaacttyyggtgcactacacaatgttatgatgtggaatactgataaccaaaaatcataaaaccatgacagttactcatatagttctcccagtgaaaggtcaaggggttggaagtacagacagaacttctggctgagtactctaaatgcagctactgtgcaggttctatgagatcacattgttagaaaatgtcttgtgttatggtaactcaaaaacattatcattgccctgtgatatcttcatttcaaggactttcaaaataccaaagcaaaatgcgatctgctctgctcagtttctgcctttcaagat

SEQ ID NO: 38685 - DNA, 600 bp, Chicken  19866894270051_3
gttcagagcaagaagcacagccaatttctgtgtgtgtatattacaatagctacttgaaaagccattaatctatatgcagctgtcctctccattttttccactgtaggaggtgtgacatactgaagacagaataatttttaatatcataaagggcagaagagtgctttattgtgttcattttttatgcttagttttgattttgcctatattcagtgctctgaaatttgcatgagagctaatgtcactgctgctgaccccgctcccttccataaacgtttctgggaatggtcgagcttctayagctattcagtattsacwgctgagatttgtgattaaacatgcccttttttagttagatgctcagaaagctatctctgaaggcagaaggcataaaatatctgtatttctgtacttcatggaaaaatacaaagtactgtcatcaaaatatggatagtgtctgtgcaggcaagtgtgtgtgtatctgcagtatgggtgtatttggtacatataaacagacgcactagcaaaaacaaggttttcatttctaattgtagtgctcaacaaggaataacaagattttaggaaaacatttcagtttaa

SEQ ID NO: 38686 - DNA, 600 bp, Chicken  19866894270051_4
cacagccaatttctgtgtgtgtatattacaatagctacttgaaaagccattaatctatatgcagctgtcctctccattttttccactgtaggaggtgtgacatactgaagacagaataatttttaatatcataaagggcagaagagtgctttattgtgttcattttttatgcttagttttgattttgcctatattcagtgctctgaaatttgcatgagagctaatgtcactgctgctgaccccgctcccttccataaacgtttctgggaatggtcgagcttctayagctattcagtattsacwgctgagatttgtgattaaacatgcccttttttagttagatgctcagaaagctatctctgaaggcagaaggcataaaatatctgtatttctgtacttcatggaaaaatacaaagtactgtcatcaaaatatggatagtgtctgtgcaggcaagtgtgtgtgtatctgcagtatgggtgtatttggtacatataaacagacgcactagcaaaaacaaggttttcatttctaattgtagtgctcaacaaggaataacaagattttaggaaaacatttcagtttaaatagtcataacagtt

SEQ ID NO: 38687 - DNA, 600 bp, Chicken  19866894270051_5
agccaatttctgtgtgtgtatattacaatagctacttgaaaagccattaatctatatgcagctgtcctctccattttttccactgtaggaggtgtgacatactgaagacagaataatttttaatatcataaagggcagaagagtgctttattgtgttcattttttatgcttagttttgattttgcctatattcagtgctctgaaatttgcatgagagctaatgtcactgctgctgaccccgctcccttccataaacgtttctgggaatggtcgagcttctayagctattcagtattsacwgctgagatttgtgattaaacatgcccttttttagttagatgctcagaaagctatctctgaaggcagaaggcataaaatatctgtatttctgtacttcatggaaaaatacaaagtactgtcatcaaaatatggatagtgtctgtgcaggcaagtgtgtgtgtatctgcagtatgggtgtatttggtacatataaacagacgcactagcaaaaacaaggttttcatttctaattgtagtgctcaacaaggaataacaagattttaggaaaacatttcagtttaaatagtcataacagttacg

SEQ ID NO: 38688 - DNA, 600 bp, Chicken  19866894270054_1
ttcttcatgtcttaattgccaaaaataaagacgcttttcaagtagcatttccagggtgacttttatcagcaatatggttactaaagttatgtttaccgatgttggtgtatcttaactgccgttttcatttgcctctgtattcccaggcagaaaataacaatatatttccaaaacttataaccaaatactgctttcagttgtgttttctcatttcaaagtagctactcacttcctgaatagttattctggaaatactttaaagtaattgagaacagaggatggccaaagtttccatgtttstatatttgaattgtctgattttcatttctagtagttggcagatgctccttctagcaatctgacacaaatctatgaagttgaacccacwaagttgttgtactgaataaacaacagacacaattaaatgaatggtatttttccagagcagttccatcacttygatgaggtaatgctctgacaacaaataccgtctttagaacatgatgagattttatattatgccctttgtaaagatgtgcttaaaatttagcaacrctatctagcaaccgaaaagagtaattacagctttctccttctcat

SEQ ID NO: 38689 - DNA, 600 bp, Chicken  19866894270054_2
atgtttaccgatgttggtgtatcttaactgccgttttcatttgcctctgtattcccaggcagaaaataacaatatatttccaaaacttataaccaaatactgctttcagttgtgttttctcatttcaaagtagctactcacttcctgaatagttattctggaaatactttaaagtaattgagaacagaggatggccaaagtttccatgtttstatatttgaattgtctgattttcatttctagtagttggcagatgctccttctagcaatctgacacaaatctatgaagttgaacccacwaagttgttgtactgaataaacaacagacacaattaaatgaatggtatttttccagagcagttccatcacttygatgaggtaatgctctgacaacaaataccgtctttagaacatgatgagattttatattatgccctttgtaaagatgtgcttaaaatttagcaacrctatctagcaaccgaaaagagtaattacagctttctccttctcatacgttgtgaattcatttaacagaataaacacaaggatatcccttatgttttatgatggcttgttcttctgcctttttttcacgcagag

SEQ ID NO: 38690 - DNA, 600 bp, Chicken  19866894270054_3
tatatttccaaaacttataaccaaatactgctttcagttgtgttttctcatttcaaagtagctactcacttcctgaatagttattctggaaatactttaaagtaattgagaacagaggatggccaaagtttccatgtttstatatttgaattgtctgattttcatttctagtagttggcagatgctccttctagcaatctgacacaaatctatgaagttgaacccacwaagttgttgtactgaataaacaacagacacaattaaatgaatggtatttttccagagcagttccatcacttygatgaggtaatgctctgacaacaaataccgtctttagaacatgatgagattttatattatgccctttgtaaagatgtgcttaaaatttagcaacrctatctagcaaccgaaaagagtaattacagctttctccttctcatacgttgtgaattcatttaacagaataaacacaaggatatcccttatgttttatgatggcttgttcttctgcctttttttcacgcagagggacaaccataccttacataggatcccagcagaaaaaaacctagaaattcccggaagccctgccatctgttg

SEQ ID NO: 38691 - DNA, 600 bp, Chicken  19866894270054_4
tttaaagtaattgagaacagaggatggccaaagtttccatgtttstatatttgaattgtctgattttcatttctagtagttggcagatgctccttctagcaatctgacacaaatctatgaagttgaacccacwaagttgttgtactgaataaacaacagacacaattaaatgaatggtatttttccagagcagttccatcacttygatgaggtaatgctctgacaacaaataccgtctttagaacatgatgagattttatattatgccctttgtaaagatgtgcttaaaatttagcaacrctatctagcaaccgaaaagagtaattacagctttctccttctcatacgttgtgaattcatttaacagaataaacacaaggatatcccttatgttttatgatggcttgttcttctgcctttttttcacgcagagggacaaccataccttacataggatcccagcagaaaaaaacctagaaattcccggaagccctgccatctgttggagcatagcaggatgggagctctcaaatatgtaggagttattggtccatcacctcttctacactttctgtaaagaacagaagataacacacagcc

SEQ ID NO: 38692 - DNA, 600 bp, Chicken  19866894270056_1
gactagatctagtcactttcttctctcatatgcccagagaagtcttccaggaggactagcacagtgatattcccaaggttgaccaacccattactccctggaatgtcctcttggttttttttaaatatgggtgcaaaatttcccttgtttgaataatcagggattctgctttgcccaatatctccatgatctttcaaagataacagatactgtagagagatcgactagctcactcagcactctcatgcagcccctcagttcctgtgggttttgtgtgcctcagattcttccaagtaaccycaaacacaactgcacctgctgctggcacttttccactttcactaagtacagaagcttgggagacattgtcagtgaggcaaaggtaacattaaatacctcagactcatctgtgtctactgtcactaaatcaaccatcccatgagcctgtgtttgtctttttcagccttttacctttaatgtagtgattaataagctctwcttcttattatcctttgatgtcccttgagagtctcaataccaattcagactgtttgtacctctatcaagaactcaccacgaaattcatccagaaagagaact

SEQ ID NO: 38693 - DNA, 600 bp, Chicken  19866894270056_2
gataacagatactgtagagagatcgactagctcactcagcactctcatgcagcccctcagttcctgtgggttttgtgtgcctcagattcttccaagtaaccycaaacacaactgcacctgctgctggcacttttccactttcactaagtacagaagcttgggagacattgtcagtgaggcaaaggtaacattaaatacctcagactcatctgtgtctactgtcactaaatcaaccatcccatgagcctgtgtttgtctttttcagccttttacctttaatgtagtgattaataagctctwcttcttattatcctttgatgtcccttgagagtctcaataccaattcagactgtttgtacctctatcaagaactcaccacgaaattcatccagaaagagaactcttcctgtggtccttctgtgatgttacccttttagcagacaccagaaagctgaagttcccaaggagaactgcaatctatgtaggccactctgaaagtgatgcttcaatttatttccatggaagctacaacagttacaaagagcacaggaacactatctgatagagaaaattctcagctacaaaacactgtttttcagc

SEQ ID NO: 38694 - DNA, 600 bp, Chicken  19866894270064_1
tgagagaattgatgtgaaaaataaaattattacttaaagaaaataaaggaaaacaagaaacatatctactttctgtaagataggaggaagactaaaattaacagcacccactttttacctgagtgatgatgtcgtatgcccccttttgcctcaaagaagatggcaatttggccctcctctaggatgtttgttacatttgatgttagcaattttacaacttatcataagcatggtattgataaagtctacttactcttatggcattgttgtttgtaattcataaatatttccatggcaatmgaattattgatgtttattgaacctataactatttccacatcttatctgctgctatattattaatgttctcaccctgaatcagctttctattttccctaattgctgctgttattaattggtactacagccttaatacctgtaacatgtatgttccttcctgttaatatccagactgtttatacatatgcatatayttgtattattaaccatagagtttttgttagtgctgatwtgtgttcatttgtaatacactgaaacctttaataaacagtctttgtgtcattgtgtatcacagaatac

SEQ ID NO: 38695 - DNA, 600 bp, Chicken  19866894270064_2
atttgatgttagcaattttacaacttatcataagcatggtattgataaagtctacttactcttatggcattgttgtttgtaattcataaatatttccatggcaatmgaattattgatgtttattgaacctataactatttccacatcttatctgctgctatattattaatgttctcaccctgaatcagctttctattttccctaattgctgctgttattaattggtactacagccttaatacctgtaacatgtatgttccttcctgttaatatccagactgtttatacatatgcatatayttgtattattaaccatagagtttttgttagtgctgatwtgtgttcatttgtaatacactgaaacctttaataaacagtctttgtgtcattgtgtatcacagaatactacaaactcactgtttctatcactatacacacatgagctgggtagattccccttggcttttccattttgatattgctaaatggagcttgtagaatattcaaggaaaatagaaggcaattagataagacctaaacctttcaagagtaatggccgaaggtgggtataaaactttactacgactaaaatagttctag

SEQ ID NO: 38696 - DNA, 600 bp, Chicken  19866894270064_3
gtattgataaagtctacttactcttatggcattgttgtttgtaattcataaatatttccatggcaatmgaattattgatgtttattgaacctataactatttccacatcttatctgctgctatattattaatgttctcaccctgaatcagctttctattttccctaattgctgctgttattaattggtactacagccttaatacctgtaacatgtatgttccttcctgttaatatccagactgtttatacatatgcatatayttgtattattaaccatagagtttttgttagtgctgatwtgtgttcatttgtaatacactgaaacctttaataaacagtctttgtgtcattgtgtatcacagaatactacaaactcactgtttctatcactatacacacatgagctgggtagattccccttggcttttccattttgatattgctaaatggagcttgtagaatattcaaggaaaatagaaggcaattagataagacctaaacctttcaagagtaatggccgaaggtgggtataaaactttactacgactaaaatagttctagacttccatgtttgaaatcacagagtctttctatgaata

SEQ ID NO: 38697 - DNA, 599 bp, Chicken  19866894270073_1
  misc_feature (1)..(189): n is any nucleotide
nnnnnnnnnnnnnnnnnnnnnnnnnnnnnnnnnnnnnnnnnnnnnnnnnnnnnnnnnnnnnnnnnnnnnnnnnnnnnnnnnnnnnnnnnnnnnnnnnnnnnnnnnnnnnnnnnnnnnnnnnnnnnnnnnnnnnnnnnnnnnnnnnnnnnnnnnnnnnnnnnnnnnnnnnnnnnnnnnnnnnnnnnnnnnaccaggcacagctagggctgggggagaagaccaggaaataatgaaggcaaattgtgcccagcaaccgctgtcacccaaacacacatcaacttttgtaggacgcaaacaagyatggctttgaggctcagccattcctcaaacacaaacattcctcaaatacatctgtaaattcagcatcttaattatgaataacaacaaaaagatcaatatgctgcggggaaaccgtcaactgtgggcatcacccagtgttcaacaagctcttattgacgtcactaagcccaggtttctgtttgagcaatgcagtcttctcctcgaataaaagccaaaccactgaatttgggcaatatttccattgtagctcagattctcaaaaatattagtaggttcagggcaaaaatgacatttttttg

SEQ ID NO: 38698 - DNA, 591 bp, Chicken  19866894270073_2
tgcagtcttctcctcgaataaaagccaaaccactgaatttgggcaatatttccattgtagctcagattctcaaaaatattagtaggttcagggcaaaaatgacatttttttgcaaggactgcaagatgagtttggcacagattgcagagatgggagatataagttacaaactaaaatggctcctctgagggagctccaacagaagtgcaactggaggtgataattaaccaaagcctatcaacccaattgctgggagcttcataagagaggttcacgtgttacaacacacctaccacttcrcttgggtgtttcttttatcaccatctttttgccaaagyagcctggggacttagaagacactgagagcacagaaagtgctttcaagtaatgcctgtctgaacgcagatcattcctcctggattcaggtgaaaacaaagatgttttaaataatatttgcatcttataaaggctgccttcatgcctatgcacaccaaggcagcaaatggaggctttgacaagagaagtaattgtacagaagtagtgttgagaatagaagaggtagaaaagcacagagtatgcacgatataaaat

SEQ ID NO: 38699 - DNA, 553 bp, Chicken  19866894270073_3
ttgggcaatatttccattgtagctcagattctcaaaaatattagtaggttcagggcaaaaatgacatttttttgcaaggactgcaagatgagtttggcacagattgcagagatgggagatataagttacaaactaaaatggctcctctgagggagctccaacagaagtgcaactggaggtgataattaaccaaagcctatcaacccaattgctgggagcttcataagagaggttcacgtgttacaacacacctaccacttcrcttgggtgtttcttttatcaccatctttttgccaaagyagcctggggacttagaagacactgagagcacagaaagtgctttcaagtaatgcctgtctgaacgcagatcattcctcctggattcaggtgaaaacaaagatgttttaaataatatttgcatcttataaaggctgccttcatgcctatgcacaccaaggcagcaaatggaggctttgacaagagaagtaattgtacagaagtagtgttgagaatagaagaggtagaaaagcacagagtatgcacgatataaaat

SEQ ID NO: 38700 - DNA, 600 bp, Chicken  19866894270077_1
cagcagtgtttactcagattttcatttcgcttccatcatgcagctaacatccctcactccaaaaaaaattccaaagcacttctaaagttgctgttggttgtaccaatccataactgaaatacagccaccaagcaaataaatatttagctttcacaaatggagagcacttagtaagtctgagtgatttacaagaggacattatgtctccctgaataatccagttggaaatgacttgtttaataagacatcaattcagcagtacaacttgtactaggatttagacatccttcccctgcatgytccacgttttgcaaagcaaccagtttgttaacacattatcagccatttatgagagtactcgtcaacagtttcctgccatttttacaaaatcctcaagtgtctgggatagaaaaaactctcctttggtaaacatacaactaagtgcaaatcttggagctggaagactagccagataaatctctgtggaacagcatgaagctggcaatgctcctacttgaggctaaattctaaagagcaatttgcatktgaatgcaagatgtagctaacagatcctctactatttattgtgagatcccatgc

SEQ ID NO: 38701 - DNA, 600 bp, Chicken  19866894270077_2
atcaattcagcagtacaacttgtactaggatttagacatccttcccctgcatgytccacgttttgcaaagcaaccagtttgttaacacattatcagccatttatgagagtactcgtcaacagtttcctgccatttttacaaaatcctcaagtgtctgggatagaaaaaactctcctttggtaaacatacaactaagtgcaaatcttggagctggaagactagccagataaatctctgtggaacagcatgaagctggcaatgctcctacttgaggctaaattctaaagagcaatttgcatktgaatgcaagatgtagctaacagatcctctactatttattgtgagatcccatgctttaaatttctcagttaaatcttagatgctttcctaagccaggtcctagcatttaattatggagaaacaaagcacacttaatttcatcatgccgactgaaacatttccatgcaaaaaaaaccagaatgacagaaacagcttaccttggctgcatagattgagtcgatgaagaatctaaagttgactgagtttcctgggcactgccttctgtgcactgaaccggtaaggactcagttatactactga

SEQ ID NO: 38702 - DNA, 600 bp, Chicken  19866894270082_1
tctcacattactcgacattaaagcggttcgctttacattttagtgcttcacttaaaagcagggcagtgctcacggagtgctgtgatccctcccctctgtctggaggtgttcctttggggaagtgaagcctgcagcagctttgcagcctgaggttaaccctctggtgcagtctgtgtgtgggacagatggttggagcagggctgggggggtctgcatgcattgggagctctgcgtgggtgcagcccctacgctgtttggtggtgctgccttatgctgttgtatgggaactgttgaatcacrgcctgaacctctgattgaccacctgaggygagtgctgagtcagctgcaggggcacaggtgaacgcaatctcacctgagtgacctcctagaccccatttaagggctgactcccaaggaggaaggatctctatctggagatcactcctcttggagcccttctgtgagcccaggacacaggtaagctctttatttcattacttctttgtaacatgatgatccctctggttcaatatctgtatacctgtttgttgtacagctgtgttagcagagctgtagagtgggatcactctgcaaacattg

SEQ ID NO: 38703 - DNA, 600 bp, Chicken  19866894270082_2
gctttacattttagtgcttcacttaaaagcagggcagtgctcacggagtgctgtgatccctcccctctgtctggaggtgttcctttggggaagtgaagcctgcagcagctttgcagcctgaggttaaccctctggtgcagtctgtgtgtgggacagatggttggagcagggctgggggggtctgcatgcattgggagctctgcgtgggtgcagcccctacgctgtttggtggtgctgccttatgctgttgtatgggaactgttgaatcacrgcctgaacctctgattgaccacctgaggygagtgctgagtcagctgcaggggcacaggtgaacgcaatctcacctgagtgacctcctagaccccatttaagggctgactcccaaggaggaaggatctctatctggagatcactcctcttggagcccttctgtgagcccaggacacaggtaagctctttatttcattacttctttgtaacatgatgatccctctggttcaatatctgtatacctgtttgttgtacagctgtgttagcagagctgtagagtgggatcactctgcaaacattgcagggcccaaagctggataggtctgcata

SEQ ID NO: 38704 - DNA, 599 bp, Chicken  19866894270088_1
  misc_feature (1)..(196): n is any nucleotide
nnnnnnnnnnnnnnnnnnnnnnnnnnnnnnnnnnnnnnnnnnnnnnnnnnnnnnnnnnnnnnnnnnnnnnnnnnnnnnnnnnnnnnnnnnnnnnnnnnnnnnnnnnnnnnnnnnnnnnnnnnnnnnnnnnnnnnnnnnnnnnnnnnnnnnnnnnnnnnnnnnnnnnnnnnnnnnnnnnnnnnnnnnnnnnnnnnnngtggatatcctatccttctgctgcccacacacgcattgctttgctggggaagcagcagagtttggggctgtggggctgcggagacccccccccaaaacacagcygagagcctggaggggtgaattctaaatgcagagtgtttgtgttacgtgtgagcagtgattcacgatgactggcgttcaatggggggaatctctgccgctgtgtgctccccccttccttacgtggttctccgtagtgttttacacgtaatgtgtgactgctcggatgacgatgcgctcaacgagtgacgtattgccagaaagcctttccagtcagaaacctgcaggcacagcataattcccttcgtttgtgcggtatcgcgtgctgctggaattaaggattccggtcaggaggctgtggg

SEQ ID NO: 38705 - DNA, 600 bp, Chicken  19866894270089_1
ccagtggtgccctccctggtgagctctgtcctgccccatgctgcagcagtgtcttgatgctgcctgttggtgcgatctgggcatggctccagctatgagctccacatctgtaactgccccttcctatggcaggcagccacgagctccacgcctggcagagttaggagcttcatggactgatcctgtgcaccgggccagaaggtgaggagagtgtttgcacaggagaagtgcagcatggggaggagcaaccacccctacaagccctgatggggagataaggggttgtgtgagcctgtgcargcactgcgcagagcrcagagggccttgtgtgagtccatggacaagaaacgtttgtccagctgaagcgaagcccacctgctcatgcacctcatgggtgatttccccagcctggcagctgccagtttttgcctgygggctctgtctgtgtgctgccaatcccagtcagggctgccaccaggatggcagggacatggcaagacactgtggaaagcagctttggaggagcatggtaggctcctgatccatggtgaggttgagcagaagctgggagcaagccatgctctccagcccagatttaga

SEQ ID NO: 38706 - DNA, 600 bp, Chicken  19866894270089_2
ctggtgagctctgtcctgccccatgctgcagcagtgtcttgatgctgcctgttggtgcgatctgggcatggctccagctatgagctccacatctgtaactgccccttcctatggcaggcagccacgagctccacgcctggcagagttaggagcttcatggactgatcctgtgcaccgggccagaaggtgaggagagtgtttgcacaggagaagtgcagcatggggaggagcaaccacccctacaagccctgatggggagataaggggttgtgtgagcctgtgcargcactgcgcagagcrcagagggccttgtgtgagtccatggacaagaaacgtttgtccagctgaagcgaagcccacctgctcatgcacctcatgggtgatttccccagcctggcagctgccagtttttgcctgygggctctgtctgtgtgctgccaatcccagtcagggctgccaccaggatggcagggacatggcaagacactgtggaaagcagctttggaggagcatggtaggctcctgatccatggtgaggttgagcagaagctgggagcaagccatgctctccagcccagatttagatttaatcctctgtgt

SEQ ID NO: 38707 - DNA, 559 bp, Chicken  19866894270089_3
cagccacgagctccacgcctggcagagttaggagcttcatggactgatcctgtgcaccgggccagaaggtgaggagagtgtttgcacaggagaagtgcagcatggggaggagcaaccacccctacaagccctgatggggagataaggggttgtgtgagcctgtgcargcactgcgcagagcrcagagggccttgtgtgagtccatggacaagaaacgtttgtccagctgaagcgaagcccacctgctcatgcacctcatgggtgatttccccagcctggcagctgccagtttttgcctgygggctctgtctgtgtgctgccaatcccagtcagggctgccaccaggatggcagggacatggcaagacactgtggaaagcagctttggaggagcatggtaggctcctgatccatggtgaggttgagcagaagctgggagcaagccatgctctccagcccagatttagatttaatcctctgtgtaaacatttccaaataatttattatcaagagagagagggaacattcctccagttgatggtgcctgagaacaacaggct

SEQ ID NO: 38708 - DNA, 600 bp, Chicken  19866894270091_1
tcattttccaacctgctgtgtccttgtatgacatgaaatgaaatgaacttatgtctccatccacttcccatgccgccagcttttccaggcctcacagatcagtgaagaaaattcatccctggacggtactttccccattctcaagccctccagctattgcgcctttaatagctgtggtaagtatttaatattatccagaaaccaatagtgatgcttttattccatacttaaaccttgctgtctgactagcctactcctaaagtatttccttactaaccagattacaaagatagttacttkatttttccaactgacagtgagtatgttgacattttccctgcttagtaacagaagtcacatgagattatctgaagcaggaagcaaatgcatctctatgaagagtgagaacttggcattgttagcgatctggtaacagtcttgtctctattgactgctctcctctgacgtttctacaacagcaacagccctctcggatttctccatttcttttcagatctgatctgtgaacccctttgctccacagctagccattttaatcttttcatcctttctgtgcacacattcattatctcaaaaata

SEQ ID NO: 38709 - DNA, 599 bp, Chicken  19866894270094_1
  misc_feature (1)..(85): n is any nucleotide
nnnnnnnnnnnnnnnnnnnnnnnnnnnnnnnnnnnnnnnnnnnnnnnnnnnnnnnnnnnnnnnnnnnnnnnnnnnnnnnnnnnnntctatagagtgtttgctgatcgatggtgttgaaaactgcgtgaaagacagctgaaacagtttaaatgcttccctgctggtgcttctctgtgtaagcaattgctctaggtgccatgtggatgttagaggtgtgttaatgggagaaagggaagatgttggggagatagtctctattaaattgtgttctccagtgtgaaagaaggattaagcattgcrgagtcggcttgacaggagctaatgctctattccyaastgtgaaaacctaaagtcttgtaaatattgagtgcagccacacagctgtcagaaatactgttattaattagcagctgtttccttgttttgtgacaacaggctgcaaaygagcaaaggctattcaaagagcttcatggatgtgaacttaatagttcaaaactatagcttctctgttgcaaggaacttggattttacttcttctaaattggctaggtcaactgaccctttaccattgtgttgttgcttgagggaattagtagaag

SEQ ID NO: 38710 - DNA, 599 bp, Chicken  19866894270094_2
  misc_feature (1)..(51): n is any nucleotide
nnnnnnnnnnnnnnnnnnnnnnnnnnnnnnnnnnnnnnnnnnnnnnnnnnntctatagagtgtttgctgatcgatggtgttgaaaactgcgtgaaagacagctgaaacagtttaaatgcttccctgctggtgcttctctgtgtaagcaattgctctaggtgccatgtggatgttagaggtgtgttaatgggagaaagggaagatgttggggagatagtctctattaaattgtgttctccagtgtgaaagaaggattaagcattgcrgagtcggcttgacaggagctaatgctctattccyaastgtgaaaacctaaagtcttgtaaatattgagtgcagccacacagctgtcagaaatactgttattaattagcagctgtttccttgttttgtgacaacaggctgcaaaygagcaaaggctattcaaagagcttcatggatgtgaacttaatagttcaaaactatagcttctctgttgcaaggaacttggattttacttcttctaaattggctaggtcaactgaccctttaccattgtgttgttgcttgagggaattagtagaagtgagagatggaaaatacttactacgtacagaatc

SEQ ID NO: 38711 - DNA, 599 bp, Chicken  19866894270094_3
  misc_feature (1)..(48): n is any nucleotide
nnnnnnnnnnnnnnnnnnnnnnnnnnnnnnnnnnnnnnnnnnnnnnnntctatagagtgtttgctgatcgatggtgttgaaaactgcgtgaaagacagctgaaacagtttaaatgcttccctgctggtgcttctctgtgtaagcaattgctctaggtgccatgtggatgttagaggtgtgttaatgggagaaagggaagatgttggggagatagtctctattaaattgtgttctccagtgtgaaagaaggattaagcattgcrgagtcggcttgacaggagctaatgctctattccyaastgtgaaaacctaaagtcttgtaaatattgagtgcagccacacagctgtcagaaatactgttattaattagcagctgtttccttgttttgtgacaacaggctgcaaaygagcaaaggctattcaaagagcttcatggatgtgaacttaatagttcaaaactatagcttctctgttgcaaggaacttggattttacttcttctaaattggctaggtcaactgaccctttaccattgtgttgttgcttgagggaattagtagaagtgagagatggaaaatacttactacgtacagaatctrt

SEQ ID NO: 38712 - DNA, 600 bp, Chicken  19866894270094_4
tttaaatgcttccctgctggtgcttctctgtgtaagcaattgctctaggtgccatgtggatgttagaggtgtgttaatgggagaaagggaagatgttggggagatagtctctattaaattgtgttctccagtgtgaaagaaggattaagcattgcrgagtcggcttgacaggagctaatgctctattccyaastgtgaaaacctaaagtcttgtaaatattgagtgcagccacacagctgtcagaaatactgttattaattagcagctgtttccttgttttgtgacaacaggctgcaaaygagcaaaggctattcaaagagcttcatggatgtgaacttaatagttcaaaactatagcttctctgttgcaaggaacttggattttacttcttctaaattggctaggtcaactgaccctttaccattgtgttgttgcttgagggaattagtagaagtgagagatggaaaatacttactacgtacagaatctrtggcttcccaacctcacccttcgaaatctaacatgggcttaattatttttgaaaggatttcatgcctatgttctctaaatctctttggatttgtttgctaatattgtat

SEQ ID NO: 38713 - DNA, 537 bp, Chicken  19866894270094_5
astgtgaaaacctaaagtcttgtaaatattgagtgcagccacacagctgtcagaaatactgttattaattagcagctgtttccttgttttgtgacaacaggctgcaaaygagcaaaggctattcaaagagcttcatggatgtgaacttaatagttcaaaactatagcttctctgttgcaaggaacttggattttacttcttctaaattggctaggtcaactgaccctttaccattgtgttgttgcttgagggaattagtagaagtgagagatggaaaatacttactacgtacagaatctrtggcttcccaacctcacccttcgaaatctaacatgggcttaattatttttgaaaggatttcatgcctatgttctctaaatctctttggatttgtttgctaatattgtataggagtgaccacagaagttctaagcaaattctaagaaaatattgatgtcctttaattcattctgctaggcctagggtcatttctccacaggattttctttttctcatgtgctaacattctaagaaaaa

SEQ ID NO: 38714 - DNA, 600 bp, Chicken  19866894270100_1
gggcactttgttttatttattttcaattctgtctatttctgtcagccatcaagggatttatttttccaaaaaaaaaaaataataataataattaaaaaatagtcctagatcttgccattcataggagtgtaatttagacgtataagcttagggaagacaagacagcccagctggtaaaagggccagaaggcatgtcctgtgaggaaaggctgaggacactagacctgtctagtttggaaaaaaggagactaagagaggactttgttgctctctgcaactccctgaggggaagtggagagrtcacttctccctgggaatccatgacagaatgggtggggactgcacagggctgcacaagggaacagattcagaacagatattaggaaaccattttctaccatgagggtgatcaaacactgcaacaggcttccaagagaggtggttgatgcctcatgcctgtcagtattcaagtgcaatttggacaatgccttccgtaacatactctaccttttaattatgactgaggtggtcagataggacaaggtagtatttgtaggcgtcttccaactgaattattcaattctacctcctctgtaagta

SEQ ID NO: 38715 - DNA, 599 bp, Chicken  19866894270105_1
  misc_feature (1)..(30): n is any nucleotide
nnnnnnnnnnnnnnnnnnnnnnnnnnnnnnccattccctcttacaatcctcctgtacttcaggggccccctacaccctttgctcctttctgccctccccacaagcaatgtgatctgccatcccatctgtgtcaccatcagaacccagtaccaatgcaacatcaaaaagaagcatggagaaaacaatgacttcataatgaccttacaactttcagggatgccttctactttactgaccttcctgtagaaatcttttccgtatagggaatgtctgtgcatgctctaattgtttctttcagawgctccgtaagctaataatagaataacaattttaaatactgaaaacagcaatcgtctgagacaaaacayggagttgaatttctatctaaatatctcttacagagaaaaaaatctttaaagcctggcattaaaaattcatatttctctgggcactcctttagtgtgatgactacgatgttacattttacaaaatgttaattttccttttcccaagtttcccaaagagaaaggctgttatttcttttaaaataacaggcacattatgacacagcagggtaaaagcaagaaaaaactaaacac

SEQ ID NO: 38716 - DNA, 600 bp, Chicken  19866894270105_2
cctacaccctttgctcctttctgccctccccacaagcaatgtgatctgccatcccatctgtgtcaccatcagaacccagtaccaatgcaacatcaaaaagaagcatggagaaaacaatgacttcataatgaccttacaactttcagggatgccttctactttactgaccttcctgtagaaatcttttccgtatagggaatgtctgtgcatgctctaattgtttctttcagawgctccgtaagctaataatagaataacaattttaaatactgaaaacagcaatcgtctgagacaaaacayggagttgaatttctatctaaatatctcttacagagaaaaaaatctttaaagcctggcattaaaaattcatatttctctgggcactcctttagtgtgatgactacgatgttacattttacaaaatgttaattttccttttcccaagtttcccaaagagaaaggctgttatttcttttaaaataacaggcacattatgacacagcagggtaaaagcaagaaaaaactaaacacattttccttctaaatggcatatttatgctgtacattaaaaaatatattaatgctgcagagcgttttgag

SEQ ID NO: 38717 - DNA, 600 bp, Chicken  19866894270110_1
tattgggtttcctaatatcactgtcattttgttaaggacagaattttagcaatttcttcaatttgagctcatatagcaagggtcttagcaaaaacttgcctactgccatttaataatttagatgtgaatttatgttttcctagtgttgtaatgtatgtctaaatatagcaagttcacctaaatccaagtgatgaacatgtatctgagatacaaaactgagattctctgtcctttggtaactttgatagaaaaatcatatcccaccccacaccctttatctcctgtttctacttttctgtyggatgtggtttctcagtcctgatataccatgtgccaggcctacatattccactctctagtctgatrcaccaacaaaagtatggaatacaaataatttttccttgatgattatcaagagtagatggttttgtggcttaatcttccacatggtattttaaaatatatttttctgagacaccactattaactcttttctttctctttctgttctgaatgttgctgttctgttttatttagcccatgaaaatgagctgcaataaaagactgccctgtggcttatgatttgctcttgctgcttat

SEQ ID NO: 38718 - DNA, 600 bp, Chicken  19866894270110_2
gctcatatagcaagggtcttagcaaaaacttgcctactgccatttaataatttagatgtgaatttatgttttcctagtgttgtaatgtatgtctaaatatagcaagttcacctaaatccaagtgatgaacatgtatctgagatacaaaactgagattctctgtcctttggtaactttgatagaaaaatcatatcccaccccacaccctttatctcctgtttctacttttctgtyggatgtggtttctcagtcctgatataccatgtgccaggcctacatattccactctctagtctgatrcaccaacaaaagtatggaatacaaataatttttccttgatgattatcaagagtagatggttttgtggcttaatcttccacatggtattttaaaatatatttttctgagacaccactattaactcttttctttctctttctgttctgaatgttgctgttctgttttatttagcccatgaaaatgagctgcaataaaagactgccctgtggcttatgatttgctcttgctgcttattccacagcatctcacattttacttatactcagcaaaattcagtttaagcgccccaaatggttttga

SEQ ID NO: 38719 - DNA, 600 bp, Chicken  19866894270110_3
tttttccttgatgattatcaagagtagatggttttgtggcttaatcttccacatggtattttaaaatatatttttctgagacaccactattaactcttttctttctctttctgttctgaatgttgctgttctgttttatttagcccatgaaaatgagctgcaataaaagactgccctgtggcttatgatttgctcttgctgcttattccacagcatctcacattttacttatactcagcaaaattcagtttaagcgccccaaatggttttgatctaagatcagcattcacaatcacagtrcagaaacaaattataatatatatatccaaaccagtttaatgttctttctctctgctgtgagaagtgtggctgcttggcattctcctcccaaccagcgttttgtgatagtgcaagaactgagcagaaatgttgcgctgctgcctgtagtcaaaayatgtaagatcagattccatccagtctcgtttagatcctgaaatagacacccctttcagctgtgactgatattcatagattatgtagtttcatacttggttttctatcactctgtgctcccatgtcatcttcttctctttcccactt

SEQ ID NO: 38720 - DNA, 600 bp, Chicken  19866894270110_4
gagctgcaataaaagactgccctgtggcttatgatttgctcttgctgcttattccacagcatctcacattttacttatactcagcaaaattcagtttaagcgccccaaatggttttgatctaagatcagcattcacaatcacagtrcagaaacaaattataatatatatatccaaaccagtttaatgttctttctctctgctgtgagaagtgtggctgcttggcattctcctcccaaccagcgttttgtgatagtgcaagaactgagcagaaatgttgcgctgctgcctgtagtcaaaayatgtaagatcagattccatccagtctcgtttagatcctgaaatagacacccctttcagctgtgactgatattcatagattatgtagtttcatacttggttttctatcactctgtgctcccatgtcatcttcttctctttcccacttgctcagatgtttccagagtatgaaaacactgcatttttcttcaagaagaatggcattacttcccgtgatattatttcaaaaggaagtttacaatggttgaaatgtttggtatttccacagtaaacattgtcaactttcagtgtgggatcttggg

SEQ ID NO: 38721 - DNA, 599 bp, Chicken  19866894270114_1
  misc_feature (1)..(158): n is any nucleotide
nnnnnnnnnnnnnnnnnnnnnnnnnnnnnnnnnnnnnnnnnnnnnnnnnnnnnnnnnnnnnnnnnnnnnnnnnnnnnnnnnnnnnnnnnnnnnnnnnnnnnnnnnnnnnnnnnnnnnnnnnnnnnnnnnnnnnnnnnnnnnnnnnnnnnnnnnnnnnngtggaggtatgtgctcagtctggagttagctttgggactcggaatgtaaagaacataaatggcaaatggtagctgatatccttgctggaagaggacttttgttggtttacttccctgccttctttcgattcgcgttgaagartcctggtgaatggcataggagctgtaggggtagatctgggtttcaggttgttaagaaatgtgaagcccatagataccaattgttgatattttcaaggccctcaaaaaatagttggaaatgcattatatttgtctgctgctctgctaacatgcttatttcatacttctatcataacacattattaatgttttatcctgttgatttttacagaccttactgtactttgactcctcaaaatctctcctgagttttacaaatttacaggtaaaaaaataacctgaaaayaacccaacattttg

SEQ ID NO: 38722 - DNA, 593 bp, Chicken  19866894270114_2
attcgcgttgaagartcctggtgaatggcataggagctgtaggggtagatctgggtttcaggttgttaagaaatgtgaagcccatagataccaattgttgatattttcaaggccctcaaaaaatagttggaaatgcattatatttgtctgctgctctgctaacatgcttatttcatacttctatcataacacattattaatgttttatcctgttgatttttacagaccttactgtactttgactcctcaaaatctctcctgagttttacaaatttacaggtaaaaaaataacctgaaaayaacccaacattttgatgctggacatatttcagatttatttcagtggcttttgttagagattatttggttcagaaaacatattttagtaaatatgagtaaatagaaaacatatwctcctcaacagtttcattgcaactagaagcaactgtttttcatcctactaaaaaaccaataacatcagttgtttgacctgatttctatctgagctgtctttataggcttatcctaatttagattggagccgaaagaaaaaggtgaacctgaaaattaattaatcattagtaaattttcat

SEQ ID NO: 38723 - DNA, 480 bp, Chicken  19866894270114_3
cctcaaaaaatagttggaaatgcattatatttgtctgctgctctgctaacatgcttatttcatacttctatcataacacattattaatgttttatcctgttgatttttacagaccttactgtactttgactcctcaaaatctctcctgagttttacaaatttacaggtaaaaaaataacctgaaaayaacccaacattttgatgctggacatatttcagatttatttcagtggcttttgttagagattatttggttcagaaaacatattttagtaaatatgagtaaatagaaaacatatwctcctcaacagtttcattgcaactagaagcaactgtttttcatcctactaaaaaaccaataacatcagttgtttgacctgatttctatctgagctgtctttataggcttatcctaatttagattggagccgaaagaaaaaggtgaacctgaaaattaattaatcattagtaaattttcat

SEQ ID NO: 38724 - DNA, 600 bp, Chicken  19866894270116_1
caaaaaaaaaagacaacatttactgcagtgtttagcctaataaaaacaagcctgcttacccttccttatctatagtgagtgctgggtatctttacacaaacaacacactacagacaaacacctccagccccaagtgaggtttgtccgtacgcaccaactcactacccaatacatctggcaagatcaaaatgcattaccaaattgcagtccatcacaagcctgggagctgaaggtatgcttgaggatttgctttattctgatacatcctggtcatgggacagaagggaggcaaatgaaggraggttagagcagaatgatattygaattcattaataaggcccccgggtctcctacacacacaccatgcaagtcgtgttcagttccactgacagaagctgttgctgtaaagcaaagataggttttcccatcacacatgcccactaacacttcgtattgaatgccattactgctgctttttgcacagcgcagccatcagcaggtgggtctgcttgtgacagagcacaccaagaacaaggcaggagtycaagctggggatgcttccacctacagccctgctcaggcaaggaccaagggcatgga

SEQ ID NO: 38725 - DNA, 600 bp, Chicken  19866894270116_2
ctgcagtgtttagcctaataaaaacaagcctgcttacccttccttatctatagtgagtgctgggtatctttacacaaacaacacactacagacaaacacctccagccccaagtgaggtttgtccgtacgcaccaactcactacccaatacatctggcaagatcaaaatgcattaccaaattgcagtccatcacaagcctgggagctgaaggtatgcttgaggatttgctttattctgatacatcctggtcatgggacagaagggaggcaaatgaaggraggttagagcagaatgatattygaattcattaataaggcccccgggtctcctacacacacaccatgcaagtcgtgttcagttccactgacagaagctgttgctgtaaagcaaagataggttttcccatcacacatgcccactaacacttcgtattgaatgccattactgctgctttttgcacagcgcagccatcagcaggtgggtctgcttgtgacagagcacaccaagaacaaggcaggagtycaagctggggatgcttccacctacagccctgctcaggcaaggaccaagggcatggagttgaatatggctctgaacccc

SEQ ID NO: 38726 - DNA, 600 bp, Chicken  19866894270116_3
atttgctttattctgatacatcctggtcatgggacagaagggaggcaaatgaaggraggttagagcagaatgatattygaattcattaataaggcccccgggtctcctacacacacaccatgcaagtcgtgttcagttccactgacagaagctgttgctgtaaagcaaagataggttttcccatcacacatgcccactaacacttcgtattgaatgccattactgctgctttttgcacagcgcagccatcagcaggtgggtctgcttgtgacagagcacaccaagaacaaggcaggagtycaagctggggatgcttccacctacagccctgctcaggcaaggaccaagggcatggagttgaatatggctctgaaccccaagggagacaaggctcctcagccagctctccctcatgacttagctgatgctgaatggctcagcagcgagcaggagggatagcagagcccacaggtacccgacacaaagcaagtgcagcgccccgtggggatcacagcaacactgagagaagaaagcagttataacaagaacaacaaaagcctgcctgtttcttgtgggcagaaattgagtttgggaagctat

SEQ ID NO: 38727 - DNA, 599 bp, Chicken  19866894270118_1
  misc_feature (1)..(67): n is any nucleotide
nnnnnnnnnnnnnnnnnnnnnnnnnnnnnnnnnnnnnnnnnnnnnnnnnnnnnnnnnnnnnnnnnnntgttagaagttggtttcccttctgtttataatgttcctttaaatattggaaagccacaataaaatctcctcagagtcagtcttctccagactgaacttcagctgttctttgtaggatagttgctccagccctctgatcatcctcatggccctctcatgacactctccaaaagctccacatctttcctgaggtaggggtcccagacctgaatgcagtactccagatagggcctytaaagggcagagtagagagggacactcacctcccttactctgctggcatcaggcatttttccaatctccatgctaattcaaattttactgagaatgtctacagtgatacctgtgagctccctcagtgcttttgtatatatacaccataaaggcccatggacttaagaatgtctaatttgcttaagtattctctacttcgatctttgctccaggcttccccatgtcccttagatttttgaagtcaaagatatccctgctatgtttattttccagttttctatttatagcccttctactca

SEQ ID NO: 38728 - DNA, 600 bp, Chicken  19866894270125_1
cttgggcccatctgcactgctgaaagtgttctggacaaaccctgatctttgcttctgaaacccagagatactgatggtgtcggtcccgtgagacttaataatgtgaagtttgtagctttaacttttttgtaccgaattagcaacactggcataaagtgctgacttgaaatgctattttgtaagatctgcccgtttgtatataatagtgttgggtccttagtttatatatgtatgaaatagtaacttttattgcattcctctgagtttgatacaggagattgtgtttgatctttctcaacrtttcttgccttatttgctcaaaggggcaaataaaactgtccttacggaaagcttcggtgtcccggctgttatgtacacacccacagagcagtgacaggaggtgctttgggaccggctgcggggcaatccatcccttcctacacagcaggtgaggttcgagtcgcactcctaatcctggctgcactctcagctctctcagaacgctgacagtgagtgggtgctgccttccagggcgaactgttggcttttacgtggtttccctgagctgttactaaatccgtcccaaagggatgactaact

SEQ ID NO: 38729 - DNA, 600 bp, Chicken  19866894270131_1
aggaggattgttttttgagaaataaccagatgagacttcttaatggtccctgaatatttttgagagaaaagatgatgatatgcgtaagggaagcttttaataagtttgtgttttaaacccttatttttccctctcaggctgtaaacaagtcagagacagtgatgtgtagtgagtgccattaatgcagtaataaaaacatagtaagatcaccttttcatattcatagaccatgttttccatttgctcttggtagcactattacagattgagtggaattggagcactgtatcaaagagttcrgttttcacattacattagtatgtctttattttacaattggacaaaagtatgtttgacattcagttagggaattcttaggaatgttatgtgtgtcttgaaatatttatgttggcagctgggttggcaggggaagggaggagagtggaagagaggacaaattgggatcacttagtatggtgatagatttaagtaacgacagtaatattattttatgacttggagtatgtaagtgataggtaacggtactatgttaacagtactataaagcagtgaaaagagtatggttttgccagaacagtt

SEQ ID NO: 38730 - DNA, 600 bp, Chicken  19866894270141_1
tttgggcagtgggatggaataaaaattttgttaaggttttgtaaaataaggcaacattttttttataaggtgcaataattatgactttggccattgtttgtttgctgtggaaaaaatattttaatgtaataccagaaatttgccttttcttggtgggattttgaaacctgcttgtgtgatgagggagtctcaaaaactggaacacttgtaaatctggtttcatgcttgaatttggctgtactgaagccatgctgtcacatccattcccttctaagacaatcaagttagttaagagaaaakcctgagtggtagagttrcacagcaaaataagcaaaattcccaaatgcttctttattcatatgcctttattctaaatkaagttgtaraatgtgttcctgaatgtcctttggatttgttcatttaatacctgacttcttgtgcgagtcgccatagaaatgagtcttaaaaagagaggaagtgtttctgcaaattagttatgcagctacgggtgttctttttcatggtttgcacttttattccctaatagaaaagagtattgctttttctattcaaaagttcgaaagtggaatttaatctccc

SEQ ID NO: 38731 - DNA, 600 bp, Chicken  19866894270141_2
aataaaaattttgttaaggttttgtaaaataaggcaacattttttttataaggtgcaataattatgactttggccattgtttgtttgctgtggaaaaaatattttaatgtaataccagaaatttgccttttcttggtgggattttgaaacctgcttgtgtgatgagggagtctcaaaaactggaacacttgtaaatctggtttcatgcttgaatttggctgtactgaagccatgctgtcacatccattcccttctaagacaatcaagttagttaagagaaaakcctgagtggtagagttrcacagcaaaataagcaaaattcccaaatgcttctttattcatatgcctttattctaaatkaagttgtaraatgtgttcctgaatgtcctttggatttgttcatttaatacctgacttcttgtgcgagtcgccatagaaatgagtcttaaaaagagaggaagtgtttctgcaaattagttatgcagctacgggtgttctttttcatggtttgcacttttattccctaatagaaaagagtattgctttttctattcaaaagttcgaaagtggaatttaatctcccaytgtaattacttagca

SEQ ID NO: 38732 - DNA, 600 bp, Chicken  19866894270141_3
attatgactttggccattgtttgtttgctgtggaaaaaatattttaatgtaataccagaaatttgccttttcttggtgggattttgaaacctgcttgtgtgatgagggagtctcaaaaactggaacacttgtaaatctggtttcatgcttgaatttggctgtactgaagccatgctgtcacatccattcccttctaagacaatcaagttagttaagagaaaakcctgagtggtagagttrcacagcaaaataagcaaaattcccaaatgcttctttattcatatgcctttattctaaatkaagttgtaraatgtgttcctgaatgtcctttggatttgttcatttaatacctgacttcttgtgcgagtcgccatagaaatgagtcttaaaaagagaggaagtgtttctgcaaattagttatgcagctacgggtgttctttttcatggtttgcacttttattccctaatagaaaagagtattgctttttctattcaaaagttcgaaagtggaatttaatctcccaytgtaattacttagcatgagatatttttttagaataaggatattgactgtccaaatacaaatcctcaaagagtctt

SEQ ID NO: 38733 - DNA, 600 bp, Chicken  19866894270141_4
ttggccattgtttgtttgctgtggaaaaaatattttaatgtaataccagaaatttgccttttcttggtgggattttgaaacctgcttgtgtgatgagggagtctcaaaaactggaacacttgtaaatctggtttcatgcttgaatttggctgtactgaagccatgctgtcacatccattcccttctaagacaatcaagttagttaagagaaaakcctgagtggtagagttrcacagcaaaataagcaaaattcccaaatgcttctttattcatatgcctttattctaaatkaagttgtaraatgtgttcctgaatgtcctttggatttgttcatttaatacctgacttcttgtgcgagtcgccatagaaatgagtcttaaaaagagaggaagtgtttctgcaaattagttatgcagctacgggtgttctttttcatggtttgcacttttattccctaatagaaaagagtattgctttttctattcaaaagttcgaaagtggaatttaatctcccaytgtaattacttagcatgagatatttttttagaataaggatattgactgtccaaatacaaatcctcaaagagtcttctggaagtt

SEQ ID NO: 38734 - DNA, 527 bp, Chicken  19866894270141_5
tgagtggtagagttrcacagcaaaataagcaaaattcccaaatgcttctttattcatatgcctttattctaaatkaagttgtaraatgtgttcctgaatgtcctttggatttgttcatttaatacctgacttcttgtgcgagtcgccatagaaatgagtcttaaaaagagaggaagtgtttctgcaaattagttatgcagctacgggtgttctttttcatggtttgcacttttattccctaatagaaaagagtattgctttttctattcaaaagttcgaaagtggaatttaatctcccaytgtaattacttagcatgagatatttttttagaataaggatattgactgtccaaatacaaatcctcaaagagtcttctggaagtttcaggtgatggtgttgattaaagcttttatatttatgaataaaagtagtagagtaatgaaatgtatgttacccatataattagaagtgatattgtttcagagtccaaaaatcgactacttaaacattttggcccttctgattt

SEQ ID NO: 38735 - DNA, 600 bp, Chicken  19866894270147_1
ttataggctccctttaggtactgaaaggccgcaatgaggtcaccctgcagccttctcttctccaggctgaataagcccaactccctcagcctgtcctcgcaggggaggtgctccagccccctgatcgtctttgtggccctcctctggaccctcttcagcagctctctatctttcttgtactgggagctccatacctggacacagtactccagatggggcctcacaagagcagagtggagagggacaatcacctccctgtccctgctggccactcctctcatgatggagcccaggataccrtttgctttctgagctgcaagagcacactgctggctcatgttaagtttgtcatccatcaggacccccaggtccttctctgyagagctgctctcaaggactgctccttccagtctgtatagaggcctggggttcctccagcccaagtgcaaaaccctgcactttgccgtgttgaacctcattaggttcacccgggcccacctttcaagtctgtcaaggtccctctgaatggcatcccttccttcctccgtgtcaaccgcaccactcagtttggtgtcgtcagcaaatctgctgagtggtgca

SEQ ID NO: 38736 - DNA, 600 bp, Chicken  19866894270147_2
ctccctcagcctgtcctcgcaggggaggtgctccagccccctgatcgtctttgtggccctcctctggaccctcttcagcagctctctatctttcttgtactgggagctccatacctggacacagtactccagatggggcctcacaagagcagagtggagagggacaatcacctccctgtccctgctggccactcctctcatgatggagcccaggataccrtttgctttctgagctgcaagagcacactgctggctcatgttaagtttgtcatccatcaggacccccaggtccttctctgyagagctgctctcaaggactgctccttccagtctgtatagaggcctggggttcctccagcccaagtgcaaaaccctgcactttgccgtgttgaacctcattaggttcacccgggcccacctttcaagtctgtcaaggtccctctgaatggcatcccttccttcctccgtgtcaaccgcaccactcagtttggtgtcgtcagcaaatctgctgagtggtgcactcgattccatcgttcgatgtcattgataaagatgttaaagagcaccggtcccaagacagacctctgggagactccgctc

SEQ ID NO: 38737 - DNA, 501 bp, Chicken  19866894270151_1
taacttggatgattttgcccaaagcagattaagaagtgctcgcacagattgctccactgggaaacctgtggatggccatgagcagtcaagagcacgcacctcttccaccagcactgcagaatccagacaagggcatcaatctaaggcttaaatccagtcttctagagagtagaaaggcaggtcattggttaactcttcagtgtcccagccttccaggaaattaaggtcattttccagtttgggggagtgaggaagaggagaggagcatcccctcaatgtgaccagaaaacctctctcttygatgcactctcttcccccttgtccctcagtaggcatgcaaatatctaccttccttatttagggttatatcaatttcccatttgaaaaaaatctctgtttgaaaaacactaacaaattcataggccattaagagcagcagatatttgcctcaagattgttcagtttcactttctttttcagccgtcaaaattggcaggaaat

SEQ ID NO: 38738 - DNA, 599 bp, Chicken  19866894270154_1
  misc_feature (1)..(41): n is any nucleotide
nnnnnnnnnnnnnnnnnnnnnnnnnnnnnnnnnnnnnnnnncagactccttcaaattccagtaatgctcgcaacatttcatttaatagagacatttttttttttcctgagataagcagcaagacctttaaaaagggagctttatccctgatgtcacattcttggccataaacgcgtacaacatgccagaaacagtcagaacggctcagctggaaagatttatgcatgcacacatgcacacagtgttgcatatgaaaatagtctccacgctcttctagttctccagtagaaactctcaggrtggcacacarcttttgctttcatgatcttctttgaggctgggatcatttgttttgggtgctttcttttctcagcaatagttagaaaaaagtaggtaattttgctcaagcctggcttctcaaaacagaagcagtgtgagaaactggctgacttaaatgtcacttgaagagatggggaaaaaatgagcaaagaaagaaaagcctggaaataaaaggagcagatcaatcccctgacattagtcacccatatgctagtcacgaagggtcatttttagacaggcaagaaacagacacttccaaa

SEQ ID NO: 38739 - DNA, 599 bp, Chicken  19866894270154_2
  misc_feature (1)..(31): n is any nucleotide
nnnnnnnnnnnnnnnnnnnnnnnnnnnnnnncagactccttcaaattccagtaatgctcgcaacatttcatttaatagagacatttttttttttcctgagataagcagcaagacctttaaaaagggagctttatccctgatgtcacattcttggccataaacgcgtacaacatgccagaaacagtcagaacggctcagctggaaagatttatgcatgcacacatgcacacagtgttgcatatgaaaatagtctccacgctcttctagttctccagtagaaactctcaggrtggcacacarcttttgctttcatgatcttctttgaggctgggatcatttgttttgggtgctttcttttctcagcaatagttagaaaaaagtaggtaattttgctcaagcctggcttctcaaaacagaagcagtgtgagaaactggctgacttaaatgtcacttgaagagatggggaaaaaatgagcaaagaaagaaaagcctggaaataaaaggagcagatcaatcccctgacattagtcacccatatgctagtcacgaagggtcatttttagacaggcaagaaacagacacttccaaagctcaattcc

SEQ ID NO: 38740 - DNA, 600 bp, Chicken  19866894270160_1
tagataaatgctgcagcagacaaagaattctggaaaacttgacataaaaatcatttgactttgagggtgggagaagggagatggaaactcaatgaggtaaaatgaaaaaagttggtcttcaatacttactaagccttaaagtactgttgtgaaacatagttctgagagtagaaatttttagtacctttgttcagcttaatcaaattttttctatgtggaataggcacatcaatgcactcttcctcttattcccattctctttcagctttgctcaacatcactacaattcatgccagaaarcataagaatcctctatattttgaagtgttttccccacctcacaaatctgcttgcacagtttctacatcaatatgcataaatgcaaatgagtaaatgaagctatttaaatgacatttattatgtcttaacataaaaacactactttgaagttttgaatgcattctgtgattgcttaaataactgcaagaaactcaaatcaattctacagaaaacaataattcaaacattgtttgaattagtgggtatacaaatatttctaaagaaaatcagaaggtgtattttcaagattattctattata

SEQ ID NO: 38741 - DNA, 600 bp, Chicken  19866894270169_1
gtcctgacacccccagcattgcccactctggccctgcctttcccagccctcagcccctgctcccaccccaggtctgtggcgagaggaaccgctttgagaaactgatggagtatttccgaaacgaggacagcaacatcgacttcatggtgagtggttcacaaggcaggggacccacagcctggggacccgcagcctcctgccttggggacagctcctgtgggcccaccaggcctcttggctgtgtctccagctgtggggctgtccccagtgtgctacgtccccaggagctgttggtccctycccagggtcccaagggctgtcagatggctgtgctgtccccagggcattgtgtttccgaggcagcatgccattctgtgcatgagggcygctgagccaccacggtgtcctcagaccattgtgtccccaagggctgctgagcagctggctttcccagctccccagggcagggaagccaccacaggcaactgtgtccccagggccaccgtgctgtgcccagggctgtgctgagcctgctcccatcccacaggtcgcctgcatgcagttcatcaacatcgtggtgcactcggtggagaacatgaa

SEQ ID NO: 38742 - DNA, 600 bp, Chicken  19866894270169_2
accgctttgagaaactgatggagtatttccgaaacgaggacagcaacatcgacttcatggtgagtggttcacaaggcaggggacccacagcctggggacccgcagcctcctgccttggggacagctcctgtgggcccaccaggcctcttggctgtgtctccagctgtggggctgtccccagtgtgctacgtccccaggagctgttggtccctycccagggtcccaagggctgtcagatggctgtgctgtccccagggcattgtgtttccgaggcagcatgccattctgtgcatgagggcygctgagccaccacggtgtcctcagaccattgtgtccccaagggctgctgagcagctggctttcccagctccccagggcagggaagccaccacaggcaactgtgtccccagggccaccgtgctgtgcccagggctgtgctgagcctgctcccatcccacaggtcgcctgcatgcagttcatcaacatcgtggtgcactcggtggagaacatgaacttccgtgtcttcctgcagtacgagttcacccacctggggctcgatcagtacctggaggtgggttggggcttccctgagcccctctg

SEQ ID NO: 38743 - DNA, 600 bp, Chicken  19866894270171_1
gccaaaacctcagaggctctaagggcttccaccctgtttgatttcctattctttgcatgagatgtgtactgcaatctccttagtaaaaatcccttggagaactttgcaacaacagtttggtacaatactctggctcaaatccatctcctgcaattatatttcactatcaatggcctctccttcacagtcttacactaccaatgtgaaatgtagtctaatgtgcaatgtgagggaactgctgcattataccttggagggaccatcatttaaacactgaggatattgattccaatttaaacyttgttgatcttatggtgctttgagacaaaagatactacatgcagtcactgctagtgatcaccacctctccaccaagattatatacataaatggtttactgtttggatgcatccaagtttacttaaccctcataactcccaaatrtgatacaagtagggagttcttcacagtttgtgcatgtttacctgttgagatggcatgatgcctggctgctcacaagttggtcagacacttccccctaaggcataagtttccagggaatatgagagctaagacagaaggcctagataatatttaagt

SEQ ID NO: 38744 - DNA, 600 bp, Chicken  19866894270171_2; identical to SEQ ID NO: 38743

SEQ ID NO: 38745 - DNA, 600 bp, Chicken  19866894270171_3; identical to SEQ ID NO: 38743

SEQ ID NO: 38746 - DNA, 600 bp, Chicken  19866894270171_4; identical to SEQ ID NO: 38743

SEQ ID NO: 38747 - DNA, 600 bp, Chicken  19866894270171_5
ctcctgcaattatatttcactatcaatggcctctccttcacagtcttacactaccaatgtgaaatgtagtctaatgtgcaatgtgagggaactgctgcattataccttggagggaccatcatttaaacactgaggatattgattccaatttaaacgttgttgatcttatggtgctttgagacaaaagatactacatgcagtcactgctagtgatcaccacctctccaccaagattatatacataaatggtttactgtttggatgcatccaagtttacttaaccctcataactcccaaatrtgatacaagtagggagttcttcacagtttgtgcatgtttacctgttgagatggcatgatgcctggctgctcacaagttggtcagacacttccccctaaggcataagtttccagggaatatgagagctaagacagaaggcctagataatatttaagtgccatcacttttataggaaaccctttccactgtgacagctctgccacactggtgtcacatccctctttacacttcatcacgcctgttcacactttgcgcattgacgaatcaattaaagcattttcctggcttcttctgtctctc

SEQ ID NO: 38748 - DNA, 600 bp, Chicken  19866894270171_6
ggcctagataatatttaagtgccatcacttttataggaaaccctttccactgtgacagctctgccacactggtgtcacatccctctttacacttcatcacgcctgttcacactttgcgcattgacgaatcaattaaagcattttcctggcttcttctgtctctcttttgcatcaatatgggacagtttgcttgcagcaagacaaactttcatgtgtggatattcaaaccttttatggaaggtaatgagaatacatatgccacaggtaaatcaacaagcatagcaggacaatagtggaatrtttactcagctctgttccactttcttgcaaaattaaaaaaaaacgtggctgtaatttgacttccagagttggtcaactaaaaagaaggatctattttcctttttagcaatataagaacttgtaacaactactgctattcaagtataatatgctttggggtcaagccaaaatttgtattccttaatgaatacacattacatggaatctaaactgggctcttaatataagttacttgaaactcaggagtgatacacaatcataaatcccattacaattagtgaaagctatgggcacttgaca

SEQ ID NO: 38749 - DNA, 470 bp, Chicken  19866894270174_1
cccatttgaaagaaaataaaaaggttgtcgggtatttgtgtggtgtgtgtgtgtgttttcaagcagtaaaagttctgcattattccacgtgggtgtgtgactgaatgcaaacacacacagctccaggaatacatacttcatgccaagcactgctggctgcccgacaggtgacttcagggaaggactgtggcagggggttgcagcttgataacccttgagctcccttccaacccaacccaggccgttctgtgattcttctacgctttcttcactgtaatcgctgacgaaaagcagcttctyagcactctgtagtgcagtgggtgttcttttgctgtgctcacctgcagcatttyaggcaccttcaccctgacagtggcagaagtctggattgttaaagatattttcagctgtttcctacgagtccctctttctttgttgcactttaatgagctccaggtttatttcccccc

SEQ ID NO: 38750 - DNA, 417 bp, Chicken  19866894270174_2
tgttttcaagcagtaaaagttctgcattattccacgtgggtgtgtgactgaatgcaaacacacacagctccaggaatacatacttcatgccaagcactgctggctgcccgacaggtgacttcagggaaggactgtggcagggggttgcagcttgataacccttgagctcccttccaacccaacccaggccgttctgtgattcttctacgctttcttcactgtaatcgctgacgaaaagcagcttctyagcactctgtagtgcagtgggtgttcttttgctgtgctcacctgcagcatttyaggcaccttcaccctgacagtggcagaagtctggattgttaaagatattttcagctgtttcctacgagtccctctttctttgttgcactttaatgagctccaggtttatttcccccc

SEQ ID NO: 38751 - DNA, 600 bp, Chicken  19866894270178_1
acacaggtaaagaagagggcaacattggtcccattgctactgtgcaacaacataaggtttcccttaaaactttcccataatgtatcactgccagtcctatttcacttctctgatcaggaagaggaatgcacaaacatagaagatggagtctgccctagaaactcctgcagtaccttaggaaatgatggatgtaggaccttcaacaaactgcagctggggaaacagcaggaaagatgaagatgcagaagtataaacagcactgtctcattagttaaagaacagaagcaccattcaaaacartattactatcttggccatratgttcaacatagaatctcctttgtattaacaaacaagttagaagtcaatggaaatgttctgcctgctttgatggctttttagagtttccaccctcactgatgttcaggcaacatcgagatactctctgggaacagaaacaaactattccctgactcattatactccaaaatgaactgcaggtggcaggtatggatatgggagtgaaggacactttttcaggcagacaatcacaaggcaataatataatttttttccttaaaaatacagtaaagaaagtac

SEQ ID NO: 38752 - DNA, 600 bp, Chicken  19866894270178_2
caacattggtcccattgctactgtgcaacaacataaggtttcccttaaaactttcccataatgtatcactgccagtcctatttcacttctctgatcaggaagaggaatgcacaaacatagaagatggagtctgccctagaaactcctgcagtaccttaggaaatgatggatgtaggaccttcaacaaactgcagctggggaaacagcaggaaagatgaagatgcagaagtataaacagcactgtctcattagttaaagaacagaagcaccattcaaaacartattactatcttggccatratgttcaacatagaatctcctttgtattaacaaacaagttagaagtcaatggaaatgttctgcctgctttgatggctttttagagtttccaccctcactgatgttcaggcaacatcgagatactctctgggaacagaaacaaactattccctgactcattatactccaaaatgaactgcaggtggcaggtatggatatgggagtgaaggacactttttcaggcagacaatcacaaggcaataatataatttttttccttaaaaatacagtaaagaaagtacacagttataacagaaagct

SEQ ID NO: 38753 - DNA, 525 bp, Chicken  19866894270182_1
attgccctcagcttccagcttaaatttacccctgggcagctcataaacacttgttctctggccagaattggggttcaaactgattcaaacccattgaaattaatgaggtttttttttctcattgacttcagcgagccttgaattaaggccctgtgtgtggacaaaaaggcttagggcagtttttgtaaaaggagagttttatcctgttgatcttggcctctctcttcagcctgctgtgaactgtctgcctcattttaatgctgtattcttatcctgttctagtgcagaactcctgttgaratccaggacggccttgccaagttgttattaattaccgtggttctcgaggctcaatcctgcaaactgatctgcatgagctcacaggtctctcttaaaggatctcctttcaggatttgggctctagttctacaaagcaaggcccagagggaaaatgtgattggcagygcacgctctcaggtctgcctgccctaccagtgccactgcaacctgagcacataagcccag

SEQ ID NO: 38754 - DNA, 360 bp, Chicken  19866894270182_2
aaggcttagggcagtttttgtaaaaggagagttttatcctgttgatcttggcctctctcttcagcctgctgtgaactgtctgcctcattttaatgctgtattcttatcctgttctagtgcagaactcctgttgaratccaggacggccttgccaagttgttattaattaccgtggttctcgaggctcaatcctgcaaactgatctgcatgagctcacaggtctctcttaaaggatctcctttcaggatttgggctctagttctacaaagcaaggcccagagggaaaatgtgattggcagygcacgctctcaggtctgcctgccctaccagtgccactgcaacctgagcacataagcccag

SEQ ID NO: 38755 - DNA, 600 bp, Chicken  19866894270196_1
atagcccatgtatatcctttctaaagcacaaagtaaatttcccccatatatcaatcagttatctcaaatgtcttaaaagcaaacaaacaaaaatgcattgccttacctaagggtaaggtcaggcctaataaggagatgcatggaattttgtttgcatttggtagcatgcatggactcagagccaagattgagtgactggcagtgacaatatcaagttctggagacaacccctggctcagagagctgagaggctagggtgaaacagaaatacagcaggcagatcaaacataggtttggtargttgttaggagagaaaaagtaaagagcaaaacacgtatttattagcaaacaatttgcacaaggtttgattcactagtttcatggcatacagaaggaaactgcacaaaggaagtctcctgttggtgtttctaagccattaaagcttgctctttgccagaaacttaagaattgmagcagataaagccaagagccaagataaggtaaggtcactacataaagtaaattttgaagctgtgcacttatttttcagacatgaaagagagccccacaatattcaaattctgtgaagtctactgaata

SEQ ID NO: 38756 - DNA, 600 bp, Chicken  19866894270196_2
gactcagagccaagattgagtgactggcagtgacaatatcaagttctggagacaacccctggctcagagagctgagaggctagggtgaaacagaaatacagcaggcagatcaaacataggtttggtargttgttaggagagaaaaagtaaagagcaaaacacgtatttattagcaaacaatttgcacaaggtttgattcactagtttcatggcatacagaaggaaactgcacaaaggaagtctcctgttggtgtttctaagccattaaagcttgctctttgccagaaacttaagaattgmagcagataaagccaagagccaagataaggtaaggtcactacataaagtaaattttgaagctgtgcacttatttttcagacatgaaagagagccccacaatattcaaattctgtgaagtctactgaatacaaatactgaatccatagaattcccatgtgggatttgtcacatccatttgagaacaatgccccagtcacctgccatcatcaagaaaagggcggtttatatcctgtcagctttacacctaatgtgtttaaggagccagagatccaaatacaatcaggcatgaggctgggctca

SEQ ID NO: 38757 - DNA, 599 bp, Chicken  19866894270198_1
  misc_feature (1)..(95): n is any nucleotide
nnnnnnnnnnnnnnnnnnnnnnnnnnnnnnnnnnnnnnnnnnnnnnnnnnnnnnnnnnnnnnnnnnnnnnnnnnnnnnnnnnnnnnnnnnnnnnngctgcagctcttggtgacttcttaacaaggaacacagccagaggttgcactagctcaacccaggctgaactacatgcccctgtttaaaattcaataacagcctatccacgtatctattttctaatgtaaacagaagagattattttcttctcttttctgctaaggacttttagtgctcttaagcatcgcctcaaaatgtgactcygaagcacaaggcagagcactgggtgaggctgagaaaccrtatctggaaagctggctgtgtagaggcacatgctgggtcagatgggttggagcaaaaggtctctgagctccagcaggagatggaggtgagaggggccaggcagacacatagcagcgatgtctggctgtgcctgcagagccacactccccagcaatcacatggatggcagactcctaccgcagaagwgcccttcagcaaccaaacagctattagctttgattattcttccattagtcggccattctctacagaaacaatct

SEQ ID NO: 38758 - DNA, 599 bp, Chicken  19866894270198_2
  misc_feature (1)..(56): n is any nucleotide
nnnnnnnnnnnnnnnnnnnnnnnnnnnnnnnnnnnnnnnnnnnnnnnnnnnnnnnngctgcagctcttggtgacttcttaacaaggaacacagccagaggttgcactagctcaacccaggctgaactacatgcccctgtttaaaattcaataacagcctatccacgtatctattttctaatgtaaacagaagagattattttcttctcttttctgctaaggacttttagtgctcttaagcatcgcctcaaaatgtgactcygaagcacaaggcagagcactgggtgaggctgagaaaccrtatctggaaagctggctgtgtagaggcacatgctgggtcagatgggttggagcaaaaggtctctgagctccagcaggagatggaggtgagaggggccaggcagacacatagcagcgatgtctggctgtgcctgcagagccacactccccagcaatcacatggatggcagactcctaccgcagaagwgcccttcagcaaccaaacagctattagctttgattattcttccattagtcggccattctctacagaaacaatctccatttgggagtgcattgaacacaaactgtttctcagtc

SEQ ID NO: 38759 - DNA, 600 bp, Chicken  19866894270198_3
cagaagagattattttcttctcttttctgctaaggacttttagtgctcttaagcatcgcctcaaaatgtgactcygaagcacaaggcagagcactgggtgaggctgagaaaccrtatctggaaagctggctgtgtagaggcacatgctgggtcagatgggttggagcaaaaggtctctgagctccagcaggagatggaggtgagaggggccaggcagacacatagcagcgatgtctggctgtgcctgcagagccacactccccagcaatcacatggatggcagactcctaccgcagaagwgcccttcagcaaccaaacagctattagctttgattattcttccattagtcggccattctctacagaaacaatctccatttgggagtgcattgaacacaaactgtttctcagtctttgaaataactgcaaaaccagctgacccagtctggctgtttgaaaacttacctatcccaggcagagttggctgaaggatggccagcagggtgctgccctgcttggcacatcgccttgtccaggccagcactctcagcacagggaactacggagacatggtctaggaggacagggagtggagggatg

SEQ ID NO: 38760 - DNA, 599 bp, Chicken  19866894270203_1
  misc_feature (1)..(107): n is any nucleotide
nnnnnnnnnnnnnnnnnnnnnnnnnnnnnnnnnnnnnnnnnnnnnnnnnnnnnnnnnnnnnnnnnnnnnnnnnnnnnnnnnnnnnnnnnnnnnnnnnnnnnnnnnnntgtgcaagtgcccgaacgtctgcagggctgaggacttggctccacaggttcacgtgtgtcatcccaccccacaaacccattggagaatgtcccaagaagagtgtctctgtccttcccaaggacaagcatccctccagcctggctcacgtagcctctctgaatgctctttgcatcaccagcagctccattgagycacagatttgctattccggactgggaagcccatgccatgcagtaatgcagccaatcccgtgccttgtggtagagagggaagctgacgaaatggcctcctatccacaatcccacctctgtgcctgtggtcatcaccagctcgttgtccctctcccgtgtggagtaggaaagaacagtctgagtgcccacatgctgggcttgtgtccagaagcacagggtgaaggcttggagagacatctcatggcggggacgaacctccacaaagctctcaatgttttccacggggaagtagaaagctgg

SEQ ID NO: 38761 - DNA, 600 bp, Chicken  19866894270213_1
aggggacaaaggaaccgcatctctccctgctctttgctgcatgtcataacaaagtgctgggccagataattaagatagtttctaaaaatgtccccatgatagttgccagggtatctgtctccctgagcatacacataagcatatctgcaacagttgcttttgtgctttattccacgatgaactgattcatttttttgtcttctaaaccagtgcatcaacaacaaacactgcctttgctcttaagagagatgaggagtatatactcttccttaggaaatgagatactgctgtaaatacacmctgggagtctctacagatgtgtcgtcttttcactggagtcaatggaactcccccaaattcctcagccttcgcagctatccccatccccacagcccattctgcaacgtatcacatacagcctattttttagaagctatttcacgttcttgttgacaaagacagaaaacaggacaattattttttacagaaatgcacagagctgtagcatccttagtaccggagtgaaacctaattaactagaaccctccgtggtgagtttaatatgtcataccatggctggctttccaacagccagctaat

SEQ ID NO: 38762 - DNA, 600 bp, Chicken  19866894270230_1
atgctttcaccttcaatgggttcaacgaaatcaattcagttatattggtaatgtactttccaacactcaagcagccatctaggcctgaattttaatgaaaccaacacactgtgcacaggctgctgcatgagtagtaataacactttgcacttatataataataattctatttactaggcaagatacaaatgaaacactcagaatataatgcaaaaaataaaaataaaagaagtcaagatatctttcaagcaccattacacctaaaagtacagtgagctgtaatgttttgtttttcttttwtccctccccagactctcttaagtcagaagctccaataagtttagtttatcagtactggtgtgagctgttagcttactgaaagcatgataacgtacaatcaagagaatgtctagatacactctgcactgttgtgtgccctgaatagcatatggaagaagggaaatttggaattattagccagccagaaatgaaaaatctaaatctaggcccttttcctaytacctgtgataatatagaaaagatagttccttttttggtctctyaagcatgattcctttgcctcctgttatctattctgac

SEQ ID NO: 38763 - DNA, 600 bp, Chicken  19866894270230_2
aaaataaaagaagtcaagatatctttcaagcaccattacacctaaaagtacagtgagctgtaatgttttgtttttcttttwtccctccccagactctcttaagtcagaagctccaataagtttagtttatcagtactggtgtgagctgttagcttactgaaagcatgataacgtacaatcaagagaatgtctagatacactctgcactgttgtgtgccctgaatagcatatggaagaagggaaatttggaattattagccagccagaaatgaaaaatctaaatctaggcccttttcctaytacctgtgataatatagaaaagatagttccttttttggtctctyaagcatgattcctttgcctcctgttatctattctgactccaagaatgctgtaattaagcaggattcatctaatgtcagcagatctcatcacagagtcatagaatcatagaatcacaaggttggaatggacctacaagatcatctagtccaaccattctcctgtcaccattactaccactaagctactgaacaatgtctygtagcayctcatctggagragtcttcagatacaaaatctgaatacccactgaatagg

SEQ ID NO: 38764 - DNA, 600 bp, Chicken  19866894270230_3
aaagtacagtgagctgtaatgttttgtttttcttttwtccctccccagactctcttaagtcagaagctccaataagtttagtttatcagtactggtgtgagctgttagcttactgaaagcatgataacgtacaatcaagagaatgtctagatacactctgcactgttgtgtgccctgaatagcatatggaagaagggaaatttggaattattagccagccagaaatgaaaaatctaaatctaggcccttttcctaytacctgtgataatatagaaaagatagttccttttttggtctctyaagcatgattcctttgcctcctgttatctattctgactccaagaatgctgtaattaagcaggattcatctaatgtcagcagatctcatcacagagtcatagaatcatagaatcacaaggttggaatggacctacaagatcatctagtccaaccattctcctgtcaccattactaccactaagctactgaacaatgtctygtagcayctcatctggagragtcttcagatacaaaatctgaatacccactgaataggaaatattttccccagaatccagtgatgcaagctgttggatgttg

SEQ ID NO: 38765 - DNA, 600 bp, Chicken  19866894270230_4
atttggaattattagccagccagaaatgaaaaatctaaatctaggcccttttcctaytacctgtgataatatagaaaagatagttccttttttggtctctyaagcatgattcctttgcctcctgttatctattctgactccaagaatgctgtaattaagcaggattcatctaatgtcagcagatctcatcacagagtcatagaatcatagaatcacaaggttggaatggacctacaagatcatctagtccaaccattctcctgtcaccattactaccactaagctactgaacaatgtctygtagcayctcatctggagragtcttcagatacaaaatctgaatacccactgaataggaaatattttccccagaatccagtgatgcaagctgttggatgttgaggcaagatggagaaaatctctttgtgaaaagccagtacttttctgctgaaaacagtaatcaaagtggaagaattggcagggctgtgttatcatgttcctgccaatgaacttgtgtgttgggttgaactaagttgttctgtgatagaatatttatatacctagcctcatttgctactcttagtgtaatttttgttttat

SEQ ID NO: 38766 - DNA, 600 bp, Chicken  19866894270230_5
attattagccagccagaaatgaaaaatctaaatctaggcccttttcctaytacctgtgataatatagaaaagatagttccttttttggtctctyaagcatgattcctttgcctcctgttatctattctgactccaagaatgctgtaattaagcaggattcatctaatgtcagcagatctcatcacagagtcatagaatcatagaatcacaaggttggaatggacctacaagatcatctagtccaaccattctcctgtcaccattactaccactaagctactgaacaatgtctygtagcayctcatctggagragtcttcagatacaaaatctgaatacccactgaataggaaatattttccccagaatccagtgatgcaagctgttggatgttgaggcaagatggagaaaatctctttgtgaaaagccagtacttttctgctgaaaacagtaatcaaagtggaagaattggcagggctgtgttatcatgttcctgccaatgaacttgtgtgttgggttgaactaagttgttctgtgatagaatatttatatacctagcctcatttgctactcttagtgtaatttttgttttatgtcatat

SEQ ID NO: 38767 - DNA, 600 bp, Chicken  19866894270230_6
ccagaaatgaaaaatctaaatctaggcccttttcctaytacctgtgataatatagaaaagatagttccttttttggtctctyaagcatgattcctttgcctcctgttatctattctgactccaagaatgctgtaattaagcaggattcatctaatgtcagcagatctcatcacagagtcatagaatcatagaatcacaaggttggaatggacctacaagatcatctagtccaaccattctcctgtcaccattactaccactaagctactgaacaatgtctygtagcayctcatctggagragtcttcagatacaaaatctgaatacccactgaataggaaatattttccccagaatccagtgatgcaagctgttggatgttgaggcaagatggagaaaatctctttgtgaaaagccagtacttttctgctgaaaacagtaatcaaagtggaagaattggcagggctgtgttatcatgttcctgccaatgaacttgtgtgttgggttgaactaagttgttctgtgatagaatatttatatacctagcctcatttgctactcttagtgtaatttttgttttatgtcatattatttcataggc

SEQ ID NO: 38768 - DNA, 600 bp, Chicken  19866894270231_1
tctggtttttcaaaatgcttttattattgctaacgctccaaatttttaagtctcttagcacagtgactgaggaggaaatacttcttagagtgagaggttacctgttttggttttgtttcattttccattcttcttcaatttcctggaactcttgtgtaatttttttttttctaaggtagtagcttctgaaataggtttccctgcatgctttctgtctgcatttgatgtagttgccttggcatcctgacctactggcaaatctgtagttttgctaggcatgactgaaagtttttcactctyaccaattttcacatactgcagcttcatgggagactrtattaaatgtttagtgtattaaaatttgagttggtgagagaaaaatgggaggccctgaacttaagtcaagagacttgtggatatttagcagtctagccagttataaaacaatagctcacattctgttytcrrgtgtttggtttgctgatgtagtgaagcctatgtgcagtcttcttgatattccttgggaggtactgtggatgtgtctcttagcttaaatgttttctgggaagctgggaagttcctagccattgcatttcatta

SEQ ID NO: 38769 - DNA, 600 bp, Chicken  19866894270231_2
tccaaatttttaagtctcttagcacagtgactgaggaggaaatacttcttagagtgagaggttacctgttttggttttgtttcattttccattcttcttcaatttcctggaactcttgtgtaatttttttttttctaaggtagtagcttctgaaataggtttccctgcatgctttctgtctgcatttgatgtagttgccttggcatcctgacctactggcaaatctgtagttttgctaggcatgactgaaagtttttcactctyaccaattttcacatactgcagcttcatgggagactrtattaaatgtttagtgtattaaaatttgagttggtgagagaaaaatgggaggccctgaacttaagtcaagagacttgtggatatttagcagtctagccagttataaaacaatagctcacattctgttytcrrgtgtttggtttgctgatgtagtgaagcctatgtgcagtcttcttgatattccttgggaggtactgtggatgtgtctcttagcttaaatgttttctgggaagctgggaagttcctagccattgcatttcattaataatttatgtctaactgcttttagtagaacttgtt

SEQ ID NO: 38770 - DNA, 600 bp, Chicken  19866894270231_3
ttttttctaaggtagtagcttctgaaataggtttccctgcatgctttctgtctgcatttgatgtagttgccttggcatcctgacctactggcaaatctgtagttttgctaggcatgactgaaagtttttcactctyaccaattttcacatactgcagcttcatgggagactrtattaaatgtttagtgtattaaaatttgagttggtgagagaaaaatgggaggccctgaacttaagtcaagagacttgtggatatttagcagtctagccagttataaaacaatagctcacattctgttytcrrgtgtttggtttgctgatgtagtgaagcctatgtgcagtcttcttgatattccttgggaggtactgtggatgtgtctcttagcttaaatgttttctgggaagctgggaagttcctagccattgcatttcattaataatttatgtctaactgcttttagtagaacttgttggctcacttctatatgaatatatagctagttatacaatggagtaaagctttttcagccctgtcaggtatgatttgtttcagagcctgttggtgcttgggtaaagttcattgttaattgtctatctgat

SEQ ID NO: 38771 - DNA, 600 bp, Chicken  19866894270231_4
tttctaaggtagtagcttctgaaataggtttccctgcatgctttctgtctgcatttgatgtagttgccttggcatcctgacctactggcaaatctgtagttttgctaggcatgactgaaagtttttcactctyaccaattttcacatactgcagcttcatgggagactrtattaaatgtttagtgtattaaaatttgagttggtgagagaaaaatgggaggccctgaacttaagtcaagagacttgtggatatttagcagtctagccagttataaaacaatagctcacattctgttytcrrgtgtttggtttgctgatgtagtgaagcctatgtgcagtcttcttgatattccttgggaggtactgtggatgtgtctcttagcttaaatgttttctgggaagctgggaagttcctagccattgcatttcattaataatttatgtctaactgcttttagtagaacttgttggctcacttctatatgaatatatagctagttatacaatggagtaaagctttttcagccctgtcaggtatgatttgtttcagagcctgttggtgcttgggtaaagttcattgttaattgtctatctgatttt

SEQ ID NO: 38772 - DNA, 600 bp, Chicken  19866894270231_5
ttctaaggtagtagcttctgaaataggtttccctgcatgctttctgtctgcatttgatgtagttgccttggcatcctgacctactggcaaatctgtagttttgctaggcatgactgaaagtttttcactctyaccaattttcacatactgcagcttcatgggagactrtattaaatgtttagtgtattaaaatttgagttggtgagagaaaaatgggaggccctgaacttaagtcaagagacttgtggatatttagcagtctagccagttataaaacaatagctcacattctgttytcrrgtgtttggtttgctgatgtagtgaagcctatgtgcagtcttcttgatattccttgggaggtactgtggatgtgtctcttagcttaaatgttttctgggaagctgggaagttcctagccattgcatttcattaataatttatgtctaactgcttttagtagaacttgttggctcacttctatatgaatatatagctagttatacaatggagtaaagctttttcagccctgtcaggtatgatttgtttcagagcctgttggtgcttgggtaaagttcattgttaattgtctatctgattttt

SEQ ID NO: 38773 - DNA, 565 bp, Chicken  19866894270233_1
agtttgcttcatttagtattcattctaaatagatactaagctttaaagaagaaaacccctacttgtttcatatgcttcccatactgctttgccaaggacaatgatgaattcattggtgggtttgcttttggtagcgtaaagtgagagcaaacagttacatgggattatcaccgctgaatgtgcaccaatctgctgcaaatatgggttagcttgtcttgtgccacgctgggaaatgagtaattagcaattggttttgcagaagagtgactttctttctgacactgaaatcctacttgatarcaaacataaaatagaatacgcagactttgctgaaggttgctctctgctcttgtaagacaaaacaaaagcaaaagggaatttggggaatgtttttaattccagctgaggaaatctcaggggtttctacagcccctcttgtgtgcagcatattgcccctgctcagccccaccgctggcagtgatgtgccagcagcagctggagagcagctgggtaccctctgcgtggggcacaaggctagccaagggaagagggctttgggcagcag

SEQ ID NO: 38774 - DNA, 600 bp, Chicken  19866894270234_1
gaagagcagctccctccccgaggagttaaaacattttctgcattatcataccatcaatattgcatcctcaaactaagatcggacaaagactcgctgttcataaagcctgctcagaggggagctcacgtcttcaaacacgttatcctcccaagcatgcttcccccctcctcagaggcagatctctcctctttgggatggcaatcacaacccaacactcaggcaataagcaatttgttgacaaagagaaatgccaacaaggaaacatttcagctgcattcaagactggatatttttttattwttattatttgcttttctggacatgatctggcagctgtgagcaaaaagaggaggcrggatgctgcatgtgtcccctccccacgaggagcayagccagtgctgcaggcgagccatgctcccgtgtcaccgtgctcacagtgcaccggaggaaataatcctgtattagcarggcagcagatcacagggatcaggcgggtcttttctggttctgacctaaccaatgccaaaaagcacagagcaggagcaaatgaaacagagagagagatgtcatcagcctcctgcaaagagaatctgcagagct

SEQ ID NO: 38775 - DNA, 600 bp, Chicken  19866894270234_2
aatattgcatcctcaaactaagatcggacaaagactcgctgttcataaagcctgctcagaggggagctcacgtcttcaaacacgttatcctcccaagcatgcttcccccctcctcagaggcagatctctcctctttgggatggcaatcacaacccaacactcaggcaataagcaatttgttgacaaagagaaatgccaacaaggaaacatttcagctgcattcaagactggatatttttttattwttattatttgcttttctggacatgatctggcagctgtgagcaaaaagaggaggcrggatgctgcatgtgtcccctccccacgaggagcayagccagtgctgcaggcgagccatgctcccgtgtcaccgtgctcacagtgcaccggaggaaataatcctgtattagcarggcagcagatcacagggatcaggcgggtcttttctggttctgacctaaccaatgccaaaaagcacagagcaggagcaaatgaaacagagagagagatgtcatcagcctcctgcaaagagaatctgcagagctgtgctgcacagggtaatggttaattcaggatgtctcatgattggaagaagtcaaa

SEQ ID NO: 38776 - DNA, 600 bp, Chicken  19866894270234_3
tcgctgttcataaagcctgctcagaggggagctcacgtcttcaaacacgttatcctcccaagcatgcttcccccctcctcagaggcagatctctcctctttgggatggcaatcacaacccaacactcaggcaataagcaatttgttgacaaagagaaatgccaacaaggaaacatttcagctgcattcaagactggatatttttttattwttattatttgcttttctggacatgatctggcagctgtgagcaaaaagaggaggcrggatgctgcatgtgtcccctccccacgaggagcayagccagtgctgcaggcgagccatgctcccgtgtcaccgtgctcacagtgcaccggaggaaataatcctgtattagcarggcagcagatcacagggatcaggcgggtcttttctggttctgacctaaccaatgccaaaaagcacagagcaggagcaaatgaaacagagagagagatgtcatcagcctcctgcaaagagaatctgcagagctgtgctgcacagggtaatggttaattcaggatgtctcatgattggaagaagtcaaagaagacttytgtctacaagcataatgcacggttcc

SEQ ID NO: 38777 - DNA, 600 bp, Chicken  19866894270234_4
tcagaggcagatctctcctctttgggatggcaatcacaacccaacactcaggcaataagcaatttgttgacaaagagaaatgccaacaaggaaacatttcagctgcattcaagactggatatttttttattwttattatttgcttttctggacatgatctggcagctgtgagcaaaaagaggaggcrggatgctgcatgtgtcccctccccacgaggagcayagccagtgctgcaggcgagccatgctcccgtgtcaccgtgctcacagtgcaccggaggaaataatcctgtattagcarggcagcagatcacagggatcaggcgggtcttttctggttctgacctaaccaatgccaaaaagcacagagcaggagcaaatgaaacagagagagagatgtcatcagcctcctgcaaagagaatctgcagagctgtgctgcacagggtaatggttaattcaggatgtctcatgattggaagaagtcaaagaagacttytgtctacaagcataatgcacggttcctccagaaccacactaagcagggcaccacagyggtcagctccttcaggatgtaaccttaagcagccaaaggctccagct

SEQ ID NO: 38778 - DNA, 600 bp, Chicken  19866894270234_5
atgtgtcccctccccacgaggagcayagccagtgctgcaggcgagccatgctcccgtgtcaccgtgctcacagtgcaccggaggaaataatcctgtattagcarggcagcagatcacagggatcaggcgggtcttttctggttctgacctaaccaatgccaaaaagcacagagcaggagcaaatgaaacagagagagagatgtcatcagcctcctgcaaagagaatctgcagagctgtgctgcacagggtaatggttaattcaggatgtctcatgattggaagaagtcaaagaagacttytgtctacaagcataatgcacggttcctccagaaccacactaagcagggcaccacagyggtcagctccttcaggatgtaaccttaagcagccaaaggctccagcttcaacctggaacatggarggataaaatacaatcagagaaccatagaatcacagaatggttgggttggaagggaactcaaagcccactcagtccaaccccctgctgtcggctgattgccactgtatgggaattgctaagtcaaggcctgaaccaatgattgagcacctggtgaaggaacacagccagccctgggagc

SEQ ID NO: 38779 - DNA, 600 bp, Chicken  19866894270234_6
gtcaccgtgctcacagtgcaccggaggaaataatcctgtattagcarggcagcagatcacagggatcaggcgggtcttttctggttctgacctaaccaatgccaaaaagcacagagcaggagcaaatgaaacagagagagagatgtcatcagcctcctgcaaagagaatctgcagagctgtgctgcacagggtaatggttaattcaggatgtctcatgattggaagaagtcaaagaagacttytgtctacaagcataatgcacggttcctccagaaccacactaagcagggcaccacagyggtcagctccttcaggatgtaaccttaagcagccaaaggctccagcttcaacctggaacatggarggataaaatacaatcagagaaccatagaatcacagaatggttgggttggaagggaactcaaagcccactcagtccaaccccctgctgtcggctgattgccactgtatgggaattgctaagtcaaggcctgaaccaatgattgagcacctggtgaaggaacacagccagccctgggagcacaggtgaattgctttcacctgtgcaaccagaagggatggaaccaggttccacccct

SEQ ID NO: 38780 - DNA, 600 bp, Chicken  19866894270234_7
tcaggcgggtcttttctggttctgacctaaccaatgccaaaaagcacagagcaggagcaaatgaaacagagagagagatgtcatcagcctcctgcaaagagaatctgcagagctgtgctgcacagggtaatggttaattcaggatgtctcatgattggaagaagtcaaagaagacttytgtctacaagcataatgcacggttcctccagaaccacactaagcagggcaccacagyggtcagctccttcaggatgtaaccttaagcagccaaaggctccagcttcaacctggaacatggarggataaaatacaatcagagaaccatagaatcacagaatggttgggttggaagggaactcaaagcccactcagtccaaccccctgctgtcggctgattgccactgtatgggaattgctaagtcaaggcctgaaccaatgattgagcacctggtgaaggaacacagccagccctgggagcacaggtgaattgctttcacctgtgcaaccagaagggatggaaccaggttccacccctccctaagcctcatttaaggactggctgccccagggagaggatctctacctggagatcccttcttt

SEQ ID NO: 38781 - DNA, 600 bp, Chicken  19866894270235_1
tgttcagctcaaacagccaatttttcactcttgcttgcactttcatagagtgtttggtctgtctcagcagagaggttttattgctgagatggttacttcagctttgtctcaatttgtttttagactaacaagcagtgtagtcagaaattaaaaaaagatggaaaacaacaataacctgcctttctccccagccctgctccccacgaagaggacactgagagattgaaaatgagtcactggaagatcattctaggtcacaaagaccttttcctaatgtactgcaaatagagaaaggaaagytctgtgatgacaatactagactgggacctgtgttcagatctctgctcagctactgatgcacagaatattttgtgtctattcattacagaactccagaagattcgtttctacagaaatgtataaataattcccttctttcctggttattggttctctttggatgatcatttctttgggtagacataggctttccctggagagaagattgcctggtacccatgctacgcacatcagtaggctgtaaatcacagcggcaatgaatagcaaacattgaactacaagaccatgacagaccactct

SEQ ID NO: 38782 - DNA, 599 bp, Chicken  19866894270244_1
  misc_feature (1)..(28): n is any nucleotide
nnnnnnnnnnnnnnnnnnnnnnnnnnnntttgtggggctttgctgcagttcagctacaccggatcagcgctggagaaatcgtccctccattctcaaagttttgcctatgaagtctcagacggcattaattattaaaacgtatttcaagtagagaaatgagagttaagctgtctctcactttaaagtgttccgaagctgcttctccctgttccagattaagaaaccattttaaaaacttcattcttctgaagaccatccacgataaaaaaaaacactgggtccaccccaggcattcacttytccaaatgaactcttccttcagtttagtctgtaagagactggagaatcacgactgcttatgctataacataaaaataggaaacctgctttatgaacttccatttgtaatcaatacgtgcagtgagattaatgctgatgcagttggcattactaacagcggagtttttctccaacctgatgaaataaacacactgaccgaagtcaaatttcggctctaatccatccccacaacrtcagtgaagaaaggcagctactggtttgaactgcattgctgcaggaagacccgcgacccaccaggg

SEQ ID NO: 38783 - DNA, 524 bp, Chicken  19866894270244_2
aacttcattcttctgaagaccatccacgataaaaaaaaacactgggtccaccccaggcattcacttytccaaatgaactcttccttcagtttagtctgtaagagactggagaatcacgactgcttatgctataacataaaaataggaaacctgctttatgaacttccatttgtaatcaatacgtgcagtgagattaatgctgatgcagttggcattactaacagcggagtttttctccaacctgatgaaataaacacactgaccgaagtcaaatttcggctctaatccatccccacaacrtcagtgaagaaaggcagctactggtttgaactgcattgctgcaggaagacccgcgacccaccagggtttggactgacttaacctcccagcagcagacaagcgcagtgtgcttttccggggcttggatcaatagcaaagagctgaaattgtaaatgaatgtcttgaaagaacactaattagcatagtttatggataagagggcatacgaaaacctcaacagttac

SEQ ID NO: 38784 - DNA, 599 bp, Chicken  19866894270252_1
  misc_feature (1)..(205): n is any nucleotide
nnnnnnnnnnnnnnnnnnnnnnnnnnnnnnnnnnnnnnnnnnnnnnnnnnnnnnnnnnnnnnnnnnnnnnnnnnnnnnnnnnnnnnnnnnnnnnnnnnnnnnnnnnnnnnnnnnnnnnnnnnnnnnnnnnnnnnnnnnnnnnnnnnnnnnnnnnnnnnnnnnnnnnnnnnnnnnnnnnnnnnnnnnnnnnnnnnnnnnnnnnnnnacatttcaagtgctgtgctggtaaatacgatactgtgtctgtcttggagattattaagtctttaccttgccaatgtgagtgtacttatgttaagytgtctttccagttcattgaaatgatgttggtgtgaggaactgtcatgggagagctggcttggaaatgaaagtatttcttctcatgaaaaatacacacttaaaaaagcaaacaacctccctcctcttacaccaaattaggacaaaatgtttagcatggcaactgttggaagggctttccattcaagttccatctgtggggaaccaaaataaagctgtcttctggactaccagctgccaaaggctccttcaacttcacaaagcttccgagtggggagcgatcttttcagttttcctagtgg

SEQ ID NO: 38785 - DNA, 600 bp, Chicken  19866894270252_2
cttggaaatgaaagtatttcttctcatgaaaaatacacacttaaaaaagcaaacaacctccctcctcttacaccaaattaggacaaaatgtttagcatggcaactgttggaagggctttccattcaagttccatctgtggggaaccaaaataaagctgtcttctggactaccagctgccaaaggctccttcaacttcacaaagcttccgagtggggagcgatcttttcagttttcctagtggaaaattggtagggccaagaagcttcccctggaaaccttttgtttttgccaaaaagggsactttccatcaagaaaaccattccagtggaaaatgtgttacagctttaaaagtgaccacattttctgactggtgtgggtacatrtaaacctccgggctcaaaccttgggccaaaccctagtgagaactatttacccctttggcataagttatcccatgtctgttctgcatctttgtgttctttccttgaaatgcatgctactgtaagcaaccgtgggagctgggaggcaatggagcgagtcattttatgagtgcttaagagaagcttattaatgccctgttgacggcccagcaaaggaca

SEQ ID NO: 38786 - DNA, 600 bp, Chicken  19866894270252_3
aaaatgtttagcatggcaactgttggaagggctttccattcaagttccatctgtggggaaccaaaataaagctgtcttctggactaccagctgccaaaggctccttcaacttcacaaagcttccgagtggggagcgatcttttcagttttcctagtggaaaattggtagggccaagaagcttcccctggaaaccttttgtttttgccaaaaagggsactttccatcaagaaaaccattccagtggaaaatgtgttacagctttaaaagtgaccacattttctgactggtgtgggtacatrtaaacctccgggctcaaaccttgggccaaaccctagtgagaactatttacccctttggcataagttatcccatgtctgttctgcatctttgtgttctttccttgaaatgcatgctactgtaagcaaccgtgggagctgggaggcaatggagcgagtcattttatgagtgcttaagagaagcttattaatgccctgttgacggcccagcaaaggacaaagctaatcccacatggcagctgccttcctcttttttcttaatgtgcttacaaagaatgacacagccgactagagtcactggaa

SEQ ID NO: 38787 - DNA, 600 bp, Chicken  19866894270256_1
ttggatttagtttaagtgatatagtggtaggaaatgcaggagcatgttaatgtatgagtatgacagaatattcttgcatattttagaagtatatttaatctggaaagctgtgctttcttgagtatggcatagtaacatctttatttcagcttatttttgtctttgattaatatgaaatacaccaaatataagtttttctttgtagtagttttttttcttgcattatgcttgtattgtataaagaagctttaagtaagtgatttaacctcaaaattaatacaagtttacccattaaaattrtttctattataggctgctcagtgcaaatagagtaccagagagtagaggaacccatttagtactgttttgtcttggattggtattcatcgttttattagggaaataaggtatacacattttgattctattgtcgttattatattagatgtgacacttaagtggccagacacaagcaaaaaaacatataaggtgaatttcatctctttttttttttaattcagttgagaaacaacttgtgtaacaactgcagacttcatatttaggcaaaatgcaattccagttcagtctataatgatgctt

SEQ ID NO: 38788 - DNA, 600 bp, Chicken  19866894270264_1
aatcctgactctgccagcagcgagaacctgtgttagcactttggggtaaggccgggagccgggtgccaggtaggagggcagcgcgaggctgctgggcagcagccatcgcgtgtggaacagatggcggggaaagctggccggggaggggctccttagcagaactaatcagacagtaacagatagggcagctgggaggactgaccacagagaggcaagcggcggggtagccgcagccttccgcgatgtgtgcagtggtgtgcccgttggtccgagataagaccttgcaatgtctttctaggyagaagctgcacaaactttggggcggatagagcgcctggctgccgctcgcagtgatgggaggcatgagctggctgcccggcctcgtgcagcctcctgagcctctggcccagccctgcgaggtgcatcaggctgcccgtgccctgcacaagcattgtttgctctcactctgtcccacaatataaggatgcgtggggttgcattttgctgtggtggcacgttaaatgtagaacttggatatctgtagaaatgcaaaagcatgtgaatgtggggactgatcctgcaaaccgatgagaaaactct

SEQ ID NO: 38789 - DNA, 600 bp, Chicken  19866894270268_1
cctcctctcgtttgactctggtttatggctgcagggctgaaagcagaaccgggttccttcttaaactttagtctgtcaacgaagaatacttaagccattaatactttctgaagctaataggtctaagtttcttttaatcatacgtatgggttgaaatagtttcgctgacaggacgatgcagtggaagctctgcgctcctggaagacagtgcctctttattgtttatgtaactttcttaatctgttgccaaattacacagagtagttgtatatccttcttctaatggctccctcaggagcygctgtatttagtccacctagaaatgagcagtgttcatcatttgctcaaacccttcattttgtgataactgcaggattaggcagccgccgagttctagcaatcaaatgaaattcctaattacacggagaagttctaattagtctcctagaaataattagcatttataccacatattccgccctgctacgtgttctcagtgatgcagcatccaagcacagccccgtctgtcagctgaacaaacaaccrtgcaataaaaccatcctgtctggtgrctgtccgctcagcgcaggccgcttctgg

SEQ ID NO: 38790 - DNA, 600 bp, Chicken  19866894270268_2
ccaaattacacagagtagttgtatatccttcttctaatggctccctcaggagcygctgtatttagtccacctagaaatgagcagtgttcatcatttgctcaaacccttcattttgtgataactgcaggattaggcagccgccgagttctagcaatcaaatgaaattcctaattacacggagaagttctaattagtctcctagaaataattagcatttataccacatattccgccctgctacgtgttctcagtgatgcagcatccaagcacagccccgtctgtcagctgaacaaacaaccrtgcaataaaaccatcctgtctggtgrctgtccgctcagcgcaggccgcttctggaaccgattcccttcatccagatgagatgcactgttgagaagcagctctatgagagcggcagcacactgcgtgctcctcctctctgaagtgcaataaccaggagatcaaatctgcagtcaactttcaattcccattctgaccgcttctgcttctggtttttgagttgcacaagaccgtaactcttcagaacacagctaaatgggacgtgttccacagctgctctggagctgcccccgtgttgctctg

SEQ ID NO: 38791 - DNA, 600 bp, Chicken  19866894270268_3
ccttcttctaatggctccctcaggagcygctgtatttagtccacctagaaatgagcagtgttcatcatttgctcaaacccttcattttgtgataactgcaggattaggcagccgccgagttctagcaatcaaatgaaattcctaattacacggagaagttctaattagtctcctagaaataattagcatttataccacatattccgccctgctacgtgttctcagtgatgcagcatccaagcacagccccgtctgtcagctgaacaaacaaccrtgcaataaaaccatcctgtctggtgrctgtccgctcagcgcaggccgcttctggaaccgattcccttcatccagatgagatgcactgttgagaagcagctctatgagagcggcagcacactgcgtgctcctcctctctgaagtgcaataaccaggagatcaaatctgcagtcaactttcaattcccattctgaccgcttctgcttctggtttttgagttgcacaagaccgtaactcttcagaacacagctaaatgggacgtgttccacagctgctctggagctgcccccgtgttgctctgcgagctgcacgtgcagcagaagtccg

SEQ ID NO: 38792 - DNA, 600 bp, Chicken  19866894270272_1
gccatgcattagaaaagaaaaactaaagcaaaacaataatcatatggaatataggaaacagaggtgagaataaatgtgtagtgttcgagttaatggaaggtcaaagaaggagtccttcagcagtgtgaaatggtaccattctgttaattgtattcataagtgatcccagaaaggcaggtagccaggcttaaccaagtttttcaaggaaacaaggacaagaatttaccttgaagaatttctgaaggtccctaaacatttttaaacagcaaaatagcatacaaatgtaatgtgctgcctccragaaaaaagatakgtgagaagtgcaaaaattccaggctagagcaacagcattgagcaatgataaggaactggctccatacaaggaacaagtgcataaggtaggacttcttggaaaaggaataattaaggataaaagtgatggagttctctaggatatcccaagaaacatgtcttttctctcccagtactggaatgagggaacatcaaaatatcaagcagcagattgaggaaataaaaaaatgtaagaaagctttggaaatccttgatgcagaattgttgtgaaaagtagatctgcatgtg

SEQ ID NO: 38793 - DNA, 600 bp, Chicken  19866894270272_2
aaagaaaaactaaagcaaaacaataatcatatggaatataggaaacagaggtgagaataaatgtgtagtgttcgagttaatggaaggtcaaagaaggagtccttcagcagtgtgaaatggtaccattctgttaattgtattcataagtgatcccagaaaggcaggtagccaggcttaaccaagtttttcaaggaaacaaggacaagaatttaccttgaagaatttctgaaggtccctaaacatttttaaacagcaaaatagcatacaaatgtaatgtgctgcctccragaaaaaagatakgtgagaagtgcaaaaattccaggctagagcaacagcattgagcaatgataaggaactggctccatacaaggaacaagtgcataaggtaggacttcttggaaaaggaataattaaggataaaagtgatggagttctctaggatatcccaagaaacatgtcttttctctcccagtactggaatgagggaacatcaaaatatcaagcagcagattgaggaaataaaaaaatgtaagaaagctttggaaatccttgatgcagaattgttgtgaaaagtagatctgcatgtggattaaaaataka

SEQ ID NO: 38794 - DNA, 600 bp, Chicken  19866894270272_3
kgtgagaagtgcaaaaattccaggctagagcaacagcattgagcaatgataaggaactggctccatacaaggaacaagtgcataaggtaggacttcttggaaaaggaataattaaggataaaagtgatggagttctctaggatatcccaagaaacatgtcttttctctcccagtactggaatgagggaacatcaaaatatcaagcagcagattgaggaaataaaaaaatgtaagaaagctttggaaatccttgatgcagaattgttgtgaaaagtagatctgcatgtggattaaaaatakaaaytacagggcagttctttgaagaaaattaatcaaaggcttttaaatacaaattcacaacctctggctttggaagtccctgatctatcrattgatggaggctgttttattttattgatgtgtcgttgcgtgttatcctgcatcttattctgttctttgggtatccccagatattcagttttggcagctcttaaaggcgggatacagggctagagagaccataagccgacccaaattaccttttctttttaatcaagttaagacctttgacttttcgttgagtgacataataagcagtta

SEQ ID NO: 38795 - DNA, 600 bp, Chicken  19866894270272_4
agaagtgcaaaaattccaggctagagcaacagcattgagcaatgataaggaactggctccatacaaggaacaagtgcataaggtaggacttcttggaaaaggaataattaaggataaaagtgatggagttctctaggatatcccaagaaacatgtcttttctctcccagtactggaatgagggaacatcaaaatatcaagcagcagattgaggaaataaaaaaatgtaagaaagctttggaaatccttgatgcagaattgttgtgaaaagtagatctgcatgtggattaaaaatakaaaytacagggcagttctttgaagaaaattaatcaaaggcttttaaatacaaattcacaacctctggctttggaagtccctgatctatcrattgatggaggctgttttattttattgatgtgtcgttgcgtgttatcctgcatcttattctgttctttgggtatccccagatattcagttttggcagctcttaaaggcgggatacagggctagagagaccataagccgacccaaattaccttttctttttaatcaagttaagacctttgacttttcgttgagtgacataataagcagttagcta

SEQ ID NO: 38796 - DNA, 600 bp, Chicken  19866894270272_5
gacttcttggaaaaggaataattaaggataaaagtgatggagttctctaggatatcccaagaaacatgtcttttctctcccagtactggaatgagggaacatcaaaatatcaagcagcagattgaggaaataaaaaaatgtaagaaagctttggaaatccttgatgcagaattgttgtgaaaagtagatctgcatgtggattaaaaatakaaaytacagggcagttctttgaagaaaattaatcaaaggcttttaaatacaaattcacaacctctggctttggaagtccctgatctatcrattgatggaggctgttttattttattgatgtgtcgttgcgtgttatcctgcatcttattctgttctttgggtatccccagatattcagttttggcagctcttaaaggcgggatacagggctagagagaccataagccgacccaaattaccttttctttttaatcaagttaagacctttgacttttcgttgagtgacataataagcagttagctaaatgtcaccaaaaacttaaataaatacatctgtttatttctgcatgtgtgtaagtttataataaataataaataaatggttgaagt

SEQ ID NO: 38797 - DNA, 600 bp, Chicken  19866894270275_1
ctacttgtctcttttgttgaaatggctgatgcaagtgcaaaggtagttaacattgacatgctcatttaggtatgtaagttatctcattctggcctggtcaggaaatgtcattgatatgatacgatacctgttgtgacgcaaccaagcaaacttctgattagaagacttccaaaataaaaagtttgtactcagcagacaaaaaaatgctatcaacaggtgagatgcaaatttttgaaactgtagaaaacatgatgactgcaatgaatgaaaacttaagcgaaattcactgtgttaattttkctctactagaagatgttacggagatatatattgcgaaatgttgaaacgctactgccgagtctccagaaaagacagttgtctgcactttacttgacacatagtaattttttcttccacaaaacaagaaacctttcgtaaaatataaggaatctcctttttcgcctgtcttctacatttgacagtttacatactttgagaattctttaaaagaaaaaacacctgttaagctccccctccatcttccattagcaaaattgctatatgtgcaaaaattccagaaaaataaataaaaaatccagt

SEQ ID NO: 38798 - DNA, 600 bp, Chicken  19866894270281_1
ctaataacaagatcacctgccttttctccagagatcagaatggaaaagaagctgagagtgtgctgcctacatctctccccccagtatctctgtcactagcatgaaatcttgcattttctgttcctcactataaacctctcagagtttttgataacctctgcaatcgctgagcagatctggctgtcccttcatctgcacagaagtttcaggtgggattacttgctggtacagtggctgtcagcctttgtattaggcagcatctgtggggagccctaaggtgagggtcttttagaggatgarcttcatgctttctcataacacgcggagattttgtatagcattattcttcggttgtgtatttctatamtgtaaaaaatagattgaaagtaaattccttgttccaggtgtataaaaacatagcagaaaatctgcagatctgcaaatctgcaggcacctgatggtamcctgcatattttttttttctcttaaaacctctcckttgtgatagagatgttctgtatctataagaaaaattcagtagttatattatgatacgaaatactggtgacagatcataaaaccatgacactttctttccag

SEQ ID NO: 38799 - DNA, 600 bp, Chicken  19866894270281_2
tacatctctccccccagtatctctgtcactagcatgaaatcttgcattttctgttcctcactataaacctctcagagtttttgataacctctgcaatcgctgagcagatctggctgtcccttcatctgcacagaagtttcaggtgggattacttgctggtacagtggctgtcagcctttgtattaggcagcatctgtggggagccctaaggtgagggtcttttagaggatgarcttcatgctttctcataacacgcggagattttgtatagcattattcttcggttgtgtatttctatamtgtaaaaaatagattgaaagtaaattccttgttccaggtgtataaaaacatagcagaaaatctgcagatctgcaaatctgcaggcacctgatggtamcctgcatattttttttttctcttaaaacctctcckttgtgatagagatgttctgtatctataagaaaaattcagtagttatattatgatacgaaatactggtgacagatcataaaaccatgacactttctttccagatctttaatagatcaagattagacccaaatgttcaggagccraatttcactgcctttgctaatactg

SEQ ID NO: 38800 - DNA, 600 bp, Chicken  19866894270281_3
cgctgagcagatctggctgtcccttcatctgcacagaagtttcaggtgggattacttgctggtacagtggctgtcagcctttgtattaggcagcatctgtggggagccctaaggtgagggtcttttagaggatgarcttcatgctttctcataacacgcggagattttgtatagcattattcttcggttgtgtatttctatamtgtaaaaaatagattgaaagtaaattccttgttccaggtgtataaaaacatagcagaaaatctgcagatctgcaaatctgcaggcacctgatggtamcctgcatattttttttttctcttaaaacctctcckttgtgatagagatgttctgtatctataagaaaaattcagtagttatattatgatacgaaatactggtgacagatcataaaaccatgacactttctttccagatctttaatagatcaagattagacccaaatgttcaggagccraatttcactgcctttgctaatactgatcagaaaaaagaacagtggagggaaacagtggttgggactgrgtatgatcaagacttcttcatgatraagggatatcaaaaccagagttacatcct

SEQ ID NO: 38801 - DNA, 600 bp, Chicken  19866894270281_4
gaagtttcaggtgggattacttgctggtacagtggctgtcagcctttgtattaggcagcatctgtggggagccctaaggtgagggtcttttagaggatgarcttcatgctttctcataacacgcggagattttgtatagcattattcttcggttgtgtatttctatamtgtaaaaaatagattgaaagtaaattccttgttccaggtgtataaaaacatagcagaaaatctgcagatctgcaaatctgcaggcacctgatggtamcctgcatattttttttttctcttaaaacctctcckttgtgatagagatgttctgtatctataagaaaaattcagtagttatattatgatacgaaatactggtgacagatcataaaaccatgacactttctttccagatctttaatagatcaagattagacccaaatgttcaggagccraatttcactgcctttgctaatactgatcagaaaaaagaacagtggagggaaacagtggttgggactgrgtatgatcaagacttcttcatgatraagggatatcaaaaccagagttacatcctgacatgagggcagattatatcaaggttacccctgg

SEQ ID NO: 38802 - DNA, 600 bp, Chicken  19866894270281_5
attcttcggttgtgtatttctatamtgtaaaaaatagattgaaagtaaattccttgttccaggtgtataaaaacatagcagaaaatctgcagatctgcaaatctgcaggcacctgatggtamcctgcatattttttttttctcttaaaacctctcckttgtgatagagatgttctgtatctataagaaaaattcagtagttatattatgatacgaaatactggtgacagatcataaaaccatgacactttctttccagatctttaatagatcaagattagacccaaatgttcaggagccraatttcactgcctttgctaatactgatcagaaaaaagaacagtggagggaaacagtggttgggactgrgtatgatcaagacttcttcatgatraagggatatcaaaaccagagttacatcctgacatgagggcagattatatcaaggttacccctggacactcactgagttcctgggttcccttgcactgccacgagccacgctgggatgagtagtgccagcacatcaaccactccacattggaccatgtccttccacagggcagcgtacacagtctttatgcaggaagcagcctgggac

SEQ ID NO: 38803 - DNA, 600 bp, Chicken  19866894270281_6
aaaaacatagcagaaaatctgcagatctgcaaatctgcaggcacctgatggtamcctgcatattttttttttctcttaaaacctctcckttgtgatagagatgttctgtatctataagaaaaattcagtagttatattatgatacgaaatactggtgacagatcataaaaccatgacactttctttccagatctttaatagatcaagattagacccaaatgttcaggagccraatttcactgcctttgctaatactgatcagaaaaaagaacagtggagggaaacagtggttgggactgrgtatgatcaagacttcttcatgatraagggatatcaaaaccagagttacatcctgacatgagggcagattatatcaaggttacccctggacactcactgagttcctgggttcccttgcactgccacgagccacgctgggatgagtagtgccagcacatcaaccactccacattggaccatgtccttccacagggcagcgtacacagtctttatgcaggaagcagcctgggaccaaattgtgattggcaatctctgactttccccaagtctagagagccttgcagaaaacattcaaacacc

SEQ ID NO: 38804 - DNA, 600 bp, Chicken  19866894270281_7
tctgcaaatctgcaggcacctgatggtamcctgcatattttttttttctcttaaaacctctcckttgtgatagagatgttctgtatctataagaaaaattcagtagttatattatgatacgaaatactggtgacagatcataaaaccatgacactttctttccagatctttaatagatcaagattagacccaaatgttcaggagccraatttcactgcctttgctaatactgatcagaaaaaagaacagtggagggaaacagtggttgggactgrgtatgatcaagacttcttcatgatraagggatatcaaaaccagagttacatcctgacatgagggcagattatatcaaggttacccctggacactcactgagttcctgggttcccttgcactgccacgagccacgctgggatgagtagtgccagcacatcaaccactccacattggaccatgtccttccacagggcagcgtacacagtctttatgcaggaagcagcctgggaccaaattgtgattggcaatctctgactttccccaagtctagagagccttgcagaaaacattcaaacaccatgagcctggtgaataaagggtttt

SEQ ID NO: 38805 - DNA, 599 bp, Chicken  19866894270283_1
  misc_feature (1)..(217): n is any nucleotide
nnnnnnnnnnnnnnnnnnnnnnnnnnnnnnnnnnnnnnnnnnnnnnnnnnnnnnnnnnnnnnnnnnnnnnnnnnnnnnnnnnnnnnnnnnnnnnnnnnnnnnnnnnnnnnnnnnnnnnnnnnnnnnnnnnnnnnnnnnnnnnnnnnnnnnnnnnnnnnnnnnnnnnnnnnnnnnnnnnnnnnnnnnnnnnnnnnnnnnnnnnnnnnnnnnnnnnnnntgagagtgtgagggtgatggccgtgtatctctgctggtgactgagcattgcaccgtgccctcctgcacccaggccagcactgmgaacggcttgggttggaagggacctcaaagaccatctatttccaaccccccagctcagtgacatttaccttcaggtctctkcttgggagaatgaatgctttggagtgctsatggagcagggttcgaagcgttcyctggcacaaaacatgtgctgaacgtttcatttcccaccaccgctggggttggtctcatctcccttatcagcagtaactccactgagcaccatttgtcaccactgggagccatttgctcgtggtaaactgatttaaggacaggcacaggatgctgcagggatcctg

SEQ ID NO: 38806 - DNA, 599 bp, Chicken  19866894270283_2
  misc_feature (1)..(136): n is any nucleotide
nnnnnnnnnnnnnnnnnnnnnnnnnnnnnnnnnnnnnnnnnnnnnnnnnnnnnnnnnnnnnnnnnnnnnnnnnnnnnnnnnnnnnnnnnnnnnnnnnnnnnnnnnnnnnnnnnnnnnnnnnnnnnnnnnnnnnnnntgagagtgtgagggtgatggccgtgtatctctgctggtgactgagcattgcaccgtgccctcctgcacccaggccagcactgmgaacggcttgggttggaagggacctcaaagaccatctatttccaaccccccagctcagtgacatttaccttcaggtctctkcttgggagaatgaatgctttggagtgctsatggagcagggttcgaagcgttcyctggcacaaaacatgtgctgaacgtttcatttcccaccaccgctggggttggtctcatctcccttatcagcagtaactccactgagcaccatttgtcaccactgggagccatttgctcgtggtaaactgatttaaggacaggcacaggatgctgcagggatcctgcctgctttgtctggggctgtgactgagaatttgcttgaactgcttaaaaacagagtgagccttaggttcgaagaagcacat

SEQ ID NO: 38807 - DNA, 599 bp, Chicken  19866894270283_3
  misc_feature (1)..(107): n is any nucleotide
nnnnnnnnnnnnnnnnnnnnnnnnnnnnnnnnnnnnnnnnnnnnnnnnnnnnnnnnnnnnnnnnnnnnnnnnnnnnnnnnnnnnnnnnnnnnnnnnnnnnnnnnnnntgagagtgtgagggtgatggccgtgtatctctgctggtgactgagcattgcaccgtgccctcctgcacccaggccagcactgmgaacggcttgggttggaagggacctcaaagaccatctatttccaaccccccagctcagtgacatttaccttcaggtctctkcttgggagaatgaatgctttggagtgctsatggagcagggttcgaagcgttcyctggcacaaaacatgtgctgaacgtttcatttcccaccaccgctggggttggtctcatctcccttatcagcagtaactccactgagcaccatttgtcaccactgggagccatttgctcgtggtaaactgatttaaggacaggcacaggatgctgcagggatcctgcctgctttgtctggggctgtgactgagaatttgcttgaactgcttaaaaacagagtgagccttaggttcgaagaagcacatttgccttttgctttgtatttattaaatgc

SEQ ID NO: 38808 - DNA, 599 bp, Chicken  19866894270283_4
  misc_feature (1)..(83): n is any nucleotide
nnnnnnnnnnnnnnnnnnnnnnnnnnnnnnnnnnnnnnnnnnnnnnnnnnnnnnnnnnnnnnnnnnnnnnnnnnnnnnnnnnntgagagtgtgagggtgatggccgtgtatctctgctggtgactgagcattgcaccgtgccctcctgcacccaggccagcactgmgaacggcttgggttggaagggacctcaaagaccatctatttccaaccccccagctcagtgacatttaccttcaggtctctkcttgggagaatgaatgctttggagtgctsatggagcagggttcgaagcgttcyctggcacaaaacatgtgctgaacgtttcatttcccaccaccgctggggttggtctcatctcccttatcagcagtaactccactgagcaccatttgtcaccactgggagccatttgctcgtggtaaactgatttaaggacaggcacaggatgctgcagggatcctgcctgctttgtctggggctgtgactgagaatttgcttgaactgcttaaaaacagagtgagccttaggttcgaagaagcacatttgccttttgctttgtatttattaaatgcaatataccaatatttatgtgtatt

SEQ ID NO: 38809 - DNA, 600 bp, Chicken  19866894270283_5
gctcgtggtaaactgatttaaggacaggcacaggatgctgcagggatcctgcctgctttgtctggggctgtgactgagaatttgcttgaactgcttaaaaacagagtgagccttaggttcgaagaagcacatttgccttttgctttgtatttattaaatgcaatataccaatatttatgtgtattatggtctggagaccttcagtatttccttttttttctttctttttttcttctttcttttcttatttgtctttttcaactaggaactcaattttcagactagtaggaagctgtggcygtaaaacctccttcctacttcccctctctcaccagttactaaatactgcaaagttcataaattgtgaaagttggcaaatcagagcactgcttcattttgagacagggctggggctgtgagactgccattctgtgctgcctgggacacatccctgccgatggagatgctgggatgtgctcagttgcccaaactgtggatagggaacagctggatgtaaaggtggagtcatgggatcatcatggaatyattaaggttggaaaagatcatggagttcaccaaggccaaccccagtccaccctc

SEQ ID NO: 38810 - DNA, 600 bp, Chicken  19866894270283_6
atttgtctttttcaactaggaactcaattttcagactagtaggaagctgtggcygtaaaacctccttcctacttcccctctctcaccagttactaaatactgcaaagttcataaattgtgaaagttggcaaatcagagcactgcttcattttgagacagggctggggctgtgagactgccattctgtgctgcctgggacacatccctgccgatggagatgctgggatgtgctcagttgcccaaactgtggatagggaacagctggatgtaaaggtggagtcatgggatcatcatggaatyattaaggttggaaaagatcatggagttcaccaaggccaaccccagtccaccctcaccatgcccactgcccacggccctcagtgccacatctccatggctctggaacacctccagggacggtgatcccaccactccctgggcagctgtgccactgcatcaccactctcatagagaasaagtgtttcctattgctagaaacaagggccacctggcttcctgcctggtgggagcgaggtgcctatgtcttctatgtgcagctgctgtcatggtagctggaaacgggctgctgccagcagtatg

SEQ ID NO: 38811 - DNA, 600 bp, Chicken  19866894270283_7
tgccattctgtgctgcctgggacacatccctgccgatggagatgctgggatgtgctcagttgcccaaactgtggatagggaacagctggatgtaaaggtggagtcatgggatcatcatggaatyattaaggttggaaaagatcatggagttcaccaaggccaaccccagtccaccctcaccatgcccactgcccacggccctcagtgccacatctccatggctctggaacacctccagggacggtgatcccaccactccctgggcagctgtgccactgcatcaccactctcatagagaasaagtgtttcctattgctagaaacaagggccacctggcttcctgcctggtgggagcgaggtgcctatgtcttctatgtgcagctgctgtcatggtagctggaaacgggctgctgccagcagtatgctcccacatggaaccacagaatggtttgggttggaagggacctttaagatcatccagttccaaccccgctgctataggcagggacacctccctctagaccaggctgctcacagtcccatccagcctgaccttaaatgcttccagggaaggggtatccacagcctcactgggcaacc

SEQ ID NO: 38812 - DNA, 600 bp, Chicken  19866894270286_1
tgaggcagcctttgcaaagctgtgtccaagcagggctgcagggtggcacttgatgttaggtttggatgtggttgtgctcactgtgcatgcaaactgacgagcctggtgtagagccactctgcagagagaatgccagctctgtaatgcagcaaggaggtggactttgtgcagttatcctttacccccttgcacctttgcaaggaaaagctcttggagagccaattggcagcaactgctgaaactgttgtttggctcctgaaaagagtactgctttcctaagcatgtcttgtcttgacctgraggcagggggccagcgtcctgcaagcagttcccaccgaggtgccaggcagccrtgcttgcagcattgccagcaacagggaggtgtgacagggagataagtcagcaggyatctcgcagggggtctgcagtgagatgccctaggagcagcttgccaacacaaaggtctctgtggtgctgagctgtcgtctaacaagcatttgcccgggctgtgtgccctgagagttttcagccaggtgatattaaaagcagtgaagcaatgccccacctgctgtgttttttgcatggtggggactgccacag

SEQ ID NO: 38813 - DNA, 600 bp, Chicken  19866894270286_2
tgttaggtttggatgtggttgtgctcactgtgcatgcaaactgacgagcctggtgtagagccactctgcagagagaatgccagctctgtaatgcagcaaggaggtggactttgtgcagttatcctttacccccttgcacctttgcaaggaaaagctcttggagagccaattggcagcaactgctgaaactgttgtttggctcctgaaaagagtactgctttcctaagcatgtcttgtcttgacctgraggcagggggccagcgtcctgcaagcagttcccaccgaggtgccaggcagccrtgcttgcagcattgccagcaacagggaggtgtgacagggagataagtcagcaggyatctcgcagggggtctgcagtgagatgccctaggagcagcttgccaacacaaaggtctctgtggtgctgagctgtcgtctaacaagcatttgcccgggctgtgtgccctgagagttttcagccaggtgatattaaaagcagtgaagcaatgccccacctgctgtgttttttgcatggtggggactgccacagctgcccgcatcgtgtgattgctccaggtctgggacacttaccatcaggaacag

SEQ ID NO: 38814 - DNA, 600 bp, Chicken  19866894270286_3
tagagccactctgcagagagaatgccagctctgtaatgcagcaaggaggtggactttgtgcagttatcctttacccccttgcacctttgcaaggaaaagctcttggagagccaattggcagcaactgctgaaactgttgtttggctcctgaaaagagtactgctttcctaagcatgtcttgtcttgacctgraggcagggggccagcgtcctgcaagcagttcccaccgaggtgccaggcagccrtgcttgcagcattgccagcaacagggaggtgtgacagggagataagtcagcaggyatctcgcagggggtctgcagtgagatgccctaggagcagcttgccaacacaaaggtctctgtggtgctgagctgtcgtctaacaagcatttgcccgggctgtgtgccctgagagttttcagccaggtgatattaaaagcagtgaagcaatgccccacctgctgtgttttttgcatggtggggactgccacagctgcccgcatcgtgtgattgctccaggtctgggacacttaccatcaggaacagtttgtgataactgtgctagatgaacggttttgttttaaaattgtttaaaattgca

SEQ ID NO: 38815 - DNA, 600 bp, Chicken  19866894270289_1
tttcacccactagtgtcagtgtgatgggctgactgtcacagcagatggaaatcttctgagaggaagagctgagccctcagagtgaattaattgagttactgtctcttcttctgcttactcccacagtcaaactgaaagctccggccgtcattaatggcagacttctggctgtactgtgaagtgatccttactcctttgctacaagccaatatgaatgcagagtctctgggtttaggtgtttcaagatgcagctgttttcctttttaataacctgcttgtgaaaagtctgtgtgcccacakatcacttcacggtcctatgcaaaatgtagagtgttgagtggcagaaaatactctatcctgcctgatcatgcaagctcctgaggatcttagggtatgtcatcagtgtgaaaaactaacctggtgcttttaactaggcagactgtaagtaactgctttctctttggggacctgccagtgcctgtgcccacaaagggagaattcatgcaagaaaggagtgactgcagaaacacagctggctgtgggacagcactggcttctgccatcttaaaatggctgtgaggctataatttgccttctttt

SEQ ID NO: 38816 - DNA, 599 bp, Chicken  19866894270291_1
  misc_feature (1)..(184): n is any nucleotide
nnnnnnnnnnnnnnnnnnnnnnnnnnnnnnnnnnnnnnnnnnnnnnnnnnnnnnnnnnnnnnnnnnnnnnnnnnnnnnnnnnnnnnnnnnnnnnnnnnnnnnnnnnnnnnnnnnnnnnnnnnnnnnnnnnnnnnnnnnnnnnnnnnnnnnnnnnnnnnnnnnnnnnnnnnnnnnnnnnnnnnnnaagggacagttgcccttgagcaggcaaattgctgcctcatgaatttctgcacatgggttgctgcattagaagcatctgcaacaaaaccccatccattgtaaggagggtatgcctcytgttaagaactagtgctaactgggttacacaattatttgggtactatacaaagcatgtgttcctcttaataaaagatatagtttgtatattaacttccagactacaaagtaaaggattagaaaggatcttttttcatagagatgtagttatccttccatgtgcacacagggatctgtaaaaactaatgaaacagtgattataatggatgaagaaaatatctgactgctacctaattttatctcaaactttggaaggtgtagcaatctgaattatgtttttgctaraatacgtactgcat

SEQ ID NO: 38817 - DNA, 600 bp, Chicken  19866894270291_2
ggagggtatgcctcytgttaagaactagtgctaactgggttacacaattatttgggtactatacaaagcatgtgttcctcttaataaaagatatagtttgtatattaacttccagactacaaagtaaaggattagaaaggatcttttttcatagagatgtagttatccttccatgtgcacacagggatctgtaaaaactaatgaaacagtgattataatggatgaagaaaatatctgactgctacctaattttatctcaaactttggaaggtgtagcaatctgaattatgtttttgctaraatacgtactgcatgtatacacaaggcygtatcagttcacagtgccctttctgcttcttaaaggaacatctctgtagccactgttaacagtatgtttgtcttgtttaatatacatagycaaacagggtgagaacagatttgttcacagtcataaataagtctatatgcattcagtaattcatatayatttaaataataatacgtatgttatacaaaatagacctgataaatargtacatataccttaaacagtaggctactagatttgtagacaatattacgaaatctgaagatgggaaa

SEQ ID NO: 38818 - DNA, 600 bp, Chicken  19866894270291_3
tgctaactgggttacacaattatttgggtactatacaaagcatgtgttcctcttaataaaagatatagtttgtatattaacttccagactacaaagtaaaggattagaaaggatcttttttcatagagatgtagttatccttccatgtgcacacagggatctgtaaaaactaatgaaacagtgattataatggatgaagaaaatatctgactgctacctaattttatctcaaactttggaaggtgtagcaatctgaattatgtttttgctaraatacgtactgcatgtatacacaaggcygtatcagttcacagtgccctttctgcttcttaaaggaacatctctgtagccactgttaacagtatgtttgtcttgtttaatatacatagycaaacagggtgagaacagatttgttcacagtcataaataagtctatatgcattcagtaattcatatayatttaaataataatacgtatgttatacaaaatagacctgataaatargtacatataccttaaacagtaggctactagatttgtagacaatattacgaaatctgaagatgggaaatttcctggaagcagccaatagccaggat

SEQ ID NO: 38819 - DNA, 552 bp, Chicken  19866894270291_4
acaaagtaaaggattagaaaggatcttttttcatagagatgtagttatccttccatgtgcacacagggatctgtaaaaactaatgaaacagtgattataatggatgaagaaaatatctgactgctacctaattttatctcaaactttggaaggtgtagcaatctgaattatgtttttgctaraatacgtactgcatgtatacacaaggcygtatcagttcacagtgccctttctgcttcttaaaggaacatctctgtagccactgttaacagtatgtttgtcttgtttaatatacatagycaaacagggtgagaacagatttgttcacagtcataaataagtctatatgcattcagtaattcatatayatttaaataataatacgtatgttatacaaaatagacctgataaatargtacatataccttaaacagtaggctactagatttgtagacaatattacgaaatctgaagatgggaaatttcctggaagcagccaatagccaggatttgtgatattagatgtcaaccatttaagccttgggtgctgaa

SEQ ID NO: 38820 - DNA, 484 bp, Chicken  19866894270291_5
atctgtaaaaactaatgaaacagtgattataatggatgaagaaaatatctgactgctacctaattttatctcaaactttggaaggtgtagcaatctgaattatgtttttgctaraatacgtactgcatgtatacacaaggcygtatcagttcacagtgccctttctgcttcttaaaggaacatctctgtagccactgttaacagtatgtttgtcttgtttaatatacatagycaaacagggtgagaacagatttgttcacagtcataaataagtctatatgcattcagtaattcatatayatttaaataataatacgtatgttatacaaaatagacctgataaatargtacatataccttaaacagtaggctactagatttgtagacaatattacgaaatctgaagatgggaaatttcctggaagcagccaatagccaggatttgtgatattagatgtcaaccatttaagccttgggtgctgaa

SEQ ID NO: 38821 - DNA, 437 bp, Chicken  19866894270291_6
tctgactgctacctaattttatctcaaactttggaaggtgtagcaatctgaattatgtttttgctaraatacgtactgcatgtatacacaaggcygtatcagttcacagtgccctttctgcttcttaaaggaacatctctgtagccactgttaacagtatgtttgtcttgtttaatatacatagycaaacagggtgagaacagatttgttcacagtcataaataagtctatatgcattcagtaattcatatayatttaaataataatacgtatgttatacaaaatagacctgataaatargtacatataccttaaacagtaggctactagatttgtagacaatattacgaaatctgaagatgggaaatttcctggaagcagccaatagccaggatttgtgatattagatgtcaaccatttaagccttgggtgctgaa

SEQ ID NO: 38822 - DNA, 600 bp, Chicken  19866894270296_1
taaaccataatgaaaagtttattcgatatcatgcaggaaactgacacatttctcatcatttgagcatacaccttttaacatcctaccaggcaccagagctcagccttattttattgtgcccaaagtcaaaatacaatgtatatgtcctattaaagctaccaaagaagtcccacccttattatcaaaccacacctgaaagattaggacatgatcaacgtaccattatatcttcatggcaaaaggccactgtcactctgttttgggtcctctttctcatctcagtaagcaactcaatctcaytggtaggtcaagatctgcccctgagacaactttattctacagtggagagaacaaggtgatggtcaggattctaagactactgccccacttacatattcctgttccttgttactattgccaataattccttatttcartaatactctattctttagcctcactgtcaccaggatactctgctttcctttccatggcaaagtgccagaggaatgaagaacaaacagtccaacttcagttcttcccactctttttctctcagtattctccagtggaaacatcacacaagtagcactctcccaa

SEQ ID NO: 38823 - DNA, 600 bp, Chicken  19866894270296_2
gtatatgtcctattaaagctaccaaagaagtcccacccttattatcaaaccacacctgaaagattaggacatgatcaacgtaccattatatcttcatggcaaaaggccactgtcactctgttttgggtcctctttctcatctcagtaagcaactcaatctcaytggtaggtcaagatctgcccctgagacaactttattctacagtggagagaacaaggtgatggtcaggattctaagactactgccccacttacatattcctgttccttgttactattgccaataattccttatttcartaatactctattctttagcctcactgtcaccaggatactctgctttcctttccatggcaaagtgccagaggaatgaagaacaaacagtccaacttcagttcttcccactctttttctctcagtattctccagtggaaacatcacacaagtagcactctcccaaggatcagtcacactgtacatgatcctatagaacatgtgcctattatacactaatacaaaataactgattatctcattacccaatattactgcatacctgtggtatgagtctaaatcttctgcaagaatacctgagta

SEQ ID NO: 38824 - DNA, 600 bp, Chicken  19866894270299_1
caggcagtcggatcggatggggatcagtgaggcaatgatggttggaaggaaggtggatcgtgaaattattgcccggaggaatagcaggcgagatggaatgatgatgaagttaaacttctgtttcttcttctgtcgacgatggtgggcgtttctgttgctacagctccacatgttgcaagcgctggcacaaggtaaggctagagacatttttgtttatagaaatgctgcgtctgtcttccaagaggaaggcagttttgctcgggtaaagatataccgttttactttgtccctgtcagaggraaactgcagaatttgcagggagttgatttcatgcaggaacggtcattcattatgcacgattctttctttatggagcagggatttgcaggctgtgtctgcatgtttccctttctcattctcctatgcttcccctatccgcacctcccacagagaatcaatggcttatcgggaccgaatctatgcttgtatttacttcaatctttcggtgtgtttctgtgctttttagcgtcaggcagcagaagagttaactgctggttgtgtgtgtttaaaaacactgtgcactgagataagttattagga

SEQ ID NO: 38825 - DNA, 600 bp, Chicken  19866894270300_1
gagaacagtagggggaaatttatgccatttaaatgcaaaccagcaataaaaataatcattagagtcataatctcaatctgttagcattttatgtagaaatgagcttaatgggaaatgtttgccatgtaaactatttgcatttacttagtacgaataagcctcttaaatataattcagtcattaccactgagttttattaagaggttggtttgggtcctaactgctttaaagtgtctgtcttgggagagctgctggcctgccccagccaggatttattgttcatatccccatggatattcytgtttccatactgagaatacatgtggattttgatggcattcagaaaacatctctcttcacccaaactgcactgagattttggggctgaccaaggaggggctgcatttctcagccagatgttggggtcttttcagaggaaaagtgacttcagagcacatttccaggcccttcatttcctagaaacagtgagaagcatctgccaatctttcttagctgctttctccttagtaaaataagaggaaaacgtggcccacagggaggggaaatcagaggtgcccagcagctccaaagaggcttttt

SEQ ID NO: 38826 - DNA, 540 bp, Chicken  19866894270303_1
ggggatgttgtcattgtcctcacatcacatgggcctgcaggaccaacaatccatactagtaagaaggagctccaggaggtaagtcttgaaagaactttgacttcacatgatcactagttaagtaaaggccatggactcagccctcatgtgcacaatcttcatgaaaacagtggagaaaaaaaggtttgactctccgctttttgcttttctacgatgtggctaggctgggagaatcagctgctagaatggcttctagaaggaagaatctccatgtcactcagagatctctccattggcttytgagaatcctattttttgtctttttgctttcccatatttgtaattgctaaatgctaaactgtaagaggaggttgctacactaagacctgaatttgggtgattcattgtgggtttaccaagttcttatggaagccatgaatctcttgaagctataggctgtggtagataataagagttgttaattaaaaatatgaatccaagacaaatatttctcttccatttgcaatcctgactggaaaa

SEQ ID NO: 38827 - DNA, 600 bp, Chicken  19866894270305_1
cacaaccctcttatgtgccgaaagtggcactcagacatcacagtctgtgatttgtgaagatgttcttggatctgtgaaacttctggtgtctaatttcggttagtaaagttcccttagtatttacagtttgtcgactgcatttacctgtaaggactgcctccctgggagttagcttattgccaaaatgtttggcaagtaatattacattcagtgttaaataagttcctcaagaagtaaaggccagatcctgggacctgccatgcacaagccctgcacaaaagaatgtcacagtgatgagtratggtgcaaagtgtggcttcagggcaactagcatttccagaggggaaattaaaagaaaaaagggaagtggatgggggaagaaagcagctagaaatgataacattgtccttctctccatatatgttttaaaagaagagcataaaccaatcttatgtatggaggtggctgtgggctattaagtgctgtcttggctccaacctgggtatgatttgtacacatcttgaatcatggaatcatttgagttggaggagagcccttaaaggtcatctagtccaactcccctgcaatcaacagcagcgc

SEQ ID NO: 38828 - DNA, 600 bp, Chicken  19866894270310_1
tgtccctggtatttatgtctggaaggagtgactcatccttcagagatgtttatatctcttcattaagcctggtaccagcttgcacaagacagctacattcagtgaggtgaatcccaatttattatgacctatgcagtcttaaagctagactcagccaatggtcagatatttattcactgcttcaaaatgaactattgaaataagaaagcaagcataaatatacctactgaacccagcacaccagtggggaaaagactttgcagaatcaatgaccttgatagtcaggagtatagaaaacayctgatgtggtattacagaccatttaaaggctttgagttactataattactggccaagtactatttaaaggtgtaaattcgttttggagtttaagggaaaaaatatttcgttcagtgttatatgcatatgatttggatattgatgtttagggtttgttggatttcttctaatacctgggaaaaggaaggttttctttaaagctaggcttgcacaattattgctgcattttctcacaagcttcacttctaaactgtagctgtttctcaatagtagctaaatttggaaaacagtttaaaaaag

SEQ ID NO: 38829 - DNA, 600 bp, Chicken  19866894270310_2
tgttggatttcttctaatacctgggaaaaggaaggttttctttaaagctaggcttgcacaattattgctgcattttctcacaagcttcacttctaaactgtagctgtttctcaatagtagctaaatttggaaaacagtttaaaaaaggagaaaaagttttggaagacactatgatctcccttactgtctcccccctctccatcccaatttatatatatatatatttacaagtaatatttaatagaacattcagcttattttaaatttctgagaagtttaatcgcatcctcagtctactawattttttccatgaaatatttttactagctcaattttgtcttgttttgccaaagtcctcatgatggattttgcacactgtctgtcgaaaacctgaatgtcatttaaagatttctttgctggacatgcaaaaaaattctgcagtatctgtaattattttgtggaaaaattgtccctgctccctgactacacaattcctcagataattttcttctytgattactgaagcagatcacaaatatgcatttcttcctaaactctgtagcctaaatgcagtcctgtttcctggactgctgccaactg

SEQ ID NO: 38830 - DNA, 600 bp, Chicken  19866894270310_3
tatatatatatttacaagtaatatttaatagaacattcagcttattttaaatttctgagaagtttaatcgcatcctcagtctactawattttttccatgaaatatttttactagctcaattttgtcttgttttgccaaagtcctcatgatggattttgcacactgtctgtcgaaaacctgaatgtcatttaaagatttctttgctggacatgcaaaaaaattctgcagtatctgtaattattttgtggaaaaattgtccctgctccctgactacacaattcctcagataattttcttctytgattactgaagcagatcacaaatatgcatttcttcctaaactctgtagcctaaatgcagtcctgtttcctggactgctgccaactgttgactttgttaaagtttgacttgttaatgatatttaagttctagtaattccaggagaaagaaactaggccctaagagatttacttaattaggacctttgctatctggcatatggaaaattaattggataataccaggtataaagtagttcatgcttgacccaggagagagtatttttgacttgagttagctgggggaatatagtataggtaa

SEQ ID NO: 38831 - DNA, 600 bp, Chicken  19866894270311_1
cctacaaagtgagagagaaggtaaatgacactcccctgccaaaatagcagctcccaagattttggctttcatttggtagaaaatacactatgttccatgttactcgctaagaaaagtgggcacaactctctcttcccgatgcttcaacagttgcattggcgatgctactctatgtagaaccgggccaggttagccctctaagcactgggagttcagctgttttcttgtgcattcttcttttcatattttattactgtaaggagaacacaaagagtgcttgtttctttccttctctctctytttttttctctccagttgacacaatcagtgttatttgaaggaaaaaaaaatgctctcagaatgggaaatagggtgggaaaatgtaataggatctgcaaatcttttctgtcttgtctgagtaaatgggagctgatgagagatgcagcacaatgagggctagggaatgctaactgaactggtatataaagatagtttcattttgcttcatttcattttactgtattgaatttgaaaaggaaaattgcgacggacatgaaagtttgcagtggaaacaccttgggttgctgtacccttgacacg

SEQ ID NO: 38832 - DNA, 599 bp, Chicken  19866894270320_1
  misc_feature (1)..(15): n is any nucleotide
nnnnnnnnnnnnnnnataaaaaaggaattacagaaaagctagactgtgtgcctacaattaatatctggtgagaagaccttggcgaagaaagcaatccaagctttgctaataagctaccactcctgctgccatggctaatatcaagatctatgctgggaatagagcagtctgctgctgctttgaatatttaattatttctttgcttttaaggggttatttttactcacattgctcactaattttcacagaatgtcaaagaattccagtaaaattaagttcagtaaactacttggacatgamtgataacaacatagacaactacaagattttaatcagttattacagtttgaaagaatatgctcattaattgtgctttgcaaattaatggctgttcatagtaaatatgtaaacagaaartgtgaagaatttgcacaagaatttttatcgttaccacttmatttctaacatcttcccaagttagtcctgaagttcaatgccaggagatgtgttgtgcagaatttacttataagacaacgtgaatgttttggtcaaatactaattagctaagctcagtttattaattaacagcagcatacttc

SEQ ID NO: 38833 - DNA, 600 bp, Chicken  19866894270320_2
cactcctgctgccatggctaatatcaagatctatgctgggaatagagcagtctgctgctgctttgaatatttaattatttctttgcttttaaggggttatttttactcacattgctcactaattttcacagaatgtcaaagaattccagtaaaattaagttcagtaaactacttggacatgamtgataacaacatagacaactacaagattttaatcagttattacagtttgaaagaatatgctcattaattgtgctttgcaaattaatggctgttcatagtaaatatgtaaacagaaartgtgaagaatttgcacaagaatttttatcgttaccacttmatttctaacatcttcccaagttagtcctgaagttcaatgccaggagatgtgttgtgcagaatttacttataagacaacgtgaatgttttggtcaaatactaattagctaagctcagtttattaattaacagcagcatacttccagcaaagtcatttcttctcctgcttaaaatggtttgcatcttcttttcagcactccctgaatgggataagaaaattgaaaatgcctttctgtctctctatgacagtttgttttggga

SEQ ID NO: 38834 - DNA, 600 bp, Chicken  19866894270320_3
aatagagcagtctgctgctgctttgaatatttaattatttctttgcttttaaggggttatttttactcacattgctcactaattttcacagaatgtcaaagaattccagtaaaattaagttcagtaaactacttggacatgamtgataacaacatagacaactacaagattttaatcagttattacagtttgaaagaatatgctcattaattgtgctttgcaaattaatggctgttcatagtaaatatgtaaacagaaartgtgaagaatttgcacaagaatttttatcgttaccacttmatttctaacatcttcccaagttagtcctgaagttcaatgccaggagatgtgttgtgcagaatttacttataagacaacgtgaatgttttggtcaaatactaattagctaagctcagtttattaattaacagcagcatacttccagcaaagtcatttcttctcctgcttaaaatggtttgcatcttcttttcagcactccctgaatgggataagaaaattgaaaatgcctttctgtctctctatgacagtttgttttgggaatgtaaggcaaaaggaaaaccaaccccttcctacagctgg

SEQ ID NO: 38835 - DNA, 600 bp, Chicken  19866894270321_1
atggcagcaggagtggtagcttattagcaaagcttggattgctttcttcgccaaggtcttctcaccagatattaattgtaggcacacagtctagcttttctgtaattccttttttattaagaagttttattttttctcttgttttcaaagacctatcaggtaaggaaaagacctccatatctcttactcatgcacaaactttgcttttttccctgagtattaaaaacaggactaaagagtatataatttgctttggctacagtggaacatcatgcataacttggaccacaggaaattaaygcgtaggatgggaagggaaatgggagaacagtttcacagaaatattattgcctgtttttacacaaggaggaaggagagggaggcaacaagatgagtttcccctgctttggcctcatctgtttctggagaaacattgttcagctagaactcatatgaaccaaaatctcatgaatccttccctaatctgcatcaggggcagcacagttttctgctgctgtgagctactgagagtaaatctttttgcctgcccttaatgtttcatgtaaatgtacctgggatttttttctgccttgtattaac

SEQ ID NO: 38836 - DNA, 600 bp, Chicken  19866894270324_1
ttacagggtggatgggattagctgccccaagggcaccctaaccctaatcagcccaacaaggggggctgggggtcccatcctgccagccaggagccccacggtgccccagcagggacgcattctgtcccactcacctgggtcatttggctgttcccctttgctggatcccaaaacaaccccacatgccctccatcagccaggacctaacccagcttgcagcctgcccaggcaggggcagccacccccggcactctgcaggcacattcaggcacacagtgcctggagcacaacgcggaagcrcagaggtggggcgcacattgctcgctccatggtgggatttgctgtaagggcccctccgtcacacaaggagcaggtttattttaatcagattaattaaacacctgatgctgacagagcatcactgggcacagcagcactggggggagmcactgggggcggtggctctggaatgcgtgtgggacggggctgggctctgcagagtgttgttgtgtcatttatagaaagaaatgaaaggaaacctttgctaacatagagaaattcttctggatacggcacattcatcaaatgcaattcattgct

SEQ ID NO: 38837 - DNA, 595 bp, Chicken  19866894270324_2
ctgttcccctttgctggatcccaaaacaaccccacatgccctccatcagccaggacctaacccagcttgcagcctgcccaggcaggggcagccacccccggcactctgcaggcacattcaggcacacagtgcctggagcacaacgcggaagcrcagaggtggggcgcacattgctcgctccatggtgggatttgctgtaagggcccctccgtcacacaaggagcaggtttattttaatcagattaattaaacacctgatgctgacagagcatcactgggcacagcagcactggggggagmcactgggggcggtggctctggaatgcgtgtgggacggggctgggctctgcagagtgttgttgtgtcatttatagaaagaaatgaaaggaaacctttgctaacatagagaaattcttctggatacggcacattcatcaaatgcaattcattgctgtgtgctcaccaggacaggatgggatgggggatcacccggggggaccgcagcccacagcaacccccaaccatcaccaaagggtaaacccaaatatgtacagccaaaaactggcacgggtgacagcacttccactgccctggg

SEQ ID NO: 38838 - DNA, 599 bp, Chicken  19866894270329_1
  misc_feature (1)..(17): n is any nucleotide
nnnnnnnnnnnnnnnnntttcacaaaaaataatcaaatatccttcataattagacaccagataagtgttcaagtatcataggaaataaggaagaaatatttatatcacttaaaacatttagttgttgaacaaattaaaaattaaaattagaaatttgttgaaataaaaataagccctaatggaaaatcacagaatccacagaactgtaggggttggaagggacatctaagagatcattgagtccgaccctcctgcaaagcaggcctcctacagcaggctgcacaagtagatgaccagacrggtcttgaataactccagagaagaatccacaaccttcctgggcagcctgttccagtgctctgccaccctcactgtgaagaagtttcttcctatgctcaagtttacagccatatctccttgtcctgtccctacagactgctgaaaaaaggttggctatgtctctttgactcccacacttaagatatttataaacattaataggatcgcctctgagtcttcttttctcatggctgaacagacccaggttgctcagcccttcctcatagggaagatgctccaggccctttatcatctttgtg

SEQ ID NO: 38839 - DNA, 589 bp, Chicken  19866894270329_2
gaagaagtttcttcctatgctcaagtttacagccatatctccttgtcctgtccctacagactgctgaaaaaaggttggctatgtctctttgactcccacacttaagatatttataaacattaataggatcgcctctgagtcttcttttctcatggctgaacagacccaggttgctcagcccttcctcatagggaagatgctccaggccctttatcatctttgtggctgtctgcaggactttctccaggagatcagtatcttttctgtaccagggagtcccgaactgaatacagtactccmggtgaggcctgtcattttattcctgtctataccaagatgcaaatgcacgtgcagggaggaagctgcattataaatatgagcatagatttctgtttttcacagctgactttcttcgaaaagaattctttccctgacctagatgttcaacataatagttaagaaacggagaccaaattgctcttcaattttaataatgaatctgaaagtggaggaactagactctgtctttagttcctgatttttttaatagcaaaaatttttttcatataattccttcatgtaaatatcc

SEQ ID NO: 38840 - DNA, 600 bp, Chicken  19866894270339_1
agtgcctctgaaaatgcttcccaaaatataattgctatttccagccttgggacttgcaggatccagaaatacaacaggcctcttatataactcaccttattgctattgtgagtcaagcagcaaggggcagatgttttttagggtgctttagggtgttttatttggtaatgtgttacttgataaagaaatgattaggctaattgagggaaaagctagaaagaaataggttaaagaggtcttaaagtacagcttaaaataattaaatctggcagtctatttagcagagacaaaaataaacaycaagttagcaaacaaaggacagtaaaaggaaayraagggtataaatggtgcagcaaaagaatcactgatgtacagtatagtttataatatctaactcgtgaatggggggaaaattgtacatgtgtacatatggacataaatatatacatttaatactacattgttttttatattttgtcagaacaactatcacaactattttataagtgaaaatttttgctaggtagatggatataaatcatctttactttgacttatgggcttgatttaaagatgaacagccacttccacttatttttg

SEQ ID NO: 38841 - DNA, 600 bp, Chicken  19866894270339_2
gctatttccagccttgggacttgcaggatccagaaatacaacaggcctcttatataactcaccttattgctattgtgagtcaagcagcaaggggcagatgttttttagggtgctttagggtgttttatttggtaatgtgttacttgataaagaaatgattaggctaattgagggaaaagctagaaagaaataggttaaagaggtcttaaagtacagcttaaaataattaaatctggcagtctatttagcagagacaaaaataaacaycaagttagcaaacaaaggacagtaaaaggaaayraagggtataaatggtgcagcaaaagaatcactgatgtacagtatagtttataatatctaactcgtgaatggggggaaaattgtacatgtgtacatatggacataaatatatacatttaatactacattgttttttatattttgtcagaacaactatcacaactattttataagtgaaaatttttgctaggtagatggatataaatcatctttactttgacttatgggcttgatttaaagatgaacagccacttccacttatttttgtccctcttctctctagaatagtgggaaaatctg

SEQ ID NO: 38842 - DNA, 600 bp, Chicken  19866894270339_3
ctatttccagccttgggacttgcaggatccagaaatacaacaggcctcttatataactcaccttattgctattgtgagtcaagcagcaaggggcagatgttttttagggtgctttagggtgttttatttggtaatgtgttacttgataaagaaatgattaggctaattgagggaaaagctagaaagaaataggttaaagaggtcttaaagtacagcttaaaataattaaatctggcagtctatttagcagagacaaaaataaacaycaagttagcaaacaaaggacagtaaaaggaaayraagggtataaatggtgcagcaaaagaatcactgatgtacagtatagtttataatatctaactcgtgaatggggggaaaattgtacatgtgtacatatggacataaatatatacatttaatactacattgttttttatattttgtcagaacaactatcacaactattttataagtgaaaatttttgctaggtagatggatataaatcatctttactttgacttatgggcttgatttaaagatgaacagccacttccacttatttttgtccctcttctctctagaatagtgggaaaatctgt

SEQ ID NO: 38843 - DNA, 600 bp, Chicken  19866894270339_4
atttttgtccctcttctctctagaatagtgggaaaatctgttaatactactatcaggtatagttgtgctcccaaactgcacactgcagtcatcagtctcataatacctaggttttccttggcatctccattctgtatgaatatttattatatttattatttgttattgtatttaccttagtgctacaaagccctggattgtggatcagagtaagcacaaatgattcctgccctgaagcactttacagtcaaacaaagaaatgggagaagtgaggaatacagacaggagaggcagcacatrgaattgtgacactgtacattagacattacaagaaagagaagytttaagtaacatattgaagacaaatgattagcaactttgtgaccatttagaggatccctagaaagcaaaggcagccaaaagaacatatagaggcagatgtttaaacatgttacggtgggctgtgaaaactggcatcatgagctgaagggagctgcagtaagacctcagaagtgaatggaaatggcaagcaaggtgaagacaggctatcaggcctttcaaactaaagacaccttagtaagaatcaacatgacagaggag

SEQ ID NO: 38844 - DNA, 600 bp, Chicken  19866894270339_5
aatactactatcaggtatagttgtgctcccaaactgcacactgcagtcatcagtctcataatacctaggttttccttggcatctccattctgtatgaatatttattatatttattatttgttattgtatttaccttagtgctacaaagccctggattgtggatcagagtaagcacaaatgattcctgccctgaagcactttacagtcaaacaaagaaatgggagaagtgaggaatacagacaggagaggcagcacatrgaattgtgacactgtacattagacattacaagaaagagaagytttaagtaacatattgaagacaaatgattagcaactttgtgaccatttagaggatccctagaaagcaaaggcagccaaaagaacatatagaggcagatgtttaaacatgttacggtgggctgtgaaaactggcatcatgagctgaagggagctgcagtaagacctcagaagtgaatggaaatggcaagcaaggtgaagacaggctatcaggcctttcaaactaaagacaccttagtaagaatcaacatgacagaggaggctgagccagtggagagatgaaaagagagaaataacttggtg

SEQ ID NO: 38845 - DNA, 599 bp, Chicken  19866894270341_1
  misc_feature (1)..(6): n is any nucleotide
nnnnnnatgacgagggaatttgtatcaggtgtgaaaaggagcaagacttctgccatcctgaggagactccttctccttctctgcctggggaaggagagaaatggccccttagaaatgcaatcagctcagggcaaggagggcagggaatgcaggtgtccacgtccccccgggcaagtgagcacagaggctccctccacacccctcagtctgtgatttaagctgttatggaggcatcaaggacccctgagctctgttttggctttagatccactcccaaactatgctgcatcccccacagcrcctggaaaagacaccaggaaaagcagggcagaggaactccagcttaccaagtgccagcaggtgggattgcaagcgccagtcccacacactaacatcttatttccatgctttgctattaaggtgatgaagtttttattgtcctcctgcaagagaaagaagaggatcatgagcagctgtgaacggcaggcagcagccctgcagctccaagtctacagcgctatcagcactctgctatatggcttctcagctttcccataggtgttaaaaccagaggagcagtcctccagcccgagtcctcc

SEQ ID NO: 38846 - DNA, 600 bp, Chicken  19866894270341_2
gaggatcatgagcagctgtgaacggcaggcagcagccctgcagctccaagtctacagcgctatcagcactctgctatatggcttctcagctttcccataggtgttaaaaccagaggagcagtcctccagcccgagtcctccaacccacatatgctgttcctccaaaggcaggacctaccgggctcccaggcttcaaacactgtgctccattttccactgggaactctacctagtgtaaaagagaaagagagaggctttaatcactgccctctcaaggacggctgagaggggcccagtctygtgtgccacgtacttagctgctctcttagcaagaagcaaagcaagcgtgtcagtcagaaggtcataaacacagcagctcagccttcttccccatctgaaagcccttgggaggcactgacgtggcaggactgggtcctctcagccctttggtggtgacgtggagaagtggggacgcagggccgaagcagcgagcacagccccgggttgcaccccaaaggatttcaggagagggtctgctcacaaggagtgagcattcagcagtggatgtccaaggactgggacacacgaaccccgctgttc

SEQ ID NO: 38847 - DNA, 600 bp, Chicken  19866894270345_1
tctaatgccacagaaagcatgagactgacttcacaaaggctgctatgaggcacctatgttccctttcaccagttcagcctaatgattggcagcctgcagttataatctcctagacataaaaaaatggcgaagactcaacaaattctgtagatgtctaaatcactatcaactgttaaataaggaagaagaaataagtgaaatggattaaagggaactcttccccttgccccatttcttaagctaatatttatgatcttttactaatgaggtattaaaatctgaatatttgaagtatattcrtttttttcactcccactgatacagacacgtctttattatgcatatttgttcagtacagtcatgctgtttccaacttccatctaattactgtttatgtcattatagttcctaggagcccagtcacagaccagaaagctactgtgctaaatgtggaagacaaacaaaacaaaaaagtctagaaacccaaagattacagcaaatctgtccatttacgtaaatgtcatatttccagtcagttttattttgtctctaattattttactatgtacattcttccctcatagggaagaatttcttcct

SEQ ID NO: 38848 - DNA, 600 bp, Chicken  19866894270346_1
ctgcgccctccatccctttggctgttagatctgcgcaagaaaggttgctctaattttctggaagggtgactcacagatgatggtgaccagatgaccccttgtgccagggagcagcagatagagcagggtccccttcctgcaggagcagcggtgtgaagaatggaggtgggagaagagcagtgagggctttgtgtcaggaggggttctggtgagctggacctgttttgtagttgctgtgagcccttgttctctttccttctttgctatgaaggaacaagagggaggtggtacatggggtgwggaagccctgcacacacttggcaggcagtcccrggacacagtgacacttccttcctctgagtatggaaacatccacgctcagaagatatctatgctgtgcttaaacctgtggccttgcctccttcagcagtgcttgtctcctacactgctctgagaaaatatgtatgaaagcctcagagagcctgacaaacctgacaagtgatttcttggacaaatttggaccaaggaaggaatgtgggggatgagaacaagagatggscatttttacartgatcccccaaggaatggaacaagagaccg

SEQ ID NO: 38849 - DNA, 600 bp, Chicken  19866894270346_2
cgcaagaaaggttgctctaattttctggaagggtgactcacagatgatggtgaccagatgaccccttgtgccagggagcagcagatagagcagggtccccttcctgcaggagcagcggtgtgaagaatggaggtgggagaagagcagtgagggctttgtgtcaggaggggttctggtgagctggacctgttttgtagttgctgtgagcccttgttctctttccttctttgctatgaaggaacaagagggaggtggtacatggggtgwggaagccctgcacacacttggcaggcagtcccrggacacagtgacacttccttcctctgagtatggaaacatccacgctcagaagatatctatgctgtgcttaaacctgtggccttgcctccttcagcagtgcttgtctcctacactgctctgagaaaatatgtatgaaagcctcagagagcctgacaaacctgacaagtgatttcttggacaaatttggaccaaggaaggaatgtgggggatgagaacaagagatggscatttttacartgatcccccaaggaatggaacaagagaccgacaatgaaatgacctgcagaatgtttttacatc

SEQ ID NO: 38850 - DNA, 600 bp, Chicken  19866894270346_3
tttgctatgaaggaacaagagggaggtggtacatggggtgwggaagccctgcacacacttggcaggcagtcccrggacacagtgacacttccttcctctgagtatggaaacatccacgctcagaagatatctatgctgtgcttaaacctgtggccttgcctccttcagcagtgcttgtctcctacactgctctgagaaaatatgtatgaaagcctcagagagcctgacaaacctgacaagtgatttcttggacaaatttggaccaaggaaggaatgtgggggatgagaacaagagatggscatttttacartgatcccccaaggaatggaacaagagaccgacaatgaaatgacctgcagaatgtttttacatctcacagtgtgggaactgcaaggtaggtggggtgaactgtacggcttcattttatcagtaacctgtagaatgttatattccctttcagaattgctataacatcgatgggagaattcctcaggtggataataccaagaagtgcttcctgtgaggaaaaggkgagagtggctgctggcattacccatcacagtgagtgagtgcctgtaytgctccagggggtatgggct

SEQ ID NO: 38851 - DNA, 600 bp, Chicken  19866894270346_4
ggaacaagagggaggtggtacatggggtgwggaagccctgcacacacttggcaggcagtcccrggacacagtgacacttccttcctctgagtatggaaacatccacgctcagaagatatctatgctgtgcttaaacctgtggccttgcctccttcagcagtgcttgtctcctacactgctctgagaaaatatgtatgaaagcctcagagagcctgacaaacctgacaagtgatttcttggacaaatttggaccaaggaaggaatgtgggggatgagaacaagagatggscatttttacartgatcccccaaggaatggaacaagagaccgacaatgaaatgacctgcagaatgtttttacatctcacagtgtgggaactgcaaggtaggtggggtgaactgtacggcttcattttatcagtaacctgtagaatgttatattccctttcagaattgctataacatcgatgggagaattcctcaggtggataataccaagaagtgcttcctgtgaggaaaaggkgagagtggctgctggcattacccatcacagtgagtgagtgcctgtaytgctccagggggtatgggctwgtgcccaggc

SEQ ID NO: 38852 - DNA, 600 bp, Chicken  19866894270346_5
tgacaagtgatttcttggacaaatttggaccaaggaaggaatgtgggggatgagaacaagagatggscatttttacartgatcccccaaggaatggaacaagagaccgacaatgaaatgacctgcagaatgtttttacatctcacagtgtgggaactgcaaggtaggtggggtgaactgtacggcttcattttatcagtaacctgtagaatgttatattccctttcagaattgctataacatcgatgggagaattcctcaggtggataataccaagaagtgcttcctgtgaggaaaaggkgagagtggctgctggcattacccatcacagtgagtgagtgcctgtaytgctccagggggtatgggctwgtgcccaggcagtgcgagcctggggaccaggctctgcatgggatccacrcttcaggctgctgcctccctctgaggtggaggcagataggtgcgtgccgggtgcaggccgttctgacggatgagtggagttcttaatacacagggaagagtgtggtgtttgcgccaatgccattctccagatagcagtcagaaggcaggctgttttgtcagtaggaggctgttggggatgggg

SEQ ID NO: 38853 - DNA, 600 bp, Chicken  19866894270346_6
ggatgagaacaagagatggscatttttacartgatcccccaaggaatggaacaagagaccgacaatgaaatgacctgcagaatgtttttacatctcacagtgtgggaactgcaaggtaggtggggtgaactgtacggcttcattttatcagtaacctgtagaatgttatattccctttcagaattgctataacatcgatgggagaattcctcaggtggataataccaagaagtgcttcctgtgaggaaaaggkgagagtggctgctggcattacccatcacagtgagtgagtgcctgtaytgctccagggggtatgggctwgtgcccaggcagtgcgagcctggggaccaggctctgcatgggatccacrcttcaggctgctgcctccctctgaggtggaggcagataggtgcgtgccgggtgcaggccgttctgacggatgagtggagttcttaatacacagggaagagtgtggtgtttgcgccaatgccattctccagatagcagtcagaaggcaggctgttttgtcagtaggaggctgttggggatggggaggctggtgtcagctcagcactcaggctggccacagcactcagcagc

SEQ ID NO: 38854 - DNA, 600 bp, Chicken  19866894270346_7
atttttacartgatcccccaaggaatggaacaagagaccgacaatgaaatgacctgcagaatgtttttacatctcacagtgtgggaactgcaaggtaggtggggtgaactgtacggcttcattttatcagtaacctgtagaatgttatattccctttcagaattgctataacatcgatgggagaattcctcaggtggataataccaagaagtgcttcctgtgaggaaaaggkgagagtggctgctggcattacccatcacagtgagtgagtgcctgtaytgctccagggggtatgggctwgtgcccaggcagtgcgagcctggggaccaggctctgcatgggatccacrcttcaggctgctgcctccctctgaggtggaggcagataggtgcgtgccgggtgcaggccgttctgacggatgagtggagttcttaatacacagggaagagtgtggtgtttgcgccaatgccattctccagatagcagtcagaaggcaggctgttttgtcagtaggaggctgttggggatggggaggctggtgtcagctcagcactcaggctggccacagcactcagcagcaaggaataaccaacagagagc

SEQ ID NO: 38855 - DNA, 600 bp, Chicken  19866894270346_8
tgacctgcagaatgtttttacatctcacagtgtgggaactgcaaggtaggtggggtgaactgtacggcttcattttatcagtaacctgtagaatgttatattccctttcagaattgctataacatcgatgggagaattcctcaggtggataataccaagaagtgcttcctgtgaggaaaaggkgagagtggctgctggcattacccatcacagtgagtgagtgcctgtaytgctccagggggtatgggctwgtgcccaggcagtgcgagcctggggaccaggctctgcatgggatccacrcttcaggctgctgcctccctctgaggtggaggcagataggtgcgtgccgggtgcaggccgttctgacggatgagtggagttcttaatacacagggaagagtgtggtgtttgcgccaatgccattctccagatagcagtcagaaggcaggctgttttgtcagtaggaggctgttggggatggggaggctggtgtcagctcagcactcaggctggccacagcactcagcagcaaggaataaccaacagagagcggagagaaccacgttcaggtgtgccaggagtaagttaatgcccagggtc

SEQ ID NO: 38856 - DNA, 599 bp, Chicken  19866894270355_1
  misc_feature (1)..(123): n is any nucleotide
nnnnnnnnnnnnnnnnnnnnnnnnnnnnnnnnnnnnnnnnnnnnnnnnnnnnnnnnnnnnnnnnnnnnnnnnnnnnnnnnnnnnnnnnnnnnnnnnnnnnnnnnnnnnnnnnnnnnnnnnnnncagcaagaggctgtctcactcagaattcaagcaggacacagggatagtcaagacaactcagtagcctggcagtgttcctttggccctgtgtgctgtctgttctgaccaagaacctcccctagtcattttggagtacaagtaagcaccctcacatcactccagacagcatcaccaatrrtttgtgatttgcatgggcacctgtgtagagcagtcactcatccccagaagagtagtgaagcttgtgctgaaccttgctcctgtgcagagtcactgctgttgcaggagctatttagattaaagctgacacaggtatcgctcccratgctgtcattgtatttactgtgtcagcatagatgggccttcacagataccgttgacatcagccaacagttttttacaggaaattactcyctgataataccctcgcagcaaatatatatatactaatgtcccctttactgcatttgtttgacata

SEQ ID NO: 38857 - DNA, 599 bp, Chicken  19866894270355_2
  misc_feature (1)..(122): n is any nucleotide
nnnnnnnnnnnnnnnnnnnnnnnnnnnnnnnnnnnnnnnnnnnnnnnnnnnnnnnnnnnnnnnnnnnnnnnnnnnnnnnnnnnnnnnnnnnnnnnnnnnnnnnnnnnnnnnnnnnnnnnnnncagcaagaggctgtctcactcagaattcaagcaggacacagggatagtcaagacaactcagtagcctggcagtgttcctttggccctgtgtgctgtctgttctgaccaagaacctcccctagtcattttggagtacaagtaagcaccctcacatcactccagacagcatcaccaatrrtttgtgatttgcatgggcacctgtgtagagcagtcactcatccccagaagagtagtgaagcttgtgctgaaccttgctcctgtgcagagtcactgctgttgcaggagctatttagattaaagctgacacaggtatcgctcccratgctgtcattgtatttactgtgtcagcatagatgggccttcacagataccgttgacatcagccaacagttttttacaggaaattactcyctgataataccctcgcagcaaatatatatatactaatgtcccctttactgcatttgtttgacatag

SEQ ID NO: 38858 - DNA, 600 bp, Chicken  19866894270355_3
agaattcaagcaggacacagggatagtcaagacaactcagtagcctggcagtgttcctttggccctgtgtgctgtctgttctgaccaagaacctcccctagtcattttggagtacaagtaagcaccctcacatcactccagacagcatcaccaatrrtttgtgatttgcatgggcacctgtgtagagcagtcactcatccccagaagagtagtgaagcttgtgctgaaccttgctcctgtgcagagtcactgctgttgcaggagctatttagattaaagctgacacaggtatcgctcccratgctgtcattgtatttactgtgtcagcatagatgggccttcacagataccgttgacatcagccaacagttttttacaggaaattactcyctgataataccctcgcagcaaatatatatatactaatgtcccctttactgcatttgtttgacatagcaaactaaaatgcaatagcatggccacttcatgtgcctagtgctgttacacaccctcagagtcttaatgcctgtagcactgcacatgttttaacacttttaacaacatctacctctttttctctccttaactgtgcatgggatc

SEQ ID NO: 38859 - DNA, 600 bp, Chicken  19866894270355_4
acctcccctagtcattttggagtacaagtaagcaccctcacatcactccagacagcatcaccaatrrtttgtgatttgcatgggcacctgtgtagagcagtcactcatccccagaagagtagtgaagcttgtgctgaaccttgctcctgtgcagagtcactgctgttgcaggagctatttagattaaagctgacacaggtatcgctcccratgctgtcattgtatttactgtgtcagcatagatgggccttcacagataccgttgacatcagccaacagttttttacaggaaattactcyctgataataccctcgcagcaaatatatatatactaatgtcccctttactgcatttgtttgacatagcaaactaaaatgcaatagcatggccacttcatgtgcctagtgctgttacacaccctcagagtcttaatgcctgtagcactgcacatgttttaacacttttaacaacatctacctctttttctctccttaactgtgcatgggatctcaggtcttttcctcagggctgggtgagctcttgctccacaccgtgctgcagcacagggtcctggatgttccccgtaggagtttaatgag

SEQ ID NO: 38860 - DNA, 600 bp, Chicken  19866894270355_5
ctttatactcaagaatttttatttttggtcatccagctgcccttacatactctaacctctatgcccaattcatcttcattgccccaacattcttgagaggcaagcaaagttttcccctaatgtctagctactctatcagaaagataaacacagcacttgtaaatcttcatcttgcaaaatttgttgccagatattttccaaatccttaccttgaaaccagctgtataagaataaaagaaaaataggcacttcatacatacatttgtaaaagccctactttttttaaccccccagtttgamatgggggatggttggattttctctctgtcagagcacttcttcccattttctgtattttcatgcttcagtactgctctagctaaaaattccgtgtataaagaggcagcctaattttgcagtgtcagaggtttgtgctgaaagctgtttatgactttctgcccttaaatatacactgcatcacaaggcactctttccagtgcatgtttgtatacagttggtaagggtgaccttgacacaaaaggatgtttctgtcatcagcgcgatgcctcaatcctgtttcagtggcatagtatatgtttg

SEQ ID NO: 38861 - DNA, 600 bp, Chicken  19866894270359_1
tgctgttatggatgggtgcaggtgtctcacaggtcttgtatcacagatggcagtttcttagggcttttctgaggctgcctgaaatagctccagtacttggggtcagctgtgtcaagactcgagcgaatttctgacaatagcagtgagcttctgtcaaggaggttattggctctgagggtgacattggggaacacactgtgtgcactcagtctgcacttagcctgctctggagatggagaccattccaataaatctcaatgtccaacacatagaaaagaaaacctgtgcttcttaaatcartgggattgtttccagtaatttctgcctcacttggttctgatttaaatatatatttaggaatcagggcttttccccatctttagacaagttagtattcctactcaggattactaattatcagagagccattttaaatggacatgcctctactgaattggatttgtgagataagttaaggaaaaggcagttgtgtaatttgcacacaaagtggttggaattgatctaaaacaaacctttaactttcaaactggtttaaatggggaaaagaccattggataattacatcatttaacacattga

SEQ ID NO: 38862 - DNA, 600 bp, Chicken  19866894270365_1
ttgtccactaaaaaataaagtctaaataattggctttactcctatctgctcttcttaaagttttgataagtgtgggcaaattcttctctgaagccaattaaactaaagacttttgtaaagaacaggacataaagaaaaaaaaacagatacaatatcacatacaaaataatgcggaattccattcctcttaccacaataataacctcaaagagtttgctttcacaaataattcaactctcatgaaagtgatataactcagctgaaatcagtggagtttgcaacagctctgaactttgattyactgttttgttcaaatggtttaaactttccttggtatgtgatttaataaagacaaaatggaaccatctatcctagctgctactgaataatttaatacactctcttttttagctatagataaacagaagatattatgacatgtctccatcagctatagaaatatccacttatgaaggagactgctctgggaagtccttctaaactaaaggatatgctgaaaataagagctcttgctgccatgagagacaayaattagggctacctgggtcttgagtacgatcattttctttggtttatata

SEQ ID NO: 38863 - DNA, 600 bp, Chicken  19866894270365_2
ataactcagctgaaatcagtggagtttgcaacagctctgaactttgattyactgttttgttcaaatggtttaaactttccttggtatgtgatttaataaagacaaaatggaaccatctatcctagctgctactgaataatttaatacactctcttttttagctatagataaacagaagatattatgacatgtctccatcagctatagaaatatccacttatgaaggagactgctctgggaagtccttctaaactaaaggatatgctgaaaataagagctcttgctgccatgagagacaayaattagggctacctgggtcttgagtacgatcattttctttggtttatatagttacagcactccctgctttgttgccaacgtgccctcacagccaaacaaaagacctcctccrtgacttcacaagagcaggagaaaaggcaaccagtgaacagggagctgtgataatgttggtgttctttcccagaagtttgcctttgccagcctagattaattagaaatrtatgtaatttaagtatgtatttcagaatagagaaagggaataatagaaaaaaaatacaagagttgaaggaactgaaatct

SEQ ID NO: 38864 - DNA, 600 bp, Chicken  19866894270365_3
ccatctatcctagctgctactgaataatttaatacactctcttttttagctatagataaacagaagatattatgacatgtctccatcagctatagaaatatccacttatgaaggagactgctctgggaagtccttctaaactaaaggatatgctgaaaataagagctcttgctgccatgagagacaayaattagggctacctgggtcttgagtacgatcattttctttggtttatatagttacagcactccctgctttgttgccaacgtgccctcacagccaaacaaaagacctcctccrtgacttcacaagagcaggagaaaaggcaaccagtgaacagggagctgtgataatgttggtgttctttcccagaagtttgcctttgccagcctagattaattagaaatrtatgtaatttaagtatgtatttcagaatagagaaagggaataatagaaaaaaaatacaagagttgaaggaactgaaatcttaatatttagatattcctaaatgatttatacaccatttattcctctgtgtttatttaatgctcagcaggctgctagaaagcaaatcgacatgcttcatccccaagccttata

SEQ ID NO: 38865 - DNA, 498 bp, Chicken  19866894270365_4
tgaaggagactgctctgggaagtccttctaaactaaaggatatgctgaaaataagagctcttgctgccatgagagacaayaattagggctacctgggtcttgagtacgatcattttctttggtttatatagttacagcactccctgctttgttgccaacgtgccctcacagccaaacaaaagacctcctccrtgacttcacaagagcaggagaaaaggcaaccagtgaacagggagctgtgataatgttggtgttctttcccagaagtttgcctttgccagcctagattaattagaaatrtatgtaatttaagtatgtatttcagaatagagaaagggaataatagaaaaaaaatacaagagttgaaggaactgaaatcttaatatttagatattcctaaatgatttatacaccatttattcctctgtgtttatttaatgctcagcaggctgctagaaagcaaatcgacatgcttcatccccaagccttatacacagt

SEQ ID NO: 38866 - DNA, 600 bp, Chicken  19866894270377_1
catgaagaggcaaaagctcgggggagaccgtgttgcagctttccagttgttgaggggagcttataggcaggaggggaggctggctttttacactgtccaatagcaacaggacaagggggaatggctttaaactagaagaggggttagatggtaggaagaaattctttaaagggtgctcaaagctatgttggatgggaccaggggaacctgacctggtgtgtggcagccctgccagtggtgggggttgaaactagatgatatttaacattctttccaaactaagccattctgagattctaygaccctttagggaactgcctctctctctaacagaaagaactacaggagcagagaactgacaaatcttattattttttaatagccataaaacaaacagtatyttcctctacccattrcaatagctcacaytaaatttcagttgagtggttaactacacaggaagagttttaatgctaaatagatgaatatgttgacgcagcctgagaagtctacagaaatgataaattctgggctgccagcagtgttacagagtaaagccaccagcatcttctccatcttgagcctcttgaaagaaaagga

SEQ ID NO: 38867 - DNA, 600 bp, Chicken  19866894270377_2
agcaacaggacaagggggaatggctttaaactagaagaggggttagatggtaggaagaaattctttaaagggtgctcaaagctatgttggatgggaccaggggaacctgacctggtgtgtggcagccctgccagtggtgggggttgaaactagatgatatttaacattctttccaaactaagccattctgagattctaygaccctttagggaactgcctctctctctaacagaaagaactacaggagcagagaactgacaaatcttattattttttaatagccataaaacaaacagtatyttcctctacccattrcaatagctcacaytaaatttcagttgagtggttaactacacaggaagagttttaatgctaaatagatgaatatgttgacgcagcctgagaagtctacagaaatgataaattctgggctgccagcagtgttacagagtaaagccaccagcatcttctccatcttgagcctcttgaaagaaaaggaacaatgaagacacttttactacatgatcttcacgtgttttactatcaaataattctgttacatggccacatgcttctacatctttcctcccatctatttaa

SEQ ID NO: 38868 - DNA, 600 bp, Chicken  19866894270377_3
gggaatggctttaaactagaagaggggttagatggtaggaagaaattctttaaagggtgctcaaagctatgttggatgggaccaggggaacctgacctggtgtgtggcagccctgccagtggtgggggttgaaactagatgatatttaacattctttccaaactaagccattctgagattctaygaccctttagggaactgcctctctctctaacagaaagaactacaggagcagagaactgacaaatcttattattttttaatagccataaaacaaacagtatyttcctctacccattrcaatagctcacaytaaatttcagttgagtggttaactacacaggaagagttttaatgctaaatagatgaatatgttgacgcagcctgagaagtctacagaaatgataaattctgggctgccagcagtgttacagagtaaagccaccagcatcttctccatcttgagcctcttgaaagaaaaggaacaatgaagacacttttactacatgatcttcacgtgttttactatcaaataattctgttacatggccacatgcttctacatctttcctcccatctatttaaaacttcagagtcaag

SEQ ID NO: 38869 - DNA, 600 bp, Chicken  19866894270377_4
aactagaagaggggttagatggtaggaagaaattctttaaagggtgctcaaagctatgttggatgggaccaggggaacctgacctggtgtgtggcagccctgccagtggtgggggttgaaactagatgatatttaacattctttccaaactaagccattctgagattctaygaccctttagggaactgcctctctctctaacagaaagaactacaggagcagagaactgacaaatcttattattttttaatagccataaaacaaacagtatyttcctctacccattrcaatagctcacaytaaatttcagttgagtggttaactacacaggaagagttttaatgctaaatagatgaatatgttgacgcagcctgagaagtctacagaaatgataaattctgggctgccagcagtgttacagagtaaagccaccagcatcttctccatcttgagcctcttgaaagaaaaggaacaatgaagacacttttactacatgatcttcacgtgttttactatcaaataattctgttacatggccacatgcttctacatctttcctcccatctatttaaaacttcagagtcaagaactggaggaaac

SEQ ID NO: 38870 - DNA, 599 bp, Chicken  19866894270383_1
  misc_feature (1)..(16): n is any nucleotide
nnnnnnnnnnnnnnnnactccaatctttttataactggtttgcaaagtcaggaaaagcaatgtaatttagataaatgttacaatgcacttacggttggtatcgtagggcaatacgttactgtcacatccccgtgctttggatggtaatgaaatcatagcagatgttagattagggctggtgtatttatagctacagatacgttagaaaatcaaagagaacccaatagatgtatatatatatatatatatatatatattttacagagctgcaattgttggcgagctctgtgggcacacatsacggatacgtatcgggttcgctctgcgctcggcttgctcagggagcggggaggcaggctccaggcagacgcacacacgcacaaatgtcatgagttcttgttgtttttttcccccaacgcttctgtagcctccagccagggttagtccctgccgcccgcccgctcctgggacggagaaggagaaaacaaaaatccccgctctccgttccgccctacgcacggccgccggagcagcgcgggtcgcggccggtcccaaacctctcctctccctccgccggcaatctctgagccctgggaaca

SEQ ID NO: 38871 - DNA, 600 bp, Chicken  19866894270389_1
ttatcttcaaaactcttctgctattaatgcccgcacaaattgtgataggtctttatactcagagtctgtactggttgctttcactttgctacctctatcccagaagttgcagagggaactctttgggccagagtttctgttctgtagcagaattctgttggatgttggtgcatgtgacaaaggaaatactgtagtacggacagaacgtatgtaagctactaagcaccccactgtgttgattttacttctcaatactgaatctttccccacaaaaaggaacgtattgaagatcctgctttyatggggagcattgctgaatggaacgcattcctttttgtagtgcarctctgatggcacaaacttatgactmgaggagaggcaagcagggtggatgtttctgtgaatggaaactgggtttgtgctatagagtgaaagctgacgtgtgtctgtgtatgactgtaagttcaggtgacagcattgcaaacttcctttccttcatacggctacagtttgtagccatgcaactttcaaaacactttaagctcagaaataggttggattgtgaatgagtacctaaattatgctgtgcttcaccgtgac

SEQ ID NO: 38872 - DNA, 600 bp, Chicken  19866894270389_2
taggtctttatactcagagtctgtactggttgctttcactttgctacctctatcccagaagttgcagagggaactctttgggccagagtttctgttctgtagcagaattctgttggatgttggtgcatgtgacaaaggaaatactgtagtacggacagaacgtatgtaagctactaagcaccccactgtgttgattttacttctcaatactgaatctttccccacaaaaaggaacgtattgaagatcctgctttyatggggagcattgctgaatggaacgcattcctttttgtagtgcarctctgatggcacaaacttatgactmgaggagaggcaagcagggtggatgtttctgtgaatggaaactgggtttgtgctatagagtgaaagctgacgtgtgtctgtgtatgactgtaagttcaggtgacagcattgcaaacttcctttccttcatacggctacagtttgtagccatgcaactttcaaaacactttaagctcagaaataggttggattgtgaatgagtacctaaattatgctgtgcttcaccgtgacagacatggggtgtttttctgactcttgggagcatgttatttatgt

SEQ ID NO: 38873 - DNA, 600 bp, Chicken  19866894270389_3
ctggttgctttcactttgctacctctatcccagaagttgcagagggaactctttgggccagagtttctgttctgtagcagaattctgttggatgttggtgcatgtgacaaaggaaatactgtagtacggacagaacgtatgtaagctactaagcaccccactgtgttgattttacttctcaatactgaatctttccccacaaaaaggaacgtattgaagatcctgctttyatggggagcattgctgaatggaacgcattcctttttgtagtgcarctctgatggcacaaacttatgactmgaggagaggcaagcagggtggatgtttctgtgaatggaaactgggtttgtgctatagagtgaaagctgacgtgtgtctgtgtatgactgtaagttcaggtgacagcattgcaaacttcctttccttcatacggctacagtttgtagccatgcaactttcaaaacactttaagctcagaaataggttggattgtgaatgagtacctaaattatgctgtgcttcaccgtgacagacatggggtgtttttctgactcttgggagcatgttatttatgtggcaccatctgaggcacattataat

SEQ ID NO: 38874 - DNA, 599 bp, Chicken  19866894270391_1
  misc_feature (1)..(27): n is any nucleotide
nnnnnnnnnnnnnnnnnnnnnnnnnnncagggacatttgcatcccaaagaaaggtatcattttgctgttggaagggaataagtcaggctaacctggctttcaccatgctgaatatcaacccccaattaccagtacttagtaactgtgaaattgacagataccaagaagaaattctcttttttagccttaaatttgactgctgtactcaagaaactaagactagcaagcatcctgtgcttgtcagggcttgaaaattttgatctctaatgcacagctgaaagggaaaaaaaaaatattttragtaaggatcaatgttcccacagcaccagcagtggaaaagagggaaaatgaaatagcctgcagagaggctgaacgaagacyaaacaactgagcctcctacagccacagggcaggggatgaggttcaggcagcaacactcaagcacatgaaagaacaagaggtaaaatagcttcaaggtctgctaacttcagaaaaggttttcacttggatggtctaagtaccaactactaccatatttcaaggatgcaggcccctctattttgacttccctacttccagagacaaacaggctttggcag

SEQ ID NO: 38875 - DNA, 600 bp, Chicken  19866894270391_2
gtcaggctaacctggctttcaccatgctgaatatcaacccccaattaccagtacttagtaactgtgaaattgacagataccaagaagaaattctcttttttagccttaaatttgactgctgtactcaagaaactaagactagcaagcatcctgtgcttgtcagggcttgaaaattttgatctctaatgcacagctgaaagggaaaaaaaaaatattttragtaaggatcaatgttcccacagcaccagcagtggaaaagagggaaaatgaaatagcctgcagagaggctgaacgaagacyaaacaactgagcctcctacagccacagggcaggggatgaggttcaggcagcaacactcaagcacatgaaagaacaagaggtaaaatagcttcaaggtctgctaacttcagaaaaggttttcacttggatggtctaagtaccaactactaccatatttcaaggatgcaggcccctctattttgacttccctacttccagagacaaacaggctttggcaggtttgctacctgcatccttatccctccaacattcatggcaccaactctcagtgcacmaagcagtaactgaaggcaagatctg

SEQ ID NO: 38876 - DNA, 600 bp, Chicken  19866894270391_3
cctgcagagaggctgaacgaagacyaaacaactgagcctcctacagccacagggcaggggatgaggttcaggcagcaacactcaagcacatgaaagaacaagaggtaaaatagcttcaaggtctgctaacttcagaaaaggttttcacttggatggtctaagtaccaactactaccatatttcaaggatgcaggcccctctattttgacttccctacttccagagacaaacaggctttggcaggtttgctacctgcatccttatccctccaacattcatggcaccaactctcagtgcacmaagcagtaactgaaggcaagatctgcttgcaggctcagccacarcttccaacacatctttgagcaagtgatctgctctacttcctgacatttcaagtggagtacccgcagttatttgacagtgaagatacacatattttcatttactacttgcacctgcagatgttctagctgaaaacattggcgaacacttggatttcatcattaccaccacagaagctcatcagtcatctgcacaacaccctacaaataaccacatattgcacaactattcctcagagcatccgtcaatagtagtttt

SEQ ID NO: 38877 - DNA, 600 bp, Chicken  19866894270391_4
agccacagggcaggggatgaggttcaggcagcaacactcaagcacatgaaagaacaagaggtaaaatagcttcaaggtctgctaacttcagaaaaggttttcacttggatggtctaagtaccaactactaccatatttcaaggatgcaggcccctctattttgacttccctacttccagagacaaacaggctttggcaggtttgctacctgcatccttatccctccaacattcatggcaccaactctcagtgcacmaagcagtaactgaaggcaagatctgcttgcaggctcagccacarcttccaacacatctttgagcaagtgatctgctctacttcctgacatttcaagtggagtacccgcagttatttgacagtgaagatacacatattttcatttactacttgcacctgcagatgttctagctgaaaacattggcgaacacttggatttcatcattaccaccacagaagctcatcagtcatctgcacaacaccctacaaataaccacatattgcacaactattcctcagagcatccgtcaatagtagttttgtcttcttcctatactgttttcattccttaagcacatattacct

SEQ ID NO: 38878 - DNA, 599 bp, Chicken  19866894270393_1
  misc_feature (1)..(16): n is any nucleotide
nnnnnnnnnnnnnnnntgcaccaggtgtttgtaaatagttttgcttgggttgctgtctgagacgaaccagtttggcgctgattccttagctaggtctactcagctgtagttgcaaaggtgctgtggaacacgcatcaacctaattgcacaatggattttaaaaaagaaataaatactggcattaatcatgactgttcaggctcctggtaatttcaataaatcatattccaatcatgtacctggatgagaggtacgtaatttgtgcaaagaaacaacagaaaatattttcaaactgcccaygtttctggttttaaagaagtaattttctttaacactagaaaaaaaaacccttgcacagggttggcttggtgtgggtttctttacaatctgttcatatacaacaacagctgagacaatgcagagtaaacagacgtaatatccctgcaaacactgatgctatccactggccttcccaagcagggcattccatcatttgtcagtgaactaaattctctattaaaattaagttgaacaaagaaaaacagaatgagaagcaaagagttggtgtttgggttagttttttgtttgtgctttttttt

SEQ ID NO: 38879 - DNA, 600 bp, Chicken  19866894270394_1
acttaaacagaaatactggcttgcatgccatgttgaggaagcctgtttgggtaggaaaatgaatatggaacatcctactataagttaactatttctgagcattgaagctgtctatatgagctgtatcaacctgccatgccggaatttgtcttcggtcttcttaaacacttactgttactggttttgactgcttgttccaatctgttgttttccattaattctgctgaaacaactctcaaaaagtttctcatgatgttatccaagttacaattattctggctctctttcacctttgatacygtcagcatagtgttctcaatgtgtcacattaattctcttgatttattaattctcttgattttatctgatgccaagtcatgagtttacctttcttccaaagatcttccaaagtccttgtcactattgaaattttaccattactttgctagcttctcatgaatgatctgcagaaacattcataaaaacggaggtctttcattcactgcctstctgttgtgtagcatctgtcacttggcctgtcactcactttcatactccaggtgttttccttagtgaaaacctttccccagaacctcacat

SEQ ID NO: 38880 - DNA, 600 bp, Chicken  19866894270394_2
ttccattaattctgctgaaacaactctcaaaaagtttctcatgatgttatccaagttacaattattctggctctctttcacctttgatacygtcagcatagtgttctcaatgtgtcacattaattctcttgatttattaattctcttgattttatctgatgccaagtcatgagtttacctttcttccaaagatcttccaaagtccttgtcactattgaaattttaccattactttgctagcttctcatgaatgatctgcagaaacattcataaaaacggaggtctttcattcactgcctstctgttgtgtagcatctgtcacttggcctgtcactcactttcatactccaggtgttttccttagtgaaaacctttccccagaacctcacatctatgagatatctgaaaattaccttatttcttttggtcttcacagccggctacttgaaaccaaactatgtggtctgcagaaatgtgtcattctataaactgaatctcactgctttgtgattgctcttttatttgttggaagggagtaattatttaattactttgaattgaaagctgaaaccgttctctaatttactttcaaacactgtc

SEQ ID NO: 38881 - DNA, 599 bp, Chicken  19866894270396_1
  misc_feature (1)..(112): n is any nucleotide
nnnnnnnnnnnnnnnnnnnnnnnnnnnnnnnnnnnnnnnnnnnnnnnnnnnnnnnnnnnnnnnnnnnnnnnnnnnnnnnnnnnnnnnnnnnnnnnnnnnnnnnnnnnnnnnnctgcggcagacaggtggagatctgaggcttgctgctaattgttgaccaagtcactctttgcggatcataatctagaaaatagccacacagaagacggtgtggtcacctctgtgcctataaactaatgacacttttttttcttcattctaatatgcccaattatgtaagatgaaaatttaggcagtgtkgtacatgtgagggagttctttcagcagagcttgtttggctcttctccaaaccctggtgtataaagcaatagttccaacaaacacgatacaaccagagttagtaaaatcacagtgtaactggacctctcaccttcagtgttytccattcttcttggctctctccagttcttaaygcatttcttcactatcatgatgggctgcaaaaagagatttttgtcctcttttctgtgcttgttgtaggaagttcatcagatcaggatagtggagaaggtgtttgattaaagtcaaattcattctga

SEQ ID NO: 38882 - DNA, 600 bp, Chicken  19866894270396_2
tgctgctaattgttgaccaagtcactctttgcggatcataatctagaaaatagccacacagaagacggtgtggtcacctctgtgcctataaactaatgacacttttttttcttcattctaatatgcccaattatgtaagatgaaaatttaggcagtgtkgtacatgtgagggagttctttcagcagagcttgtttggctcttctccaaaccctggtgtataaagcaatagttccaacaaacacgatacaaccagagttagtaaaatcacagtgtaactggacctctcaccttcagtgttytccattcttcttggctctctccagttcttaaygcatttcttcactatcatgatgggctgcaaaaagagatttttgtcctcttttctgtgcttgttgtaggaagttcatcagatcaggatagtggagaaggtgtttgattaaagtcaaattcattctgataggtgctggctgcagctcatgagatagcatgtagtcaaaagacagctttttgtgactacagatagagagaaattaaaattacagctgataatcatgggacaactacatgaagatgtattatggactgttatctgctaacac

SEQ ID NO: 38883 - DNA, 600 bp, Chicken  19866894270396_3
ggatcataatctagaaaatagccacacagaagacggtgtggtcacctctgtgcctataaactaatgacacttttttttcttcattctaatatgcccaattatgtaagatgaaaatttaggcagtgtkgtacatgtgagggagttctttcagcagagcttgtttggctcttctccaaaccctggtgtataaagcaatagttccaacaaacacgatacaaccagagttagtaaaatcacagtgtaactggacctctcaccttcagtgttytccattcttcttggctctctccagttcttaaygcatttcttcactatcatgatgggctgcaaaaagagatttttgtcctcttttctgtgcttgttgtaggaagttcatcagatcaggatagtggagaaggtgtttgattaaagtcaaattcattctgataggtgctggctgcagctcatgagatagcatgtagtcaaaagacagctttttgtgactacagatagagagaaattaaaattacagctgataatcatgggacaactacatgaagatgtattatggactgttatctgctaacacagattcacaacaatcacatgcatacatactct

SEQ ID NO: 38884 - DNA, 600 bp, Chicken  19866894270397_1
acacctaattttttattcttttgaggaagctgatattaaaaaaaaaaaaaaaaacaatggtgattggctatgtcttttaattcagatcaaatgaaagtaattttatcacgagtaattcctcttttattggtcacctccctccaaagttcttcttagaaaacaaaatgcagttcttgttactttctcattcaaagttgctgaatgtaaatgaacttttagaaacaatacagaatccatttgtcaggataataacagttctctgtaacaattctttctgtctcttcctgctccccctacccrcattaattataatgctcttgcagaacagagcttgattcccttttttattaaggttgtttcactctattattgattaagcttatttcccatgataaataaccttcctgtcaaaaaatgatttatgaaagccagtggtctttctttttccagtttgcttttcctgtggttacatattacatattatctcccgctgactggtttgggcagtctttgaatctacaattactggtcctcattaagagagccgaatttcagtgctgtaaaaggcttagagattgatcaggtgaaccatttaatttt

SEQ ID NO: 38885 - DNA, 600 bp, Chicken  19866894270401_1
gcgtttgttagaaaatttctgacttacctaacaaactgtttcatacttgattgcatgctagatttcacactgccccaattcccaggtgcatgtatgactaaatcctgcttctcctgatgttagaaagcaatgtttccgttgacttcaaaagtagcaggatttcctctgttgttagagggaacatgtacaccctcttcactctacctgatgtgccagagaaggagctgagccaatggctctttgtgacaactagaggtgactttttcccactcattattttattgcagcctcacaaaaacwatggaagaattttctttgatgggcaatgtcactcagcccaaygttgcagtccagtctgctccactgaaaccraactcctctacagttctgttttyggtacagagaggtaagcttgggcacgttgttggatttacaagcacaaggaggtatgtaccataaattctaaygcagatgttgttaatttttctagatacaaccctgggatattttccatcaacaaaactagaaatacaggaaaaygtccctgggcttactagtgaactgagtactgaagtccagatactgctcgatgttaagagt

SEQ ID NO: 38886 - DNA, 600 bp, Chicken  19866894270401_2
atacttgattgcatgctagatttcacactgccccaattcccaggtgcatgtatgactaaatcctgcttctcctgatgttagaaagcaatgtttccgttgacttcaaaagtagcaggatttcctctgttgttagagggaacatgtacaccctcttcactctacctgatgtgccagagaaggagctgagccaatggctctttgtgacaactagaggtgactttttcccactcattattttattgcagcctcacaaaaacwatggaagaattttctttgatgggcaatgtcactcagcccaaygttgcagtccagtctgctccactgaaaccraactcctctacagttctgttttyggtacagagaggtaagcttgggcacgttgttggatttacaagcacaaggaggtatgtaccataaattctaaygcagatgttgttaatttttctagatacaaccctgggatattttccatcaacaaaactagaaatacaggaaaaygtccctgggcttactagtgaactgagtactgaagtccagatactgctcgatgttaagagtaacagtaagttctttcacctactgaaacctgaaccyggcaac

SEQ ID NO: 38887 - DNA, 600 bp, Chicken  19866894270401_3
ccccaattcccaggtgcatgtatgactaaatcctgcttctcctgatgttagaaagcaatgtttccgttgacttcaaaagtagcaggatttcctctgttgttagagggaacatgtacaccctcttcactctacctgatgtgccagagaaggagctgagccaatggctctttgtgacaactagaggtgactttttcccactcattattttattgcagcctcacaaaaacwatggaagaattttctttgatgggcaatgtcactcagcccaaygttgcagtccagtctgctccactgaaaccraactcctctacagttctgttttyggtacagagaggtaagcttgggcacgttgttggatttacaagcacaaggaggtatgtaccataaattctaaygcagatgttgttaatttttctagatacaaccctgggatattttccatcaacaaaactagaaatacaggaaaaygtccctgggcttactagtgaactgagtactgaagtccagatactgctcgatgttaagagtaacagtaagttctttcacctactgaaacctgaaccyggcaacattttgagtgaatattccctaaaaacatgc

SEQ ID NO: 38888 - DNA, 600 bp, Chicken  19866894270401_4
gactaaatcctgcttctcctgatgttagaaagcaatgtttccgttgacttcaaaagtagcaggatttcctctgttgttagagggaacatgtacaccctcttcactctacctgatgtgccagagaaggagctgagccaatggctctttgtgacaactagaggtgactttttcccactcattattttattgcagcctcacaaaaacwatggaagaattttctttgatgggcaatgtcactcagcccaaygttgcagtccagtctgctccactgaaaccraactcctctacagttctgttttyggtacagagaggtaagcttgggcacgttgttggatttacaagcacaaggaggtatgtaccataaattctaaygcagatgttgttaatttttctagatacaaccctgggatattttccatcaacaaaactagaaatacaggaaaaygtccctgggcttactagtgaactgagtactgaagtccagatactgctcgatgttaagagtaacagtaagttctttcacctactgaaacctgaaccyggcaacattttgagtgaatattccctaaaaacatgctttggaaataaatttaagaaaac

SEQ ID NO: 38889 - DNA, 600 bp, Chicken  19866894270401_5
gttgttagagggaacatgtacaccctcttcactctacctgatgtgccagagaaggagctgagccaatggctctttgtgacaactagaggtgactttttcccactcattattttattgcagcctcacaaaaacwatggaagaattttctttgatgggcaatgtcactcagcccaaygttgcagtccagtctgctccactgaaaccraactcctctacagttctgttttyggtacagagaggtaagcttgggcacgttgttggatttacaagcacaaggaggtatgtaccataaattctaaygcagatgttgttaatttttctagatacaaccctgggatattttccatcaacaaaactagaaatacaggaaaaygtccctgggcttactagtgaactgagtactgaagtccagatactgctcgatgttaagagtaacagtaagttctttcacctactgaaacctgaaccyggcaacattttgagtgaatattccctaaaaacatgctttggaaataaatttaagaaaacctgtacctgaatgcaaacttttttataacaacgtttttgatgcatgttggtaccatatataatggcacaaaa

SEQ ID NO: 38890 - DNA, 600 bp, Chicken  19866894270401_6
ttgtgacaactagaggtgactttttcccactcattattttattgcagcctcacaaaaacwatggaagaattttctttgatgggcaatgtcactcagcccaaygttgcagtccagtctgctccactgaaaccraactcctctacagttctgttttyggtacagagaggtaagcttgggcacgttgttggatttacaagcacaaggaggtatgtaccataaattctaaygcagatgttgttaatttttctagatacaaccctgggatattttccatcaacaaaactagaaatacaggaaaaygtccctgggcttactagtgaactgagtactgaagtccagatactgctcgatgttaagagtaacagtaagttctttcacctactgaaacctgaaccyggcaacattttgagtgaatattccctaaaaacatgctttggaaataaatttaagaaaacctgtacctgaatgcaaacttttttataacaacgtttttgatgcatgttggtaccatatataatggcacaaaaacgtacatgtcaaatgagctagatgatcttacttatagattaatgccagatgtgcctgtaatggatagaaagc

SEQ ID NO: 38891 - DNA, 600 bp, Chicken  19866894270401_7
cccaaygttgcagtccagtctgctccactgaaaccraactcctctacagttctgttttyggtacagagaggtaagcttgggcacgttgttggatttacaagcacaaggaggtatgtaccataaattctaaygcagatgttgttaatttttctagatacaaccctgggatattttccatcaacaaaactagaaatacaggaaaaygtccctgggcttactagtgaactgagtactgaagtccagatactgctcgatgttaagagtaacagtaagttctttcacctactgaaacctgaaccyggcaacattttgagtgaatattccctaaaaacatgctttggaaataaatttaagaaaacctgtacctgaatgcaaacttttttataacaacgtttttgatgcatgttggtaccatatataatggcacaaaaacgtacatgtcaaatgagctagatgatcttacttatagattaatgccagatgtgcctgtaatggatagaaagctttgcatgttttttttttttcccacttgttttgttctttaaaaattcagcacgtaatgaatctttgaccaaatctctgcagacataaagatcaaaa

SEQ ID NO: 38892 - DNA, 600 bp, Chicken  19866894270403_1
gggacatcctcatctcttggaacttggttcttctgctgtctgtgtctcactggagatggagcagaagtccatgactcaggaaagtttgcccaactcaggaacccttgccgaaaattcggttatttgaagagactgtgtaccgttctggttttctactttgtggaagttatttggtttggaaggagagcgtcccagaagagggtcgaataggaaagcaaatgtaattgcaatagtcttggtgtactgtccatacagggcaaagatcccatgccaaaaatgggagaaaatgaagtgcagtgractaaaattggcgctgaaccatttggaaacaagaaatgaggctggatcagaactccgtcttgcccagagcacagtttagaatacagagctgaattccttgagtgtattcctagctgaaactgcagctagtagagcagttaagatctcgagtctttggctgatttgatggttgatagtaggctgttatgactagaggaaaatctctgttttctctcaagggatggaaaaatactaactcaaaagaggatgacaacttttatttttgaaggaaagcatataaatattaataagtgatccatc

SEQ ID NO: 38893 - DNA, 600 bp, Chicken  19866894270408_1
tgttactgtagcagaggttaactgctgttattattgagcaatgcacctcttgattatccaatcaataacaacatttgaagcctgatatggttgctgatagcttcgtttttcccctcactctttttctcttatttctacagtaggtgttgcttgtcatggacccatttcctggttcttctccttaagggcattgtttcaactaccctagctgactgcatagaaagtcaaggattcattcttgctgaaatctctggtaagtgttttcaaatccaaagacttttgttagtttcaaggcagtcyagctgcatcgtgcatgtcttgatagtgagaaatatagtaggagatgttatgtgtaaccagaaattgtatctattaatactgtgtggagagttgactttaccattctatctgcctacttttacttcactgtttttgttcttcttcttgctgttaatgataatgttgagaatgagaactacccacatcacttctagaccggtccttactgtgcctagtaagggaaagtgaaatccttctgaatcagaagtctggggttcatatggattctctcaatactgcaaaaaagataacaaaaaatca

SEQ ID NO: 38894 - DNA, 600 bp, Chicken  19866894270416_1
accctggcacctaagcacttccaagtttgcaagcttttaatcataagtttactacttctggcttgttctgctatcatggctggcactcatcactgagctggaactgcttctgtgagcagagatcagcggcaatgggaacagagacaagctaagcagagagaaaacgaaagaacgtgacttctctctgaaacgagtcaggaagttgggaaagagtgcaactgagggtgggaaagcttcaagtagaactactcaactttctcatcaatttaaaaatgaaaaggatgtttacaataatagcaygtaagattaaatctatcaattatttcaagtgcggtcccaatccattaggattcagcggcaaagccagctactattaaatataatatgacctcccaccacactggtaatttacaaagtggaggtgtaaaatggaggcttcatcactagtaaggcttacagaatgcacacagatctgataattactgttcatcaacttgtagcatgccacagatctctacttaaagcagcctttcttcttttacgtgaggcttcttctacatagatggtatcagaggcaccgaaattgaactaaggtcttcc

SEQ ID NO: 38895 - DNA, 599 bp, Chicken  19866894270421_1
  misc_feature (1)..(16): n is any nucleotide
nnnnnnnnnnnnnnnncaggtatggtagttctccttctaatgtgctatgtggctttataaatggcaagggtcatgtctttgtaggatttgcaacaaagatgaaagttctctcagagcctctttcctgagagctaaatccacataaatccagggctttcaagatttttctaagctgggaaatgttgagcacacagataaagatcggtcgtcttatttttattattattattttatttcagcagctgcagaaaggaatatgtatgcagtgtcatgaatttaacacgtttgggtctgtcctayaactcccgttgtttttctgcaaccactgttmaatatttgctaatctgagttgttctgattctttgtgtttctgttgtttggctgttgactgattagattcttagtgtgtacatttcctctgaatatcccagagctgaggggttttgtttttgttttttttgcagtatcctacagcacttcaggttatcaaatgctcattccaagtttgtgcatgccagagcaattgtaaaactgaaggaatgaggcctgactatttgggttataggtaacttcattttaataataacctctaccragtg

SEQ ID NO: 38896 - DNA, 600 bp, Chicken  19866894270421_2
tccttctaatgtgctatgtggctttataaatggcaagggtcatgtctttgtaggatttgcaacaaagatgaaagttctctcagagcctctttcctgagagctaaatccacataaatccagggctttcaagatttttctaagctgggaaatgttgagcacacagataaagatcggtcgtcttatttttattattattattttatttcagcagctgcagaaaggaatatgtatgcagtgtcatgaatttaacacgtttgggtctgtcctayaactcccgttgtttttctgcaaccactgttmaatatttgctaatctgagttgttctgattctttgtgtttctgttgtttggctgttgactgattagattcttagtgtgtacatttcctctgaatatcccagagctgaggggttttgtttttgttttttttgcagtatcctacagcacttcaggttatcaaatgctcattccaagtttgtgcatgccagagcaattgtaaaactgaaggaatgaggcctgactatttgggttataggtaacttcattttaataataacctctaccragtggcaagaatatacatgtattcagtatatgttgc

SEQ ID NO: 38897 - DNA, 423 bp, Chicken  19866894270421_3
cctayaactcccgttgtttttctgcaaccactgttmaatatttgctaatctgagttgttctgattctttgtgtttctgttgtttggctgttgactgattagattcttagtgtgtacatttcctctgaatatcccagagctgaggggttttgtttttgttttttttgcagtatcctacagcacttcaggttatcaaatgctcattccaagtttgtgcatgccagagcaattgtaaaactgaaggaatgaggcctgactatttgggttataggtaacttcattttaataataacctctaccragtggcaagaatatacatgtattcagtatatgttgctgtcatggtctgcctgttccttgagctttccttacatttctgtgggtctttagatcaaacccttttactgcatgcagcgatgcatac

SEQ ID NO: 38898 - DNA, 600 bp, Chicken  19866894270423_1
atgtaatgagaagctaacgatctggtgctgttgggaggctgaagggagcagaactgggaatggcttgtttgaaatgaccttgatgttggcgtttcatataagctgttaaatttacccaaagagccaccaggaaatcaataacatagaacacagagtttccactatggacgtgagggacataaattcccattttaattttcaatcaatagagaaacagctatccctgcaacagtaaagcatgacctgtgcacagatgtgcgttgcaggactaattcaagacagtagatatgcatgcatctrtttaggtgttagcaagagtaacaaaacagggtatgttgattatgtgtagttggtacatatctgcttcctaaatgaagaagctttcytcattatttatcaagatttacaaagccaattctgggtcacactggactgttcgcaggtccgatcaattgaaagaattgcccagtctgtccgtacatggctatctgagtggagtgaatgttaccaaaagctattactgtgtgatgggctctgtggccatttgaatgagttaagtaggctgtttctttggaaaggtaaacttgttatagtagaatc

SEQ ID NO: 38899 - DNA, 600 bp, Chicken  19866894270423_2
tggcgtttcatataagctgttaaatttacccaaagagccaccaggaaatcaataacatagaacacagagtttccactatggacgtgagggacataaattcccattttaattttcaatcaatagagaaacagctatccctgcaacagtaaagcatgacctgtgcacagatgtgcgttgcaggactaattcaagacagtagatatgcatgcatctctttaggtgttagcaagagtaacaaaacagggtatgttgattatgtgtagttggtacatatctgcttcctaaatgaagaagctttcytcattatttatcaagatttacaaagccaattctgggtcacactggactgttcgcaggtccgatcaattgaaagaattgcccagtctgtccgtacatggctatctgagtggagtgaatgttaccaaaagctattactgtgtgatgggctctgtggccatttgaatgagttaagtaggctgtttctttggaaaggtaaacttgttatagtagaatctgttttcttttcatttcagttaaatgaacttggaaatcggatacctctgatacgcttcaaaacacattttttagaacagataatct

SEQ ID NO: 38900 - DNA, 600 bp, Chicken  19866894270424_1
gcattataactaagcgtaagttacctagctgctctccttctttatagtatctggagataagagacatttacaaagtacacgcctcaacttacataccctttcttgaggaaattactaactaagattatacttttttcatcttgcacatcagtacatggagacatcatctagggaataaaccacagaggaatacaataaatcacccactcattcactagctgaatcttttgaggaaatgctaaatctttggcagacttctgccattgaaacatttcctcctcttgcttaagtgttaccctygggccctgtcactgtcacagagagcagagctcagcgctgccccaccgctccctgtgaggagctgcagccgccatcaggcctcccctcagctcctctgctctgggctgagcacaccaagggacctcagcagcccctcataccttttgccctccagacccttccccatccttatagccctcccttggacactgtcagctttatgccattcttacattgtggggcccaaactgcacccaagtacttgaggtggtccaaacccaaatgttaattaaccagctagccttaacaacacagtaactg

SEQ ID NO: 38901 - DNA, 600 bp, Chicken  19866894270430_1
tgcagcacttcattctcttgtacatgtcacttcatgcaattaaatgtaatatcatattttttccctcttcctttccttttttcccctttctaattctagtgtgcctcctgtggcagagtgggcagtacctcagtcatcaagactgaaatacagacagttgttcaatagccacgataaaacaatgagtggacacttaacaggtattgaaacagttattgttgtctcctttttcaactataaaaggccaattgtagcagcatgctaaatgctgttcagatagtaaagaaattttcatctctmtgttaccaccatcagtrtttttcagttaaagtttcccagctgctcaatggtctttaggagcaagcgcacattatagttgggatccttttcttactttctttcctgaattttctgtaaaaataagttggcactgggaaatgaagatatastgggccttgtgaaaacttctgcagccatttgcagtgtttgacatatccgctggtaggggtgcctatccagtttcagaagtaaaattgaacaatgctctgagttagttttatttgttctgtgaacatctcttgcagcaaagaggtgtttggt

SEQ ID NO: 38902 - DNA, 600 bp, Chicken  19866894270430_2
ttgtacatgtcacttcatgcaattaaatgtaatatcatattttttccctcttcctttccttttttcccctttctaattctagtgtgcctcctgtggcagagtgggcagtacctcagtcatcaagactgaaatacagacagttgttcaatagccacgataaaacaatgagtggacacttaacaggtattgaaacagttattgttgtctcctttttcaactataaaaggccaattgtagcagcatgctaaatgctgttcagatagtaaagaaattttcatctctmtgttaccaccatcagtrtttttcagttaaagtttcccagctgctcaatggtctttaggagcaagcgcacattatagttgggatccttttcttactttctttcctgaattttctgtaaaaataagttggcactgggaaatgaagatatastgggccttgtgaaaacttctgcagccatttgcagtgtttgacatatccgctggtaggggtgcctatccagtttcagaagtaaaattgaacaatgctctgagttagttttatttgttctgtgaacatctcttgcagcaaagaggtgtttggttttggttgtcctttgtc

SEQ ID NO: 38903 - DNA, 588 bp, Chicken  19866894270430_3
acagacagttgttcaatagccacgataaaacaatgagtggacacttaacaggtattgaaacagttattgttgtctcctttttcaactataaaaggccaattgtagcagcatgctaaatgctgttcagatagtaaagaaattttcatctctmtgttaccaccatcagtrtttttcagttaaagtttcccagctgctcaatggtctttaggagcaagcgcacattatagttgggatccttttcttactttctttcctgaattttctgtaaaaataagttggcactgggaaatgaagatatastgggccttgtgaaaacttctgcagccatttgcagtgtttgacatatccgctggtaggggtgcctatccagtttcagaagtaaaattgaacaatgctctgagttagttttatttgttctgtgaacatctcttgcagcaaagaggtgtttggttttggttgtcctttgtctgactgagtgttatgaagaaagaaagtgttacgcatttttaaatactttctttttgaggaacctgggaatggtagtatgcgtaagcctgttcgttcatgctggtaacatcactttggtgt

SEQ ID NO: 38904 - DNA, 600 bp, Chicken  19866894270433_1
atagcatttacagacagcccactaagtctgaatctcaagatcagtcttcaattttcattaataatagcaaaagattataaaaattttatatggaaacctggaaaaaaataatctgatgaatgaagttcttgtcaggtaaatgctagcttgtccacttatatatggtgtagcaataaatcaaaacaagagaaaactttcacatttcattatgcttgttggactaaaatttgctttttctgatagtacattttacctcctcctcctccaaagattcactactctccatgaacagagtgtacyatttatccattctctttgactgaaatgaaagtgaatgaaaactcattatccttattctcaaatccctggaatgtgatggattaaaaagtgtgatttgtacaggactgaggtttttttgcttcttaaatgaggccatgaaaccagagctgacaaatgaaaggaaattctaacattgagtaagtacttcatagttgcgttaaaaaatgatctcaagccaaaaaacaatactttaaagattacagcctgataaactggtataaagaagcacatctttaaggtggaatgaaaaatgtctgaaat

SEQ ID NO: 38905 - DNA, 547 bp, Chicken  19866894270434_1
gtcttcaattacactcatgtatggtattgggtttgtgatagactgtcatacacaggattatatgattgtaaagggtgaaaggcatttgttaatcttctgttccatcaatgctgtcttgcttggacactgggattattacagttctttttaatatcagcaaaaacactttgatctcctcctgtttgtactgtcatgctggctaattttatttaatttctgacacatttcttggagacatttgccaaacgtttatctcctgtttatagagctttcactgacctgcctcatttagatttagakgctcctgctgagaaaggcagtgtgactgttccattrccagtgtcagaatgtttcggtcaagactccaggctgctctctatactcaacaaccatgcaaaagagttacagtaaaaaaaagaagaaaatcagaaacccgaatcatgtactgtatgcgttacacttaacagctgtttcttaaagagtctgtggtctgggaatggtagatcaggaacagctggctgatatctcctatttaatagcgatgaag

SEQ ID NO: 38906 - DNA, 511 bp, Chicken  19866894270434_2
gatagactgtcatacacaggattatatgattgtaaagggtgaaaggcatttgttaatcttctgttccatcaatgctgtcttgcttggacactgggattattacagttctttttaatatcagcaaaaacactttgatctcctcctgtttgtactgtcatgctggctaattttatttaatttctgacacatttcttggagacatttgccaaacgtttatctcctgtttatagagctttcactgacctgcctcatttagatttagakgctcctgctgagaaaggcagtgtgactgttccattrccagtgtcagaatgtttcggtcaagactccaggctgctctctatactcaacaaccatgcaaaagagttacagtaaaaaaaagaagaaaatcagaaacccgaatcatgtactgtatgcgttacacttaacagctgtttcttaaagagtctgtggtctgggaatggtagatcaggaacagctggctgatatctcctatttaatagcgatgaag

SEQ ID NO: 38907 - DNA, 600 bp, Chicken  19866894270439_1
atgcatagattttttaattattatttatttctcaacagcagccaaaaacaggatatataagctgtaaaataattaaatatatgtagaaagataggtgtttcaaaggactatgacatttcactgatgttttctgtctaaccccagctttctctgacataacactgacaatcagttatcactaggaatgctgtgggtttttttttttcttttttttttcttttttttttttgtggttagctacgaacaattctcctctgagaaatgaaaatcttatcttgtacagtgcacatcagaatgcamtttcattcctgacaggagagcttgtctgcattgccagaaatctatcttcttttactagttcagcatcttttctacttcatttaccaagcactagatgaagtactagatcagggttgcctggggccacgtccatcctggccttgaacaccttcagggacatggcatctgcatgtctatgaactgtgcttccaatttggctgagtttgtayaggtggaattttacagtwcagaatagaagtgtaaaccaaataaaggaaacttcagtctaaattctgcctgaatctgacttcagtgctacat

SEQ ID NO: 38908 - DNA, 600 bp, Chicken  19866894270439_2
tttttttcttttttttttttgtggttagctacgaacaattctcctctgagaaatgaaaatcttatcttgtacagtgcacatcagaatgcamtttcattcctgacaggagagcttgtctgcattgccagaaatctatcttcttttactagttcagcatcttttctacttcatttaccaagcactagatgaagtactagatcagggttgcctggggccacgtccatcctggccttgaacaccttcagggacatggcatctgcatgtctatgaactgtgcttccaatttggctgagtttgtayaggtggaattttacagtwcagaatagaagtgtaaaccaaataaaggaaacttcagtctaaattctgcctgaatctgacttcagtgctacattagtaactgtttattatatgggggcttatttcagagcccactgaaactggtgcaatttgtttcagtgagttgatgatgattaacaaaatagcaattaaatcttgtaggtcctaactgaatttggttcgtacgtaacagacacgttaatattatcatagtaactgatctggaaaagaaccaagtgtttgagtttgttgggttgtctgtta

SEQ ID NO: 38909 - DNA, 600 bp, Chicken  19866894270439_3
ttgtggttagctacgaacaattctcctctgagaaatgaaaatcttatcttgtacagtgcacatcagaatgcamtttcattcctgacaggagagcttgtctgcattgccagaaatctatcttcttttactagttcagcatcttttctacttcatttaccaagcactagatgaagtactagatcagggttgcctggggccacgtccatcctggccttgaacaccttcagggacatggcatctgcatgtctatgaactgtgcttccaatttggctgagtttgtayaggtggaattttacagtwcagaatagaagtgtaaaccaaataaaggaaacttcagtctaaattctgcctgaatctgacttcagtgctacattagtaactgtttattatatgggggcttatttcagagcccactgaaactggtgcaatttgtttcagtgagttgatgatgattaacaaaatagcaattaaatcttgtaggtcctaactgaatttggttcgtacgtaacagacacgttaatattatcatagtaactgatctggaaaagaaccaagtgtttgagtttgttgggttgtctgttaagtaagcaaagagtctca

SEQ ID NO: 38910 - DNA, 600 bp, Chicken  19866894270439_4
tcatccttgctgctgattgacagtaaaagcttagcatgtatctagccaaggatgtcactaaggtagagaaaataattctcttaaaatccagaaaaagaaatcctaaatctctctcttcatctggtttaatctgtgacagtgaaaaatctagataacaaagtctggtaaacaagaacactggagatacaaaaagaagtagagagtaattactaaggtataaaaaaacattatgtcatcacaaaatatctgaaagatataaattaatgacatggattacgttacacgagagtaagtgacatytggaaattgttgatgcagaaattgttaataatctgatgaatggaatgtcagtgatggcaaatagaacttttctccagttagattttttcctcttaatcctgacaaacctgtattaaaatatcagaacaaagcaagtagtgacatgtacaagtaagatttcattatagatcttatttgaagacttgctcttcaaaaagttcttagaagcttcctatatctgtaggtgtagatggttgagtatgtacatataaaacccatgtgcaaaaataaatgattgttctgttacctatgcctaagtaa

SEQ ID NO: 38911 - DNA, 600 bp, Chicken  19866894270439_5
ttgctcttcaaaaagttcttagaagcttcctatatctgtaggtgtagatggttgagtatgtacatataaaacccatgtgcaaaaataaatgattgttctgttacctatgcctaagtaacagcaaatacacaagtatttgcatttggaaaagtatgtcctgttttcagttctggccataaatattttacatcataggccatgcttttggagatagacagcccaccatcttttgagagacagggaactcatcattctaagatatcttctaatgacttatattttaataccaaataaatgtgrctgtctaaaactttgtggttgcagagctcaagtgagttcaacctgttcaacagaaatttcacgtggctaatataagcagtgtgtgttaggttagcagcagtacttgaaggagcttgattgttattgttaattaacaaataacatttgcaaaataaacatttctttttgttcattgtaactagcttccttgcgctcagagctaaatcatcaacatgcagcagcaattgaccaactaaggcacaaccatcagcaggaactcctagctgccaaaatggaacttgaaagaagcatagaacttgg

SEQ ID NO: 38912 - DNA, 600 bp, Chicken  19866894270453_1
tgtagacctttctaatcccctaccttgtgatccttgtcttcccacagtcccagtttgcagcctggactgattagcaaaactgaggttgccagtttcccactgattttcttatgtgtttctacctttctttgttttcagtgctcttagcaaaaatgccacttagctgtatataaaatatcagatgctgaaatcttaaaagaaactaacctgagtggcttcacttcctttgaggggttgaggggaggaaataatattaaagaaaggaaaattcattagcattccagaaaagcatgcttatgytcaggtatctagaatacccatttccagttataatatataaattcattgtaaaataatatttattttgaaatgcttcctaatgcattgcatttattcaacagtgatcacaggagggtaatgggagaggtaggtggaaaatgcagaacataaggtaagttgtgaatacaggcaacctcagatgagtgtgtttcacactggaaggaaaggaactgcatccaagagagggaaaaagagacctgtaacaagaaaacaatattgatcatttttacrctacwctaatattgaatttcttgagtgttt

SEQ ID NO: 38913 - DNA, 532 bp, Chicken  19866894270453_2
cattagcattccagaaaagcatgcttatgytcaggtatctagaatacccatttccagttataatatataaattcattgtaaaataatatttattttgaaatgcttcctaatgcattgcatttattcaacagtgatcacaggagggtaatgggagaggtaggtggaaaatgcagaacataaggtaagttgtgaatacaggcaacctcagatgagtgtgtttcacactggaaggaaaggaactgcatccaagagagggaaaaagagacctgtaacaagaaaacaatattgatcatttttacrctacwctaatattgaatttcttgagtgtttggaataatatgtatgcacctatcttatgtatattatattaataaggtgcaaataagaagtacaaattattgtaagagagggctatgcaagaggaaaacgtaggaggaaagactgaagatattttgctgtgttttgtgttaagggttaagtgtaaaaaagctgtaaatccagcatgaatcttcagcaggtaagttctactgtg

SEQ ID NO: 38914 - DNA, 527 bp, Chicken  19866894270453_3
gcattccagaaaagcatgcttatgytcaggtatctagaatacccatttccagttataatatataaattcattgtaaaataatatttattttgaaatgcttcctaatgcattgcatttattcaacagtgatcacaggagggtaatgggagaggtaggtggaaaatgcagaacataaggtaagttgtgaatacaggcaacctcagatgagtgtgtttcacactggaaggaaaggaactgcatccaagagagggaaaaagagacctgtaacaagaaaacaatattgatcatttttacrctacwctaatattgaatttcttgagtgtttggaataatatgtatgcacctatcttatgtatattatattaataaggtgcaaataagaagtacaaattattgtaagagagggctatgcaagaggaaaacgtaggaggaaagactgaagatattttgctgtgttttgtgttaagggttaagtgtaaaaaagctgtaaatccagcatgaatcttcagcaggtaagttctactgtg

SEQ ID NO: 38915 - DNA, 599 bp, Chicken  19866894270458_1
  misc_feature (1)..(74): n is any nucleotide
nnnnnnnnnnnnnnnnnnnnnnnnnnnnnnnnnnnnnnnnnnnnnnnnnnnnnnnnnnnnnnnnnnnnnnnnnncccaggaggctgtgggactaaacggagcctatgggaaccttgagatcagggctgtgtccttgggggctgatagaccaaaccctgaggtgaggaatttccccccccccacacacacacccaccaccacagccccgtgtcctgcagcccgggctggctcccggggggtcggggcacacgcacacgcacacgtgtacagccatggggctgcgtgcccatgggatggggytgctgctggggggcgtgggggtgttctttggctcctattgcccgccctgccagcctgcagctgggccacagtgttgtaggagaaagctgttggagggctgccacccccttaaagggaacaagcggagcccccggcctcagccccaaaaamcagggggggggggctgtgcctccccactgcacaccccacacccttcctgacgtgccgagctcaattcctgcttgatcgaagtgtatgatttcagctcccacccccaccccaggcgctttgcattgcagcggagaccccctggccccccc

SEQ ID NO: 38916 - DNA, 600 bp, Chicken  19866894270458_2
aaaccctgaggtgaggaatttccccccccccacacacacacccaccaccacagccccgtgtcctgcagcccgggctggctcccggggggtcggggcacacgcacacgcacacgtgtacagccatggggctgcgtgcccatgggatggggytgctgctggggggcgtgggggtgttctttggctcctattgcccgccctgccagcctgcagctgggccacagtgttgtaggagaaagctgttggagggctgccacccccttaaagggaacaagcggagcccccggcctcagccccaaaaamcagggggggggggctgtgcctccccactgcacaccccacacccttcctgacgtgccgagctcaattcctgcttgatcgaagtgtatgatttcagctcccacccccaccccaggcgctttgcattgcagcggagaccccctggccccccccatccctgcaggggctgctggagcccccccagcccagggtttggtctatggcagaggcagccgcctctggagggcagcacgagagcacagctgcgtccgccagctgtgaagatgatgatgatttcttcttttttttttttttttaatagaa

SEQ ID NO: 38917 - DNA, 600 bp, Chicken  19866894270463_1
agtttaagaagatactgtggaagaagtttttaaaaacaggataaactgctgttttcaattccatttttcttttctgatctttcaaaatgagacattacacagcaaatggttcagctcattggaaacactgccccagccaacttctcaggaatctcaatgaacttcagagacattacaaacagggttcgtacttctactaatgcatggctttcttcatacagatctgttttcagagtttttaaactttggcatactgaaatgttttgagtagaattactttagagctggtacctacaacamttttttttttattattctatttcattaaaagagctcagccatcacagtttggattttttttaaaaaaagttcctctttccctaataaaagattttgaaatttctgtgctttgaacttttgtagtgcttttaagcttagaagaaaggaattaaaaattgattctgtggcatgaacaagtgcttaaatttgtttcactgtcattaaagtcatcccatgcagacaatttataaaatgtttaagatgcacagctcccagataaatcaacagggacttctggaagagcaaactggtagactgcct

SEQ ID NO: 38918 - DNA, 599 bp, Chicken  19866894270474_1
  misc_feature (1)..(196): n is any nucleotide
nnnnnnnnnnnnnnnnnnnnnnnnnnnnnnnnnnnnnnnnnnnnnnnnnnnnnnnnnnnnnnnnnnnnnnnnnnnnnnnnnnnnnnnnnnnnnnnnnnnnnnnnnnnnnnnnnnnnnnnnnnnnnnnnnnnnnnnnnnnnnnnnnnnnnnnnnnnnnnnnnnnnnnnnnnnnnnnnnnnnnnnnnnnnnnnnnnnnccctgttactgttccactcagcctaggttggtattatcatcaaagacaggagctgagatgggcagcaccaaagctgatgagtgaaacaccaggtggtctgggtmtgcctctgagcactgttacctttcagcctctgcacacactgcacccttcagtcaagtgacaccagcagggactctggggaagrgcttcctgaccagttatcaggatcatgscagggctttgtaatcagctacttgggccatggcagagctgctttttgacatgcrtgctgtgatagcttttctgttgttagcaagctattttgctctaaaacgcgttacctgtaatgttgaatctcatcctcccagactgctgcagctttcttttgaggagcttcaaagtagtttccaagtagtcggca

SEQ ID NO: 38919 - DNA, 413 bp, Chicken  19866894270474_10
cgctgtgctcttctacagcagcctgactgctcctcagatttgcacacctccctctctcagtaaaattttgggraatgagtcattgtgattcctttcaggtttgctttatatccttgtcataatgagacctgttaatctacgtgtaaagctataagtattggtggtaaactgagtttttcaatgacaggatagaattttacatttaggatgttacagtatatattctttgagcagaagacagtcttggatacgttgcttctgttcctggccacayygatcactggtagagagagacccctycccagagatcaacctgcactggcacaccaccaacatccacctctgacattgtgggccaatgtcataaaacaggaggcattactttcggggcagccttcataggttatctctta

SEQ ID NO: 38920 - DNA, 599 bp, Chicken  19866894270474_2
  misc_feature (1)..(113): n is any nucleotide
nnnnnnnnnnnnnnnnnnnnnnnnnnnnnnnnnnnnnnnnnnnnnnnnnnnnnnnnnnnnnnnnnnnnnnnnnnnnnnnnnnnnnnnnnnnnnnnnnnnnnnnnnnnnnnnnnccctgttactgttccactcagcctaggttggtattatcatcaaagacaggagctgagatgggcagcaccaaagctgatgagtgaaacaccaggtggtctgggtmtgcctctgagcactgttacctttcagcctctgcacacactgcacccttcagtcaagtgacaccagcagggactctggggaagrgcttcctgaccagttatcaggatcatgscagggctttgtaatcagctacttgggccatggcagagctgctttttgacatgcrtgctgtgatagcttttctgttgttagcaagctattttgctctaaaacgcgttacctgtaatgttgaatctcatcctcccagactgctgcagctttcttttgaggagcttcaaagtagtttccaagtagtcggcagcacggactgcagatctggttcttcctactggatcctttaagtgcttcaggaaatccaccgggctgggaaactcttcccttag

SEQ ID NO: 38921 - DNA, 599 bp, Chicken  19866894270474_3
  misc_feature (1)..(85): n is any nucleotide
nnnnnnnnnnnnnnnnnnnnnnnnnnnnnnnnnnnnnnnnnnnnnnnnnnnnnnnnnnnnnnnnnnnnnnnnnnnnnnnnnnnnnccctgttactgttccactcagcctaggttggtattatcatcaaagacaggagctgagatgggcagcaccaaagctgatgagtgaaacaccaggtggtctgggtmtgcctctgagcactgttacctttcagcctctgcacacactgcacccttcagtcaagtgacaccagcagggactctggggaagrgcttcctgaccagttatcaggatcatgscagggctttgtaatcagctacttgggccatggcagagctgctttttgacatgcrtgctgtgatagcttttctgttgttagcaagctattttgctctaaaacgcgttacctgtaatgttgaatctcatcctcccagactgctgcagctttcttttgaggagcttcaaagtagtttccaagtagtcggcagcacggactgcagatctggttcttcctactggatcctttaagtgcttcaggaaatccaccgggctgggaaactcttcccttagtttttgctgtaagctaaacagaacagag

SEQ ID NO: 38922 - DNA, 599 bp, Chicken  19866894270474_4
  misc_feature (1)..(31): n is any nucleotide
nnnnnnnnnnnnnnnnnnnnnnnnnnnnnnnccctgttactgttccactcagcctaggttggtattatcatcaaagacaggagctgagatgggcagcaccaaagctgatgagtgaaacaccaggtggtctgggtmtgcctctgagcactgttacctttcagcctctgcacacactgcacccttcagtcaagtgacaccagcagggactctggggaagrgcttcctgaccagttatcaggatcatgscagggctttgtaatcagctacttgggccatggcagagctgctttttgacatgcrtgctgtgatagcttttctgttgttagcaagctattttgctctaaaacgcgttacctgtaatgttgaatctcatcctcccagactgctgcagctttcttttgaggagcttcaaagtagtttccaagtagtcggcagcacggactgcagatctggttcttcctactggatcctttaagtgcttcaggaaatccaccgggctgggaaactcttcccttagtttttgctgtaagctaaacagaacagagtctcatgggctgcctaccctgaaaacacctcctctgcccygtggggctggtgta

SEQ ID NO: 38923 - DNA, 600 bp, Chicken  19866894270474_5
gctttttgacatgcrtgctgtgatagcttttctgttgttagcaagctattttgctctaaaacgcgttacctgtaatgttgaatctcatcctcccagactgctgcagctttcttttgaggagcttcaaagtagtttccaagtagtcggcagcacggactgcagatctggttcttcctactggatcctttaagtgcttcaggaaatccaccgggctgggaaactcttcccttagtttttgctgtaagctaaacagaacagagtctcatgggctgcctaccctgaaaacacctcctctgcccygtggggctggtgtacttagacatgatggaaycagcaggtccccaggaacgctgtgctcttctacagcagcctgactgctcctcagatttgcacacctccctctctcagtaaaattttgggraatgagtcattgtgattcctttcaggtttgctttatatccttgtcataatgagacctgttaatctacgtgtaaagctataagtattggtggtaaactgagtttttcaatgacaggatagaattttacatttaggatgttacagtatatattctttgagcagaagacagtcttggatacg

SEQ ID NO: 38924 - DNA, 600 bp, Chicken  19866894270474_6
ctgttgttagcaagctattttgctctaaaacgcgttacctgtaatgttgaatctcatcctcccagactgctgcagctttcttttgaggagcttcaaagtagtttccaagtagtcggcagcacggactgcagatctggttcttcctactggatcctttaagtgcttcaggaaatccaccgggctgggaaactcttcccttagtttttgctgtaagctaaacagaacagagtctcatgggctgcctaccctgaaaacacctcctctgcccygtggggctggtgtacttagacatgatggaaycagcaggtccccaggaacgctgtgctcttctacagcagcctgactgctcctcagatttgcacacctccctctctcagtaaaattttgggraatgagtcattgtgattcctttcaggtttgctttatatccttgtcataatgagacctgttaatctacgtgtaaagctataagtattggtggtaaactgagtttttcaatgacaggatagaattttacatttaggatgttacagtatatattctttgagcagaagacagtcttggatacgttgcttctgttcctggccacayygatcactg

SEQ ID NO: 38925 - DNA, 600 bp, Chicken  19866894270474_7
cttcaaagtagtttccaagtagtcggcagcacggactgcagatctggttcttcctactggatcctttaagtgcttcaggaaatccaccgggctgggaaactcttcccttagtttttgctgtaagctaaacagaacagagtctcatgggctgcctaccctgaaaacacctcctctgcccygtggggctggtgtacttagacatgatggaaycagcaggtccccaggaacgctgtgctcttctacagcagcctgactgctcctcagatttgcacacctccctctctcagtaaaattttgggraatgagtcattgtgattcctttcaggtttgctttatatccttgtcataatgagacctgttaatctacgtgtaaagctataagtattggtggtaaactgagtttttcaatgacaggatagaattttacatttaggatgttacagtatatattctttgagcagaagacagtcttggatacgttgcttctgttcctggccacayygatcactggtagagagagacccctycccagagatcaacctgcactggcacaccaccaacatccacctctgacattgtgggccaatgtcataaaacagg

SEQ ID NO: 38926 - DNA, 439 bp, Chicken  19866894270474_8
tgatggaaycagcaggtccccaggaacgctgtgctcttctacagcagcctgactgctcctcagatttgcacacctccctctctcagtaaaattttgggraatgagtcattgtgattcctttcaggtttgctttatatccttgtcataatgagacctgttaatctacgtgtaaagctataagtattggtggtaaactgagtttttcaatgacaggatagaattttacatttaggatgttacagtatatattctttgagcagaagacagtcttggatacgttgcttctgttcctggccacayygatcactggtagagagagacccctycccagagatcaacctgcactggcacaccaccaacatccacctctgacattgtgggccaatgtcataaaacaggaggcattactttcggggcagccttcataggttatctctta

SEQ ID NO: 38927 - DNA, 438 bp, Chicken  19866894270474_9
gatggaaycagcaggtccccaggaacgctgtgctcttctacagcagcctgactgctcctcagatttgcacacctccctctctcagtaaaattttgggraatgagtcattgtgattcctttcaggtttgctttatatccttgtcataatgagacctgttaatctacgtgtaaagctataagtattggtggtaaactgagtttttcaatgacaggatagaattttacatttaggatgttacagtatatattctttgagcagaagacagtcttggatacgttgcttctgttcctggccacayygatcactggtagagagagacccctycccagagatcaacctgcactggcacaccaccaacatccacctctgacattgtgggccaatgtcataaaacaggaggcattactttcggggcagccttcataggttatctctta

SEQ ID NO: 38928 - DNA, 600 bp, Chicken  19866894270475_1
ccaagatttagatgcgtatctttccagtgagaaagaaccagttctgaaagcacagctcagagaacatgtcggcaaaagtggaaattttggagggggaatttcccttgtctccatcacagaacgtattagcataattcctcaagtgcacactatctaagatacctgtgagttatttattaatagttaaagaagttatttggcatccagcatcaaatataattcttgaaaagggctgacagcagaatacatttgttaactagagacatgcctaaactttgccaagagaaatactgaactaarcatgcactcactgaaggagagtctacctttttaagttgaagtctttgtttgyaaagtttcctttttcaacctgtcatagttctctaaatttatattgataattgcagcaacaataaggtacatcaaactacagaacagttttgccaagtacacaatctgaagattatattcttctgcagcattttctttatagtgcaataggagaccacccttgtgattccctaaaatcctgrtttgtttatattttgttcattttctttagtttaatgaggtgataaataaatgagatttacaaggaat

SEQ ID NO: 38929 - DNA, 600 bp, Chicken  19866894270475_2
cagctcagagaacatgtcggcaaaagtggaaattttggagggggaatttcccttgtctccatcacagaacgtattagcataattcctcaagtgcacactatctaagatacctgtgagttatttattaatagttaaagaagttatttggcatccagcatcaaatataattcttgaaaagggctgacagcagaatacatttgttaactagagacatgcctaaactttgccaagagaaatactgaactaarcatgcactcactgaaggagagtctacctttttaagttgaagtctttgtttgyaaagtttcctttttcaacctgtcatagttctctaaatttatattgataattgcagcaacaataaggtacatcaaactacagaacagttttgccaagtacacaatctgaagattatattcttctgcagcattttctttatagtgcaataggagaccacccttgtgattccctaaaatcctgrtttgtttatattttgttcattttctttagtttaatgaggtgataaataaatgagatttacaaggaataagggactgtcagtgctagaaactgaagttctctgtttattcataggccagg

SEQ ID NO: 38930 - DNA, 600 bp, Chicken  19866894270475_3
tgacagcagaatacatttgttaactagagacatgcctaaactttgccaagagaaatactgaactaarcatgcactcactgaaggagagtctacctttttaagttgaagtctttgtttgyaaagtttcctttttcaacctgtcatagttctctaaatttatattgataattgcagcaacaataaggtacatcaaactacagaacagttttgccaagtacacaatctgaagattatattcttctgcagcattttctttatagtgcaataggagaccacccttgtgattccctaaaatcctgrtttgtttatattttgttcattttctttagtttaatgaggtgataaataaatgagatttacaaggaataagggactgtcagtgctagaaactgaagttctctgtttattcataggccaggtatggatgccggcaggcacagtgcaaatacatccgtcagtaaccatgcagttggcctgagggaataaggcagttaagtggtgactgtaatgcagttccttgcatattagtatttgggaccctttcctgagcagacatggtcaacactatcactccatagtaatgtgcagcccgaacaggag

SEQ ID NO: 38931 - DNA, 600 bp, Chicken  19866894270479_1
tcatgaacaattcccagtggaaatactcatcattagaaacctgaccttacatttaaagagctgtgaggaaaaaaagcataattaattagtcacattatttttcctccagcatattttaaagaattagcaaccagcgaaggaaggagatgggagctgatcctgcagccctttcacacaacagtagttgtactgttgcctctgtgaatgcgcaaaggggcagcaagatcaggcccttcagcataagctaggcataagtaatgcctgtagataagcacagatcaggcctccgggctacagtaycctgagcatcctcatcccctgctaaagtcaatgggaacaaaagaagctttatgggtactttgaagggtaccttattcaaaattatcagcattttatgacacacaattatacttcagcaacttgtagccctcctaaaaatgcragatactggttcttcaccccatacaccagtgctatagctgtgcatttctactgcctctaatcatgtgccatagtagcttattccagtgtaacacagatgaggagcaggtcctgaatctctcatctacaggcaactgttctccaagtatcactttattt

SEQ ID NO: 38932 - DNA, 600 bp, Chicken  19866894270479_2
ggagatgggagctgatcctgcagccctttcacacaacagtagttgtactgttgcctctgtgaatgcgcaaaggggcagcaagatcaggcccttcagcataagctaggcataagtaatgcctgtagataagcacagatcaggcctccgggctacagtaycctgagcatcctcatcccctgctaaagtcaatgggaacaaaagaagctttatgggtactttgaagggtaccttattcaaaattatcagcattttatgacacacaattatacttcagcaacttgtagccctcctaaaaatgcragatactggttcttcaccccatacaccagtgctatagctgtgcatttctactgcctctaatcatgtgccatagtagcttattccagtgtaacacagatgaggagcaggtcctgaatctctcatctacaggcaactgttctccaagtatcactttatttgcacttctaccctgaggtatcatttatcatgacaactattaagcacataggactttagaactttatgctcatgacctttcaccattctagtaactacccctcccaaaacaaagaaaaaaaagagcattttgtgataacagtg

SEQ ID NO: 38933 - DNA, 600 bp, Chicken  19866894270479_3
tacaccagtgctatagctgtgcatttctactgcctctaatcatgtgccatagtagcttattccagtgtaacacagatgaggagcaggtcctgaatctctcatctacaggcaactgttctccaagtatcactttatttgcacttctaccctgaggtatcatttatcatgacaactattaagcacataggactttagaactttatgctcatgacctttcaccattctagtaactacccctcccaaaacaaagaaaaaaaagagcattttgtgataacagtgtatgtgatttggatctgagcytcaagactcagcygtgttgtctgctcactcctaattcacacacagagaaacattttctgtgcttcaaaaccatcagtataaatatctccatcatttcacatttaattctcactatcacaagaatagagaaggaattttgtgtcagtctaattcatgcaattggggtataattactcagatttagatcaaaaatccatcttaattaaaggtctggtaggctgagctctcactggaaatctggattaatgtggtatcacttttttgaaatgtaagtcacacctctctgcttcattttcccaa

SEQ ID NO: 38934 - DNA, 600 bp, Chicken  19866894270479_4
tagctgtgcatttctactgcctctaatcatgtgccatagtagcttattccagtgtaacacagatgaggagcaggtcctgaatctctcatctacaggcaactgttctccaagtatcactttatttgcacttctaccctgaggtatcatttatcatgacaactattaagcacataggactttagaactttatgctcatgacctttcaccattctagtaactacccctcccaaaacaaagaaaaaaaagagcattttgtgataacagtgtatgtgatttggatctgagcytcaagactcagcygtgttgtctgctcactcctaattcacacacagagaaacattttctgtgcttcaaaaccatcagtataaatatctccatcatttcacatttaattctcactatcacaagaatagagaaggaattttgtgtcagtctaattcatgcaattggggtataattactcagatttagatcaaaaatccatcttaattaaaggtctggtaggctgagctctcactggaaatctggattaatgtggtatcacttttttgaaatgtaagtcacacctctctgcttcattttcccaagtaaaatggggac

SEQ ID NO: 38935 - DNA, 519 bp, Chicken  19866894270482_1
aagagcattgtcctagctaatatcccttaggacaataaaatatagtgtttgacttgtgatcgacaacacaattatctggtccttgtggacaaacatattaaggaaatataaggcaaaataatacatttcttgtactgtacctatattctgattgctacattgatttcattaagtttgttccttaatatgggggagaaaacattgcagacaaagacagatatccccaactcttgagaaggctactctcacagctctcatcaaaaaactaaaatgctcaacagggctctcaaaagggaaagrggatgacatctggcatgtgaagttaccatctacagccagcccatttccatttactttttccccaatgacaaggacaagtmgcttgctggaaacaactttcttccttctgacttatggcatgtcaaaggtagctacaggttgaactaatgtggatatgagtcattacaatttttgaatagtgcatttttgtaattttttggcctttgaatgaatgataaa

SEQ ID NO: 38936 - DNA, 439 bp, Chicken  19866894270482_2
ccttgtggacaaacatattaaggaaatataaggcaaaataatacatttcttgtactgtacctatattctgattgctacattgatttcattaagtttgttccttaatatgggggagaaaacattgcagacaaagacagatatccccaactcttgagaaggctactctcacagctctcatcaaaaaactaaaatgctcaacagggctctcaaaagggaaagrggatgacatctggcatgtgaagttaccatctacagccagcccatttccatttactttttccccaatgacaaggacaagtmgcttgctggaaacaactttcttccttctgacttatggcatgtcaaaggtagctacaggttgaactaatgtggatatgagtcattacaatttttgaatagtgcatttttgtaattttttggcctttgaatgaatgataaa

SEQ ID NO: 38937 - DNA, 600 bp, Chicken  19866894270487_1
aaaggaaagaggaaatgactcactcccataaactccaggctaaaaaagtagagcagaggaagccaagtgttttggtatatctcattaatttagtccattttcattaccttggcctatccaatctcctgagacgacacagatggtggccctacaactgcccctgaccgtcccaggatgcacagcccctccatgggacatctcccagccctgagccggtagctggtacgcctcggcttgctctgccacctaccattgtgctttctgtggccagctcatgtgggtgggggacaagctaagtgstgtgcaaacagaggggatgagagatgctgccagcaggatgggcacagatcatcyttgttsgccttggatgtaaaccagtgccacccaccaccgcccaaggacgtgccctgcatggtgtgtccctgcttgtgactgaaacgccccagggctgctcacaactcttgaaaacctcctgtgggtccccaccagtcacagagctatacttggtcacaggttctggccacagctgtggctctcaaagctgtctttgccagccagtaggaaagagggagggaagagcaggaaggaggggagggaagg

SEQ ID NO: 38938 - DNA, 600 bp, Chicken  19866894270487_2
agaggaagccaagtgttttggtatatctcattaatttagtccattttcattaccttggcctatccaatctcctgagacgacacagatggtggccctacaactgcccctgaccgtcccaggatgcacagcccctccatgggacatctcccagccctgagccggtagctggtacgcctcggcttgctctgccacctaccattgtgctttctgtggccagctcatgtgggtgggggacaagctaagtgstgtgcaaacagaggggatgagagatgctgccagcaggatgggcacagatcatcyttgttsgccttggatgtaaaccagtgccacccaccaccgcccaaggacgtgccctgcatggtgtgtccctgcttgtgactgaaacgccccagggctgctcacaactcttgaaaacctcctgtgggtccccaccagtcacagagctatacttggtcacaggttctggccacagctgtggctctcaaagctgtctttgccagccagtaggaaagagggagggaagagcaggaaggaggggagggaaggaggaagagagatagggagggaaggaggctgtatttggcagctgccttcagagag

SEQ ID NO: 38939 - DNA, 600 bp, Chicken  19866894270487_3
agccaagtgttttggtatatctcattaatttagtccattttcattaccttggcctatccaatctcctgagacgacacagatggtggccctacaactgcccctgaccgtcccaggatgcacagcccctccatgggacatctcccagccctgagccggtagctggtacgcctcggcttgctctgccacctaccattgtgctttctgtggccagctcatgtgggtgggggacaagctaagtgstgtgcaaacagaggggatgagagatgctgccagcaggatgggcacagatcatcyttgttsgccttggatgtaaaccagtgccacccaccaccgcccaaggacgtgccctgcatggtgtgtccctgcttgtgactgaaacgccccagggctgctcacaactcttgaaaacctcctgtgggtccccaccagtcacagagctatacttggtcacaggttctggccacagctgtggctctcaaagctgtctttgccagccagtaggaaagagggagggaagagcaggaaggaggggagggaaggaggaagagagatagggagggaaggaggctgtatttggcagctgccttcagagaggccaac

SEQ ID NO: 38940 - DNA, 600 bp, Chicken  19866894270488_1
ccttgttacaaagaccatttattgtccataggagctgaaggccccctgttcatctggagacccagcctcttttggctgtttcagggtctcccggtgttgcattttctgcccttaatgtacagcagggcagcatttcttaggatcatcctattggcatgaaagcctgacttctgacaggactcaaaatgtactagcctgttatatctgaaatttgaggcatctatggaggatagagcagccttgaaaaattctagatgccttttcacacagaggagtaaatttttattattattattattwtttttttaccagctagtaaaatatcagtaatggttttcattaatatcgctgtcattgtccagataaagcattttggaaaagatgccctggctgttctgaaaacggtgaattacattaagcaactattttcttacttcagatgcagcaattcaattagtaataatctacacgcccaaaatccatggaaaggaaccacaaatcttgctctggcctcaaacaaacgaccaccaattacctcattcaacccctgcacaaccatacatggttactgagtaggacagtgaatccttctggcttttt

SEQ ID NO: 38941 - DNA, 600 bp, Chicken  19866894270493_1
tagaaccatagaatcatttgagttggaaggcaccctcaaaggccatccagtccaactcttctgccatgaacagggacacctacagctccagcagattactcagagccctgtccagtctggccctgggtgtctccaggcactgggcatccaccacctctctgtgcaataaccaacgcagtactccaggtgaggcctcacagcacagagcacatgggcaggatcacctccctcaccctgctgctcacactgcttttggtgcagtccacgatacagttggctttctgggctgtgagggcacaytgctggctcatgtccagctgccatccaccagtacccccaagtccttttcagcagggctgtgctccatccttaaatcccccagtttgyactgatagsgggrgctgccatgacccagatacaagaacttgcactttgatttattaaacctcatgaggttcacmcaggcccacaagtccctgagcctgcctgtccctttttgcactgttcatggatttttgcaattgtatttatttaacctgatagataggaattttttcctctgttcaaggagcatgatattttctctttccgtaaatagta

SEQ ID NO: 38942 - DNA, 600 bp, Chicken  19866894270493_2
ccagcagattactcagagccctgtccagtctggccctgggtgtctccaggcactgggcatccaccacctctctgtgcaataaccaacgcagtactccaggtgaggcctcacagcacagagcacatgggcaggatcacctccctcaccctgctgctcacactgcttttggtgcagtccacgatacagttggctttctgggctgtgagggcacaytgctggctcatgtccagctgccatccaccagtacccccaagtccttttcagcagggctgtgctccatccttaaatcccccagtttgyactgatagsgggrgctgccatgacccagatacaagaacttgcactttgatttattaaacctcatgaggttcacmcaggcccacaagtccctgagcctgcctgtccctttttgcactgttcatggatttttgcaattgtatttatttaacctgatagataggaattttttcctctgttcaaggagcatgatattttctctttccgtaaatagtaaaatctgatttggcacaattcatgaggagatattactgcttcttttaagaagtacatttgggccaaagagatgactctggaaaaaaa

SEQ ID NO: 38943 - DNA, 600 bp, Chicken  19866894270493_3
tactcagagccctgtccagtctggccctgggtgtctccaggcactgggcatccaccacctctctgtgcaataaccaacgcagtactccaggtgaggcctcacagcacagagcacatgggcaggatcacctccctcaccctgctgctcacactgcttttggtgcagtccacgatacagttggctttctgggctgtgagggcacaytgctggctcatgtccagctgccatccaccagtacccccaagtccttttcagcagggctgtgctccatccttaaatcccccagtttgyactgatagsgggrgctgccatgacccagatacaagaacttgcactttgatttattaaacctcatgaggttcacmcaggcccacaagtccctgagcctgcctgtccctttttgcactgttcatggatttttgcaattgtatttatttaacctgatagataggaattttttcctctgttcaaggagcatgatattttctctttccgtaaatagtaaaatctgatttggcacaattcatgaggagatattactgcttcttttaagaagtacatttgggccaaagagatgactctggaaaaaaaggcttaaca

SEQ ID NO: 38944 - DNA, 600 bp, Chicken  19866894270493_4
cagagccctgtccagtctggccctgggtgtctccaggcactgggcatccaccacctctctgtgcaataaccaacgcagtactccaggtgaggcctcacagcacagagcacatgggcaggatcacctccctcaccctgctgctcacactgcttttggtgcagtccacgatacagttggctttctgggctgtgagggcacaytgctggctcatgtccagctgccatccaccagtacccccaagtccttttcagcagggctgtgctccatccttaaatcccccagtttgyactgatagsgggrgctgccatgacccagatacaagaacttgcactttgatttattaaacctcatgaggttcacmcaggcccacaagtccctgagcctgcctgtccctttttgcactgttcatggatttttgcaattgtatttatttaacctgatagataggaattttttcctctgttcaaggagcatgatattttctctttccgtaaatagtaaaatctgatttggcacaattcatgaggagatattactgcttcttttaagaagtacatttgggccaaagagatgactctggaaaaaaaggcttaacacatg

SEQ ID NO: 38945 - DNA, 600 bp, Chicken  19866894270493_5
tgcaataaccaacgcagtactccaggtgaggcctcacagcacagagcacatgggcaggatcacctccctcaccctgctgctcacactgcttttggtgcagtccacgatacagttggctttctgggctgtgagggcacaytgctggctcatgtccagctgccatccaccagtacccccaagtccttttcagcagggctgtgctccatccttaaatcccccagtttgyactgatagsgggrgctgccatgacccagatacaagaacttgcactttgatttattaaacctcatgaggttcacmcaggcccacaagtccctgagcctgcctgtccctttttgcactgttcatggatttttgcaattgtatttatttaacctgatagataggaattttttcctctgttcaaggagcatgatattttctctttccgtaaatagtaaaatctgatttggcacaattcatgaggagatattactgcttcttttaagaagtacatttgggccaaagagatgactctggaaaaaaaggcttaacacatgttccctgctgcacagtacaactctttcccatttcggaagctgaataccgctatgccataat

SEQ ID NO: 38946 - DNA, 600 bp, Chicken  19866894270495_1
ctggaaagctgctcaactttactaccgcactacatctggtcatcattagtagtaatacttctttacactatatctcactcacacaggaccttgcaggtaaaaccaggtcttggctttcaggtgtttacggtgtaagttacaccaaaaattggcagtgacaatatacatgcagatgcagagataacaggtgaggagaggtagcagtacagcgagcagaagacacacagtgtgagggctctggagaaccaccactggatgcatttactcatccaaacagagaagttttaagcatgtctcagraatgtagttgatagagctaaaataccccagatggtctttcctgagatagcccaaatcagctaaacccaacttaaggaaaaacagtacagaaagcaatacaacttctaggtgcttgcagtgagagcagggtaggtctcttctcactggtgacaggtgacaagacgatgggaaatggcctcaagttgcaccaaggtaagttaggttggacgttaggaaacacttctttacagaaagggtggttaaacactggaataggctccccagggaggtggttgagtcaccatccctggatgtgtttaa

SEQ ID NO: 38947 - DNA, 599 bp, Chicken  19866894270496_1
  misc_feature (1)..(3): n is any nucleotide
nnnaactgattgcaagccacaaatgttgcctgattcagaattcaaaaaatgaaacccaatagtcactcagcataggctttttttgtagtctattttaaatgttcattctgcattataacagcagctgcaggggtggtttctagcatagctatatggaatttctttgaataaaagtttctccagatgtagctttgagcgtgccagatgggctggctcttcagtataaaaagcaaattggaagctgagtatatggtgctttagcagtaagcagatttaatcagcactcactgaaaaagttasggcttttcaattcgctcacctcatccagtattcagcctattttgtcaaaggaagattcacagagagaggaatatgtatattcttcaatgttctgaggcatatttttatagtgccaacttccaggacctccttttcctcctcctacttctctcatccttttctttatccaaaactgcaggattcttagatgtatgttataccatgaacagtcagtcagatgttgaaaaaaacaaaagtttttcagatgtagtggcaatcaccacttttyaatgtctcagttattggcacacaaaggtcat

SEQ ID NO: 38948 - DNA, 593 bp, Chicken  19866894270496_2
attggaagctgagtatatggtgctttagcagtaagcagatttaatcagcactcactgaaaaagttasggcttttcaattcgctcacctcatccagtattcagcctattttgtcaaaggaagattcacagagagaggaatatgtatattcttcaatgttctgaggcatatttttatagtgccaacttccaggacctccttttcctcctcctacttctctcatccttttctttatccaaaactgcaggattcttagatgtatgttataccatgaacagtcagtcagatgttgaaaaaaacasaagtttttcagatgtagtggcaatcaccacttttyaatgtctcagttattggcacacaaaggtcattgaggtacatgtcaagaatttacttcaaatatactgagtactgaaattaaatcctgacatttagaactagtgaactgaaagcattaagatttcctcccgctggaggaacaaggtccacctttgtatgaactatcacttgtatttgaaagataaatgtctgaaaactcatagttagtatcttactgataacagcgatattaagggctagtaccttatagtattgcatt

SEQ ID NO: 38949 - DNA, 558 bp, Chicken  19866894270496_3
cagatttaatcagcactcactgaaaaagttasggcttttcaattcgctcacctcatccagtattcagcctattttgtcaaaggaagattcacagagagaggaatatgtatattcttcaatgttctgaggcatatttttatagtgccaacttccaggacctccttttcctcctcctacttctctcatccttttctttatccaaaactgcaggattcttagatgtatgttataccatgaacagtcagtcagatgttgaaaaaaacaaaagtttttcagatgtagtggcaatcaccacttttyaatgtctcagttattggcacacaaaggtcattgaggtacatgtcaagaatttacttcaaatatactgagtactgaaattaaatcctgacatttagaactagtgaactgaaagcattaagatttcctcccgctggaggaacaaggtccacctttgtatgaactatcacttgtatttgaaagataaatgtctgaaaactcatagttagtatcttactgataacagcgatattaagggctagtaccttatagtattgcatt

SEQ ID NO: 38950 - DNA, 600 bp, Chicken  19866894270499_1
ttttctatcatttcttgtgctggcttactgattgcacctgatgactatatgtatacctcttctttttcttttttttaggctacagaattgtctacacaccctctgtggaaggcagcagcacagagctcaacctgcctgatactgctacctctgtaacactcagtgacctgatgccaggtgttcagtacaacatcagcatctatgcagtggaggaacatcaggagagtactcctgtcttcatccagcaggaaaccacaggcgtcccacgcacaggtagtggccagaagaccagtcagtacytaacccaaatggcagtgsaagctctcattactctaactgaatgagcgttgccactcagtgcctatgtggacttttaattttgcttttgttgtgctggctttttaattgcaaatgtcagacactgaagttctatggtaaagtcatacttacgaactgacacagtcaaaccactactttgcattactagtgttacagttcaagatcaagctgggggcaggtcaaaaggttagtcttgcattgtgtctacggaaaagagagatcactttttcctaagttgtcttatggggattctgctgagag

SEQ ID NO: 38951 - DNA, 600 bp, Chicken  19866894270499_2
gctggcttactgattgcacctgatgactatatgtatacctcttctttttcttttttttaggctacagaattgtctacacaccctctgtggaaggcagcagcacagagctcaacctgcctgatactgctacctctgtaacactcagtgacctgatgccaggtgttcagtacaacatcagcatctatgcagtggaggaacatcaggagagtactcctgtcttcatccagcaggaaaccacaggcgtcccacgcacaggtagtggccagaagaccagtcagtacytaacccaaatggcagtgsaagctctcattactctaactgaatgagcgttgccactcagtgcctatgtggacttttaattttgcttttgttgtgctggctttttaattgcaaatgtcagacactgaagttctatggtaaagtcatacttacgaactgacacagtcaaaccactactttgcattactagtgttacagttcaagatcaagctgggggcaggtcaaaaggttagtcttgcattgtgtctacggaaaagagagatcactttttcctaagttgtcttatggggattctgctgagagatcttaggagcctggtaa

SEQ ID NO: 38952 - DNA, 600 bp, Chicken  19866894270499_3
cttttgttgtgctggctttttaattgcaaatgtcagacactgaagttctatggtaaagtcatacttacgaactgacacagtcaaaccactactttgcattactagtgttacagttcaagatcaagctgggggcaggtcaaaaggttagtcttgcattgtgtctacggaaaagagagatcactttttcctaagttgtcttatggggattctgctgagagatcttaggagcctggtaaatcattttgcctcagtacttggcctacagatgtttaaggttatgtactcagacacaacaaaacrgatctaaatagttcacctgacttctccatctcctttcccagtcctcactgttattttccatcgcagcctgtggagattgcttagcattggttgatgtgccaaaataacaccgtacaatctaaaattgagggagccacattaaaaaataaaacagtggtttcagagttctttaactatcagttgggttgaatagccaaaccaaaagaaaagacagtggaaaaaattgggatctgatgtggtaacagtggaatgtgatggtcctgcaagttgcaagcatatgtgttggcaaatgggagctta

SEQ ID NO: 38953 - DNA, 547 bp, Chicken  19866894270530_1
ttcatgtgggaataatatgtccacttccctacctccactgcagcattttcgtccctcaggtgcatgccatcaccagctccccctctcatccccccccaggtacgtgagcgagacctgcccttcgtcatgcacacgctggctgcagagttcaccatcctcagagtagtgaatggggagacggtggctgccgatgaccttgggataacaaatggatttgtcaaaccaaaactgggtaaggagcagcctggactcaaccccttggggcgctggtcttcatgctgcatggggagaggggttcgygttcaccaggggctgcaggaggtgcttaactttgtgagcaacgctgatgagccctgtggaatttgagccttttaatgctgctttaatgcctgtagagcagacgtgcctttttgtaggacagaaggttaagacgcaactcatttcagctgtgaaaagataacgttgtgtggcccatacttccatatgttcacgttgcaaaagaaaatggcttcgacagaggcttggttaagcattgcagccattgatg

SEQ ID NO: 38954 - DNA, 600 bp, Chicken  19866894270532_1
ctatattaacagctatgtgccagttcatcccaaggtactggactttaaacactgtctccttgctacatacatagaggctccagtactcaaaaaatgtttacaccaagtagctggacatgttcaatgataatgcagcagtaatctgtacacagaacatggtagaaatttttgcagaccccttcccagctgtaaggctatgctacacttaagcataagcagctgctgcagctttttgaaaggccttgagggcttaagagagagctacattaaagcaacaaaacatattcagaaagtgtcagyatgacaattctgtaagccttcagcatgaaacctagagactcccgagtgtactctggaagcccaaccatattgttttacaagtcctaccatgtgactgaaggccatcactgctgatgcttctgacacagggggctcttttggtatctctcgtggcgtttttggttgatcctgcagcacatgaaaaggatctcacggcagagggaattgcccatgtacagtaaaaacaaacatggagaaatgacactgaaatagacagtgataataagttggaagatacgggattctaactattatcattgc

SEQ ID NO: 38955 - DNA, 600 bp, Chicken  19866894270541_1
gacactccttcatctttgcatttgcaaccatgtcctatctgctggcagtccccagcatgtcatacagcagggctggagcgttgggaaagcaaccccagaaaaatgatgttggcaactaaaggaagtgtttttggggaggtaacagggcaagtggtgctggggagcaggcagcgttcaggcaggagcaattctggaagcatccacagagagggtaaatgccaggaaagagcattttcttttattggcccctttattttgattttattgcatctgaagcatgcaataaaaagaaaaacattyggggcaataaaacagccasagagaaatagcctggcatcttctgaaatacggcaggggtgggacycatgcactttgaggaaggagcagggtgctggcatgatggaacagaatccatgggacggtgcttggccagccctgtggcatccctctgaatgaaaatcaaacaccatttactctttgtcaccgtcccagttccactatgcttgcccacaggtcctcatggtcagtggggaacacaacggcrcctggggaaatggatgaggagtgcctgctgggggggcagccccacctgctgcaagt

SEQ ID NO: 38956 - DNA, 600 bp, Chicken  19866894270541_2
atttgcaaccatgtcctatctgctggcagtccccagcatgtcatacagcagggctggagcgttgggaaagcaaccccagaaaaatgatgttggcaactaaaggaagtgtttttggggaggtaacagggcaagtggtgctggggagcaggcagcgttcaggcaggagcaattctggaagcatccacagagagggtaaatgccaggaaagagcattttcttttattggcccctttattttgattttattgcatctgaagcatgcaataaaaagaaaaacattyggggcaataaaacagccasagagaaatagcctggcatcttctgaaatacggcaggggtgggacycatgcactttgaggaaggagcagggtgctggcatgatggaacagaatccatgggacggtgcttggccagccctgtggcatccctctgaatgaaaatcaaacaccatttactctttgtcaccgtcccagttccactatgcttgcccacaggtcctcatggtcagtggggaacacaacggcrcctggggaaatggatgaggagtgcctgctgggggggcagccccacctgctgcaagtcacagaatggcccaggttg

SEQ ID NO: 38957 - DNA, 600 bp, Chicken  19866894270541_3
cagcagggctggagcgttgggaaagcaaccccagaaaaatgatgttggcaactaaaggaagtgtttttggggaggtaacagggcaagtggtgctggggagcaggcagcgttcaggcaggagcaattctggaagcatccacagagagggtaaatgccaggaaagagcattttcttttattggcccctttattttgattttattgcatctgaagcatgcaataaaaagaaaaacattyggggcaataaaacagccasagagaaatagcctggcatcttctgaaatacggcaggggtgggacycatgcactttgaggaaggagcagggtgctggcatgatggaacagaatccatgggacggtgcttggccagccctgtggcatccctctgaatgaaaatcaaacaccatttactctttgtcaccgtcccagttccactatgcttgcccacaggtcctcatggtcagtggggaacacaacggcrcctggggaaatggatgaggagtgcctgctgggggggcagccccacctgctgcaagtcacagaatggcccaggttggaagggaactcaaggaccatgaatctccaacccccccgctcagcc

SEQ ID NO: 38958 - DNA, 567 bp, Chicken  19866894270541_4
gcccctttattttgattttattgcatctgaagcatgcaataaaaagaaaaacattyggggcaataaaacagccasagagaaatagcctggcatcttctgaaatacggcaggggtgggacycatgcactttgaggaaggagcagggtgctggcatgatggaacagaatccatgggacggtgcttggccagccctgtggcatccctctgaatgaaaatcaaacaccatttactctttgtcaccgtcccagttccactatgcttgcccacaggtcctcatggtcagtggggaacacaacggcrcctggggaaatggatgaggagtgcctgctgggggggcagccccacctgctgcaagtcacagaatggcccaggttggaagggaactcaaggaccatgaatctccaacccccccgctcagccatgtgttgggagatgacgtagcaaaggctctgtgccaccgcactgcagcatcagcaaccaaagcagcaaaattccacccctggaacagtaataattcattgatgtcagactatccctaactgcgctggagaaagtctggcctcacat

SEQ ID NO: 38959 - DNA, 551 bp, Chicken  19866894270550_1
tgttgggtccatgagaagcaaagcaggtacaaaaccatgtcctagagccccaattcttcttttcagagtaactcaacagcaaggaactttcccccacagaccacccagcagcatggggaccctcccacagcaggtccagagcccaaccatatggacaaccagtatggcatcaactgggctgtgatgtcttcaccagcccacacagcttcagcccgtcaccctctgctccccaaaatggtgaagctcagggtggcagggattggaaccagatgggctttgagggttcattccaagccaaayctttctttswttgtgtgtatacaattccctactaaatgtcccatggccccgtgagcgctcccccacatgtctatcctgcacagggctctcccagaaaggtcaataatcaatttagcatatcttagttaatcttggcgtggaggctctcacttattttcttattaaatagcaggtgtgtgttacggtgcagacaaaactaataaaaccaataaacgtaacacaaaattccaactgtcttccatatatgctga

SEQ ID NO: 38960 - DNA, 542 bp, Chicken  19866894270550_2
catgagaagcaaagcaggtacaaaaccatgtcctagagccccaattcttcttttcagagtaactcaacagcaaggaactttcccccacagaccacccagcagcatggggaccctcccacagcaggtccagagcccaaccatatggacaaccagtatggcatcaactgggctgtgatgtcttcaccagcccacacagcttcagcccgtcaccctctgctccccaaaatggtgaagctcagggtggcagggattggaaccagatgggctttgagggttcattccaagccaaayctttctttswttgtgtgtatacaattccctactaaatgtcccatggccccgtgagcgctcccccacatgtctatcctgcacagggctctcccagaaaggtcaataatcaatttagcatatcttagttaatcttggcgtggaggctctcacttattttcttattaaatagcaggtgtgtgttacggtgcagacaaaactaataaaaccaataaacgtaacacaaaattccaactgtcttccatatatgctga

SEQ ID NO: 38961 - DNA, 541 bp, Chicken  19866894270550_3
atgagaagcaaagcaggtacaaaaccatgtcctagagccccaattcttcttttcagagtaactcaacagcaaggaactttcccccacagaccacccagcagcatggggaccctcccacagcaggtccagagcccaaccatatggacaaccagtatggcatcaactgggctgtgatgtcttcaccagcccacacagcttcagcccgtcaccctctgctccccaaaatggtgaagctcagggtggcagggattggaaccagatgggctttgagggttcattccaagccaaayctttctttswttgtgtgtatacaattccctactaaatgtcccatggccccgtgagcgctcccccacatgtctatcctgcacagggctctcccagaaaggtcaataatcaatttagcatatcttagttaatcttggcgtggaggctctcacttattttcttattaaatagcaggtgtgtgttacggtgcagacaaaactaataaaaccaataaacgtaacacaaaattccaactgtcttccatatatgctga

SEQ ID NO: 38962 - DNA, 599 bp, Chicken  19866894270582_1
  misc_feature (1)..(138): n is any nucleotide
nnnnnnnnnnnnnnnnnnnnnnnnnnnnnnnnnnnnnnnnnnnnnnnnnnnnnnnnnnnnnnnnnnnnnnnnnnnnnnnnnnnnnnnnnnnnnnnnnnnnnnnnnnnnnnnnnnnnnnnnnnnnnnnnnnnnnnnnnnagagtgattcctccccatctgacatctctgtcttctgcttggaagcctcttccccttttctgtaagtacctattacaaagacgtgtgagtattcgatgcatatgcagacaacaactgcttacgtaaatgaaagtcttgagcacctgtaaggcatctcttgtycccccccaaacacaggaggtgtttgagctcctgcttgactccagccaaacagcggggacctaatggaacccaaaaacctcactggtactggtgaatggccagctgcaaaacagctggggctgctcttggatggaagagctgggagttgagctgtgcgtttccaggggctggaaaacaaaggtgagagcagcacgagtgggattttcctgctgtggttgcctgaactgtctcagataagctaattagaggggcttttcttggcggctaactgatagagacagccacatccaggggctgac

SEQ ID NO: 38963 - DNA, 600 bp, Chicken  19866894270583_1
tctacttagagctggtaaaggagagcatgatttcttcggggcatttgtggggggtggtttgttgggtgtttctctccaactccttgttcctttacaacagtgaactttgtcatctttcaggcctcaacccagacaaaatttgtgcctaggaattatactagctgtacttttactgtctttgtgcatgtacagtctaataaaaagctgcatcttgaaaacatcagctactccacacaaacatacatacgtcattgctgtgcaacagagctttgtgtggggaacagtggccagagccctggragcagtgcagtcccccagcaactggtataagcagggaccttgtagctgtttttagatctccagctatttgctcagagctaatrgagatgtttctgcacacagatcaataagaaatggtgcagaacagatgttccttgctgtatggaacttttcactgcagtgtgaaataatttcagtggtctgaagccctgtcaccagcagaatctctgtccttcagtagtttcttcagctgtctaagaatcagtgatggcagatatcaatctgtctgtagtttctattcttatgtacttcagtgtagaa

SEQ ID NO: 38964 - DNA, 548 bp, Chicken  19866894270583_2
ttgttcctttacaacagtgaactttgtcatctttcaggcctcaacccagacaaaatttgtgcctaggaattatactagctgtacttttactgtctttgtgcatgtacagtctaataaaaagctgcatcttgaaaacatcagctactccacacaaacatacatacgtcattgctgtgcaacagagctttgtgtggggaacagtggccagagccctggragcagtgcagtcccccagcaactggtataagcagggaccttgtagctgtttttagatctccagctatttgctcagagctaatrgagatgtttctgcacacagatcaataagaaatggtgcagaacagatgttccttgctgtatggaacttttcactgcagtgtgaaataatttcagtggtctgaagccctgtcaccagcagaatctctgtccttcagtagtttcttcagctgtctaagaatcagtgatggcagatatcaatctgtctgtagtttctattcttatgtacttcagtgtagaattgtggggactacagatgcttaatattgctg

SEQ ID NO: 38965 - DNA, 599 bp, Chicken  19866894270585_1
  misc_feature (1)..(78): n is any nucleotide
nnnnnnnnnnnnnnnnnnnnnnnnnnnnnnnnnnnnnnnnnnnnnnnnnnnnnnnnnnnnnnnnnnnnnnnnnnnnnntatatttgatgtttatcagcctctgctgctagagattgttgattggggtaaacttgtagatatgctatatttcaggaatattttacatgttttcagctatgtatcgcacacttaacagatactgcaccactgcagcaaacatcaaagtgggagaaggaagagcttataaatatactttaataaattaaacttttaaacattctttctaaatgggaaaaagartctctataaattctttgtcctcccactctggtctcatcaacgccacatgttaagttctaagatgggaataaagatatttggctttcttacagatagaaaataatgccatattgtagattgtgagctggcactgcagctagaccatatgtgtcaccatcaaataagagcccaagcccacagaacacttagcattctgcaaggtttcagtgccccgtgcaatctgtaccatagccttcactgggctgaaaacaaaataacaaggaagttcaaggctcctcacagtgttctacattacaatc

SEQ ID NO: 38966 - DNA, 600 bp, Chicken  19866894270586_1
ctattatattctgtcttatgaattgttctaatttttttatactggaactgcagtattcttacagtgttgaagtactactacagtgaaagcataaccttttaactactggtattctatttgtcattacaaatctcagctggatatatgtactttgtctttggatcataacacagttctgaaaaacagcgagagtgggaataccttcaaaagcaatgagagtatactgtttattggcttagtataataagtagattgtgtttttttttaactgtatgagtacagattaggatttgaaattgrttgctagttctatctacattactattgtaatgttttacaatccattttgagatattttccccccaaattaaattgcacttcttttcagactgagtagcttaaagtctaacttttcctttagtctcaagcaaataaagtagcaataaatagttatttcattaatccctgagcctccctctgtaagtattttctcttagttatgtatgaatatatttattacttcctcatcaagatgcaagcaaattatttatccagagaccacatgtcagtcagaaacttctttcatgttttaatggtagt

SEQ ID NO: 38967 - DNA, 600 bp, Chicken  19866894270589_1
agacttgaaaggcttcctaggatgcttgctatttatggggtaagatgactcatagtcatacaacttagaattggttctattgaaccaagtgtctgttatcgggtgtctgagcactgatggtgaaaccttgattgttattagtctcaaggacaaggtctttagcacctcattttatgcactaggccttggccataacaaccaggctgactggggggacaaggactgcactgttaaatttagcctctatactagactgttgctgtggagaagaaaagtctatgttcagagtaaagtgacatyagtcacagctgcttctttgggaaagtgactggctagaaaaaaaatgagtgctagccaaatgtttctcatttttctgtttgtgtgagagaagctacgtgtgttcttactcagtaagaatcccattttacttcttaattagaagttgctgatattttaaaaatttgcagcattctcatgtctccagacagccaactaggatggctttaaatgtcaaaatgtgcttttcattcttgtgtttatatatgtatcaatgcattatcaagtgaaataaaaccctgcagagtgacaaattttctttag

SEQ ID NO: 38968 - DNA, 600 bp, Chicken  19866894270590_1
gtgctagacctctgctctcagggtcctcctgcaggtacctggcatagtgacaagacatcactgtctctgccagaaactgaggccgacagacaacagcagctcaggtaaatactgcggcattcacagcactgaagcagcagttgcgcagctagaagctgggatttctccttagtgctggaagagtgagcccagatgtctcgccggatgcaagtttgtttgcttccttgtcatctggtgactgccctagggaggccctttggcaggctgtgctctgtctgaggctgccccatggaagatggrcaaagaaaagcagggtacaagggcccggggctcacagagggatttccctgttctggcatatgcagttttaactcgtgtgactggttacatgcagaggttcattctgtcagacttgctaatttgtcccaacccctgtctcatgaacttccaagtctcttactgacacagttctgttttgatttgttttgttgaaggagtggaacaagatgcacagcacaaaccagatacattttgtaattgtaagccagctgattgctaggcatacatgacatagacacgctcgtgtgtacctctgacacg

SEQ ID NO: 38969 - DNA, 600 bp, Chicken  19866894270597_1
gaatacacatggtattcttaagagactatcatgtggccatggccaagacagcagtattccatatggtgttgctactatgcctataaaaaggctttaatgaattctgacttcatatcatcacataagaagtgtaatcatagtatagaaatccaacgccagcttcattttgttgcttgaaacctatcctctgctgtattttcctctctctttctgcactggatggctgagctcacctctaataggcatgtggggacagccatcgtccatctgtttcattttaaataaggctttttttttgarccgttgcttaggctgcccactggctcttggaagagttatgtggcttttctcactctttaaaacatttccttggtgtgatgcctacaaaagcttcacaagggtaatgctgttgttgacacgttagcaaacactgcctattgcgctgaaccacaacatcttttcctcaaaccctcctcagctcattcagtcattttatttcatctacatagatgggctatttctgggcaaggtctctttttgtctcattgctttcaatgcaccagttagtcagcaacattagcaggattgacaggttctgtg

SEQ ID NO: 38970 - DNA, 599 bp, Chicken  19866894270601_1
  misc_feature (1)..(111): n is any nucleotide
nnnnnnnnnnnnnnnnnnnnnnnnnnnnnnnnnnnnnnnnnnnnnnnnnnnnnnnnnnnnnnnnnnnnnnnnnnnnnnnnnnnnnnnnnnnnnnnnnnnnnnnnnnnnnnntgaaactgaagagtaaacaatttttttacataattttccatccaaatttatatgctcatatcagtgattgtgcactttagtttcaatgctgtaagtaaaatgcctagaatatttcagcattgcctgtcctaatattgcatagttctgtcaacaattgcactgagctcacagaacgcctaattttgtacrtttgatatattcaataatccacaaaaatgcatattgctcaaattcctcagggagaagtgcgaaatacttagatactacagtgagggcacctcacaaaactaacatagctcttcttcatatggaaatatttgtaaacttttagaactctgctaagcttctgtttttgattgtggtctgtatttttataaccatgttcttggtcctactgagctccattataaaaactctcagtaacttcagtagaacttagattaaacaaaaccacattattacatttttccctgttcaatcaggagtag

SEQ ID NO: 38971 - DNA, 600 bp, Chicken  19866894270601_2
acttagatactacagtgagggcacctcacaaaactaacatagctcttcttcatatggaaatatttgtaaacttttagaactctgctaagcttctgtttttgattgtggtctgtatttttataaccatgttcttggtcctactgagctccattataaaaactctcagtaacttcagtagaacttagattaaacaaaaccacattattacatttttccctgttcaatcaggagtagacaattggtgctaatggggaaacaatttcttttgatgaaagatatttttgtcttttatttactttwtakagagagcaaacatttaaaatgcacacagaaatgctagctagagtggcagacataaagagattgattagaaagctattattcagatggtatcaccagaacccctccacaaaaatgagagagcagtatttaatctatgtcatcctaattgcataatgtttgagtgccacctgttttagccagtggagttcctgaaaacattttaattggttgtgaagatgatttgtaagaaaaaaattatatttgtaaaactaattatttaaaaatcaactcaaataagaagctgttaagagagaaaac

SEQ ID NO: 38972 - DNA, 600 bp, Chicken  19866894270601_3
tagatactacagtgagggcacctcacaaaactaacatagctcttcttcatatggaaatatttgtaaacttttagaactctgctaagcttctgtttttgattgtggtctgtatttttataaccatgttcttggtcctactgagctccattataaaaactctcagtaacttcagtagaacttagattaaacaaaaccacattattacatttttccctgttcaatcaggagtagacaattggtgctaatggggaaacaatttcttttgatgaaagatatttttgtcttttatttactttwtakagagagcaaacatttaaaatgcacacagaaatgctagctagagtggcagacataaagagattgattagaaagctattattcagatggtatcaccagaacccctccacaaaaatgagagagcagtatttaatctatgtcatcctaattgcataatgtttgagtgccacctgttttagccagtggagttcctgaaaacattttaattggttgtgaagatgatttgtaagaaaaaaattatatttgtaaaactaattatttaaaaatcaactcaaataagaagctgttaagagagaaaactga

SEQ ID NO: 38973 - DNA, 599 bp, Chicken  19866894270616_1
  misc_feature (1)..(175): n is any nucleotide
nnnnnnnnnnnnnnnnnnnnnnnnnnnnnnnnnnnnnnnnnnnnnnnnnnnnnnnnnnnnnnnnnnnnnnnnnnnnnnnnnnnnnnnnnnnnnnnnnnnnnnnnnnnnnnnnnnnnnnnnnnnnnnnnnnnnnnnnnnnnnnnnnnnnnnnnnnnnnnnnnnnnnnnnnnnnnnnatggcaaaacccccacagcagctgtctctgcccatacaaggtttgactacagacctgtccagttggaactgctatttgccacttgcctgttccgtcctgggagcacacccaatactactgcattrttttcagatttctaagcacaaccttttgtgatctttctattaacacagtaaccaagygcaccactgctttctctgtggtctcactgccaatctcagcttttctactgttcagctcttattttaagttagatcccaaaagactagttgttctagtaacacaaatccaaccaaagtaatgcaacatttatggaggtagagtgtaagagtaatattcactcttagaggacactgtttcaaaaagaagctcaaaacttctcctgtattatatgggtaatactgcactgagctagaggtggttc

SEQ ID NO: 38974 - DNA, 599 bp, Chicken  19866894270616_2
  misc_feature (1)..(118): n is any nucleotide
nnnnnnnnnnnnnnnnnnnnnnnnnnnnnnnnnnnnnnnnnnnnnnnnnnnnnnnnnnnnnnnnnnnnnnnnnnnnnnnnnnnnnnnnnnnnnnnnnnnnnnnnnnnnnnnnnnnnnnatggcaaaacccccacagcagctgtctctgcccatacaaggtttgactacagacctgtccagttggaactgctatttgccacttgcctgttccgtcctgggagcacacccaatactactgcattrttttcagatttctaagcacaaccttttgtgatctttctattaacacagtaaccaagygcaccactgctttctctgtggtctcactgccaatctcagcttttctactgttcagctcttattttaagttagatcccaaaagactagttgttctagtaacacaaatccaaccaaagtaatgcaacatttatggaggtagagtgtaagagtaatattcactcttagaggacactgtttcaaaaagaagctcaaaacttctcctgtattatatgggtaatactgcactgagctagaggtggttcaaccaccttggaaaaaaatgtacaagttttccaccactgtcatccaaaaatatttta

SEQ ID NO: 38975 - DNA, 600 bp, Chicken  19866894270617_1
tttgtaaaaatcagccatcaatagaagctgtgacttttccagaaaatggttgattatagataggtattagataggtaccatttaaaactctctataaacacactttataaataaactttggagtcagtaagaaatgcagctactcctttactctaattttccttcttacaacactggattaaaaacttctcgatgctgcctccagttggttttgtttcagctgtttaagatgagaagttgacaaccttatttcattttaacatcagattctcagtttccagctggaggtcagttatctcyaccgggtttcacagtgtacttttattgaacatactcacttccctattggcataaagcctattgggcccaggcattaataaattatttacaaaagagcttgagaagttgttagatccaggacctgtgggttggagtacactgcttcctcctagcacagtactggtcctgatggctgggcatgtgggattgagatgaagtaaacttggaggataagaaatgttactcgtgaactaagataagactactttccatcccctgcttgtggcatgtctccagtctggattggagagccttgtacag

SEQ ID NO: 38976 - DNA, 600 bp, Chicken  19866894270617_2
gtgtacttttattgaacatactcacttccctattggcataaagcctattgggcccaggcattaataaattatttacaaaagagcttgagaagttgttagatccaggacctgtgggttggagtacactgcttcctcctagcacagtactggtcctgatggctgggcatgtgggattgagatgaagtaaacttggaggataagaaatgttactcgtgaactaagataagactactttccatcccctgcttgtggcatgtctccagtctggattggagagccttgtacagagtagccaccaargtcagctgggcaattcttcagtacaggggccatgtcctttatttattgatcaatttatttctctttgcaggatagcaaaattgtggaacaacaatgttttaaaatttctgttgatgttattgtcagaggaaatgcatgttttccaagagtgttttttcagaagctgtattgagaacctactgtttagtaaatgacttgttttagacagctgaaagttacaaaacctggtttccctgcaactgtgatctgagtttgaaccatccagaacagtgcagaactttgcaggttttgaactgcatg

SEQ ID NO: 38977 - DNA, 600 bp, Chicken  19866894270623_1
aaagcacgtcactcacggggactgctggaaaggtgaccagggcatgcttttattgacagggaatgggcctgcagctgcagtggagattgatctatattaacaacagcgatggtaaaagaaatgttgaaaagcagccctcaacccttcaccttcacagaatcacgtgacaaaaatcttaatgaaagcgggaaataccgtggattcacttcattttctttacagaggaaagtgatcctttttcaggcagttcataagacagtctgctaagtgaagaataacagagagtgatttacattatcrctgaattcaatcttgaagccagtaattttggtgtcaacccacaattacaggcaatcgcttccactcagctcgttgttctagtctgttactgtttacartgtgtacttacctaacgcacagygttgcatcgagccgtacttttgctgtaattaatctgcgatgttatatcatccttatgtaccatttcttcagtgcagggctgtagactgatgaaaatgcttctggttaaagggggaaggaaatccttttacagttgtttcctcccctttgcttgctctatagcctcccacactgtatata

SEQ ID NO: 38978 - DNA, 600 bp, Chicken  19866894270623_2
aacaacagcgatggtaaaagaaatgttgaaaagcagccctcaacccttcaccttcacagaatcacgtgacaaaaatcttaatgaaagcgggaaataccgtggattcacttcattttctttacagaggaaagtgatcctttttcaggcagttcataagacagtctgctaagtgaagaataacagagagtgatttacattatcrctgaattcaatcttgaagccagtaattttggtgtcaacccacaattacaggcaatcgcttccactcagctcgttgttctagtctgttactgtttacartgtgtacttacctaacgcacagygttgcatcgagccgtacttttgctgtaattaatctgcgatgttatatcatccttatgtaccatttcttcagtgcagggctgtagactgatgaaaatgcttctggttaaagggggaaggaaatccttttacagttgtttcctcccctttgcttgctctatagcctcccacactgtatatatatatcagcttgtggcgtgagcagatggaaaggatttcttgctaatatgggcatggtggccatctaaaaccccaggcagaaggcaccgcatgtgttgg

SEQ ID NO: 38979 - DNA, 578 bp, Chicken  19866894270623_3
tgttgaaaagcagccctcaacccttcaccttcacagaatcacgtgacaaaaatcttaatgaaagcgggaaataccgtggattcacttcattttctttacagaggaaagtgatcctttttcaggcagttcataagacagtctgctaagtgaagaataacagagagtgatttacattatcrctgaattcaatcttgaagccagtaattttggtgtcaacccacaattacaggcaatcgcttccactcagctcgttgttctagtctgttactgtttacartgtgtacttacctaacgcacagygttgcatcgagccgtacttttgctgtaattaatctgcgatgttatatcatccttatgtaccatttcttcagtgcagggctgtagactgatgaaaatgcttctggttaaagggggaaggaaatccttttacagttgtttcctcccctttgcttgctctatagcctcccacactgtatatatatatcagcttgtggcgtgagcagatggaaaggatttcttgctaatatgggcatggtggccatctaaaaccccaggcagaaggcaccgcatgtgttggg

SEQ ID NO: 38980 - DNA, 599 bp, Chicken  19866894270632_1
  misc_feature (1)..(148): n is any nucleotide
nnnnnnnnnnnnnnnnnnnnnnnnnnnnnnnnnnnnnnnnnnnnnnnnnnnnnnnnnnnnnnnnnnnnnnnnnnnnnnnnnnnnnnnnnnnnnnnnnnnnnnnnnnnnnnnnnnnnnnnnnnnnnnnnnnnnnnnnnnnnnnnnnnnnatacatcaacttgtagatctgctcagtactccactcctgttcatttttcgtactcattattcttccctccctccctccccccatgaggtgggacacgggaagtttccaggtaagacctcagtacagaaatgatgccagtggcctgcaaacaraatggttcctgccaacagctccggtgcacctcttgcatagcattcagggtctgctcctctcctctgctctctttgtactggagataccacaaggttcccagggccaggcatctccttccttctctcttacatctgctaagtaattcagacagaacattatagctcccctcacttgtgttctggttaccgtgcagattgtaactggtaggaattccctaggatatcctgcatccttctggtgacatattttgcccttaacccaagagacaaattaacacagtggtctcatttctttcctt

SEQ ID NO: 38981 - DNA, 600 bp, Chicken  19866894270639_1
gatcattgccatcacctcttttctctcttttatctaccagctcccaaactcagatgctcaggagactttccagttcatattcttcaatttcattactaacagaaattgttacttcatgaaaggtccaggtgtgacataccttcaagacttgagcatgcagaaattaatcacaaaggagcttgcttttactctctttatcttttaattagatgcctaaaagcttcttccaaagaactgttttgatatccagagtagcctgtagtccttatgcccagctctatcaaggacagaaatcctcaraaacagagtagacaaacattgttgggaataacttaggaacagctgttcttgccttcaggcttggacacttaaaactgagtgacctggtttacccagccattttttctctgatttacatccctgtgtctggtgataattggtgcttttctaattgtcatttaagctcagttaaagttaatattagctgttaattacctcttgcctcacttcagctattgtatttgtgcttaagcagaggttttcttttctttttatttttattttaggaggattgttggggctgctttttggtttgttgct

SEQ ID NO: 38982 - DNA, 600 bp, Chicken  19866894270646_1
ggatctgatttttacgctgtgagcggatggcactcctgtgcccagatcaactgccttggtttgtgtgcttgatatgtctaggaaacatcagtcctgccgtgtgcttgatttgcacgtgcataatttgtctagagctttttggcatccggaagtccccggaaagtgctctgtctggaagactgttaacagacagaagagatggaggagaaacttcttctcctgctttgctcttttagtaactgtctccgcttattgcagtacaacatcttatgacagcagggatccttggaggtgggagamkgtgagaggagcacttttaacgtgaacttcattgatacctgtaaggataatatcgcagatctttgggtygttgacagatttggaagagttcctgcctttgtaacttaagggctggcaacaagaagactgcaagctagaccctcacatgctgagattcccttgctagaaagtagaggatttttatttctcgtgtgctctgtgttcataagtaggtgattacacagacacctgcttatgaatgtgtgaaataatcattgctatcaattctttttcagggtatgaacattatagagcagctag

SEQ ID NO: 38983 - DNA, 600 bp, Chicken  19866894270646_2
gatctgatttttacgctgtgagcggatggcactcctgtgcccagatcaactgccttggtttgtgtgcttgatatgtctaggaaacatcagtcctgccgtgtgcttgatttgcacgtgcataatttgtctagagctttttggcatccggaagtccccggaaagtgctctgtctggaagactgttaacagacagaagagatggaggagaaacttcttctcctgctttgctcttttagtaactgtctccgcttattgcagtacaacatcttatgacagcagggatccttggaggtgggagamkgtgagaggagcacttttaacgtgaacttcattgatacctgtaaggataatatcgcagatctttgggtygttgacagatttggaagagttcctgcctttgtaacttaagggctggcaacaagaagactgcaagctagaccctcacatgctgagattcccttgctagaaagtagaggatttttatttctcgtgtgctctgtgttcataagtaggtgattacacagacacctgcttatgaatgtgtgaaataatcattgctatcaattctttttcagggtatgaacattatagagcagctaga

SEQ ID NO: 38984 - DNA, 600 bp, Chicken  19866894270646_3
tgatatgtctaggaaacatcagtcctgccgtgtgcttgatttgcacgtgcataatttgtctagagctttttggcatccggaagtccccggaaagtgctctgtctggaagactgttaacagacagaagagatggaggagaaacttcttctcctgctttgctcttttagtaactgtctccgcttattgcagtacaacatcttatgacagcagggatccttggaggtgggagamkgtgagaggagcacttttaacgtgaacttcattgatacctgtaaggataatatcgcagatctttgggtygttgacagatttggaagagttcctgcctttgtaacttaagggctggcaacaagaagactgcaagctagaccctcacatgctgagattcccttgctagaaagtagaggatttttatttctcgtgtgctctgtgttcataagtaggtgattacacagacacctgcttatgaatgtgtgaaataatcattgctatcaattctttttcagggtatgaacattatagagcagctagatcctgtatcttttagcaattacttgaagaaataccataatacaatatgtggaagacatcctattggcg

SEQ ID NO: 38985 - DNA, 599 bp, Chicken  19866894270655_1
  misc_feature (1)..(99): n is any nucleotide
nnnnnnnnnnnnnnnnnnnnnnnnnnnnnnnnnnnnnnnnnnnnnnnnnnnnnnnnnnnnnnnnnnnnnnnnnnnnnnnnnnnnnnnnnnnnnnnnnnntttgttgtctactgtgaatataaatcttactgagggaaaagaaatgtcaatgtctgagcaccactgctcagaaaaaaagaagtgaagctctctgctatggccagtattgtattgtttgtaatagatttatctcaacatgttcacagtggaaagactgaaatttgaattccccatagcgtgaaggtctcatttgcagtcttsagaaaatcagcagttctttggcttaactgttacttaataaaattgcacttgccttctgttaatcattcctctaataaaccttccattgcaaacatactgcagtaggatgtatctgcttgaataaaggttacagtgaggcaattcacatttcattttatttgtactcacaattggttgcaacctttgttttctgccgtgattgtctctaatctgcattcccactgttgtaagaaaattatttgaattctaaattgatagaggagatgaatataagcagatctcagctcccatgagggcaa

SEQ ID NO: 38986 - DNA, 600 bp, Chicken  19866894270657_1
attctgtgactggccacggtggtgatgggttgatgtctggactagaatcttaagaggtcttttccaaccataacaattctacgatatattctttttaacaactttagcttgctctagatcctgtttaagtggatcttcagctaccagctaacctttcaatggctctaaaaacgagggtcatagccaaacacaacccacatggtatcactgtcagcacaagggggatcacagccttgtgcccaaagcacaccagtccaagtgacacacaaaacatggctggaactgggtttcactttagayacagccactcctctccctcagtgctgagtcactgctggatgatattgtgcagctgccagacaccaccaagcaatggactgagtgatcctttgtggagtttatgaaattttatgaaatatttttgcctctctgccacaaaaacaggttacagaagtgttttcacggggaaatcttacttttcatgtgatcttggctcagcgaggagtctaaaatttaactaaaaagagttggcctaagagcatctgtatccagcaagctgtgttatgttaacacattacagaagggcacccacatggttgg

SEQ ID NO: 38987 - DNA, 600 bp, Chicken  19866894270658_1
gtcaaatgggatgacagtttctcttaagtacttttccatccctccccataactctcccagctcttctcttgagcctatgtggaaggtagaagttatggttgtttgtgcctgaggtcccctggcttccttttctgcctggtgcatttctgcctttgtcttggtacttgcagaccatggtggctgtgaaaaacagcaaactgaaaaccccctcagaaggactggtgatcagcttcaccttactgctttgcatgtggatcagatagctctgccttcaggagaccttgatctgtctgcttgttyatcctgcttgagacagccattgtgcataaaacttcagcgaagtttaacaattccagtgaaccacctctgtgatttacaaaacaatagagtctaagagtaagccctttgggcagaaagaaaaggatgtcaatagattaaagaatacaggtatgactatgaataaagcattttccagcaagcttggaaagccaccaaagcaaatacatggagctatttactcctttgaggtattgagaaactccggtttcttccaggtgtgtacctgagtgctcattcaggtgggagcagttatcctcattc

SEQ ID NO: 38988 - DNA, 600 bp, Chicken  19866894270658_2
atagagtctaagagtaagccctttgggcagaaagaaaaggatgtcaatagattaaagaatacaggtatgactatgaataaagcattttccagcaagcttggaaagccaccaaagcaaatacatggagctatttactcctttgaggtattgagaaactccggtttcttccaggtgtgtacctgagtgctcattcaggtgggagcagttatcctcattctgcccttctagttcctagggttttaggactcctactagttttcctctttaaaccttcttgtaccacactgcttacactgcagygtgccctccctgctaaagtgctaagcytcgaattttctttatcatgataagcaagagctcagctcagctttgaatgacagggtttgttcagagcagaagcaaggatttactcctctctttagctcaagaagaagtctgataactacagggtgtaccctgagctcgaaggaaaggggcttatagtctctccttaagagccctctccctgcctttcatgagcccaaaggctaggaaagcttgtttagtaggactgctgctactgtggatttcagcctgttttgtgagttaccctatgataac

SEQ ID NO: 38989 - DNA, 600 bp, Chicken  19866894270658_3
cagaaagaaaaggatgtcaatagattaaagaatacaggtatgactatgaataaagcattttccagcaagcttggaaagccaccaaagcaaatacatggagctatttactcctttgaggtattgagaaactccggtttcttccaggtgtgtacctgagtgctcattcaggtgggagcagttatcctcattctgcccttctagttcctagggttttaggactcctactagttttcctctttaaaccttcttgtaccacactgcttacactgcagygtgccctccctgctaaagtgctaagcytcgaattttctttatcatgataagcaagagctcagctcagctttgaatgacagggtttgttcagagcagaagcaaggatttactcctctctttagctcaagaagaagtctgataactacagggtgtaccctgagctcgaaggaaaggggcttatagtctctccttaagagccctctccctgcctttcatgagcccaaaggctaggaaagcttgtttagtaggactgctgctactgtggatttcagcctgttttgtgagttaccctatgataactgcaagcctgtgccttcagaagcatcc

SEQ ID NO: 38990 - DNA, 600 bp, Chicken  19866894270658_4
gctcagctttgaatgacagggtttgttcagagcagaagcaaggatttactcctctctttagctcaagaagaagtctgataactacagggtgtaccctgagctcgaaggaaaggggcttatagtctctccttaagagccctctccctgcctttcatgagcccaaaggctaggaaagcttgtttagtaggactgctgctactgtggatttcagcctgttttgtgagttaccctatgataactgcaagcctgtgccttcagaagcatcccaagcacctcaacatcaatgcaacctgcttatcytttccttgctggtgctatgtctgggctctctgcagcagaactcccagaaaacaagagttaaaccgctatgttggggttttttgtatcccagtgatacttacccagtagaaattctatcaaccaacagcagagtttacactttcacaatttctagacctaatagattaactgtttttaagtcacgttgtgtagcaatgctggctgcctaaaattwattctcgttgacagtccagttgcttcagattgggccagaaagctctaactgggctgttctgaggcaggtgcagcattcgtccattg

SEQ ID NO: 38991 - DNA, 600 bp, Chicken  19866894270658_5
gataactacagggtgtaccctgagctcgaaggaaaggggcttatagtctctccttaagagccctctccctgcctttcatgagcccaaaggctaggaaagcttgtttagtaggactgctgctactgtggatttcagcctgttttgtgagttaccctatgataactgcaagcctgtgccttcagaagcatcccaagcacctcaacatcaatgcaacctgcttatcytttccttgctggtgctatgtctgggctctctgcagcagaactcccagaaaacaagagttaaaccgctatgttgggyttttttgtatcccagtgatacttacccagtagaaattctatcaaccaacagcagagtttacactttcacaatttctagacctaatagattaactgtttttaagtcacgttgtgtagcaatgctggctgcctaaaattwattctcgttgacagtccagttgcttcagattgggccagaaagctctaactgggctgttctgaggcaggtgcagcattcgtccattgtctttccctggtaggaatgccaacagaacttcttcttttgagagaggtcacatttctttgtgtccagtatctaact

SEQ ID NO: 38992 - DNA, 600 bp, Chicken  19866894270658_6
gttttgtgagttaccctatgataactgcaagcctgtgccttcagaagcatcccaagcacctcaacatcaatgcaacctgcttatcytttccttgctggtgctatgtctgggctctctgcagcagaactcccagaaaacaagagttaaaccgctatgttggggttttttgtatcccagtgatacttacccagtagaaattctatcaaccaacagcagagtttacactttcacaatttctagacctaatagattaactgtttttaagtcacgttgtgtagcaatgctggctgcctaaaattwattctcgttgacagtccagttgcttcagattgggccagaaagctctaactgggctgttctgaggcaggtgcagcattcgtccattgtctttccctggtaggaatgccaacagaacttcttcttttgagagaggtcacatttctttgtgtccagtatctaactgatacctgtacactcatcactaatccttctgaagtgatcccatttccatgtggaagttttagatgaaatcccgttatatgaactttgtttctttttttatatgaactttttatgttgcctccagcttcccgcaggtgg

SEQ ID NO: 38993 - DNA, 600 bp, Chicken  19866894270660_1
catagaatcatagaaacatagaatttctcaggttggaaaagaccttaaagatcatcaagtccaactgcagatcatcaagtccaaccagatgtttggatgagtcttggatgggatgattcatgttgctgccatgcctagggttaacctggttgccaggtttgagattaaggaggaggtttccctaagtcaaggatcacagagatgccttcaccttcccctgacacatggctttttgtggtagtatttggtattttagacctggagttaagtacattaaagtatgttggaggattagctgtrgcttttgaagctccgggatgtacttctgaacccctggatttaatttctatttcagagttgttgagctcattgtccccacgcagtccacacracccaccagctgtgcagcatagcgtggggcttcgagaggcacccagaaaattgctccactggttaccctcaytgcttcacatttaccagggacacaaactgcgtgagggtcactcagcaggtgtatttgaataacattacgttataccccatttattagccaaatcttttaccatctctcctgctattttctgcaggattcagcaaaat

SEQ ID NO: 38994 - DNA, 600 bp, Chicken  19866894270660_2
tttggatgagtcttggatgggatgattcatgttgctgccatgcctagggttaacctggttgccaggtttgagattaaggaggaggtttccctaagtcaaggatcacagagatgccttcaccttcccctgacacatggctttttgtggtagtatttggtattttagacctggagttaagtacattaaagtatgttggaggattagctgtrgcttttgaagctccgggatgtacttctgaacccctggatttaatttctatttcagagttgttgagctcattgtccccacgcagtccacacracccaccagctgtgcagcatagcgtggggcttcgagaggcacccagaaaattgctccactggttaccctcaytgcttcacatttaccagggacacaaactgcgtgagggtcactcagcaggtgtatttgaataacattacgttataccccatttattagccaaatcttttaccatctctcctgctattttctgcaggattcagcaaaataactccagcagtccggttctgctctttgttttgatggagcattcccttctccccaccctctgctgcgctctcagcactgcacattgttcca

SEQ ID NO: 38995 - DNA, 600 bp, Chicken  19866894270660_3
attaaggaggaggtttccctaagtcaaggatcacagagatgccttcaccttcccctgacacatggctttttgtggtagtatttggtattttagacctggagttaagtacattaaagtatgttggaggattagctgtrgcttttgaagctccgggatgtacttctgaacccctggatttaatttctatttcagagttgttgagctcattgtccccacgcagtccacacracccaccagctgtgcagcatagcgtggggcttcgagaggcacccagaaaattgctccactggttaccctcaytgcttcacatttaccagggacacaaactgcgtgagggtcactcagcaggtgtatttgaataacattacgttataccccatttattagccaaatcttttaccatctctcctgctattttctgcaggattcagcaaaataactccagcagtccggttctgctctttgttttgatggagcattcccttctccccaccctctgctgcgctctcagcactgcacattgttccagcacgtgttatcaggccacaagttccccaggagctgctccaagatgcttggaagcgcagtgcacagcatctc

SEQ ID NO: 38996 - DNA, 600 bp, Chicken  19866894270660_4
tttcaatatcaccaccatcagttttatcatgcccactcagtagtgcgccttatccagccctgcatcccttttaactcctaaaatcagattacttttagtcctgctacaattttggtttttctttttccttttgttctttgctttcctaaccacagacttttgaataacataatggctcagcttaaaaggtaaaaaaaaaaacagataattggtgttgtactaattattctctacccttctttgtatgtgcatacgtagatatgcggctaccagcccctgcctgtcacttccacctgaagraacatctttactgatatgatgtagtgatgttatgcatgtacatatatcactcacgcacacttactgacaaggcactggcagccatccagctgccaacccratcaataggagcatattgagttacacggagaacctggagaggggcaggcagtggttgcagtgccggcacgcactcccacactgagctgttactcctgtttaacagggctgggggtgggcttccacattgctttaacacttcttacaattcgttttcagtttttattgttattttggacagcagaaccataggttcttggt

SEQ ID NO: 38997 - DNA, 600 bp, Chicken  19866894270660_5
ctgctacaattttggtttttctttttccttttgttctttgctttcctaaccacagacttttgaataacataatggctcagcttaaaaggtaaaaaaaaaaacagataattggtgttgtactaattattctctacccttctttgtatgtgcatacgtagatatgcggctaccagcccctgcctgtcacttccacctgaagraacatctttactgatatgatgtagtgatgttatgcatgtacatatatcactcacgcacacttactgacaaggcactggcagccatccagctgccaacccratcaataggagcatattgagttacacggagaacctggagaggggcaggcagtggttgcagtgccggcacgcactcccacactgagctgttactcctgtttaacagggctgggggtgggcttccacattgctttaacacttcttacaattcgttttcagtttttattgttattttggacagcagaaccataggttcttggtatctaattctagatggaagacaaaatctctctgatcgagcacatgcctctgctgtgttatcccatctgtagtgcagcaaaagcaaggggaactagcctct

SEQ ID NO: 38998 - DNA, 600 bp, Chicken  19866894270663_1
atcagcaaaattaaatagtttgttcagttaatattagtccctaggaaaccaagccacttattaaattggagcacagagccaggtgaaacatgacatgcaccatggagatctgtcagtacctttcaagcttgcccttgggcactgtcctgactgcttcagccaggcatttctctctggtgagtaggatattcctggctgggtgttagcttgagccttcaaaatctcaccagggaagtctgtaggaggagcccaatgggttctaggagacactggtcacttaactgatggattttgacttgycaggcatgcatgtttgccccagtgcaaaacagagatcgggtctaggagccaggaacaacttacttagttgtagccatggggctgggatgccttgggactgagtgtcagagtctgactcaagtcatcttttcctaaaataggaataaaaaaagccccacaaaccagagcactgtcccatttggctgtattacttctctgagcaacactgactttactgactccaagtacaggtggagaagatctggagatgctcatgccactgacatgtaagccatgtgtgatggcaccaggacaacagtc

SEQ ID NO: 38999 - DNA, 590 bp, Chicken  19866894270668_1
taattgtttatttaaaaaagcatatgaaatttacatttcttgtgtgatctgaaatcccatttattgtatgaagtcagaactgtaatgatttgctttaagttcaaatgactcttataggcctgtagacttatctagtaattttatagtaattttaacggaaacatttatattatctcagattgtaaaagacaatatttaattctgatgataatgttgttctgggattcaaggtatatgttcacatcaccacattcttggtttcttaaaaatttcaaaatgctggagatgatggaccacagrgatgctaactgcagctgcattttcatacttcatccctttggaccacaaaatcagagaatcatagaattgtaggcattggaagggacctccagagaccatcaagcctcacacccttgcaaagcaggctctctacaacaggctgcacaggtatagaccactgaaaagaggttgtccatgtcttttggctaccagaattaggatatttataaacattaatcagatcccctctgattccagttcacacagcctttgctcatagaggaggtgctccaggccctttatcatctttg

SEQ ID NO: 39000 - DNA, 600 bp, Chicken  19866894270676_1
tgaaatcctccaccacttcagtagaaattgaataaagagaaagaaggaagagggttcagcattttagcattttacaagcatgccacagttagcaatgacagtggtcagtcaaaggagagtagttaaaatgaagcatgtggtgaagagaaagagccacccagcacttagatttaacaaaactgcttcttttccgctcactgagttgctttgctggaatataaaagcagtccctgaatggcccagtttctcaatcgggcaagcatttagacttggcaaccaataatgactatttcaattttrgtattaagatacatgtttgtatatgttcacatcaagattctgaaaataagcaggttaagggaaactatgacttgtttaaacaatatttaaggttaaaaaattaaatgagagatgaaagtttaacgtagtgtctttatgatttatgtgcttaaaaaagccctcatattgagtaaagyataaatgaaagatttacaggaggaaagagccaattgttgtcatactgctgtaactcatcagcttaaggagcatgcagcttgctgccaaagttcccaatgaagctcttttcagtgaaaagaagta

SEQ ID NO: 39001 - DNA, 600 bp, Chicken  19866894270676_2
aaactgcttcttttccgctcactgagttgctttgctggaatataaaagcagtccctgaatggcccagtttctcaatcgggcaagcatttagacttggcaaccaataatgactatttcaattttrgtattaagatacatgtttgtatatgttcacatcaagattctgaaaataagcaggttaagggaaactatgacttgtttaaacaatatttaaggttaaaaaattaaatgagagatgaaagtttaacgtagtgtctttatgatttatgtgcttaaaaaagccctcatattgagtaaagyataaatgaaagatttacaggaggaaagagccaattgttgtcatactgctgtaactcatcagcttaaggagcatgcagcttgctgccaaagttcccaatgaagctcttttcagtgaaaagaagtaaaactctatttgttttctttgtaattcctgctcacgtgtttagctgtgcaagaaaaaaaagttatgagtttctaaagatgctatagatccatagagtttaaaaacatcggatgataaactgaacagtgactattgtttgtaagctaagacttgtgtccttacataattatgtgtcc

SEQ ID NO: 39002 - DNA, 600 bp, Chicken  19866894270679_1
gataaagagctggtaatgaggtttagcagaggctaccacagtacaggctttccttgcagtcatttaacatactgcatattttagtggctgtaatatacagaaagccttactttcatggttcttcttggaactggtccagcttgtgctgtgaaagtacaattcagcagaagccctttttgaatatttatttatttttagtttctaagagttctgcatgtggtaccctgcatcctcatgagaagagtcccagcagcggtgccttggcactaacaaatgccttgatgtcactgcttggttttytcactttctttcttcttttttttttttttttttttwaattgggtaacaaagtcaaagcaccctctgcttctttcctgctcttaaaatccagtttgctcctcttctctgcctcctcccaacagccctttgggaacaagaagggatgatgtctctggcaaagaaataggtagggtttggttggtaagtggaactgatttaattaaattagcttcataatggattcattcaagaaggcaaaggagtaggaatgtggcttctgattctttttttcccttctctctccctccggtcaatcagagt

SEQ ID NO: 39003 - DNA, 600 bp, Chicken  19866894270679_2
cacagtacaggctttccttgcagtcatttaacatactgcatattttagtggctgtaatatacagaaagccttactttcatggttcttcttggaactggtccagcttgtgctgtgaaagtacaattcagcagaagccctttttgaatatttatttatttttagtttctaagagttctgcatgtggtaccctgcatcctcatgagaagagtcccagcagcggtgccttggcactaacaaatgccttgatgtcactgcttggttttytcactttctttcttcttttttttttttttttttttwaattgggtaacaaagtcaaagcaccctctgcttctttcctgctcttaaaatccagtttgctcctcttctctgcctcctcccaacagccctttgggaacaagaagggatgatgtctctggcaaagaaataggtagggtttggttggtaagtggaactgatttaattaaattagcttcataatggattcattcaagaaggcaaaggagtaggaatgtggcttctgattctttttttcccttctctctccctccggtcaatcagagtaaaatggctttctaaataaaatgcttttttggtaca

SEQ ID NO: 39004 - DNA, 514 bp, Chicken  19866894270680_1
ccggccattagcagcagcttatccctctctcgttgcccctggccttgtccatctgtgctccttagaggatatcacaatccttagccaggacctgtccatcagtgtcctcaagacaaaagatttctctgcctttgcccaggacttgcctggacttgttcctcagcaaactttgagtcagtgatataaaagaataatctcttacacatgctttatttatttttgaagctgctacaaaactgttttgtaaattgagaagaaaacttgaaaggattggactaatattaagttcacataaaatayattacctttatgcaayttcatggtgcttgcttttttttttttttttttgacatttaaagatggcaatcattagttattttaattatttccaagctagtaccttacattggacaagaatatttttcaaaattgtttttacttgaaaaatactcctggattaagaattggctcacaagcaggcagcagaaattagatttcaaaataaaataaagca

SEQ ID NO: 39005 - DNA, 498 bp, Chicken  19866894270680_2
gcttatccctctctcgttgcccctggccttgtccatctgtgctccttagaggatatcacaatccttagccaggacctgtccatcagtgtcctcaagacaaaagatttctctgcctttgcccaggacttgcctggacttgttcctcagcaaactttgagtcagtgatataaaagaataatctcttacacatgctttatttatttttgaagctgctacaaaactgttttgtaaattgagaagaaaacttgaaaggattggactaatattaagttcacataaaatayattacctttatgcaayttcatggtgcttgcttttttttttttttttttgacatttaaagatggcaatcattagttattttaattatttccaagctagtaccttacattggacaagaatatttttcaaaattgtttttacttgaaaaatactcctggattaagaattggctcacaagcaggcagcagaaattagatttcaaaataaaataaagca

SEQ ID NO: 39006 - DNA, 600 bp, Chicken  19866894270681_1
aacattcaggaaagaacagcttgtaccagtgatacttatgctgcagaaatgagtatagccagttttgtacacagttattgatatttaaataggaaaaaaaaatattgcctagacaaaaattcaccctgaccgtgccaaaactggaatgtagaccttgctttgtgctgcagtaaaaatggctttcaacacaaagattctaaaatgttaccaatttactttctgcaatattcaggttaggaaatagttttagcttcacctcagaggcagcctaatataagctgtgcagttacatattagctkaggtgcaaacataccaaaaaccactggctgtaatacagggtttatttgctttaacttatgcttcatgttggaaagagaytatgggaaacatacatatctagatttctcataagtggtaatagatatccagttaactttttttttccttcctttaaagagaatgtctcaaaaactgacataatgcaaacatgatgtcacccagtatcatccaagagaaaacgttacatgtgtgcagcaccaacagaaatacctttaaacccacgcttcatgttacccttggtaaccaagaaggcattgcta

SEQ ID NO: 39007 - DNA, 600 bp, Chicken  19866894270681_2
gatatttaaataggaaaaaaaaatattgcctagacaaaaattcaccctgaccgtgccaaaactggaatgtagaccttgctttgtgctgcagtaaaaatggctttcaacacaaagattctaaaatgttaccaatttactttctgcaatattcaggttaggaaatagttttagcttcacctcagaggcagcctaatataagctgtgcagttacatattagctkaggtgcaaacataccaaaaaccactggctgtaatacagggtttatttgctttaacttatgcttcatgttggaaagagaytatgggaaacatacatatctagatttctcataagtggtaatagatatccagttaactttttttttccttcctttaaagagaatgtctcaaaaactgacataatgcaaacatgatgtcacccagtatcatccaagagaaaacgttacatgtgtgcagcaccaacagaaatacctttaaacccacgcttcatgttacccttggtaaccaagaaggcattgctatcacgctgtaacttcttttatttaagccttctttaaaaactagagctttggctatttaatgcctacttaatacacacaa

SEQ ID NO: 39008 - DNA, 599 bp, Chicken  19866894270689_1
  misc_feature (1)..(2): n is any nucleotide
nncatcccattgggttccctccatcccattgggttccctccatcccaccgcatccctccatcccagcaggtcccctctggacccccggcatccccgaaccacccatggcagtgcggtgcccctgggcggcgtggccttggaaggcccccaacatttcccagagatgaaagcacactcaagtgtcaaacaaactttctgaattatctctctggatgttttctccctggtgctttggaagacggaggaggaacattgcattcccccaatgctggcacggtgcggagctgcgggagggagcgkggagctgccagggcgcccgcgggctccactctgtgcgctccggtgctgtccgtgagtcagcacagcccctggccgtggccccagccgggcacctcgccccgaaacgccgccgagaacaaagaggtaacaggcgcctgattaatgagcagacagcaaatcatcccttcccaccgcagttttaggaggagtagtcataaatgaccacgttaagggaaatgaacgggattgatctgctcctgcgcaagcgctcgtcgcccatcgggctcgttggtagcaaatggcacagcccgggatcggtg

SEQ ID NO: 39009 - DNA, 600 bp, Chicken  19866894270690_1
tccctgaggagccagtgtaacctctggtatttttcatgccagcacgctaattaagtgtcaccttcacaggggagcaagcagaatgcttcattcacactgttaggcttttacagatctttcccataaggcaaaaattatttagaagaactcctgtcctaaattgaggtctaacaacatctagaattgttttacatagattgatcttgtcatgtctcatccaacctgtcacagcagtacttttcataaggttttgaaactgcacatcaggctgcccactaagccatggcataatgaccctcrtgtaagatggaaaggtagaagaaaaaaagaggatgaatagcattatttcacrttgtttctgagacatttgaggttatgctttccattagtttggatggaaaaatacaggaagatggcaaaattgaaaaaatttttggcattaaaaaaattcattgtgtaatatttttaaattataccagttttcactctaaaagcgtatgtgaacacgaagaaattccttacggtaaggctaaaactgtgggttaccccactgtgggtgcagtatctcactaaatgtcagcttggagaagagtcattcta

SEQ ID NO: 39010 - DNA, 600 bp, Chicken  19866894270690_2
aagtgtcaccttcacaggggagcaagcagaatgcttcattcacactgttaggcttttacagatctttcccataaggcaaaaattatttagaagaactcctgtcctaaattgaggtctaacaacatctagaattgttttacatagattgatcttgtcatgtctcatccaacctgtcacagcagtacttttcataaggttttgaaactgcacatcaggctgcccactaagccatggcataatgaccctcrtgtaagatggaaaggtagaagaaaaaaagaggatgaatagcattatttcacrttgtttctgagacatttgaggttatgctttccattagtttggatggaaaaatacaggaagatggcaaaattgaaaaaatttttggcattaaaaaaattcattgtgtaatatttttaaattataccagttttcactctaaaagcgtatgtgaacacgaagaaattccttacggtaaggctaaaactgtgggttaccccactgtgggtgcagtatctcactaaatgtcagcttggagaagagtcattctagattgtctcaaaatgcaaatcgattttgtttctactaagcaaatgaatagaa

SEQ ID NO: 39011 - DNA, 599 bp, Chicken  19866894270693_1
  misc_feature (1)..(82): n is any nucleotide
nnnnnnnnnnnnnnnnnnnnnnnnnnnnnnnnnnnnnnnnnnnnnnnnnnnnnnnnnnnnnnnnnnnnnnnnnnnnnnnnnnatgggatttcctcaggtccttctttttctgctttagtgggggcagctacctgttcctgtgatgagatccaggaggtgccattgactccagccccagaattggccccaccacagagacaaacatctccctggtgaacagggcacatgggttgtcaaggaaaattatttcttctccttttaactacactcatttaaaacttttcccccatcgcaatacamartagacctcacaatttttctataagaacagcatcaaaactgaaataattggcacaagggaggctgaaagagagtcctgactccacaagtcatgaatgtggtgttcctacacacctgggacatgtccatgcrtatctgtcccacgatgtgacccttctcccatgtgcatataccagccctctaatgtatctgctgcaaggttttattttgtcaacccttcaaagccacccaatctcttatcttaaaataggttaatccaactgtctgtttttcctgctttgcttttttagctttgcagt

SEQ ID NO: 39012 - DNA, 599 bp, Chicken  19866894270693_2
  misc_feature (1)..(80): n is any nucleotide
nnnnnnnnnnnnnnnnnnnnnnnnnnnnnnnnnnnnnnnnnnnnnnnnnnnnnnnnnnnnnnnnnnnnnnnnnnnnnnnnatgggatttcctcaggtccttctttttctgctttagtgggggcagctacctgttcctgtgatgagatccaggaggtgccattgactccagccccagaattggccccaccacagagacaaacatctccctggtgaacagggcacatgggttgtcaaggaaaattatttcttctccttttaactacactcatttaaaacttttcccccatcgcaatacamartagacctcacaatttttctataagaacagcatcaaaactgaaataattggcacaagggaggctgaaagagagtcctgactccacaagtcatgaatgtggtgttcctacacacctgggacatgtccatgcrtatctgtcccacgatgtgacccttctcccatgtgcatataccagccctctaatgtatctgctgcaaggttttattttgtcaacccttcaaagccacccaatctcttatcttaaaataggttaatccaactgtctgtttttcctgctttgcttttttagctttgcagtgg

SEQ ID NO: 39013 - DNA, 600 bp, Chicken  19866894270693_3
tgttcctgtgatgagatccaggaggtgccattgactccagccccagaattggccccaccacagagacaaacatctccctggtgaacagggcacatgggttgtcaaggaaaattatttcttctccttttaactacactcatttaaaacttttcccccatcgcaatacamartagacctcacaatttttctataagaacagcatcaaaactgaaataattggcacaagggaggctgaaagagagtcctgactccacaagtcatgaatgtggtgttcctacacacctgggacatgtccatgcrtatctgtcccacgatgtgacccttctcccatgtgcatataccagccctctaatgtatctgctgcaaggttttattttgtcaacccttcaaagccacccaatctcttatcttaaaataggttaatccaactgtctgtttttcctgctttgcttttttagctttgcagtggtttgcagatatttttacagtggaggaagggctacagattggaatattattggttcttcttgccttttacacaaaccaggcagattcaatccctactatttactctatttttactttctttttttttttctt

SEQ ID NO: 39014 - DNA, 600 bp, Chicken  19866894270699_1
ggcagttagatagcaacatcgtaagatatatgctgaaactcaaacagtggccctggatctgaactctgttcttaatcaaaactcccagtagcttctctgggacttctgccagacttagtagtacaggaccaaacccagaaagcatatttgcattggcatccgttatttcttgggaatctgcagaagcagaagcccctcatttgtctgccagtaggaacctcaagaggggcactgggtggaggggaagactgcatgcagagacagagtgaagtcatggtatggacaggcagatatgcacasagtgcatttcatcctcaccagaagtaagcagaaagatgctctgaagttaactcagactagtcttggcagctgctaagagctcctgcatcttgtaaaatctcatctccaatacaaaattggtcaggcagctggtagcagaactgtcatagtgtgcaaaaaacacagcaggagaataaagcaaggaaattacttctgaatatctggtatctgtctagctcccaaccaagagatctttacaaccccacagctttttgtcttccacacatgatcctcctggctcaacatttagacttttttact

SEQ ID NO: 39015 - DNA, 599 bp, Chicken  19866894270700_1
  misc_feature (1)..(153): n is any nucleotide
nnnnnnnnnnnnnnnnnnnnnnnnnnnnnnnnnnnnnnnnnnnnnnnnnnnnnnnnnnnnnnnnnnnnnnnnnnnnnnnnnnnnnnnnnnnnnnnnnnnnnnnnnnnnnnnnnnnnnnnnnnnnnnnnnnnnnnnnnnnnnnnnnnnnnnnnnatgtaagagttgtcatcaacttgaatcagaagccagcaacattgctgggcctaacacaagaatcttcatggcttttctatcattttctttacatgtctgctactgtctttgttaagatttactgcctacttaaaatttatctcttgrctgttgcatattggtctctttaaaccaccacgtatgaggagggcacgaacgtcttgtggcagatagagttttaattactcctatgctggaaaacttacaagcatcaataacaagtgggaaatttttgagacagttatattcaaattgactgcatccattaataagtcaatttaaaatgagatttttgagcatctgagaaataagagagtaacagatttacttgttgattgacaacacgtcaaaaaatcaaaaaatatatattccagaaaataatcatttaaactataatagcagtgtat

SEQ ID NO: 39016 - DNA, 600 bp, Chicken  19866894270700_2
tctttaaaccaccacgtatgaggagggcacgaacgtcttgtggcagatagagttttaattactcctatgctggaaaacttacaagcatcaataacaagtgggaaatttttgagacagttatattcaaattgactgcatccattaataagtcaatttaaaatgagatttttgagcatctgagaaataagagagtaacagatttacttgttgattgacaacacgtcaaaaaatcaaaaaatatatattccagaaaataatcatttaaactataatagcagtgtatggtatttagacaatttkcttttcaaaatggtctatttactaagttccaaacacaagcaacagttgcatcatgttacaggagcggaatcactgctgaatatcagtgragggtaatgggatagataaaagttctctaaaagagaaagcaccagaactagcagcaaggtgggggttggtcagcccttcatttgaatgtaaatgtaattatgaggctggcagtttggctgacgtcagacaagatcttggtaaaccattaccaccagcacctggtaacacagttgataataaaagaggatgaagtagaagattccaagcagt

SEQ ID NO: 39017 - DNA, 600 bp, Chicken  19866894270700_3
aataacaagtgggaaatttttgagacagttatattcaaattgactgcatccattaataagtcaatttaaaatgagatttttgagcatctgagaaataagagagtaacagatttacttgttgattgacaacacgtcaaaaaatcaaaaaatatatattccagaaaataatcatttaaactataatagcagtgtatggtatttagacaatttkcttttcaaaatggtctatttactaagttccaaacacaagcaacagttgcatcatgttacaggagcggaatcactgctgaatatcagtgragggtaatgggatagataaaagttctctaaaagagaaagcaccagaactagcagcaaggtgggggttggtcagcccttcatttgaatgtaaatgtaattatgaggctggcagtttggctgacgtcagacaagatcttggtaaaccattaccaccagcacctggtaacacagttgataataaaagaggatgaagtagaagattccaagcagtttggcactattaggaaaaaaaatcaagctactattttttaagcagcaaaagaaaatacagaagagcaagatgttgtgacaacgtttaca

SEQ ID NO: 39018 - DNA, 600 bp, Chicken  19866894270701_1
ctctacagcaaaaccaagccctctttcctaattgtctggaggagagagttagctgctaaaacctatcaagcagccagaactcccactagctccaacagaaaataaggcactcggcacctaataggataaggctcaatagccctgctttacaacacttacatttgaagatcaaggctcagaaattaagggcatgatgttttccatatgcacagtacttaatgactttaaaataaacatacatacaagtgtttctgtaattgggtccttagactgtagtgctgtctctttattatttgactstttcaaaatcttacaagtacattactaacatcctctaagaaacctccttaaggaatctttgcagcacaacacagtcctaaaatctgaactttccaaccttgaagatatacagcttgtttgttagatgaaaattctaagtatttcctgtactattccaaaggcaaagacgatttgtctcttgcagtacagtggaaacccatgagaactcagaaacagtactgactaaaatctcattaaacagaaagctggacatttatgattttgcattcatggtctaatttaggagaaatgcaagaaata

SEQ ID NO: 39019 - DNA, 599 bp, Chicken  19866894270705_1
  misc_feature (1)..(50): n is any nucleotide
nnnnnnnnnnnnnnnnnnnnnnnnnnnnnnnnnnnnnnnnnnnnnnnnnngctggcaagaaatgccaaaaggctgtttgctgtgtgcgaggaaaccactgacacagcgcacaccttgcaaaagaatacagccagagctgccagagcagctcacatcacccactgcttccccagtccatgacagcgggctcccagtcagcctcattcacgtggttgagccactccagcgcaaggatcgctcagccacaaccccgggaagtgctccactgccatcagttcatctgctaacacgaagtacaaraagaaaggaacccgtctgcctttattttacccacctacaacagcagcaggtctccccgtrggctttcctagggaaggtgarttggctttaaaacaggtgcatttattccccaagctgtgacggtgcgtgcctggcacctccaagaacactttgcaatggcagcacacgcacagaaccaacatctcaggctcacagcccatccatctcccaagccattgctttaaagaaccacactgttctgactttgtggcctaagggtggggacagagcacacagcaccacgtgaactgcagctctgt

SEQ ID NO: 39020 - DNA, 600 bp, Chicken  19866894270705_2
aatgccaaaaggctgtttgctgtgtgcgaggaaaccactgacacagcgcacaccttgcaaaagaatacagccagagctgccagagcagctcacatcacccactgcttccccagtccatgacagcgggctcccagtcagcctcattcacgtggttgagccactccagcgcaaggatcgctcagccacaaccccgggaagtgctccactgccatcagttcatctgctaacacgaagtacaaraagaaaggaacccgtctgcctttattttacccacctacaacagcagcaggtctccccgtrggctttcctagggaaggtgarttggctttaaaacaggtgcatttattccccaagctgtgacggtgcgtgcctggcacctccaagaacactttgcaatggcagcacacgcacagaaccaacatctcaggctcacagcccatccatctcccaagccattgctttaaagaaccacactgttctgactttgtggcctaagggtggggacagagcacacagcaccacgtgaactgcagctctgtcacttccagagcaagttctaactctttccttaagccctgacctcccgtgaatgccaaccag

SEQ ID NO: 39021 - DNA, 600 bp, Chicken  19866894270705_3
gtgtgcgaggaaaccactgacacagcgcacaccttgcaaaagaatacagccagagctgccagagcagctcacatcacccactgcttccccagtccatgacagcgggctcccagtcagcctcattcacgtggttgagccactccagcgcaaggatcgctcagccacaaccccgggaagtgctccactgccatcagttcatctgctaacacgaagtacaaraagaaaggaacccgtctgcctttattttacccacctacaacagcagcaggtctccccgtrggctttcctagggaaggtgarttggctttaaaacaggtgcatttattccccaagctgtgacggtgcgtgcctggcacctccaagaacactttgcaatggcagcacacgcacagaaccaacatctcaggctcacagcccatccatctcccaagccattgctttaaagaaccacactgttctgactttgtggcctaagggtggggacagagcacacagcaccacgtgaactgcagctctgtcacttccagagcaagttctaactctttccttaagccctgacctcccgtgaatgccaaccagaggccgttccctctgagcagc

SEQ ID NO: 39022 - DNA, 600 bp, Chicken  19866894270705_4
gtgcctggcacctccaagaacactttgcaatggcagcacacgcacagaaccaacatctcaggctcacagcccatccatctcccaagccattgctttaaagaaccacactgttctgactttgtggcctaagggtggggacagagcacacagcaccacgtgaactgcagctctgtcacttccagagcaagttctaactctttccttaagccctgacctcccgtgaatgccaaccagaggccgttccctctgagcagcaccgttactgaggtgctgctatctgaaagagacaggctgtgcagrtgtgacacacacctgtgtgtgcccagctggtggtgacagcactgcctcctgctccctatcagcctggggggccacatagaaaagaaattagcagagaagcactctcacatgtatcccagggcacaaaggatgccatgtgtcctctgctacttacgcctcacagagcgctccgggagaaaggatgcagcatttcctctccagatcctcagtagtgccgcctttttctcttttcttttttaaggaaacccaaatgtcacctttcaaagctacaagagaacaaagaaagtggagtgcaactct

SEQ ID NO: 39023 - DNA, 600 bp, Chicken  19866894270707_1
gctccttctatagactgctgattttcagattaaatacaaaaaaataggtgggatttttttttgcgcagagaatgaaagaaaagcaaagcctgggagacatccagactttttaaagggcttcctgaattcccactgcacatttctcacccagaacgtcaatgctgatgatcatctctgccactctgggatgtgtgacaactcctctgctgttccgatgagccccgggagaagagcggaggatggatttgcatgtaactgctgtggagctgtttcagctcaccacagcttgcaaacagcaasaaggaagctcaatgggaggtggttgggactgctgtgacggaaagcattccccctttcaggcaccagataggtttgcaggccttgggtagttccatacaaagaaaatggttctaaaatygtcagtaatrtttctttcagaatcagttttaatcccttraagtcatcgctctgagttcccagctgcagcacgrcgctcacagtaactcccaggacatttggaatgagctccatttccagaactttccaattactcttccttagatgagctcctttgtaggcatctttaagaaccagagaagc

SEQ ID NO: 39024 - DNA, 600 bp, Chicken  19866894270707_2
ttcctgaattcccactgcacatttctcacccagaacgtcaatgctgatgatcatctctgccactctgggatgtgtgacaactcctctgctgttccgatgagccccgggagaagagcggaggatggatttgcatgtaactgctgtggagctgtttcagctcaccacagcttgcaaacagcaasaaggaagctcaatgggaggtggttgggactgctgtgacggaaagcattccccctttcaggcaccagataggtttgcaggccttgggtagttccatacaaagaaaatggttctaaaatygtcagtaatrtttctttcagaatcagttttaatcccttraagtcatcgctctgagttcccagctgcagcacgrcgctcacagtaactcccaggacatttggaatgagctccatttccagaactttccaattactcttccttagatgagctcctttgtaggcatctttaagaaccagagaagcacaggctgaggccttaggaatcactcagaagttcaacctgagttcctctcacaatcagcactggcagaggtcagcctgctcctcccaacgcrgtaagatgtgctcatggcacactgtg

SEQ ID NO: 39025 - DNA, 600 bp, Chicken  19866894270707_3
cccactgcacatttctcacccagaacgtcaatgctgatgatcatctctgccactctgggatgtgtgacaactcctctgctgttccgatgagccccgggagaagagcggaggatggatttgcatgtaactgctgtggagctgtttcagctcaccacagcttgcaaacagcaasaaggaagctcaatgggaggtggttgggactgctgtgacggaaagcattccccctttcaggcaccagataggtttgcaggccttgggtagttccatacaaagaaaatggttctaaaatygtcagtaatrtttctttcagaatcagttttaatcccttraagtcatcgctctgagttcccagctgcagcacgrcgctcacagtaactcccaggacatttggaatgagctccatttccagaactttccaattactcttccttagatgagctcctttgtaggcatctttaagaaccagagaagcacaggctgaggccttaggaatcactcagaagttcaacctgagttcctctcacaatcagcactggcagaggtcagcctgctcctcccaacgcrgtaagatgtgctcatggcacactgtggcactgatgt

SEQ ID NO: 39026 - DNA, 600 bp, Chicken  19866894270707_4
aatgctgatgatcatctctgccactctgggatgtgtgacaactcctctgctgttccgatgagccccgggagaagagcggaggatggatttgcatgtaactgctgtggagctgtttcagctcaccacagcttgcaaacagcaasaaggaagctcaatgggaggtggttgggactgctgtgacggaaagcattccccctttcaggcaccagataggtttgcaggccttgggtagttccatacaaagaaaatggttctaaaatygtcagtaatrtttctttcagaatcagttttaatcccttraagtcatcgctctgagttcccagctgcagcacgrcgctcacagtaactcccaggacatttggaatgagctccatttccagaactttccaattactcttccttagatgagctcctttgtaggcatctttaagaaccagagaagcacaggctgaggccttaggaatcactcagaagttcaacctgagttcctctcacaatcagcactggcagaggtcagcctgctcctcccaacgcrgtaagatgtgctcatggcacactgtggcactgatgttggaactagcattggaaacagcagctcag

SEQ ID NO: 39027 - DNA, 600 bp, Chicken  19866894270707_5
gtgacaactcctctgctgttccgatgagccccgggagaagagcggaggatggatttgcatgtaactgctgtggagctgtttcagctcaccacagcttgcaaacagcaasaaggaagctcaatgggaggtggttgggactgctgtgacggaaagcattccccctttcaggcaccagataggtttgcaggccttgggtagttccatacaaagaaaatggttctaaaatygtcagtaatrtttctttcagaatcagttttaatcccttraagtcatcgctctgagttcccagctgcagcacgrcgctcacagtaactcccaggacatttggaatgagctccatttccagaactttccaattactcttccttagatgagctcctttgtaggcatctttaagaaccagagaagcacaggctgaggccttaggaatcactcagaagttcaacctgagttcctctcacaatcagcactggcagaggtcagcctgctcctcccaacgcrgtaagatgtgctcatggcacactgtggcactgatgttggaactagcattggaaacagcagctcaggtcctccagaagcaatcttgctgcagctgttgga

SEQ ID NO: 39028 - DNA, 600 bp, Chicken  19866894270707_6
catacaaagaaaatggttctaaaatygtcagtaatrtttctttcagaatcagttttaatcccttraagtcatcgctctgagttcccagctgcagcacgrcgctcacagtaactcccaggacatttggaatgagctccatttccagaactttccaattactcttccttagatgagctcctttgtaggcatctttaagaaccagagaagcacaggctgaggccttaggaatcactcagaagttcaacctgagttcctctcacaatcagcactggcagaggtcagcctgctcctcccaacgcrgtaagatgtgctcatggcacactgtggcactgatgttggaactagcattggaaacagcagctcaggtcctccagaagcaatcttgctgcagctgttggaggccaattaaaaccctattgcaaagaatgccatctaccaagggatcgcacctatcccctacaaagtcagaaggctttatgagagaacatttccctgttaaacctgctgctgcttttctgattgcttctgtgttcttgctgtacttgagctactcgagtataaacaaaactggatgatgttttctggtatcacaagcaatcg

SEQ ID NO: 39029 - DNA, 600 bp, Chicken  19866894270707_7
atgccatctaccaagggatcgcacctatcccctacaaagtcagaaggctttatgagagaacatttccctgttaaacctgctgctgcttttctgattgcttctgtgttcttgctgtacttgagctactcgagtataaacaaaactggatgatgttttctggtatcacaagcaatcgtgggaggaaattaaaacctcactggtatttgttcagtgctgtagaagggactttgtctggcctaacaagtctaattggttccagcgagaagacttccagctctgtgcagggacagcacagttggkttgagcacctgttgagacctcgtttcccaaccctgattcctcagctgcrtggrctgcctggctcagcaggcttttctcagctctccacagccacacagaagccatccctaaaccttgaaagggcacacagatgtatctccccagatcccagcacctagagctgtgtaggagtgatagcacgtgctctcctcttattaaaagccacgagcataggagatgctgtgaggggaaagcagtgcggaagggcacaggaagccttccccagacagccctaccccaaatgttaactcatagtgaagc

SEQ ID NO: 39030 - DNA, 600 bp, Chicken  19866894270707_8
ttatgagagaacatttccctgttaaacctgctgctgcttttctgattgcttctgtgttcttgctgtacttgagctactcgagtataaacaaaactggatgatgttttctggtatcacaagcaatcgtgggaggaaattaaaacctcactggtatttgttcagtgctgtagaagggactttgtctggcctaacaagtctaattggttccagcgagaagacttccagctctgtgcagggacagcacagttggkttgagcacctgttgagacctcgtttcccaaccctgattcctcagctgcrtggrctgcctggctcagcaggcttttctcagctctccacagccacacagaagccatccctaaaccttgaaagggcacacagatgtatctccccagatcccagcacctagagctgtgtaggagtgatagcacgtgctctcctcttattaaaagccacgagcataggagatgctgtgaggggaaagcagtgcggaagggcacaggaagccttccccagacagccctaccccaaatgttaactcatagtgaagctcagcactccagtgatgcagtggcaatgacagcacgcactctccatcca

SEQ ID NO: 39031 - DNA, 600 bp, Chicken  19866894270707_9
gagagaacatttccctgttaaacctgctgctgcttttctgattgcttctgtgttcttgctgtacttgagctactcgagtataaacaaaactggatgatgttttctggtatcacaagcaatcgtgggaggaaattaaaacctcactggtatttgttcagtgctgtagaagggactttgtctggcctaacaagtctaattggttccagcgagaagacttccagctctgtgcagggacagcacagttggkttgagcacctgttgagacctcgtttcccaaccctgattcctcagctgcrtggrctgcctggctcagcaggcttttctcagctctccacagccacacagaagccatccctaaaccttgaaagggcacacagatgtatctccccagatcccagcacctagagctgtgtaggagtgatagcacgtgctctcctcttattaaaagccacgagcataggagatgctgtgaggggaaagcagtgcggaagggcacaggaagccttccccagacagccctaccccaaatgttaactcatagtgaagctcagcactccagtgatgcagtggcaatgacagcacgcactctccatccaatgc

SEQ ID NO: 39032 - DNA, 599 bp, Chicken  19866894270714_1
  misc_feature (1)..(33): n is any nucleotide
nnnnnnnnnnnnnnnnnnnnnnnnnnnnnnnnnacttgtactcattttctgatcctgaatttgtctgttttactgctttatttttgccacgtgatctgaagattctgcatatgctaagaaaacgtgctcttctttatgtagcctgtagtttattctcttcacgtgttgcctgacaccagaagtatttggtgcaagtgatatgtaaatatcatctgtaaaagtatatgcattttcatgttcctggatccagtacaactacccacaattcagatttgattagagctggcagacaactttttwaaatggtacgagctcactttctcacctgagaagcctacaggtgttctgttaatcaaaactgaaaaacaaacaacaaacaaaccaacattatcacaaaaggcagctaagcaaggtagctctcactttaaatgtcaagcatcaaacatcaagtcacctataagctaaacagaatatactcatgaagcttctgaatacactcgctggaagacatcaatgcattctgaatggcagacattccacagatcaaagatagaacttcatcaactaattaacaccttcagaataataaccgttccagc

SEQ ID NO: 39033 - DNA, 600 bp, Chicken  19866894270716_1
ttatctcccttgagaaggaaggagggggacggggcaggcttgtgccacattactggctttggaagagaaagctgggctgagaaatactggacagaaacacccacccggagtcactctgagcaccaagccctgtgtcactccctggtgctttcagctgtaggctgagcagctactcatgttcacttttacaaataacatggcttctaaaagcaaaacagataaaaagaaggaaaatatgtcttatgcatatcctaaatgtatacattttgtataatttggtaggttatcctatgcggagtratcggctggtgcaagaaataaacaaatacwcycttaaatctcacaaatgatataaggatatttctggtgcgtctcaattctgagatgaaatgcctgtgggaagggagtgtttaggtaaaagccttgcaagagaaaaatccttctgggagacgatgctgcttcyctgtaggaaacaacttgcagcaaagtggtttttagtgaaatgtttctgttggttacctgaggagggatctttctgaaatgcagttccttttttggtttcttggggactttacagggcacgttttcagagactttgag

SEQ ID NO: 39034 - DNA, 600 bp, Chicken  19866894270716_2
ggggcaggcttgtgccacattactggctttggaagagaaagctgggctgagaaatactggacagaaacacccacccggagtcactctgagcaccaagccctgtgtcactccctggtgctttcagctgtaggctgagcagctactcatgttcacttttacaaataacatggcttctaaaagcaaaacagataaaaagaaggaaaatatgtcttatgcatatcctaaatgtatacattttgtataatttggtaggttatcctatgcggagtratcggctggtgcaagaaataaacaaatacwcycttaaatctcacaaatgatataaggatatttctggtgcgtctcaattctgagatgaaatgcctgtgggaagggagtgtttaggtaaaagccttgcaagagaaaaatccttctgggagacgatgctgcttcyctgtaggaaacaacttgcagcaaagtggtttttagtgaaatgtttctgttggttacctgaggagggatctttctgaaatgcagttccttttttggtttcttggggactttacagggcacgttttcagagactttgagtgactgggggaaagctatcagttgtctcaa

SEQ ID NO: 39035 - DNA, 600 bp, Chicken  19866894270716_3
ggcaggcttgtgccacattactggctttggaagagaaagctgggctgagaaatactggacagaaacacccacccggagtcactctgagcaccaagccctgtgtcactccctggtgctttcagctgtaggctgagcagctactcatgttcacttttacaaataacatggcttctaaaagcaaaacagataaaaagaaggaaaatatgtcttatgcatatcctaaatgtatacattttgtataatttggtaggttatcctatgcggagtratcggctggtgcaagaaataaacaaatacwcycttaaatctcacaaatgatataaggatatttctggtgcgtctcaattctgagatgaaatgcctgtgggaagggagtgtttaggtaaaagccttgcaagagaaaaatccttctgggagacgatgctgcttcyctgtaggaaacaacttgcagcaaagtggtttttagtgaaatgtttctgttggttacctgaggagggatctttctgaaatgcagttccttttttggtttcttggggactttacagggcacgttttcagagactttgagtgactgggggaaagctatcagttgtctcaata

SEQ ID NO: 39036 - DNA, 600 bp, Chicken  19866894270716_4
gagcagctactcatgttcacttttacaaataacatggcttctaaaagcaaaacagataaaaagaaggaaaatatgtcttatgcatatcctaaatgtatacattttgtataatttggtaggttatcctatgcggagtratcggctggtgcaagaaataaacaaatacwcycttaaatctcacaaatgatataaggatatttctggtgcgtctcaattctgagatgaaatgcctgtgggaagggagtgtttaggtaaaagccttgcaagagaaaaatccttctgggagacgatgctgcttcyctgtaggaaacaacttgcagcaaagtggtttttagtgaaatgtttctgttggttacctgaggagggatctttctgaaatgcagttccttttttggtttcttggggactttacagggcacgttttcagagactttgagtgactgggggaaagctatcagttgtctcaatagtgcttaatgctgggacaacccccctgctgctgaaaatgggtcactgagataaatgttagcacacgtttcccctttgggagtctgcatctatagctgccccacaaaaggaattgcatcactgaagtggtgc

SEQ ID NO: 39037 - DNA, 600 bp, Chicken  19866894270722_1
gacagcacagcctgtcccttgcaccttcccctgagagtagatgtggccttcttctagttctgcctgggaagacagagaatcatcaagctgctgctcataatgtctttgggtttgctcagaaagtaggttgggtctttcctggtatctctggatacttcttcccacaggagcaggctctggatttctttgctctattctatcgataatgtttgaaacaattgacagtaaaggatcagctcagagagtctggaaataatacaccttgctaaatgaaatccactgctgtcattgacacaactraataattatggctgtaggaatccaaaaattcctgtctgcatgagtgctcacctagctatgtgatggagttcatcagtgctatatgacatcactgcaacatggaagggcagagcttggctgtgcccagtgctttgctaagccagcactggatacaggcattgcaattaagcatcatcatcaagtgagargaagcatcaagttgtgcataaggcagtttggatcaaagtgtggctaggtaatcaggctattacagaaggaggagggagatggacagaagtgcagtttctaaaaatgccatgt

SEQ ID NO: 39038 - DNA, 488 bp, Chicken  19866894270722_2
gctctattctatcgataatgtttgaaacaattgacagtaaaggatcagctcagagagtctggaaataatacaccttgctaaatgaaatccactgctgtcattgacacaactraataattatggctgtaggaatccaaaaattcctgtctgcatgagtgctcacctagctatgtgatggagttcatcagtgctatatgacatcactgcaacatggaagggcagagcttggctgtgcccagtgctttgctaagccagcactggatacaggcattgcaattaagcatcatcatcaagtgagargaagcatcaagttgtgcataaggcagtttggatcaaagtgtggctaggtaatcaggctattacagaaggaggagggagatggacagaagtgcagtttctaaaaatgccatgtgtagcttcaagtttgctgaaaagacagtatctagtgagacagcatccaagttttctaatataggagacaaagttca

SEQ ID NO: 39039 - DNA, 600 bp, Chicken  19866894270724_1
gcaacgtattccaatgtagcttaacttgtttttatcctaaactaaagaaaattccacttcaactgtcaatttttctttttttttaattattgctatttgatattggatatgatttagccacttcctttttcccctcatataatacaactgaatacaattgctaataattgcaaaaggtaacaaccaaacttacatccacttcagaaggtgcagtcaagtagcaagggttctgtttccacatatctacacactagaagatgaacaaagtggtgttagtgtgctaattttttaaattaatarctaagttcacccacctatgtcttagaacactcacatttccagctttagaaattttgaggtcatactgctgggctcctttcttgtccttccttttctgcaagtagtcaaccaatctgagctgaggtggagttgaatagtgagctacttcctgctgcctgttcagagatgactttgagtaccttttgaaacacctatggtaagatgacagataagtctgtaaatccatcacatgaaattccccaccgtcaatgtgcaagcacaaaagcatgcagtgaaatgctaattgagactagagaacag

SEQ ID NO: 39040 - DNA, 600 bp, Chicken  19866894270724_2
aggtggagttgaatagtgagctacttcctgctgcctgttcagagatgactttgagtaccttttgaaacacctatggtaagatgacagataagtctgtaaatccatcacatgaaattccccaccgtcaatgtgcaagcacaaaagcatgcagtgaaatgctaattgagactagagaacaggttttgaaatactcatttgtttgattacacagcataattcaaactcaatctcaaattcttaagaataccagtattttgttcacgagttttggagctaagaatggggttatttttgaaacayataattaaattgtcaaaaagagtataaaacttgtaagattagtatattatcaaagatttcaattctgccaaaatatccatgtactgctcatgtatttagaaatttacaggcatgggaactacccttcattctttgtgtcacatccaatctttcagcacgtcaatgctatgtgggacgctcatttaacacctgtgtcaagattttgtatgcagtgggctccacattatttacagtgagttatgtcaaaatagtataacatttgttgtcatgtacaaaaaaagcatattgcagcacctatta

SEQ ID NO: 39041 - DNA, 600 bp, Chicken  19866894270732_1
cctcatagcttcccttactgctctgaacccccatgcactgcagccccatgccatcaggctgcagcacgctttatgtgacagggctgtgtgacatttggaggactagatgagatatcttagttgggatcgttctagtttctctctagattagcgtaactaatgaacagaaacacacctgccagctatgatctcttcaaaagagtttccgaaatgcgtttttaatctttttagttcttaggcatgcaatatccaccacataaagcaataaatcacttgattttaatgacaaaagaattctcrtgtaatggtttgccattatacatgcagacaacagagacgtccataaakagytcatccacacagcagctttttttcatcccatttccttgcactatccaaagtcaaatgggaactacagtttccaggttaccttaccgataccacatccaaattctcagcctggttcttgctttgaaccrtgtgtcaggccgctaaaatgttaacctacgactgacagaaattggccatacccagctgttttcctaaatgctaattttactgtaaagccactgcttagacatgtttttgttctgttctgta

SEQ ID NO: 39042 - DNA, 600 bp, Chicken  19866894270732_2
tgccatcaggctgcagcacgctttatgtgacagggctgtgtgacatttggaggactagatgagatatcttagttgggatcgttctagtttctctctagattagcgtaactaatgaacagaaacacacctgccagctatgatctcttcaaaagagtttccgaaatgcgtttttaatctttttagttcttaggcatgcaatatccaccacataaagcaataaatcacttgattttaatgacaaaagaattctcrtgtaatggtttgccattatacatgcagacaacagagacgtccataaakagytcatccacacagcagctttttttcatcccatttccttgcactatccaaagtcaaatgggaactacagtttccaggttaccttaccgataccacatccaaattctcagcctggttcttgctttgaaccrtgtgtcaggccgctaaaatgttaacctacgactgacagaaattggccatacccagctgttttcctaaatgctaattttactgtaaagccactgcttagacatgtttttgttctgttctgtagtctgtgtgcattagtccctgaaatatcaacggaagcctgtggaaaat

SEQ ID NO: 39043 - DNA, 600 bp, Chicken  19866894270732_3
catcaggctgcagcacgctttatgtgacagggctgtgtgacatttggaggactagatgagatatcttagttgggatcgttctagtttctctctagattagcgtaactaatgaacagaaacacacctgccagctatgatctcttcaaaagagtttccgaaatgcgtttttaatctttttagttcttaggcatgcaatatccaccacataaagcaataaatcacttgattttaatgacaaaagaattctcrtgtaatggtttgccattatacatgcagacaacagagacgtccataaakagytcatccacacagcagctttttttcatcccatttccttgcactatccaaagtcaaatgggaactacagtttccaggttaccttaccgataccacatccaaattctcagcctggttcttgctttgaaccrtgtgtcaggccgctaaaatgttaacctacgactgacagaaattggccatacccagctgttttcctaaatgctaattttactgtaaagccactgcttagacatgtttttgttctgttctgtagtctgtgtgcattagtccctgaaatatcaacggaagcctgtggaaaataaa

SEQ ID NO: 39044 - DNA, 600 bp, Chicken  19866894270732_4
cagctatgatctcttcaaaagagtttccgaaatgcgtttttaatctttttagttcttaggcatgcaatatccaccacataaagcaataaatcacttgattttaatgacaaaagaattctcrtgtaatggtttgccattatacatgcagacaacagagacgtccataaakagytcatccacacagcagctttttttcatcccatttccttgcactatccaaagtcaaatgggaactacagtttccaggttaccttaccgataccacatccaaattctcagcctggttcttgctttgaaccrtgtgtcaggccgctaaaatgttaacctacgactgacagaaattggccatacccagctgttttcctaaatgctaattttactgtaaagccactgcttagacatgtttttgttctgttctgtagtctgtgtgcattagtccctgaaatatcaacggaagcctgtggaaaataaagtcgtgttttgaggacacctgaaaatacagcaatggctgactgggtgacagctgcagctcaagatcatattgatttgaatatttttcagctagtacaaaaagtatgttgttttttgtttttatttttc

SEQ ID NO: 39045 - DNA, 600 bp, Chicken  19866894270736_1
tgctaagttcttgaattaagaaatgtctggtttaagtagtggtagatggttagtgcttgcttttggtgaagggtgaacaagactgacaacaaatgcctttttatttcaagaaaatgtccagacatggctatgaaggagaatgagtggcttaactcacagcactcaggctgctgttaggggctcctctacacagcaaatgttttctgctgttgtattacaattatattgctgttattgtatgtaatgctatggtatgtgcatatcatagactgaacacaatgtacttgcacagtcacaacygtgaacactgtgtgaaggacataaaaaacagaaaaggaacagatgatagggaaaggaagaaagagtgaaaaataaagagaaagaaaaagaaagggaaaggagaaaaagaaaagaggaaaaaggaaaagagaaaaggaaagagggaaagtactataccagggattaaggatgcctacactagaggttacaaaggtgtatgtcttcctagtacacgtttctgaacaggcaaggatacaggcagctctgattcgtgggaggccggagtcagttcttttagtagactgcatggggaggagcact

SEQ ID NO: 39046 - DNA, 600 bp, Chicken  19866894272454_1
ggcctttaaaggaggtggaggccctactgtacttgagccagacattacctaactccccaggtgaaagaagaataggtgagaataaggagcagacgagggagcatgtgattcagagcagggctttctggaaggcataaagagcagcttgaatccctttaaaggtctgagttactttgtattaaaatagactgctcctgcttccctctaaagactactgaagaaaatactatcttgaaagtggattaaaaattggaccagtgttttgtggaaacacttatgaaatcccacagttttgtgtgsaggcatagggcatcctgcagtttaaaatgctcactctttagttaaagaaagctggtaataacaatatagactcagggctgttctaagagaatggataagagcattgctagactgctgctttcagagtctaataggcttattttggaaaggacagttaccctgctgaaagtagttattgcccttggtggtagcatctgattcatctttgctcactgcccaccaagtgggacagctgtttgcagccaagagatctagaggatatagttatttctcctcattttgtttctaactggctaatgc

SEQ ID NO: 39047 - DNA, 600 bp, Chicken  19866894272456_1
ttgtctaaaaaccctaattccttcaacatagttacaaacagttccgattatttgtagaaaagcttgaaaagtgttcagcgtattttattacacacaaaaggtgccagcctggcggccacagagccttgtcctctatttatctccagagctggacagtacaagcagtacgctctctccagaatgtctttctgctcccattttgaaaggcacacggtggcctatcaccatgggatgactttggtactctctgttcaatcgctatttgttctgtgccagggacacaagcaaagtgtgtcaggytgctgggagcagctggggaagccacgaagggcctcaccacaaaaacaactgccctcccagagggcttgggtggtttggtgtgtgcaactgtgcccgatgctgtcttgtctggcaagccacatctcatccaaagtttgttatgatccatggggatctggagcacaagtcttatggggagcgggtgagggagctgggattgttcagtctggagaagaggagacccaggggagaccatattgctctctacaaccacctgaaaggagcttgtggcgaggtgagggttggccttttctccctggt

SEQ ID NO: 39048 - DNA, 599 bp, Chicken  19866894272458_1
  misc_feature (1)..(102): n is any nucleotide
nnnnnnnnnnnnnnnnnnnnnnnnnnnnnnnnnnnnnnnnnnnnnnnnnnnnnnnnnnnnnnnnnnnnnnnnnnnnnnnnnnnnnnnnnnnnnnnnnnnnnnacgctcggtgcccgcagcagcggtgctgggcagcacgaggccgggtttctcggcgctgcaggtgccgcgctaattgctgcgccactaacaaccattaccacaacaaatagtggaaacattgttccatgacaataccggcagctattcccgggtggcaactgggacggcgaaatataaacggctgcgtggattttgctyggagatagcgtgggaggggtggaggaatcgcccacttctccgcacacgcgtgcacagagcgtggcacagcatcgccgctctccctccaaaggcagcaccgctccgagcgggcacaaaaaaggaatgtcggaggtcgaggtgaaggcacgtaccaatgccgtgagcagctctgggcttaaatagggctcatacgcatcccaggaggaccgtgggaggtattttctgggatacggtttcaggcagagatcgtcagcacacagaggatgctgatgtggggctgctctcgggcggcactgcac

SEQ ID NO: 39049 - DNA, 599 bp, Chicken  19866894272461_1
  misc_feature (1)..(52): n is any nucleotide
nnnnnnnnnnnnnnnnnnnnnnnnnnnnnnnnnnnnnnnnnnnnnnnnnnnnggtcggaaggtaatgtgtttattcatctgtagggcgcactcggttcaaaccctttccgagaccagcttctagtttatactgctacttctgatcacgggaaaggagaggaggaggaacagcaaaggaaaaaacaaatatgccaaaaaacccccgacatttgctgggatggatgtttacctgagaaactcatgatatgaaagccaaagctaccggtgaccttctggagtcagggatctcctgtctttttsagggtttctttagttctctttatggaataaacacttttagaaagcactcatttttgagatgtaggacagcccgtaaaggtctgcatttttatgaaactcaaatgaaggtattgtccaacagtagtgggtggataatactgcagtgaaagagaagacagttggcacggcaagtccctctcctgaataagtcataaaaaaacgttccaaaaatgatgttttattaaaaagtcaccctgccagtagagcaggcagaggtccctgagagctgggcaagcatggaarcagtgtgaggtgtgaag

SEQ ID NO: 39050 - DNA, 600 bp, Chicken  19866894272461_2
ggatctcctgtctttttsagggtttctttagttctctttatggaataaacacttttagaaagcactcatttttgagatgtaggacagcccgtaaaggtctgcatttttatgaaactcaaatgaaggtattgtccaacagtagtgggtggataatactgcagtgaaagagaagacagttggcacggcaagtccctctcctgaataagtcataaaaaaacgttccaaaaatgatgttttattaaaaagtcaccctgccagtagagcaggcagaggtccctgagagctgggcaagcatggaarcagtgtgaggtgtgaaggggcattacaggagagacatgagctctcttcttctggcagtgacttctactgattctcccctctgccccaatgaaacatctgaacacgctctgtacagaggtatggcatccatgtaaaccagagctcaaaggtgaagagatgagatgttccaaaatatacccagttctggaaaattaaactcccgggggagtccattctstttcaataactttttgttattgaatatctttgtttccagcatgggaaatagtgaagaaaaagagtaaaagcatatcatataaa

SEQ ID NO: 39051 - DNA, 492 bp, Chicken  19866894272461_3
cgttccaaaaatgatgttttattaaaaagtcaccctgccagtagagcaggcagaggtccctgagagctgggcaagcatggaarcagtgtgaggtgtgaaggggcattacaggagagacatgagctctcttcttctggcagtgacttctactgattctcccctctgccccaatgaaacatctgaacacgctctgtacagaggtatggcatccatgtaaaccagagctcaaaggtgaagagatgagatgttccaaaatatacccagttctggaaaattaaactcccgggggagtccattctstttcaataactttttgttattgaatatctttgtttccagcatgggaaatagtgaagaaaaagagtaaaagcatatcatataaaaggaacccagcatgaaagaaagccgcctcccttaacaaggagacctttttataggtacaccacggtctcaccttattataataaggccatttgaaccagtcagacattt

SEQ ID NO: 39052 - DNA, 600 bp, Chicken  19866894272463_1
ctactcttgactattatttttaatttttctcattcatgtcactcagtcatagccattctttctgattttcatgttagtccatgacctttcagaaagataatgctgtgataattgctactgttcggccagtattgcctcattattctcttgtgcttttccgtccatcacttgtattttctttttcaaaaagaaaataggcactaggggatagagaatgtcctgcagatgtgtttttgtacattgggatcaacccatgcctttataggcataaaacattagaaacaccaggagttataacastgtgctgttttagctgaagctaacattgtatttgatctgtggagtgttgtgcaatacctttagaagacttcttaaatgaatggtttgttttccctgaaaagtggcctaatctccatctgaattattccaaatcttgaatgtttatacatgaaatgttggtaacaattctgtggatagtataaacagtatcaatattcacagaaaatataggtactaaagtatgtttttcatttttccagtcccgagcagtatccagattggcagcagcacacagaggagttatacgagccttgcaggcat

SEQ ID NO: 39053 - DNA, 599 bp, Chicken  19866894272472_1
  misc_feature (1)..(3): n is any nucleotide
nnnctgctggaatatgctattcagtattaataaaataaaagaaaaataaaacaattctttaattatctattgtgtgaaccgctcccagaaaggagtggtaaatccaccatttgaaaaccttgaggagaaaaaaaaaataataataatatttttgtaatttaaataaatgaacttttgcttaaatcagatgcactagatcttcctgggtgaaaattcagcgtgcactgcagttaaactacttttatggataaagtttacatacactgtaatgtttgatgttatctgccattacctgtaacrgcgatatatcggcttgctcctgcagacactcgtaaagagaggagtaactttactcgaccagtagtccatgggaatacaattgtgaatgatgtgggtgtttgctggaggaagctgtgtgtaaggaaccagaaaagagatgctggttgccctttcacagccttgtaagtctaataagattgcatttctaccgcacaagtagtgaccaacaaccaaattcggttctttgctaccggtatagtgaatttgttgccaatccaatgtgtgtgaacagcagcacctgctactgatgataaagtgcc

SEQ ID NO: 39054 - DNA, 532 bp, Chicken  19866894272482_1
caattgtttatattcagcttttgcttgagatcaaaatggtcttttcagaaaaggaaactacatcacaatacagtgaacattacagaaagcaggaaataaaaattgagaattcacactggcaaatttctcttaggaccaagctcataaacccaagcagactgcaggatcatatctcaaaataactgtcttcaaagctcttcattagtgctgtgtgttaggagctgtgggtgttaagagcctcctgaaatttgatggatctgaccagagaacattttcaagtgtaaatgtctgcataatatrtgtcctttactacttcggcagtatttctagatcagtgtatgaaaaaatgaacacagattttgtatttttccattattagtcttaactaattttaaagatagaactgaattaatttctgcctcaaatcccatgctgctactcactgaatggagttgagaccaacttcctttctggacttgtatgcaatcatttttcttttattttttaacacaaaactatagttaaaaaaagc

SEQ ID NO: 39055 - DNA, 430 bp, Chicken  19866894272486_1
tcacacacaacattttctcaaaatattctttagtgcaacctgcaggtttttacctcattttggaaacatacaggcatgcagataaggcagtattaaatggatcactgctgcctctggaaaggaagataagttagcctttggtgcttaagtattctctttctgacagctgttcctctttctgacaaactttctctgccaagtaaagattatttgggattgacaagtttctgttttggaggaaacaagatcatttctcagacaggatgctggaaatggatacttaagatacagataacactytgtcaggactattacatagcttgagggagtctccaggaaacagtaccaagtcacatgcatacctgcgtatgcctaacagtgtttatgaatctgtaatattccaaaggatactaagggaaaaaaaaataat

SEQ ID NO: 39056 - DNA, 600 bp, Chicken  19866894272498_1
ttaacattcagaagcacctcaaatgccctagccatgcagattggatcccaccctcagcatctcattaatccttttaaagcagtagcaaggcaagcgtttgcatttatttacccttttccccccatatttcttattagtttcactccaaagattatttgtctatttaaaatgtcaaaaaaaagcaagcagggtctttctatcttctgaatcactctgcagcacttttctcaatcaaaatggatatgctttcattaaaagcatgcacatcgagccttctgctcatcaccatgctggcacatrtctgttgtcaggcattctcccacagtcagatgcagtgtcccagtacgcagagtgagagtcaccaggtacggtctcacacccctcaagtggcagccatgtttctgcccttcaccccaagccgccagcttctgcttggatgttgagctgtttgtctgcttgctgagctgaatcagctcaccaaaccggcagcaaaagcagcttcccaatgattcagtgagctcatgaggtggtgagtcaggcgccagacctggcacaagggaggagaagggaacacacacctgcaggcagaggatgggagga

SEQ ID NO: 39057 - DNA, 600 bp, Chicken  19866894272499_1
ttacctccttccactaggaaagtaataccttagttatgatatctttgaattgtccttccttccaagcatctgttgggtgattcatcattgtgattatggcgttatcgtattcttcatacttatcatataagaacaccaattcagcccagagatgggcttgttctgcagctctcagaacctaagcaaagaacattttagaaattccaatcaatatatacatatattgctatcagcacccaacagtacttaagtgtacttaagtacttaagctattgcaaaagctaggataaacacagtccygacagatgtgttttaagtttcaggtttaacaagtctgaggcatctcaccttggggatgttgactctggaccagaacagttccaagtgctccctcatcttctgtggtttgaacttggagtaaagaattgctaactctgtaaacatccccatgtgtgctcgctcaagtccaagtgctgcttccaacatagttatcagctcttcaaagtagccacgatcctaaaaaacacagttagagatgtttcacattaggaatcaatccgattaattgccagctttagtctaaattctctactggcaacg

SEQ ID NO: 39058 - DNA, 600 bp, Chicken  19866894272500_1
aatgaataattaaagatcaaatgtatgtatgcaataataatgtacaagaagctttgacttatacacagtaaaatatataactactgctaaaaagaaaaatgttgacatacccataaaaatgttcagagttcccagggtgtcttatgctcatttatattctttgctggagaaaattgcacactatgcaggttaggtattattactacacacaactgtatcctaggcaatttcaaccactgcatcatttagcatatatatcaatggactggattatggcttgacttcagttgctcatgaacrtcttatgtagactttacatgcactgaatacataaatgtgcacgtgcatgtatattacacccattctggttcttatgcatgatatttacgtatgtcaaggatccagtaaaaatagtctcattcattttaagtcacctaatcacataatcacaaaattgcaggggtttgaaggggcctcaagggatcatcgattccaatctccctgctaaagcaggtaccctccaataggttgcacaggtgggggtcctgatgagtcatttatttgattatgtgtcattctaattatattactaagttttct

SEQ ID NO: 39059 - DNA, 600 bp, Chicken  19866894272501_1
aatgccatacaaaatcacacaggcataaattttgtctggccccttcagctgcttctcttctaatgaggaatcagagcagttaaatggtggcaatctttttaacgttgttgtcacctctcagaaagtaaccactctcacgcactgagagaaaagctccagaaaacctttctgttttaatcttcatgtggaatatattattaagtgatagatgaacaatgggacatgtgtagacagcgggctttctgcttgttttgttcttttgtttttaaccaagcatctcagcagttattagcgtttcgyaggactgcttaccttggagctttgtattccagatgctctatttatggacatgaagcatttatctgagacgtacattcctgtaccatgtaggtgctcgtgttaccatcacagacagggagccagcgctggaattcctggagtcgaacgtgtgggctaacttaccttctgaactacacgcaagggctgtggtgaaggaactaacgtggggaaaagacctaggcagcttccctcccggagcgtttgacttcatcctgggggcagacatcatttatctggaagaaacttttgcggaactgcttc

SEQ ID NO: 39060 - DNA, 599 bp, Chicken  19866894272524_1
  misc_feature (1)..(167): n is any nucleotide
nnnnnnnnnnnnnnnnnnnnnnnnnnnnnnnnnnnnnnnnnnnnnnnnnnnnnnnnnnnnnnnnnnnnnnnnnnnnnnnnnnnnnnnnnnnnnnnnnnnnnnnnnnnnnnnnnnnnnnnnnnnnnnnnnnnnnnnnnnnnnnnnnnnnnnnnnnnnnnnnnnnnnnntgaaaagatttatatgaagatcccgctgccacctaggccaaggggtaatgttcttttcttgtgaatgagagaaaatgaatcaatagtaccagttttgctttgcagtgtttattctgaagctgattgcaggaaktgcttagctgtccaacgggaatgttaccattcctttcctttgctatgaacatcttccattaatgataaatgcttgcatttctcttgataaaacaagtacatcatttggtgttaaggattaaacataaattctggcatggaatttttgaaatttgttattcaaggcatcagtggtattcatggagatgcttcattagtttctaatttcagttcaaagtagtatagcagaaaggtgagttaaaactgttgagttgaagttaagttgggttcagttaaaactgttacttgtttcaattgtaa

SEQ ID NO: 39061 - DNA, 488 bp, Chicken  19866894272524_2
ggtgttaaggattaaacataaattctggcatggaatttttgaaatttgttattcaaggcatcagtggtattcatggagatgcttcattagtttctaatttcagttcaaagtagtatagcagaaaggtgagttaaaactgttgagttgaagttaagttgggttcagttaaaactgttacttgtttcaattgtaagggaaattttatttttgaagcaaatagatcgattttatttcatgacttttagctctcagtagtctttctcagctaactatgaaatctggaaacctcttgtgtaacaygwtgcagtaatagtcctyttaaaaccactayggctagggtaaatttcaattaacacaattttcaactctattttattttcatctaatagttatatgataatgggaaggttcatatttttatatgaaatagaaaaatatatgaatttgtgagtatataataaatataataataagtgtatattttttaa

SEQ ID NO: 39062 - DNA, 486 bp, Chicken  19866894272524_3
tgttaaggattaaacataaattctggcatggaatttttgaaatttgttattcaaggcatcagtggtattcatggagatgcttcattagtttctaatttcagttcaaagtagtatagcagaaaggtgagttaaaactgttgagttgaagttaagttgggttcagttaaaactgttacttgtttcaattgtaagggaaattttatttttgaagcaaatagatcgattttatttcatgacttttagctctcagtagtctttctcagctaactatgaaatctggaaacctcttgtgtaacaygwtgcagtaatagtcctyttaaaaccactayggctagggtaaatttcaattaacacaattttcaactctattttattttcatctaatagttatatgataatgggaaggttcatatttttatatgaaatagaaaaatatatgaatttgtgagtatataataaatataataataagtgtatattttttaa

SEQ ID NO: 39063 - DNA, 470 bp, Chicken  19866894272524_4
taaattctggcatggaatttttgaaatttgttattcaaggcatcagtggtattcatggagatgcttcattagtttctaatttcagttcaaagtagtatagcagaaaggtgagttaaaactgttgagttgaagttaagttgggttcagttaaaactgttacttgtttcaattgtaagggaaattttatttttgaagcaaatagatcgattttatttcatgacttttagctctcagtagtctttctcagctaactatgaaatctggaaacctcttgtgtaacaygwtgcagtaatagtcctyttaaaaccactayggctagggtaaatttcaattaacacaattttcaactctattttattttcatctaatagttatatgataatgggaaggttcatatttttatatgaaatagaaaaatatatgaatttgtgagtatataataaatataataataagtgtatattttttaa

SEQ ID NO: 39064 - DNA, 457 bp, Chicken  19866894272524_5
ggaatttttgaaatttgttattcaaggcatcagtggtattcatggagatgcttcattagtttctaatttcagttcaaagtagtatagcagaaaggtgagttaaaactgttgagttgaagttaagttgggttcagttaaaactgttacttgtttcaattgtaagggaaattttatttttgaagcaaatagatcgattttatttcatgacttttagctctcagtagtctttctcagctaactatgaaatctggaaacctcttgtgtaacaygwtgcagtaatagtcctyttaaaaccactayggctagggtaaatttcaattaacacaattttcaactctattttattttcatctaatagttatatgataatgggaaggttcatatttttatatgaaatagaaaaatatatgaatttgtgagtatataataaatataataataagtgtatattttttaa

SEQ ID NO: 39065 - DNA, 600 bp, Chicken  19866894272529_1
tagatttggtgttgtgacctgtttgtcctataaaggggaaaatcaataaactgaaataagtgtgaacagatgctctgctgttgataactattgattatctagagttaagggcttgtacttgactagaagtggcagtttctgatgacttgcatcatgcagatgttactttcttctgtcagaggctgctgtctcagtggtagagttgcaagaaaacatccatctgtaactcagcctcagtgcaaagtccagcagcttcactacagctgtgggtgagagcgggtctgagcagtgtgtctgggygctgtgctcacgtagctcatctatccttctgccaacaccgctgggacagcaggaggttctgctgcaggagcagggagggtttatctgcatctctacagatttatctgcgtctctcctgtagcacatcaaatacaccgaactaattgtatagataatggcgtttttctcttgttagcagttatcatgagtcttgtgttgttcagctgatagctgttgtggttttggggcttgagttgatgggaagaaagagttgagagtatgtttagctgtaattcggttatttattgagtatccatatag

SEQ ID NO: 39066 - DNA, 600 bp, Chicken  19866894272535_1
actcaaagtattggttgctactatgttcattcctcagtccttgaaccaatgacttcattgtctcagctgtttctcatagtcattcagtgatgaaacaagagagtgctccagtccttgttttttgctgatactgttggcagccctccctgtggagctgtaaaagagtcacttttctcgctgctgcaactggagaagatgggagcgtgagcaggagctgagagtgctggttgaggagcagcatcaagaaccggagggcagtgtcagaaagaagctgcaaaaaaagttaacttaaaaaaaaawaaaatctttcattgcaagaatcctttttaccaaaacattcagagggtttgtagtgtatgggagggaagacaaagaattttccgccagcttcctagcaagcaggcacagggaaggtgggatatgcatayagggggatgtttatgtaggcaatgtatttgaagctgacaaaatagacagtctagaaagcctgtgtcccatgtgggaccagagaataattcaggtgggagggagccttttcaattcagttctccactcatgccatcagtagattgctgaagccctactcaaatagagtttttg

SEQ ID NO: 39067 - DNA, 600 bp, Chicken  19866894272535_2
tactgttggcagccctccctgtggagctgtaaaagagtcacttttctcgctgctgcaactggagaagatgggagcgtgagcaggagctgagagtgctggttgaggagcagcatcaagaaccggagggcagtgtcagaaagaagctgcaaaaaaagttaacttaaaaaaaaawaaaatctttcattgcaagaatcctttttaccaaaacattcagagggtttgtagtgtatgggagggaagacaaagaattttccgccagcttcctagcaagcaggcacagggaaggtgggatatgcatayagggggatgtttatgtaggcaatgtatttgaagctgacaaaatagacagtctagaaagcctgtgtcccatgtgggaccagagaataattcaggtgggagggagccttttcaattcagttctccactcatgccatcagtagattgctgaagccctactcaaatagagtttttgttatctctaatcatagtctgactctttttgaatttcatggtaaacctttttttttccccttgcattccttgcatcggttaccttttgttctgtcactgtgtgtgttcaagaatctggctccttctctg

SEQ ID NO: 39068 - DNA, 600 bp, Chicken  19866894272543_1
agatctaaagccatctctccaactggcagagcaggagctcagtatcttttgcaccttacggtttcaccagttatgttttcttcccttagctgaaaattattatttgttgttagaatgtctctttacttttcttccctcaaagtttttgacagacgcgtgcaacgtacctagaactctgaaaatcaatctaagtctattggcattggtacatctatcagtattgcactaagcttgtcttatatggctgagaagaaaaagggaggatgagtattaaatggcactcatctgacagtctctatrcagcacgaatgttttttctacattctagctaaactttttgacaattaaatgcaaacacagaaataacatcctttttctatcatgttttttcctttttttttctacctacttttcctttatcagactcaaaatagcagacatttttagctgcgctacttatttccaaattgcaacagtgaataaaacaaagagaagggcaaattgttagcatgctcagcttctaacaaaatacatgtaaattaaaacttatcccttcagaagccaacagaaatctaaccagaagctaattttgggatgcaa

SEQ ID NO: 39069 - DNA, 600 bp, Chicken  19866894272546_1
tacagcataaaaagatacacagactcattttgagagtgccatgagttagaatttcttcttttgctgttaagaagtaagagaatttgcttcgaaaatatcccctaggaggaaatatactgtgattctccagttgtgtaagcctaccaaaagcctaacttcaacaaaaagcccttgaaagagtcagggaagaattcttctgtaacaccacgttatggtgtttttgttagtttttcaaggctaggaaacatcctcagtaaaagatggagcatgcatttccatctgtcctgcttcctaagagayattcttggaactggggcctattggtaacgaaccaggctgtctcctgagatgggcctcaygagtctatgctgtggtgaatatacatttaaactcctttaacaggcaaattcctgataygcyttatcaacatgcaaacttgtggagtaacgcaggcatctaccactcttactagcagagccaagasttggcagtagaacaggcacaaataaactttacagcttcaagaatgagagatttaactgattgtgtaactgcagacacacagctaaaggggaaataaaacactgcctataatggagg

SEQ ID NO: 39070 - DNA, 600 bp, Chicken  19866894272546_2
tttgctgttaagaagtaagagaatttgcttcgaaaatatcccctaggaggaaatatactgtgattctccagttgtgtaagcctaccaaaagcctaacttcaacaaaaagcccttgaaagagtcagggaagaattcttctgtaacaccacgttatggtgtttttgttagtttttcaaggctaggaaacatcctcagtaaaagatggagcatgcatttccatctgtcctgcttcctaagagayattcttggaactggggcctattggtaacgaaccaggctgtctcctgagatgggcctcaygagtctatgctgtggtgaatatacatttaaactcctttaacaggcaaattcctgataygcyttatcaacatgcaaacttgtggagtaacgcaggcatctaccactcttactagcagagccaagasttggcagtagaacaggcacaaataaactttacagcttcaagaatgagagatttaactgattgtgtaactgcagacacacagctaaaggggaaataaaacactgcctataatggagggttgttgctcttgctgatggttacagccctctgtctttaacagagattataacamagga

SEQ ID NO: 39071 - DNA, 600 bp, Chicken  19866894272546_3
tgtgattctccagttgtgtaagcctaccaaaagcctaacttcaacaaaaagcccttgaaagagtcagggaagaattcttctgtaacaccacgttatggtgtttttgttagtttttcaaggctaggaaacatcctcagtaaaagatggagcatgcatttccatctgtcctgcttcctaagagayattcttggaactggggcctattggtaacgaaccaggctgtctcctgagatgggcctcaygagtctatgctgtggtgaatatacatttaaactcctttaacaggcaaattcctgataygcyttatcaacatgcaaacttgtggagtaacgcaggcatctaccactcttactagcagagccaagasttggcagtagaacaggcacaaataaactttacagcttcaagaatgagagatttaactgattgtgtaactgcagacacacagctaaaggggaaataaaacactgcctataatggagggttgttgctcttgctgatggttacagccctctgtctttaacagagattataacamaggaacagaaagaacaccgcatgtaagttggtcggggcttactgaaccaatacttccatctt

SEQ ID NO: 39072 - DNA, 600 bp, Chicken  19866894272546_4
gattctccagttgtgtaagcctaccaaaagcctaacttcaacaaaaagcccttgaaagagtcagggaagaattcttctgtaacaccacgttatggtgtttttgttagtttttcaaggctaggaaacatcctcagtaaaagatggagcatgcatttccatctgtcctgcttcctaagagayattcttggaactggggcctattggtaacgaaccaggctgtctcctgagatgggcctcaygagtctatgctgtggtgaatatacatttaaactcctttaacaggcaaattcctgataygcyttatcaacatgcaaacttgtggagtaacgcaggcatctaccactcttactagcagagccaagasttggcagtagaacaggcacaaataaactttacagcttcaagaatgagagatttaactgattgtgtaactgcagacacacagctaaaggggaaataaaacactgcctataatggagggttgttgctcttgctgatggttacagccctctgtctttaacagagattataacamaggaacagaaagaacaccgcatgtaagttggtcggggcttactgaaccaatacttccatcttttc

SEQ ID NO: 39073 - DNA, 600 bp, Chicken  19866894272546_5
ggaagaattcttctgtaacaccacgttatggtgtttttgttagtttttcaaggctaggaaacatcctcagtaaaagatggagcatgcatttccatctgtcctgcttcctaagagayattcttggaactggggcctattggtaacgaaccaggctgtctcctgagatgggcctcaygagtctatgctgtggtgaatatacatttaaactcctttaacaggcaaattcctgataygcyttatcaacatgcaaacttgtggagtaacgcaggcatctaccactcttactagcagagccaagasttggcagtagaacaggcacaaataaactttacagcttcaagaatgagagatttaactgattgtgtaactgcagacacacagctaaaggggaaataaaacactgcctataatggagggttgttgctcttgctgatggttacagccctctgtctttaacagagattataacamaggaacagaaagaacaccgcatgtaagttggtcggggcttactgaaccaatacttccatcttttcaagccagtgaaagatgggcttcatgggcaacatttcctagcagtgatgctgtcgcagcagcctt

SEQ ID NO: 39074 - DNA, 600 bp, Chicken  19866894272546_6
tcaygagtctatgctgtggtgaatatacatttaaactcctttaacaggcaaattcctgataygcyttatcaacatgcaaacttgtggagtaacgcaggcatctaccactcttactagcagagccaagasttggcagtagaacaggcacaaataaactttacagcttcaagaatgagagatttaactgattgtgtaactgcagacacacagctaaaggggaaataaaacactgcctataatggagggttgttgctcttgctgatggttacagccctctgtctttaacagagattataacamaggaacagaaagaacaccgcatgtaagttggtcggggcttactgaaccaatacttccatcttttcaagccagtgaaagatgggcttcatgggcaacatttcctagcagtgatgctgtcgcagcagccttggaacagtgggtcacctgcactggggcagatttttacaagcatagcgtgcaggctcttgttcatcactggcaaaaatgcacagctaatgctgaggactatgttgaaaaatagttttgatataggaaacgctcagctacaaacagcattattgtgctccgtgtatgtattgt

SEQ ID NO: 39075 - DNA, 577 bp, Chicken  19866894272548_1
agcaactttaaccaacctggtaactgctccagacaagaggatataaccaatctaggtagttcttggggtgcattgttggtaacttcctcctccaagtgacaagagatccacaaaagagaggtgctctgctggacctcatactcaccaacaatgaagaatctgttgggaacatgaaggtcaaggacagtcttgcctgaagaaaccatgaaatgacagagttcaggatcctaagggcagggaggaggatgaaaagcaagctcacaaccctgaaatctggagagtagactttgatctcttcaragatcttcttggaagagacctgtgggataaggcctattgtgaggccactagtgataatctttgatcattgtgactgggagaactgcttgaagactataggaaagcaaatatcagtcttatttccaaggaaggcaagaagtagcatcaaaggaactacaggctggtcagcctcaccttgatccctggaaaggtgacagaacagctaatcctggaaatcatttccagaaacatgaaggataagaaaatcaacaggagtactcaccatgggggagtcatc

SEQ ID NO: 39076 - DNA, 600 bp, Chicken  19866894272551_1
attctatcttgatgtggacccagagtatccttttaaatatttaagctagcacctgtttccagtcagtggattttcatagcaataatgtattgtggaaactggataacatcgtagaagcaaataatgagtgctattggcattctgtaaagctttctgtgttttgaattttggtttgtatttttttccatttctcatttaagtctgtgaaattaatttatctgttttcttctattaacctgcattacaggttgccaataaggaactgccacagtagtagcagacctcccccacatcgtgtcrcttctasagagaatatttatttagtaagacttgaacaacctatttataacgtgtctggttgagtcagcagagcttggtgttaggaaaaggctgtattccctctttaaccacgtgagggagactgcagaaaattagattattgcttggttgtgtgtataatactgcactgtgcatgtcctagttgtgtttggatttactaacacttgttattcaaaatgcaaaaacatagaagcaatattacactgctgcccttgatgtttaaaacatgctttttttctccttcatgatgaagtgtacaag

SEQ ID NO: 39077 - DNA, 600 bp, Chicken  19866894272551_2
cttgatgtggacccagagtatccttttaaatatttaagctagcacctgtttccagtcagtggattttcatagcaataatgtattgtggaaactggataacatcgtagaagcaaataatgagtgctattggcattctgtaaagctttctgtgttttgaattttggtttgtatttttttccatttctcatttaagtctgtgaaattaatttatctgttttcttctattaacctgcattacaggttgccaataaggaactgccacagtagtagcagacctcccccacatcgtgtcrcttctasagagaatatttatttagtaagacttgaacaacctatttataacgtgtctggttgagtcagcagagcttggtgttaggaaaaggctgtattccctctttaaccacgtgagggagactgcagaaaattagattattgcttggttgtgtgtataatactgcactgtgcatgtcctagttgtgtttggatttactaacacttgttattcaaaatgcaaaaacatagaagcaatattacactgctgcccttgatgtttaaaacatgctttttttctccttcatgatgaagtgtacaagagggctc

SEQ ID NO: 39078 - DNA, 600 bp, Chicken  19866894272557_1
atgagggctattagcggcggtggatactctgaaccttgaacatttagtcaaaaagaccaatgacatccaatcaaacttctttaaaatgaattgcaacaaacaatggcagcacagctgctattagaattataattgagtttaggagggaaacagcagctgaatgcaatgcagataattaaggagcaagcttttgttaacactatcagtagggtcatgattctgcagattgtgaacttattatgtctgaacaaactaatctatttttataacagaggtatatttctgctttttataccaatraagtatattctggctacaagatagctgatcacttatttatttcaagtacccatttagagaaatggtaagcatttataaaatctaagattaccatggaaaccttattctttaatgctgaggattatgggaacaaatgattgtacaattgggrtgagtaaataacaaacctctgagtatgacaaagaccacagccactaaattatattaaataattactctcttctaggctaacagacattttacttcatctcagcactggaagggaagcaatatacatcctgtgagagaataatgaaaaca

SEQ ID NO: 39079 - DNA, 600 bp, Chicken  19866894272557_2
agcagctgaatgcaatgcagataattaaggagcaagcttttgttaacactatcagtagggtcatgattctgcagattgtgaacttattatgtctgaacaaactaatctatttttataacagaggtatatttctgctttttataccaatraagtatattctggctacaagatagctgatcacttatttatttcaagtacccatttagagaaatggtaagcatttataaaatctaagattaccatggaaaccttattctttaatgctgaggattatgggaacaaatgattgtacaattgggrtgagtaaataacaaacctctgagtatgacaaagaccacagccactaaattatattaaataattactctcttctaggctaacagacattttacttcatctcagcactggaagggaagcaatatacatcctgtgagagaataatgaaaacatttagaaatataacatttaggatacgcaggcatgaactgcataaatgcatgttctcgtgaacttagaatacttaagatgtagccctgggactgggaattagaagtatgatctaaaattactattttcctattgtctgttgactaatcttga

SEQ ID NO: 39080 - DNA, 600 bp, Chicken  19866894272557_3
tcaggaagtgcaagatgcttgaccactgataaccatgagtcagggttccaaaaatggaaaagagatcattaaaatgccaacaacattacatcctgttagcaatactgctgttataatatcatgttaccataataactggtactttttaaacaaactaaagagcacaggtccaccaaagatgttattatcaccagtcatacgggtaacccctctaactcatgtagcacagattcaagatctttggcttaagacaatcctgctcataacataggtcatttcattggcaaatctaaatttgtwaggtacaaatgagtaatcctgctttggaatttcattgacctcaatgtgtaaataaagcaaggaaaatgtgtctgactggcagcaagccaygactgtgctgtgtgcagtaaaaacactaatacatcaaatgtgattttaaaaatatgctttgatagtctgacctaccgaaagttctrattttgacctacaacctactaaaacagtctaataaaaatatttttaaaatattttaacattattaatcatttgctggtggctaagctatttgcattttttctattccgaattctgaatattcta

SEQ ID NO: 39081 - DNA, 600 bp, Chicken  19866894272557_4
tcctgttagcaatactgctgttataatatcatgttaccataataactggtactttttaaacaaactaaagagcacaggtccaccaaagatgttattatcaccagtcatacgggtaacccctctaactcatgtagcacagattcaagatctttggcttaagacaatcctgctcataacataggtcatttcattggcaaatctaaatttgtwaggtacaaatgagtaatcctgctttggaatttcattgacctcaatgtgtaaataaagcaaggaaaatgtgtctgactggcagcaagccaygactgtgctgtgtgcagtaaaaacactaatacatcaaatgtgattttaaaaatatgctttgatagtctgacctaccgaaagttctrattttgacctacaacctactaaaacagtctaataaaaatatttttaaaatattttaacattattaatcatttgctggtggctaagctatttgcattttttctattccgaattctgaatattctaaagtcttatgtcacctgaacatgtaaaaagtaaacaaaagcttgtcctaatttccagctattttaactctgtttcttcaggaattcgatt

SEQ ID NO: 39082 - DNA, 591 bp, Chicken  19866894272557_5
agatgttattatcaccagtcatacgggtaacccctctaactcatgtagcacagattcaagatctttggcttaagacaatcctgctcataacataggtcatttcattggcaaatctaaatttgtwaggtacaaatgagtaatcctgctttggaatttcattgacctcaatgtgtaaataaagcaaggaaaatgtgtctgactggcagcaagccaygactgtgctgtgtgcagtaaaaacactaatacatcaaatgtgattttaaaaatatgctttgatagtctgacctaccgaaagttctrattttgacctacaacctactaaaacagtctaataaaaatatttttaaaatattttaacattattaatcatttgctggtggctaagctatttgcattttttctattccgaattctgaatattctaaagtcttatgtcacctgaacatgtaaaaagtaaacaaaagcttgtcctaatttccagctattttaactctgtttcttcaggaattcgattcccagtctgaagatagtgaaagcttaatttagtcattatcacaatagaattcaaatgtgccttcagttaatattcaa

SEQ ID NO: 39083 - DNA, 599 bp, Chicken  19866894272560_1
  misc_feature (1)..(182): n is any nucleotide
nnnnnnnnnnnnnnnnnnnnnnnnnnnnnnnnnnnnnnnnnnnnnnnnnnnnnnnnnnnnnnnnnnnnnnnnnnnnnnnnnnnnnnnnnnnnnnnnnnnnnnnnnnnnnnnnnnnnnnnnnnnnnnnnnnnnnnnnnnnnnnnnnnnnnnnnnnnnnnnnnnnnnnnnnnnnnnnnnnnnnnacagtactgctgacaaggcagacccacacagttctgcatggctaacagtttgtagccatgacggtccctgagatgaggacccaatggagcacagtgcaaagcaggatgctgtccccartcttaacagaggatacgggacttgaaaacaaaatgaaggatcacttattagaaagctggtttttactgaagaattgcaataagtctttcatgtgtttagtgatgcagttgtagaaagagcaggaaggtactaagatctctcagacaagagataccagaagttattttactgcaggctttttaaaaagcacagctcactgaactaggtatatcaagttctcttcccgattaatcatggtaacaataggacatggctgtaaaagaaaagaattcagacataaatatataaaatttgaatta

SEQ ID NO: 39084 - DNA, 600 bp, Chicken  19866894272560_2
attaatcatggtaacaataggacatggctgtaaaagaaaagaattcagacataaatatataaaatttgaattaggaaaggctaggccacagataaatctaaaagacagacaatgatgtagctattccacttaataaaattccataaacctgcactttaaaagagtagagggggaaaaaagcctcatgacagtccactcagagtctggaaacatccatctggagaaaagattttgttcttaactggctctgaaagcagtgatacttcccagtgttgtcgatgatgcatttcgagcaatcasaggtctcagcagcaggctctgcaggttattcctgattttcctttttctgctagttggatgcccgtgcaatagcaagcaagactttctggatacaattggcattaacaattgggttgctagtatgctctttartgtgaattgataaccactgcaaaaatcgatccatgtgatcaaatcactcctgtctcaagccattgcagaattaacatttaatgttccaggccttttctgagctgaggggaagaaagcacctaattgcgagggaaagaactaagggctctaattatttctaaggatgca

SEQ ID NO: 39085 - DNA, 600 bp, Chicken  19866894272560_3
ataaaattccataaacctgcactttaaaagagtagagggggaaaaaagcctcatgacagtccactcagagtctggaaacatccatctggagaaaagattttgttcttaactggctctgaaagcagtgatacttcccagtgttgtcgatgatgcatttcgagcaatcasaggtctcagcagcaggctctgcaggttattcctgattttcctttttctgctagttggatgcccgtgcaatagcaagcaagactttctggatacaattggcattaacaattgggttgctagtatgctctttartgtgaattgataaccactgcaaaaatcgatccatgtgatcaaatcactcctgtctcaagccattgcagaattaacatttaatgttccaggccttttctgagctgaggggaagaaagcacctaattgcgagggaaagaactaagggctctaattatttctaaggatgcacctaaagatcatcaagaagaaacatactaagtaagatcaaatcaaagtttgttcaaattaagaattttrtaaaaaatgatggggaggccaccttcatcaggtagtcactgaggatttagaaatagccatagc

SEQ ID NO: 39086 - DNA, 392 bp, Chicken  19866894272560_4
tagcaagcaagactttctggatacaattggcattaacaattgggttgctagtatgctctttartgtgaattgataaccactgcaaaaatcgatccatgtgatcaaatcactcctgtctcaagccattgcagaattaacatttaatgttccaggccttttctgagctgaggggaagaaagcacctaattgcgagggaaagaactaagggctctaattatttctaaggatgcacctaaagatcatcaagaagaaacatactaagtaagatcaaatcaaagtttgttcaaattaagaattttrtaaaaaatgatggggaggccaccttcatcaggtagtcactgaggatttagaaatagccatagcataggagttctttatcaaacactgcaaga

SEQ ID NO: 39087 - DNA, 599 bp, Chicken  19866894272566_1
  misc_feature (1)..(5): n is any nucleotide
nnnnntctgcatttctgtttattcctgcaaataacagaaccccatctaagaagctcagctatacctaccaaactctgggtccagctctagcggtaagctaggcacaactccaggagctgtgggtgctctcacattactgatttctttagatacttcagtctttggtaactcaagtttgcatttctggctgaggcacgaggaggaagtctctccctcatttttttctggaacttcactcttaggaacatccccatctgaccataaaaacaatagcacacgatacagtatgatgcaaaacayaattagcagtaagttcagtaagttcccattgtacaagaacaaaagaatttgaataacttttgttttaacacctgaagtttctggtactgaacacacaacattattactggaagagggtctttatgttgaaataattccatggtaaactattcttagacacagargaccttgattttctcttgaccctcctaggtgcaaaaaattctgccttcagtcatcacccatttcacagtttaaaagatagccctataacagattttctccttgtttcctcrtgcttccccatctcccactgcctt

SEQ ID NO: 39088 - DNA, 600 bp, Chicken  19866894272566_2
gtaactcaagtttgcatttctggctgaggcacgaggaggaagtctctccctcatttttttctggaacttcactcttaggaacatccccatctgaccataaaaacaatagcacacgatacagtatgatgcaaaacayaattagcagtaagttcagtaagttcccattgtacaagaacaaaagaatttgaataacttttgttttaacacctgaagtttctggtactgaacacacaacattattactggaagagggtctttatgttgaaataattccatggtaaactattcttagacacagargaccttgattttctcttgaccctcctaggtgcaaaaaattctgccttcagtcatcacccatttcacagtttaaaagatagccctataacagattttctccttgtttcctcrtgcttccccatctcccactgccttctaccctatgcttggtttgttcttttacagaacctggacatggccaattgctttgatctgcctttacatatcattgtgtaccacagccaaagctgtcaggcactgctcatcgtaacactacacaggagcctaaacttcagaggaacactcaccctcactttgtta

SEQ ID NO: 39089 - DNA, 517 bp, Chicken  19866894272566_3
cacgatacagtatgatgcaaaacayaattagcagtaagttcagtaagttcccattgtacaagaacaaaagaatttgaataacttttgttttaacacctgaagtttctggtactgaacacacaacattattactggaagagggtctttatgttgaaataattccatggtaaactattcttagacacagargaccttgattttctcttgaccctcctaggtgcaaaaaattctgccttcagtcatcacccatttcacagtttaaaagatagccctataacagattttctccttgtttcctcrtgcttccccatctcccactgccttctaccctatgcttggtttgttcttttacagaacctggacatggccaattgctttgatctgcctttacatatcattgtgtaccacagccaaagctgtcaggcactgctcatcgtaacactacacaggagcctaaacttcagaggaacactcaccctcactttgttaagggcagttttctctttttagtgaacca

SEQ ID NO: 39090 - DNA, 599 bp, Chicken  19866894272567_1
  misc_feature (1)..(23): n is any nucleotide
nnnnnnnnnnnnnnnnnnnnnnncatggactgtagagtgttcagttcccttctgtcagtctagcagatgctgactgtgtttcacgaagtgttggttctaatctccatgaacatgtgtgttttccactggacacccagaggctgtgatcattactcacttcttgtttttatgctgacccagcatttgttctggtgctcttcactgcatcagacttacctaaataatgattgtcctacagtgggaacaggaccactcttgtacttgggagggttttgtcactgaagcttgattgctttggawcttaattttgtaagctggagaattccagggaagcctttctgctgccacttcactttgattctcagagctgttcttaacacctgtaagtctgaagtgtcttacctaccttatatatttatctgcagaatcccattcagagaacagtcatgcaataaggctgtgtagttagggttgtagtttatctagttacacagtgctgtacaaggggacagtgtcacaggaatccctaactctgacattgctggattcttctgtaggtatataaaaacttaaactattgctgatacagtgcatttttt

SEQ ID NO: 39091 - DNA, 600 bp, Chicken  19866894272569_1
tgcagagagcccagctctgctaagctgcctgtctgtcagggattaatttaacctctaattactacatttttttcacagtttgctgcacatgagcatgttataacaaaagcacaaagaacgatgtcattttatttagccactactctgaaattaatttagggggtatagagtcagatctaacacacttggtgttaaaataattgtgctggcattagaattgaagtacataatcttgttgtttctaatgatataacagtactagtgtaaatagtgctgttaacttgttagtcttagccataktaatagagatgatacttagttacagagaagtacccaaaaggatcgcatcagccagagcacatggtttgtgcttgattcccagcaaccattttgggttaggattgggtgttcaggaatagttggttgttttttccaaaaaggtctttcaaattgcaacaaacaaatatttaagatggcctgggtttcttccagcctggataatgatttttttcctttttttttttttttcctgtaatatgcgacatgttgggaacagtacaaaaggccatatctcctcttctgtctgctcatactgatatc

SEQ ID NO: 39092 - DNA, 596 bp, Chicken  19866894272570_1
tatcaataacactgtcaagtctctttcaggggaaaccaaagcgaatttcaacgagtcatgaagtgacagggcacattgataaattctcattttcccctccttagcagagctaccaccaaccagcaaggagcaattccagccagcccggaaccctgctggagtgactgtctcaaaccaggtcagcatgcaccaatgccttacggcagcacagcagcagcacagggaggaacgggcccaaaccccacatccctcgcctgggcacaccactagccccaagagcaggtcctggcactgcatgcyacctgtcagctgctgcctggaccagggaaaggagragcctgcagctctctcccccactttaccctttgggtacagccattccctcacaggaggaaaggatccactgtaaatgcagcctaccatggcaccttccctcatcctgctctgtttctgtctcatttccttcaataggcaagagtgagcagggtggggggcacaaaacaaccccacttccctatttaaggtcctgatgcttaagtccttaatgcgaggttcaaatctgagcgtcacccaatgctaagttccactgcaccgtg

SEQ ID NO: 39093 - DNA, 561 bp, Chicken  19866894272570_2
ccaaagcgaatttcaacgagtcatgaagtgacagggcacattgataaattctcattttcccctccttagcagagctaccaccaaccagcaaggagcaattccagccagcccggaaccctgctggagtgactgtctcaaaccaggtcagcatgcaccaatgccttacggcagcacagcagcagcacagggaggaacgggcccaaaccccacatccctcgcctgggcacaccactagccccaagagcaggtcctggcactgcatgcyacctgtcagctgctgcctggaccagggaaaggagragcctgcagctctctcccccactttaccctttgggtacagccattccctcacaggaggaaaggatccactgtaaatgcagcctaccatggcaccttccctcatcctgctctgtttctgtctcatttccttcaataggcaagagtgagcagggtggggggcacaaaacaaccccacttccctatttaaggtcctgatgcttaagtccttaatgcgaggttcaaatctgagcgtcacccaatgctaagttccactgcaccgtg

SEQ ID NO: 39094 - DNA, 599 bp, Chicken  19866894272572_1
  misc_feature (1)..(27): n is any nucleotide
nnnnnnnnnnnnnnnnnnnnnnnnnnnactttgaaagcacagacacatgggcagggagaagtgaactgcgttacacctctgctttcatgcacataatgccttaactaccattgccgagttaccacaagaatctgctacatcttattgcccccgagtttgtgtttcgctgttcagtgataaagggctcacggtattcctcaggaacgagaaacttgttttctcagcatgtccaaatcctacaagttcaaagagaggggtttgaagctggagcatctctttgatagtgcattgcacttggtraaaccccgatgtttacctgggtaaatcccgttgtatgtaagccatgtagttctagaaaataagcttgcgtggagtagtcagttgtccatttaaaatttaattctttaaaaggtgatgtaaattctaacccgtgatacgtgaaagctattacaaagagacaattgcagcatttcttttatgaaacacttcaagtaatttcagttaaataattacgtaagaaggggtgttctttacggaagtagcttgatgaatataagcgcagcagtaggagccaggctcctctaattttgtatcagttt

SEQ ID NO: 39095 - DNA, 600 bp, Chicken  19866894272572_2
taaatctgtgtctttgtaaaaacagcgatggtaccgacctacctcacaggggtgttgtgagggttagcttatgcctataaaatgcattgaggatcggaattgctatgtaaatattaaatattttaattttagttttgtgaggtgtaagatttactgtaatgaaaacagaaggtttttgtcattataaagccgtggaggcagcgcagaatggtgttccacaagaatggttactgcaggacggtgctgctggctggctgtcatggctgcttcagttacagtggtggtttcttcttcgctaaraygtgattccccaccacggtgcctcagttctgctctaatagaaaaaacagaaggaggatggttgttaggtatccaggctttggtgctgctgcttctctcaagtgcttctcatggtggtaggtttattgctttttttttttttaaatgcttttctgcaatgaacaaacacgaatcatctctcgcgcgtctctcaggtttctcccactgcctctcgagttctgctcagtataagtagagcctggtggcagtgattaaaacacaaagagccagccctccgaaacttctacactgcttccagta

SEQ ID NO: 39096 - DNA, 600 bp, Chicken  19866894272572_3
aatctgtgtctttgtaaaaacagcgatggtaccgacctacctcacaggggtgttgtgagggttagcttatgcctataaaatgcattgaggatcggaattgctatgtaaatattaaatattttaattttagttttgtgaggtgtaagatttactgtaatgaaaacagaaggtttttgtcattataaagccgtggaggcagcgcagaatggtgttccacaagaatggttactgcaggacggtgctgctggctggctgtcatggctgcttcagttacagtggtggtttcttcttcgctaaraygtgattccccaccacggtgcctcagttctgctctaatagaaaaaacagaaggaggatggttgttaggtatccaggctttggtgctgctgcttctctcaagtgcttctcatggtggtaggtttattgctttttttttttttaaatgcttttctgcaatgaacaaacacgaatcatctctcgcgcgtctctcaggtttctcccactgcctctcgagttctgctcagtataagtagagcctggtggcagtgattaaaacacaaagagccagccctccgaaacttctacactgcttccagtacg

SEQ ID NO: 39097 - DNA, 600 bp, Chicken  19866894272572_4
aaaaaacagaaggaggatggttgttaggtatccaggctttggtgctgctgcttctctcaagtgcttctcatggtggtaggtttattgctttttttttttttaaatgcttttctgcaatgaacaaacacgaatcatctctcgcgcgtctctcaggtttctcccactgcctctcgagttctgctcagtataagtagagcctggtggcagtgattaaaacacaaagagccagccctccgaaacttctacactgcttccagtacgagatcatgccctctgcagtacgtgagaataaagctcccyagcacagatcatgaagcaaatggtgtgatttgctgtagagccttaagctaccacctgtcttaaaaaaataaggaaaaaaaatagcaatatgagatttactgggctcaagcaactgagaaataaggtgtccctggcctgccctcctcctcagtgagttaaagcaagtgctgctttttccttttgtcccattccatatcctgcttttcatgttccttgaggccattataaaagattgggaagattcttccagccccaatggaagatcatactcgtgccatttttccatctattactgctgga

SEQ ID NO: 39098 - DNA, 599 bp, Chicken  19866894272579_1
  misc_feature (1)..(72): n is any nucleotide
nnnnnnnnnnnnnnnnnnnnnnnnnnnnnnnnnnnnnnnnnnnnnnnnnnnnnnnnnnnnnnnnnnnnnnnntttctatttttctttattcactaattaatctagtcttagtagctgtctttattctgcacttggaaagaataaagtttaagcaggaagccaggaaagtgtaaattgaatgtatcccattgttattttatagttgacatcatcaaagatgccaaaacagctgcggttgtctgaatttcctgttagttttttaattgtagcttttgaaaactggtacagcacaagctcagwaaatgatacwtgtgtgctgatttgcaacagctttgtttatgtttctgaytaatttgtaactgatacatatgttttaacaggtaaagcgtgcatttctttcaacaagaaagactacagaggagcccttgcgtactacaagaaagcactgcgtaccaatccaggttgtccaggtaagacagaaactgtttgctagtggaagcatctgactcrgatctccctaattcaawtatctytgggcttatttgtgttctatagctgtccaaaagatccaccaaaagcatccccagagatatcaccag

SEQ ID NO: 39099 - DNA, 599 bp, Chicken  19866894272579_2
  misc_feature (1)..(62): n is any nucleotide
nnnnnnnnnnnnnnnnnnnnnnnnnnnnnnnnnnnnnnnnnnnnnnnnnnnnnnnnnnnnnntttctatttttctttattcactaattaatctagtcttagtagctgtctttattctgcacttggaaagaataaagtttaagcaggaagccaggaaagtgtaaattgaatgtatcccattgttattttatagttgacatcatcaaagatgccaaaacagctgcggttgtctgaatttcctgttagttttttaattgtagcttttgaaaactggtacagcacaagctcagwaaatgatacwtgtgtgctgatttgcaacagctttgtttatgtttctgaytaatttgtaactgatacatatgttttaacaggtaaagcgtgcatttctttcaacaagaaagactacagaggagcccttgcgtactacaagaaagcactgcgtaccaatccaggttgtccaggtaagacagaaactgtttgctagtggaagcatctgactcrgatctccctaattcaawtatctytgggcttatttgtgttctatagctgtccaaaagatccaccaaaagcatccccagagatatcaccagaaaaaccctt

SEQ ID NO: 39100 - DNA, 599 bp, Chicken  19866894272579_3
  misc_feature (1)..(23): n is any nucleotide
nnnnnnnnnnnnnnnnnnnnnnntttctatttttctttattcactaattaatctagtcttagtagctgtctttattctgcacttggaaagaataaagtttaagcaggaagccaggaaagtgtaaattgaatgtatcccattgttattttatagttgacatcatcaaagatgccaaaacagctgcggttgtctgaatttcctgttagttttttaattgtagcttttgaaaactggtacagcacaagctcagwaaatgatacwtgtgtgctgatttgcaacagctttgtttatgtttctgaytaatttgtaactgatacatatgttttaacaggtaaagcgtgcatttctttcaacaagaaagactacagaggagcccttgcgtactacaagaaagcactgcgtaccaatccaggttgtccaggtaagacagaaactgtttgctagtggaagcatctgactcrgatctccctaattcaawtatctytgggcttatttgtgttctatagctgtccaaaagatccaccaaaagcatccccagagatatcaccagaaaaacccttcatcctctttggagagttgcgatgtttgttgcatgctac

SEQ ID NO: 39101 - DNA, 600 bp, Chicken  19866894272579_4
atcaaagatgccaaaacagctgcggttgtctgaatttcctgttagttttttaattgtagcttttgaaaactggtacagcacaagctcagwaaatgatacwtgtgtgctgatttgcaacagctttgtttatgtttctgaytaatttgtaactgatacatatgttttaacaggtaaagcgtgcatttctttcaacaagaaagactacagaggagcccttgcgtactacaagaaagcactgcgtaccaatccaggttgtccaggtaagacagaaactgtttgctagtggaagcatctgactcrgatctccctaattcaawtatctytgggcttatttgtgttctatagctgtccaaaagatccaccaaaagcatccccagagatatcaccagaaaaacccttcatcctctttggagagttgcgatgtttgttgcatgctacttagttgttagagaaagaaatcatgttgaggaagatgcttatattttttccccactttttaccttctacagctactagaaaatgagaagttgtgtattaaaatagtgtggagcagggaggaaagtactgttcaagactaccagctcctgaataagggttaag

SEQ ID NO: 39102 - DNA, 600 bp, Chicken  19866894272579_5
agctgcggttgtctgaatttcctgttagttttttaattgtagcttttgaaaactggtacagcacaagctcagwaaatgatacwtgtgtgctgatttgcaacagctttgtttatgtttctgaytaatttgtaactgatacatatgttttaacaggtaaagcgtgcatttctttcaacaagaaagactacagaggagcccttgcgtactacaagaaagcactgcgtaccaatccaggttgtccaggtaagacagaaactgtttgctagtggaagcatctgactcrgatctccctaattcaawtatctytgggcttatttgtgttctatagctgtccaaaagatccaccaaaagcatccccagagatatcaccagaaaaacccttcatcctctttggagagttgcgatgtttgttgcatgctacttagttgttagagaaagaaatcatgttgaggaagatgcttatattttttccccactttttaccttctacagctactagaaaatgagaagttgtgtattaaaatagtgtggagcagggaggaaagtactgttcaagactaccagctcctgaataagggttaaggaaattatgtcagtgcg

SEQ ID NO: 39103 - DNA, 600 bp, Chicken  19866894272579_6
ggttgtctgaatttcctgttagttttttaattgtagcttttgaaaactggtacagcacaagctcagwaaatgatacwtgtgtgctgatttgcaacagctttgtttatgtttctgaytaatttgtaactgatacatatgttttaacaggtaaagcgtgcatttctttcaacaagaaagactacagaggagcccttgcgtactacaagaaagcactgcgtaccaatccaggttgtccaggtaagacagaaactgtttgctagtggaagcatctgactcrgatctccctaattcaawtatctytgggcttatttgtgttctatagctgtccaaaagatccaccaaaagcatccccagagatatcaccagaaaaacccttcatcctctttggagagttgcgatgtttgttgcatgctacttagttgttagagaaagaaatcatgttgaggaagatgcttatattttttccccactttttaccttctacagctactagaaaatgagaagttgtgtattaaaatagtgtggagcagggaggaaagtactgttcaagactaccagctcctgaataagggttaaggaaattatgtcagtgcgttcgca

SEQ ID NO: 39104 - DNA, 600 bp, Chicken  19866894272581_1
gatgtgacaaatgcccatcaactcccacagctgctctgtatcacagggatttcatcggctgtaggcagacctccccagctctgctatttgtacaaatattttttgcaggattttacattcactgcttacatttgcacagcatctgcaaagcctcggttacagaccaggccctatctgcagggtcctctacaaacaccacagggatgtgcttccccagaaacggtgcctgcagatggaataggacaacaacaacaaaaaaaaaggaataggagggacaaagaaacactcagataatggggyctgcagctagcagctcccaaagagcaacgaaacagaaacagcaactgagttatgtcagatgtttgtttgttcaaggaatggcatttgttcggcaggaaagcacattcaagtggaagagcaacatggaagaagcagggaggtgttaatgtgaatgtaaaacaggtgagtgaaaccaagggcaggtggggtgtgagctgatactgccctgaaggagctgacaaagcacaaagagttgcccaggaagctgtgaaaaggaccgtatttaacaacagcccgtgcagcaaacaaatcagtgagctg

SEQ ID NO: 39105 - DNA, 600 bp, Chicken  19866894272582_1
ctgattgtagaaggcctcatttgcttcctcttgctgatcatgtgccctgtagtaaacacttagaacagagacgcccttgttagtctttcctttaatccttacctgctcatcatccacccttaggcagggctccacacgttccaggtgttctcctatatacaaatgggctacaccacctactactcttcctggcttgtctttcctaaaaaaccatgtagccattcatgacaatatttcagtcatatgagctatcccaccgtgtctctgtacttacagatctctaattcttcccatgctacrtgcactggtgtagaggcacttcagaaacgtatttgaggttgccaatttcccaggaagggtggtaatcccttcagccataaataaaaaggaaaaagtgagacaaaaatgtctaagatcaatttgacccaaatggttaatttagctcagctttataaatcacttaatacaatacttaggtcagaagtgtcaggaaatattaggagtggaatggcagtctttcctataactgcctttatgctttcctagtgaaacagaagcaaacctctttttttttttttcttttttttttctctttcattt

SEQ ID NO: 39106 - DNA, 600 bp, Chicken  19866894272587_1
cctgttgctctgtccaggcatatttctcatcccacagctgacttccacagaaatgaagtctcaaggatagttgattctatccttactcttaatatgacttataggagaatggactacagtatccttctcaacttttaagagttcgtgaagaaataattctgcatgctgctctgcaaaatactgttgttcttaactcacatctttaaggttgcacaacagtattactttacagaacattcacttataaacaccctcaacaccaccataaaagtaatatcttgagatattctcatcttgttrcagaactgaagacagtcaagagtgacttagtggctattttaaaagacttkcctttaacagcacccttaaaggaatttcctggtattgtctttggaaagctgtatcaactgttcattttcaccagggcctaaaytgacagcataatttttcaacgcatccaagttttgagtgctatcttccattttcagtgatacttaggctccaaaatattaaaatatatagttttcaaaactggaatttcagcttttaaatcttgtaattgttttgagggagcactacaaggcaagaaatcataaatcc

SEQ ID NO: 39107 - DNA, 600 bp, Chicken  19866894272587_2
aaatgaagtctcaaggatagttgattctatccttactcttaatatgacttataggagaatggactacagtatccttctcaacttttaagagttcgtgaagaaataattctgcatgctgctctgcaaaatactgttgttcttaactcacatctttaaggttgcacaacagtattactttacagaacattcacttataaacaccctcaacaccaccataaaagtaatatcttgagatattctcatcttgttrcagaactgaagacagtcaagagtgacttagtggctattttaaaagacttkcctttaacagcacccttaaaggaatttcctggtattgtctttggaaagctgtatcaactgttcattttcaccagggcctaaaytgacagcataatttttcaacgcatccaagttttgagtgctatcttccattttcagtgatacttaggctccaaaatattaaaatatatagttttcaaaactggaatttcagcttttaaatcttgtaattgttttgagggagcactacaaggcaagaaatcataaatccgtctcgaagaacgcactacctgtttccaagggtcagcaacctcctatagt

SEQ ID NO: 39108 - DNA, 600 bp, Chicken  19866894272587_3
tttaagagttcgtgaagaaataattctgcatgctgctctgcaaaatactgttgttcttaactcacatctttaaggttgcacaacagtattactttacagaacattcacttataaacaccctcaacaccaccataaaagtaatatcttgagatattctcatcttgttrcagaactgaagacagtcaagagtgacttagtggctattttaaaagacttkcctttaacagcacccttaaaggaatttcctggtattgtctttggaaagctgtatcaactgttcattttcaccagggcctaaaytgacagcataatttttcaacgcatccaagttttgagtgctatcttccattttcagtgatacttaggctccaaaatattaaaatatatagttttcaaaactggaatttcagcttttaaatcttgtaattgttttgagggagcactacaaggcaagaaatcataaatccgtctcgaagaacgcactacctgtttccaagggtcagcaacctcctatagtattttagcagatttacttcacttctcccagctccatgcacatgtatttttaacaacaaatacctcccttcagcatctatttag

SEQ ID NO: 39109 - DNA, 600 bp, Chicken  19866894272599_1
tctgtttattacccatgctgcatgcgttagtgtaaaggcacctgagctgggcctcctttcgagtggcagtagccctaataccctcatgaccatactcaggtacctgtttccatggtcaccaacaatcaaaaacaaacagaacaaaacaaactaacaaaaatcatgaagtatgtttctcttttgcatttttaaattctttcttgaagttgattcccttgaacatgactttttaattttattaaaatcttttgatgtttcttaagcatattttcttgtattggccttgccacctcagatacwgctgacatctgtaatcaaagtgataaaacacagcaggtaaacagttggtctagcccattaaaatcaatgataaccaaaactttatttttgtattgtttttaatatttattttgctttcctctagccaagtgaaaatgtattccagaactatatatccagaagagactttgaaagaggccttatttggccttgagctgatcaaattgggaaatcaggctgtcaaaggtcaaggttgtagaccacttcctgtttcctttaaaactaaaagaaacataaaaagaccctaaacttttgagccac

SEQ ID NO: 39110 - DNA, 600 bp, Chicken  19866894272600_1
tttaaatcgtgaaaatgcaatctatttcctctggaacattccctccccatcccactttttttttttcttcttattattttttttttctgggaaatgataatgtaggttatatatattcctataacggatctttcagcaatgccatgaaataaaattggcactgagcagcgtgactgtgtggaatggggaaggaactggagactatcttgcaaagaccatgtgttcccttatattcaagatgtacaagttttaaaaataggaatgtggaagttgctcactggagtaagcttagagaagggrcctggtgccttctggcacagccagtctgggtgaagggctggagagtaccagggaggagagaggaggtaaccctgaatgcaaagaggatttctacaaatgaagcctagccaaaatagtaaataaactattatttaccatatatatttgggaggcagtctctgttgaaaaatctatagattcccacacatcaggagatgaaaaagtcttcaagaccttctacatgattctgttaactaacatgcagctgattcatgtagcaatcattcccatcaactcacccagggcactgccagaggagga

SEQ ID NO: 39111 - DNA, 600 bp, Chicken  19866894272601_1
taggtgtcctgggcttgcctgggaccttcctctgtgcttcccctcccagcaggcagagcatggagctgtggaaatggaagtgtgcacactggggtcctgactgcatggatagcaggtgcaggtctcagtggagcagctgggaggacactccaaaggtggaaggtttgtgatgaaggggtgcagcaggggacgggtatgggacgctgtgctttaacacggctttagaatagagatctggaggtggtgtaagcctggagaggcaggctgtgtgccaggtgaacaaggtgccaccaatccctscttgtttcgagaacccaccactaaaacctgtcccaattgtgatggaaaccaatttccagcagctgaggatatttgtccctttctgtcctccatctccctgcttacaccagcacaaagttttggaggatgttctggaacacacacacacagagataggatccaactgcaagagacttcccatggcaaagtgctgtttatgcaaccagcagctaaggacatgccctcgtctgtatcttttgagacagtgcagatggttccaggtcctgggactgcaaccagcacttgctgaatagtgaaaca

SEQ ID NO: 39112 - DNA, 600 bp, Chicken  19866894272603_1
acagccttcaaactcaaaggctctggtggtcccagagcccatcattggtgttgaagacagaatcaaagaagtcattaagtaggcagtgcttcgttggcagccctatttgcaagggggcaatcctcattaagtaacagaccaatattacctctggtcttcattttactgataacatatattaaaaagccctttataataaagagagcttgtacttagaagagagcacttatggaccccaacgccttcaaaaaaagttttccaaagggagttattaactagttaacaagttccatgagcagsctgtagtctgctttccccatattcagggatgaagttttggtggcaaggattcctcctgtcctgaaagattttagactcaatgactccatgtccactatgtccaagacagacactgaccaccacatcacccacaagactctctctttttaacagcaacaaatctacaagcatcattcctagtcagtcccctagcaccgttaccaatcagcatgggattcattctggagaatgatggatgttcctctagctaagaagtttcctaaggagctcctgcttcacaggaacagcagcaatatggaa

SEQ ID NO: 39113 - DNA, 600 bp, Chicken  19866894272611_1
gcactttaaattcttgtcttcacacatactgtgttttgaaaaataaataatacatacttttctaaacccttccaaaggacttaactcagcagagtctctacagtacagttgtttctacattcagatcatttattttctgctagtatttagtggtaacatcttggttttatgcatttatgtgtatgcaacataagtgaggaatgctggcaaaagtttaattttctaaaattatttctgtgttctggtattacactatctgagtgcctggattaaggtgctacataagaaaaaaacttcaaytgatgmaattttgatgaaagaattccacgtaatatttaaaagtaaagaattttcaaaattggaaaaatgtaagccatgcaagtattatttgcacattctttgtgcatgagataagttaagagatagaattatgtcatggataacggacacacatcagtcagaaaatttttratttggaagggtgttctgttaaaacaaagatagcaagttattaaaatattaytgaatttgttttgccccactcaaacattcttaatgagcaagtcagcaaaacaaataacaaacataccaaaacccatt

SEQ ID NO: 39114 - DNA, 600 bp, Chicken  19866894272611_2
taaattcttgtcttcacacatactgtgttttgaaaaataaataatacatacttttctaaacccttccaaaggacttaactcagcagagtctctacagtacagttgtttctacattcagatcatttattttctgctagtatttagtggtaacatcttggttttatgcatttatgtgtatgcaacataagtgaggaatgctggcaaaagtttaattttctaaaattatttctgtgttctggtattacactatctgagtgcctggattaaggtgctacataagaaaaaaacttcaaytgatgmaattttgatgaaagaattccacgtaatatttaaaagtaaagaattttcaaaattggaaaaatgtaagccatgcaagtattatttgcacattctttgtgcatgagataagttaagagatagaattatgtcatggataacggacacacatcagtcagaaaatttttratttggaagggtgttctgttaaaacaaagatagcaagttattaaaatattaytgaatttgttttgccccactcaaacattcttaatgagcaagtcagcaaaacaaataacaaacataccaaaacccattaagtat

SEQ ID NO: 39115 - DNA, 600 bp, Chicken  19866894272611_3
catttatgtgtatgcaacataagtgaggaatgctggcaaaagtttaattttctaaaattatttctgtgttctggtattacactatctgagtgcctggattaaggtgctacataagaaaaaaacttcaaytgatgmaattttgatgaaagaattccacgtaatatttaaaagtaaagaattttcaaaattggaaaaatgtaagccatgcaagtattatttgcacattctttgtgcatgagataagttaagagatagaattatgtcatggataacggacacacatcagtcagaaaatttttratttggaagggtgttctgttaaaacaaagatagcaagttattaaaatattaytgaatttgttttgccccactcaaacattcttaatgagcaagtcagcaaaacaaataacaaacataccaaaacccattaagtataaaaattaaaagaaacaaaagagattgtcatcagcaatcatcaaggtaaaaatgttgaaactgctgtagtttctttcctattcccaaatatttttatttgtcataagtcacaataagatacagggtacaaatatgttcactgctccttctccaaatttactctag

SEQ ID NO: 39116 - DNA, 600 bp, Chicken  19866894272611_4
taaaattatttctgtgttctggtattacactatctgagtgcctggattaaggtgctacataagaaaaaaacttcaaytgatgmaattttgatgaaagaattccacgtaatatttaaaagtaaagaattttcaaaattggaaaaatgtaagccatgcaagtattatttgcacattctttgtgcatgagataagttaagagatagaattatgtcatggataacggacacacatcagtcagaaaatttttratttggaagggtgttctgttaaaacaaagatagcaagttattaaaatattaytgaatttgttttgccccactcaaacattcttaatgagcaagtcagcaaaacaaataacaaacataccaaaacccattaagtataaaaattaaaagaaacaaaagagattgtcatcagcaatcatcaaggtaaaaatgttgaaactgctgtagtttctttcctattcccaaatatttttatttgtcataagtcacaataagatacagggtacaaatatgttcactgctccttctccaaatttactctagcaattaaaaaaaatgcaataggcacaatctacaattacaaaaattgagagta

SEQ ID NO: 39117 - DNA, 600 bp, Chicken  19866894272612_1
aggattgttacaatagtatagcaaaatttggttaaggtttttttcctttcctccatccctggccaaaatagacactgttctttaactcatgcctgtctgtaaaatgatgtgaagcacaaaacacacacagctgtactggggacttattcttcagcatgctgaaatcaatgaacatctctatgagttagtacatttctactctgggtgttcaaagacagctctgagggaaataaaataatgtgaaagctgagatcctgcactgttgagttataaaacttcattttctaatcgtttaggtgmagacattgttagtaactgttggttttctcagcwyctttagcctatcttatagcattggtgaaacttatccacaggtgggtagatggagaactggtgtgatattagttgtccaaacatacacaccaggtgtccatataccatgcttgttgtccttctatggctacaaagaaggagagatgccyacaattcctgtgacatatctgctagccatgtgcagaagtgtgttgctgtagcgagtctaaaatgaccctggacatcagtgttaaagcaactgaatccacctgtaatgattaagcattc

SEQ ID NO: 39118 - DNA, 600 bp, Chicken  19866894272612_2
aaggtttttttcctttcctccatccctggccaaaatagacactgttctttaactcatgcctgtctgtaaaatgatgtgaagcacaaaacacacacagctgtactggggacttattcttcagcatgctgaaatcaatgaacatctctatgagttagtacatttctactctgggtgttcaaagacagctctgagggaaataaaataatgtgaaagctgagatcctgcactgttgagttataaaacttcattttctaatcgtttaggtgmagacattgttagtaactgttggttttctcagcwyctttagcctatcttatagcattggtgaaacttatccacaggtgggtagatggagaactggtgtgatattagttgtccaaacatacacaccaggtgtccatataccatgcttgttgtccttctatggctacaaagaaggagagatgccyacaattcctgtgacatatctgctagccatgtgcagaagtgtgttgctgtagcgagtctaaaatgaccctggacatcagtgttaaagcaactgaatccacctgtaatgattaagcattcttttaaacatttgtacatttgggaggatcttgt

SEQ ID NO: 39119 - DNA, 600 bp, Chicken  19866894272612_3
aggtttttttcctttcctccatccctggccaaaatagacactgttctttaactcatgcctgtctgtaaaatgatgtgaagcacaaaacacacacagctgtactggggacttattcttcagcatgctgaaatcaatgaacatctctatgagttagtacatttctactctgggtgttcaaagacagctctgagggaaataaaataatgtgaaagctgagatcctgcactgttgagttataaaacttcattttctaatcgtttaggtgmagacattgttagtaactgttggttttctcagcwyctttagcctatcttatagcattggtgaaacttatccacaggtgggtagatggagaactggtgtgatattagttgtccaaacatacacaccaggtgtccatataccatgcttgttgtccttctatggctacaaagaaggagagatgccyacaattcctgtgacatatctgctagccatgtgcagaagtgtgttgctgtagcgagtctaaaatgaccctggacatcagtgttaaagcaactgaatccacctgtaatgattaagcattcttttaaacatttgtacatttgggaggatcttgta

SEQ ID NO: 39120 - DNA, 600 bp, Chicken  19866894272612_4
agttagtacatttctactctgggtgttcaaagacagctctgagggaaataaaataatgtgaaagctgagatcctgcactgttgagttataaaacttcattttctaatcgtttaggtgmagacattgttagtaactgttggttttctcagcwyctttagcctatcttatagcattggtgaaacttatccacaggtgggtagatggagaactggtgtgatattagttgtccaaacatacacaccaggtgtccatataccatgcttgttgtccttctatggctacaaagaaggagagatgccyacaattcctgtgacatatctgctagccatgtgcagaagtgtgttgctgtagcgagtctaaaatgaccctggacatcagtgttaaagcaactgaatccacctgtaatgattaagcattcttttaaacatttgtacatttgggaggatcttgtaatttctcacatttcctcaagaagagtattctacagctttcratkttttgttgctacgatctcctcccctagatccagttgggacagggaccaggagccttcttattctttggatgaacaaatgactttggcatctcttgaagaagctt

SEQ ID NO: 39121 - DNA, 600 bp, Chicken  19866894272612_5
tgggtagatggagaactggtgtgatattagttgtccaaacatacacaccaggtgtccatataccatgcttgttgtccttctatggctacaaagaaggagagatgccyacaattcctgtgacatatctgctagccatgtgcagaagtgtgttgctgtagcgagtctaaaatgaccctggacatcagtgttaaagcaactgaatccacctgtaatgattaagcattcttttaaacatttgtacatttgggaggatcttgtaatttctcacatttcctcaagaagagtattctacagctttcratkttttgttgctacgatctcctcccctagatccagttgggacagggaccaggagccttcttattctttggatgaacaaatgactttggcatctcttgaagaagcttgtttttattcaagctcaggctggacagggctctgagcgcctcgatctagcaacaagtgtccctgttcattgcagagaagttggactatatgacttttaaaggtcccttctaactcaaatgattctattctatgatgaagcagctttagtcttctggaaataaaaattcctatagtctcagcacaacgctcatg

SEQ ID NO: 39122 - DNA, 600 bp, Chicken  19866894272612_6
gtagatggagaactggtgtgatattagttgtccaaacatacacaccaggtgtccatataccatgcttgttgtccttctatggctacaaagaaggagagatgccyacaattcctgtgacatatctgctagccatgtgcagaagtgtgttgctgtagcgagtctaaaatgaccctggacatcagtgttaaagcaactgaatccacctgtaatgattaagcattcttttaaacatttgtacatttgggaggatcttgtaatttctcacatttcctcaagaagagtattctacagctttcratkttttgttgctacgatctcctcccctagatccagttgggacagggaccaggagccttcttattctttggatgaacaaatgactttggcatctcttgaagaagcttgtttttattcaagctcaggctggacagggctctgagcgcctcgatctagcaacaagtgtccctgttcattgcagagaagttggactatatgacttttaaaggtcccttctaactcaaatgattctattctatgatgaagcagctttagtcttctggaaataaaaattcctatagtctcagcacaacgctcatgtgg

SEQ ID NO: 39123 - DNA, 600 bp, Chicken  19866894272624_1
agtctgatcttagacgacaaggagagcaacgactgagggaagattcctgtatcaataaactgatgtcagtattagcatcatcagtctgtgaccgcttttatctccgggcctcagtgcacattaccaacattaattagccttgtgagatacccatttgatgggcatggagcaattatgcctactttatgggcacacagcagctacagggcacgctcagggtcaaagaagagttctgctacacagccaccaaatctgtccagcaactcatttctgttccatcagtaatgcatttcattattryttattagataagttctggtgcttgggtgggccaacggactgaaatttagagaatttggtatttcccacagttaggaactgaaaagcattagagtcagactatacaaatatgccaccgaacagcaagtctcagaaacagcatttgaagccttagaagtctgtttttcccccatgattgcagtcaacaggtatctgcatttaatgaagaacrcctaatgcaaaatataaccacagagttctcattctctttctaatccacagtcactaaatagcgcagtaagactataacccatcaacacc

SEQ ID NO: 39124 - DNA, 600 bp, Chicken  19866894272624_2
gtctgatcttagacgacaaggagagcaacgactgagggaagattcctgtatcaataaactgatgtcagtattagcatcatcagtctgtgaccgcttttatctccgggcctcagtgcacattaccaacattaattagccttgtgagatacccatttgatgggcatggagcaattatgcctactttatgggcacacagcagctacagggcacgctcagggtcaaagaagagttctgctacacagccaccaaatctgtccagcaactcatttctgttccatcagtaatgcatttcattattryttattagataagttctggtgcttgggtgggccaacggactgaaatttagagaatttggtatttcccacagttaggaactgaaaagcattagagtcagactatacaaatatgccaccgaacagcaagtctcagaaacagcatttgaagccttagaagtctgtttttcccccatgattgcagtcaacaggtatctgcatttaatgaagaacrcctaatgcaaaatataaccacagagttctcattctctttctaatccacagtcactaaatagcgcagtaagactataacccatcaacacca

SEQ ID NO: 39125 - DNA, 600 bp, Chicken  19866894272624_3
agcaattatgcctactttatgggcacacagcagctacagggcacgctcagggtcaaagaagagttctgctacacagccaccaaatctgtccagcaactcatttctgttccatcagtaatgcatttcattattryttattagataagttctggtgcttgggtgggccaacggactgaaatttagagaatttggtatttcccacagttaggaactgaaaagcattagagtcagactatacaaatatgccaccgaacagcaagtctcagaaacagcatttgaagccttagaagtctgtttttyccccatgattgcagtcaacaggtatctgcatttaatgaagaacrcctaatgcaaaatataaccacagagttctcattctctttctaatccacagtcactaaatagcgcagtaagactataacccatcaacaccattacaaaactcagttttgtataaatgattggcagtacaccacggttgagaggagatagggagggttaccatagcatcaaatgaaggagaaatgagcctaaacacaagatgtgtaatagcagttggcataggcacaaaggcaaattctgttcagtgtatcaggtaca

SEQ ID NO: 39126 - DNA, 600 bp, Chicken  19866894272624_4
gcaattatgcctactttatgggcacacagcagctacagggcacgctcagggtcaaagaagagttctgctacacagccaccaaatctgtccagcaactcatttctgttccatcagtaatgcatttcattattryttattagataagttctggtgcttgggtgggccaacggactgaaatttagagaatttggtatttcccacagttaggaactgaaaagcattagagtcagactatacaaatatgccaccgaacagcaagtctcagaaacagcatttgaagccttagaagtctgtttttcycccatgattgcagtcaacaggtatctgcatttaatgaagaacrcctaatgcaaaatataaccacagagttctcattctctttctaatccacagtcactaaatagcgcagtaagactataacccatcaacaccattacaaaactcagttttgtataaatgattggcagtacaccacggttgagaggagatagggagggttaccatagcatcaaatgaaggagaaatgagcctaaacacaagatgtgtaatagcagttggcataggcacaaaggcaaattctgttcagtgtatcaggtacag

SEQ ID NO: 39127 - DNA, 600 bp, Chicken  19866894272624_5
gctcagggtcaaagaagagttctgctacacagccaccaaatctgtccagcaactcatttctgttccatcagtaatgcatttcattattryttattagataagttctggtgcttgggtgggccaacggactgaaatttagagaatttggtatttcccacagttaggaactgaaaagcattagagtcagactatacaaatatgccaccgaacagcaagtctcagaaacagcatttgaagccttagaagtctgtttttcccccatgattgcagtcaacaggtatctgcatttaatgaagaacrcctaatgcaaaatataaccacagagttctcattctctttctaatccacagtcactaaatagcgcagtaagactataacccatcaacaccattacaaaactcagttttgtataaatgattggcagtacaccacggttgagaggagatagggagggttaccatagcatcaaatgaaggagaaatgagcctaaacacaagatgtgtaatagcagttggcataggcacaaaggcaaattctgttcagtgtatcaggtacaggtaggtgtttccttcttatgcgaaggagagagagagcagcaat

SEQ ID NO: 39128 - DNA, 599 bp, Chicken  19866894272632_1
  misc_feature (1)..(155): n is any nucleotide
nnnnnnnnnnnnnnnnnnnnnnnnnnnnnnnnnnnnnnnnnnnnnnnnnnnnnnnnnnnnnnnnnnnnnnnnnnnnnnnnnnnnnnnnnnnnnnnnnnnnnnnnnnnnnnnnnnnnnnnnnnnnnnnnnnnnnnnnnnnnnnnnnnnnnnnnnnnttttaatgaatatatgaagtttatgcttggttttcgttctttcagtggaaactaaaaagtgagggaaacaaattatattctatctgtagttccgtttaggaatacattgcatctactatatcttcattttatttccttcatatgwtatacataagcagagatttattgatctcctttttatcgttctctctgtattttcctgggaatagatctgcttctaaatcaggcatatattgcagctgtcatcaaatgtttaatgatttttccaattcttgtgtcttgaaataattctgaaaaaagatttatttgtccattagtaccatgttgtttgctcagtggaagaggtaaagtttaaataatgcaactgtaacacaatcttaaaagatttttaaagctgtaatttgtcacaagtggaattactgaaatattattttataaaatcat

SEQ ID NO: 39129 - DNA, 600 bp, Chicken  19866894272649_1
ctctaatcagtcctttttttctgagagaagtcatatatgcttgtgtgtctatacatacctctcctctatgcccatctatacttcatttttaattcatccaagagaatttgtgcagaagaccagtatgtgctgaagatttcagagcacagcatgtctatcagacttgtttgaaccacttggagatttgagccagcctagaattgcattgctctaacagttaaatgtttttggagtttttgacttgctctccctagccttgaattagcttctacttttgtgccgttttttatatattacacygtagaactgtagtttacattactgtactttgtagcagtcagctaaaactggttgagtctggggatttgcaaggatccagtggttaacacaaccacttgcaaatatgcttttatagcacagtccatagtcttaagccatgactatggctcttgaagttcacaacgctctttgcttgtgtggcattaatttaattctgaattattgtgtcatgatatcacaattctgagccraactgggaaacgtaacttgaagagaacatataaatatttatttaataacaagacttaatgtctgtggttt

SEQ ID NO: 39130 - DNA, 600 bp, Chicken  19866894272649_2
gagtttttgacttgctctccctagccttgaattagcttctacttttgtgccgttttttatatattacacygtagaactgtagtttacattactgtactttgtagcagtcagctaaaactggttgagtctggggatttgcaaggatccagtggttaacacaaccacttgcaaatatgcttttatagcacagtccatagtcttaagccatgactatggctcttgaagttcacaacgctctttgcttgtgtggcattaatttaattctgaattattgtgtcatgatatcacaattctgagccraactgggaaacgtaacttgaagagaacatataaatatttatttaataacaagacttaatgtctgtggtttaagacaatgacgcttacaggcagatttcactctacagaatggtgtaggccttaaatgaagctgttttcaaaaatgaaaaaaactctgtattgatgtcattatctgaatagttttaattttataaaagaggaaagagttttcccattccataagacctcatttcacaaaggatttcaaacatgagataggagaaattttaagtgctggtgtcagacatagaagtattcctt

SEQ ID NO: 39131 - DNA, 599 bp, Chicken  19866894272652_1
  misc_feature (1)..(23): n is any nucleotide
nnnnnnnnnnnnnnnnnnnnnnntcagattgcatagattaaagtaagcttttgtagcagcctgaatttggagcatgagtgagcagtgacagcagcccactggtctgaaataaaagatttatttatttatttatttatttataaatcatcagttgggctgaatttcagaatggttcttaattatagatatttgattatagataggtacttctgtgctatctgctgtgttaggaaaactcaggcatcattctttttgcatttatttataaatacctatcacttctcagtccactgtgattcrtgttttcaacatgtctcagctaagatctggttaatagctctgagcaccgctgctgcacttccacctgaattccagccacagtttggtgtacacgtttgtactgtatcctcccagttaaaaycaagatttctccccagccccatgtgataactgaaaatacattgtatttggcatcattctcctgctggaagtgtccgcagtgggagttttgagatgagaagaaacaaaagatattctagcaattaatcacaaattgtgcactgccacaacggacatttcatagacaaccaagaagctga

SEQ ID NO: 39132 - DNA, 600 bp, Chicken  19866894272652_2
ttatttatttatttatttataaatcatcagttgggctgaatttcagaatggttcttaattatagatatttgattatagataggtacttctgtgctatctgctgtgttaggaaaactcaggcatcattctttttgcatttatttataaatacctatcacttctcagtccactgtgattcrtgttttcaacatgtctcagctaagatctggttaatagctctgagcaccgctgctgcacttccacctgaattccagccacagtttggtgtacacgtttgtactgtatcctcccagttaaaaycaagatttctccccagccccatgtgataactgaaaatacattgtatttggcatcattctcctgctggaagtgtccgcagtgggagttttgagatgagaagaaacaaaagatattctagcaattaatcacaaattgtgcactgccacaacggacatttcatagacaaccaagaagctgaaattcattttcattaagttcttccatgaataatttagacttgtaaaagcaaagtcatttgatagctcactgaaagagaagggacgaatttcttctagctctgtcagccagcatgactaattc

SEQ ID NO: 39133 - DNA, 600 bp, Chicken  19866894272653_1
aaatgctttacaaaagacatgtaaaacacctaacctaatcttcagctagtgcatgttcttcatacctaagtgaattattctacttgaaaaagcagcagaaaaattgatatggtgaaattgaaatttaacatagtttgtaatgcagttaagttttccaccagcatataaagttagccattatgttttgcagactctaactatcatatgtatgaatcaccaaggcacactctgctaaagtgttaagggcacagtctaagtaacaaagtaacataaattatgaaaagaaattgaattgtgccwtctctgtggcctgaagtttcaatatcaatgctttagctcctgttctttcagtctttgccacttgtcctgtaacatcacagcggaggaaggarcaaagatgtctggttgctcagttytctactttatgacaggactttggctcgttttgttttcatagagccataaccatggaatcatagaatggtttggattggaaggaaccttcaagatcatcttcttcaccctcctttccacttactagatcagactgcccagggccccatccatccaggccttgaacacctccagggatggggcaac

SEQ ID NO: 39134 - DNA, 600 bp, Chicken  19866894272653_2
cagcagaaaaattgatatggtgaaattgaaatttaacatagtttgtaatgcagttaagttttccaccagcatataaagttagccattatgttttgcagactctaactatcatatgtatgaatcaccaaggcacactctgctaaagtgttaagggcacagtctaagtaacaaagtaacataaattatgaaaagaaattgaattgtgccwtctctgtggcctgaagtttcaatatcaatgctttagctcctgttctttcagtctttgccacttgtcctgtaacatcacagcggaggaaggarcaaagatgtctggttgctcagttytctactttatgacaggactttggctcgttttgttttcatagagccataaccatggaatcatagaatggtttggattggaaggaaccttcaagatcatcttcttcaccctcctttccacttactagatcagactgcccagggccccatccatccaggccttgaacacctccagggatggggcaaccagaacttctctgggcaacctgtgccagtgcctcaccaccccccctctgagtaaaaaaaaaaaaaaaaaaaaaaatcttcctaatatcttat

SEQ ID NO: 39135 - DNA, 600 bp, Chicken  19866894272653_3
attgaaatttaacatagtttgtaatgcagttaagttttccaccagcatataaagttagccattatgttttgcagactctaactatcatatgtatgaatcaccaaggcacactctgctaaagtgttaagggcacagtctaagtaacaaagtaacataaattatgaaaagaaattgaattgtgccwtctctgtggcctgaagtttcaatatcaatgctttagctcctgttctttcagtctttgccacttgtcctgtaacatcacagcggaggaaggarcaaagatgtctggttgctcagttytctactttatgacaggactttggctcgttttgttttcatagagccataaccatggaatcatagaatggtttggattggaaggaaccttcaagatcatcttcttcaccctcctttccacttactagatcagactgcccagggccccatccatccaggccttgaacacctccagggatggggcaaccagaacttctctgggcaacctgtgccagtgcctcaccaccccccctctgagtaaaaaaaaaaaaaaaaaaaaaaatcttcctaatatcttatctaaatctccccctttttcagttt

SEQ ID NO: 39136 - DNA, 599 bp, Chicken  19866894272655_1
  misc_feature (1)..(208): n is any nucleotide
nnnnnnnnnnnnnnnnnnnnnnnnnnnnnnnnnnnnnnnnnnnnnnnnnnnnnnnnnnnnnnnnnnnnnnnnnnnnnnnnnnnnnnnnnnnnnnnnnnnnnnnnnnnnnnnnnnnnnnnnnnnnnnnnnnnnnnnnnnnnnnnnnnnnnnnnnnnnnnnnnnnnnnnnnnnnnnnnnnnnnnnnnnnnnnnnnnnnnnnnnnnnnnnnctttctgggctcgcttgtcatgcaggataataaatcagcgggactttaatggatgaatggacagctaagctggggagcaggctccttccccrtgtcgttaaggtctgcctctgattcgggcaggtttccctggttttcctctttttcagcccaacacatcatccttcagaagttggggttataaataaacamaatagtatgctctctgtcgcttcctggagccatatttttgacccccagagctgtagtgccaggtgagatgtgcacagcaagatgtggccaaggaggtacaggagttgcatatggggacagcctgaaattgaggaattactgcagggaaacgggtgctggcgggccagggacagtgctacagtgccaccagccctagggc

SEQ ID NO: 39137 - DNA, 599 bp, Chicken  19866894272655_2
  misc_feature (1)..(108): n is any nucleotide
nnnnnnnnnnnnnnnnnnnnnnnnnnnnnnnnnnnnnnnnnnnnnnnnnnnnnnnnnnnnnnnnnnnnnnnnnnnnnnnnnnnnnnnnnnnnnnnnnnnnnnnnnnnnctttctgggctcgcttgtcatgcaggataataaatcagcgggactttaatggatgaatggacagctaagctggggagcaggctccttccccrtgtcgttaaggtctgcctctgattcgggcaggtttccctggttttcctctttttcagcccaacacatcatccttcagaagttggggttataaataaacamaatagtatgctctctgtcgcttcctggagccatatttttgacccccagagctgtagtgccaggtgagatgtgcacagcaagatgtggccaaggaggtacaggagttgcatatggggacagcctgaaattgaggaattactgcagggaaacgggtgctggcgggccagggacagtgctacagtgccaccagccctagggcaggagatgggagtggaatcctggggctgagccacctcctgaggtcaaaatggaggaagtcattggtcaaaatggaacatccattatggcagctgggcaat

SEQ ID NO: 39138 - DNA, 600 bp, Chicken  19866894272697_1
aggaaaagcatttagataggatgattttctcaattcttcttgaatgcataaaagaaacaaatgtacattctgagaatttttaatgaatttgagatagctgctgtcagctttgctgtaggatttccactaatggttctgcacagaaggagaggaagatcagaaagggaatatgttggcaaaagggtaggaatgcagattgctaggacaaacactgtaattcagaagagaagggtaaagagtatggaagtgattgatacagatggagtaggaaacccagcacgtgtctcctgcacagggtgygttgtttgtctttatgtcaggaaggggccatgcatgttttttcaagtgagcactggggagagaaattgagtacagatcagatgaatcaatgattggcaaagaccaaatgaaaaatccttgagacaagtaaaagagggttaacaagagagcacgggcaaggraatgtgcagctaataggtcatcaagctgaaatcatgcaagtaagtgggaaaagcttggaggggaagaggragatgggctttcaaatcagagtggaaggctgatggtggrtgatggatgagacagtgcaaaagagaagaa

SEQ ID NO: 39139 - DNA, 600 bp, Chicken  19866894272697_2
aagggaatatgttggcaaaagggtaggaatgcagattgctaggacaaacactgtaattcagaagagaagggtaaagagtatggaagtgattgatacagatggagtaggaaacccagcacgtgtctcctgcacagggtgygttgtttgtctttatgtcaggaaggggccatgcatgttttttcaagtgagcactggggagagaaattgagtacagatcagatgaatcaatgattggcaaagaccaaatgaaaaatccttgagacaagtaaaagagggttaacaagagagcacgggcaaggraatgtgcagctaataggtcatcaagctgaaatcatgcaagtaagtgggaaaagcttggaggggaagaggragatgggctttcaaatcagagtggaaggctgatggtggrtgatggatgagacagtgcaaaagagaagaaaagagttggagccaggactgcttagaacaggaaagatgcagaagtagaagcagcagaaataggccaaggcattagcattccctgtaccttacccacaagaaggatgggtgaaaaacagtgctttctggaggagaattcttcatgaatcttcagkgtgatat

SEQ ID NO: 39140 - DNA, 600 bp, Chicken  19866894272697_3
gtaaagagtatggaagtgattgatacagatggagtaggaaacccagcacgtgtctcctgcacagggtgygttgtttgtctttatgtcaggaaggggccatgcatgttttttcaagtgagcactggggagagaaattgagtacagatcagatgaatcaatgattggcaaagaccaaatgaaaaatccttgagacaagtaaaagagggttaacaagagagcacgggcaaggraatgtgcagctaataggtcatcaagctgaaatcatgcaagtaagtgggaaaagcttggaggggaagaggragatgggctttcaaatcagagtggaaggctgatggtggrtgatggatgagacagtgcaaaagagaagaaaagagttggagccaggactgcttagaacaggaaagatgcagaagtagaagcagcagaaataggccaaggcattagcattccctgtaccttacccacaagaaggatgggtgaaaaacagtgctttctggaggagaattcttcatgaatcttcagkgtgatatgtctgacatagccatcatggactgttgtattctgtctcccctccacctccatatcaagtgtttcagtcaa

SEQ ID NO: 39141 - DNA, 600 bp, Chicken  19866894272697_4
aacccagcacgtgtctcctgcacagggtgygttgtttgtctttatgtcaggaaggggccatgcatgttttttcaagtgagcactggggagagaaattgagtacagatcagatgaatcaatgattggcaaagaccaaatgaaaaatccttgagacaagtaaaagagggttaacaagagagcacgggcaaggraatgtgcagctaataggtcatcaagctgaaatcatgcaagtaagtgggaaaagcttggaggggaagaggragatgggctttcaaatcagagtggaaggctgatggtggrtgatggatgagacagtgcaaaagagaagaaaagagttggagccaggactgcttagaacaggaaagatgcagaagtagaagcagcagaaataggccaaggcattagcattccctgtaccttacccacaagaaggatgggtgaaaaacagtgctttctggaggagaattcttcatgaatcttcagkgtgatatgtctgacatagccatcatggactgttgtattctgtctcccctccacctccatatcaagtgtttcagtcaaagcaacagtacaaagtcagtacagatgacatgcgtagat

SEQ ID NO: 39142 - DNA, 600 bp, Chicken  19866894272697_5
gcaaggraatgtgcagctaataggtcatcaagctgaaatcatgcaagtaagtgggaaaagcttggaggggaagaggragatgggctttcaaatcagagtggaaggctgatggtggrtgatggatgagacagtgcaaaagagaagaaaagagttggagccaggactgcttagaacaggaaagatgcagaagtagaagcagcagaaataggccaaggcattagcattccctgtaccttacccacaagaaggatgggtgaaaaacagtgctttctggaggagaattcttcatgaatcttcagkgtgatatgtctgacatagccatcatggactgttgtattctgtctcccctccacctccatatcaagtgtttcagtcaaagcaacagtacaaagtcagtacagatgacatgcgtagataatacattctcacttgcttgtgcatctccttaaaatacagctgaagaaagcatagcaactattactatatttaaaattaaatattatttattaaaacagacaaactccaaatctgcagggtttctgtcattctagcgaacaggaatttctcctaatctttgttcataccagaggatgtcatgct

SEQ ID NO: 39143 - DNA, 600 bp, Chicken  19866894272701_1
aagaactatttactaaaaaaaggattaaaaaaaaagggggggaaggaataaaaaatagaaagaatgttatgatagctatatatcttactatatatatttatatataaacttactacctgctgactgatgccctactagcaatgctatgtctcactcctccactgactgatgcctagctaatccccaaacagtacctggttcctgccaacttcctacagttttatattcttccacatgccctgcctcactcctgtcagcatcattgtagctaaactgaggaagtgtggtctggttgattgrgtagtgaggtggacagtgaagtggctgaaggaaacaagccagagagttgtggtcaatgggacasagcctagttggaggcctgtgtctagtggagtccctcaagggttggtattgggacaagtactattcattacattcatcggtgacttagatgagggagtagagtgtgctatcagcaagtttgcagatgacacaaaactgggaggagtggctgacatgccagaaggctgtgctgctatcctatgagacctagacaggctggagaaatgagtgtggagaaacttaatgaaatataacaag

SEQ ID NO: 39144 - DNA, 600 bp, Chicken  19866894272701_2
tgttatgatagctatatatcttactatatatatttatatataaacttactacctgctgactgatgccctactagcaatgctatgtctcactcctccactgactgatgcctagctaatccccaaacagtacctggttcctgccaacttcctacagttttatattcttccacatgccctgcctcactcctgtcagcatcattgtagctaaactgaggaagtgtggtctggttgattgrgtagtgaggtggacagtgaagtggctgaaggaaacaagccagagagttgtggtcaatgggacasagcctagttggaggcctgtgtctagtggagtccctcaagggttggtattgggacaagtactattcattacattcatcggtgacttagatgagggagtagagtgtgctatcagcaagtttgcagatgacacaaaactgggaggagtggctgacatgccagaaggctgtgctgctatcctatgagacctagacaggctggagaaatgagtgtggagaaacttaatgaaatataacaaggacaactgtagagtcttgcatctgggcaagaacaaccccaagtatcagtacaggttgtggactg

SEQ ID NO: 39145 - DNA, 599 bp, Chicken  19866894272714_1
  misc_feature (1)..(153): n is any nucleotide
nnnnnnnnnnnnnnnnnnnnnnnnnnnnnnnnnnnnnnnnnnnnnnnnnnnnnnnnnnnnnnnnnnnnnnnnnnnnnnnnnnnnnnnnnnnnnnnnnnnnnnnnnnnnnnnnnnnnnnnnnnnnnnnnnnnnnnnnnnnnnnnnnnnnnnnnntgttcggggccctgcaggtgggatattatgtatggctgtttgatagccctgaagggcagagttcttgctctccggccttccttcctttgcaccctacgagtcagtgctgaacactgtgctcctcctgatggtgcttcagggctcctygtgcagagctccatgctgcagcacagccctgaagacaagggcacatctctgctgaaggcaccgctgctgcactccgaccaccagactgaagtagtggctgcactcctccgaaggcaccacakgtgttgggtatgtagcaccrtttctttactggtgttggtaagaaagaaagggtgtcgtatggtggccgcaggctgctggggatctgtgtatcccttctaaagagacagcragagttagccaggatgagcaaggcttctggcactcgctcaacgattacagtggttctgcagggtgac

SEQ ID NO: 39146 - DNA, 599 bp, Chicken  19866894272714_2
  misc_feature (1)..(31): n is any nucleotide
nnnnnnnnnnnnnnnnnnnnnnnnnnnnnnntgttcggggccctgcaggtgggatattatgtatggctgtttgatagccctgaagggcagagttcttgctctccggccttccttcctttgcaccctacgagtcagtgctgaacactgtgctcctcctgatggtgcttcagggctcctygtgcagagctccatgctgcagcacagccctgaagacaagggcacatctctgctgaaggcaccgctgctgcactccgaccaccagactgaagtagtggctgcactcctccgaaggcaccacakgtgttgggtatgtagcaccrtttctttactggtgttggtaagaaagaaagggtgtcgtatggtggccgcaggctgctggggatctgtgtatcccttctaaagagacagcragagttagccaggatgagcaaggcttctggcactcgctcaacgattacagtggttctgcagggtgacagcagttctgctatcagcccgcagggagcagcagcagagcggcacggggctgctttcctcccggagcccctcggggctggcagcgcccaggaatggatctgcagacccccaggagggaaggc

SEQ ID NO: 39147 - DNA, 599 bp, Chicken  19866894272714_3
  misc_feature (1)..(11): n is any nucleotide
nnnnnnnnnnntgttcggggccctgcaggtgggatattatgtatggctgtttgatagccctgaagggcagagttcttgctctccggccttccttcctttgcaccctacgagtcagtgctgaacactgtgctcctcctgatggtgcttcagggctcctygtgcagagctccatgctgcagcacagccctgaagacaagggcacatctctgctgaaggcaccgctgctgcactccgaccaccagactgaagtagtggctgcactcctccgaaggcaccacakgtgttgggtatgtagcaccrtttctttactggtgttggtaagaaagaaagggtgtcgtatggtggccgcaggctgctggggatctgtgtatcccttctaaagagacagcragagttagccaggatgagcaaggcttctggcactcgctcaacgattacagtggttctgcagggtgacagcagttctgctatcagcccgcagggagcagcagcagagcggcacggggctgctttcctcccggagcccctcggggctggcagcgcccaggaatggatctgcagacccccaggagggaaggcacgaccccaccgacctgagg

SEQ ID NO: 39148 - DNA, 600 bp, Chicken  19866894272714_4
ccttcctttgcaccctacgagtcagtgctgaacactgtgctcctcctgatggtgcttcagggctcctygtgcagagctccatgctgcagcacagccctgaagacaagggcacatctctgctgaaggcaccgctgctgcactccgaccaccagactgaagtagtggctgcactcctccgaaggcaccacakgtgttgggtatgtagcaccrtttctttactggtgttggtaagaaagaaagggtgtcgtatggtggccgcaggctgctggggatctgtgtatcccttctaaagagacagcragagttagccaggatgagcaaggcttctggcactcgctcaacgattacagtggttctgcagggtgacagcagttctgctatcagcccgcagggagcagcagcagagcggcacggggctgctttcctcccggagcccctcggggctggcagcgcccaggaatggatctgcagacccccaggagggaaggcacgaccccaccgacctgagggcatcacaccgtgctggggagtgagcacagccggggctgtccgcgtggccacatctgagcagggcgagatctcgtgtgacagccacagccc

SEQ ID NO: 39149 - DNA, 599 bp, Chicken  19866894272720_1
  misc_feature (1)..(26): n is any nucleotide
nnnnnnnnnnnnnnnnnnnnnnnnnncaccacaaaaggtggattaatgcattgttctgagcatatcattgtgggtttttctcctttttctttttttcttaattcaaaatagaacaactctgaaagaactttctcaggctaatcaattgcaaagaaatagatataattatcataatcatcactattattattattattactctattattactatcacagttatctgtcaaaacatccaatagctcagttgtagaaagtccctaaggacacacaggaaagaaaaatccgatttccaattatyctgtttgagctaaaatacttccattgttagcgggcctgttctacaacactggagagactggatctccctgatggagaaatgccggagmggtctttgccatggaaaagtgaaactggcaggtgcagaatggccaaaccaaacagatgcaaaccaaacacacacaaggatatctgaaggatgctaattgctgtctactgctgaggcaaattactgggaccgacatcctgctcctctctcagatatccagaatctatgctcacaggatgtgcatttcgtaacagttatagcacttagagaaa

SEQ ID NO: 39150 - DNA, 600 bp, Chicken  19866894272720_2
ctttttttcttaattcaaaatagaacaactctgaaagaactttctcaggctaatcaattgcaaagaaatagatataattatcataatcatcactattattattattattactctattattactatcacagttatctgtcaaaacatccaatagctcagttgtagaaagtccctaaggacacacaggaaagaaaaatccgatttccaattatyctgtttgagctaaaatacttccattgttagcgggcctgttctacaacactggagagactggatctccctgatggagaaatgccggagmggtctttgccatggaaaagtgaaactggcaggtgcagaatggccaaaccaaacagatgcaaaccaaacacacacaaggatatctgaaggatgctaattgctgtctactgctgaggcaaattactgggaccgacatcctgctcctctctcagatatccagaatctatgctcacaggatgtgcatttcgtaacagttatagcacttagagaaaaaaacatgggttcatgagcctactttttatatttcttgattaaggatgtgggcccacaactctgatgtcacctgctgtttctccctgct

SEQ ID NO: 39151 - DNA, 599 bp, Chicken  19866894272724_1
  misc_feature (1)..(2): n is any nucleotide
nnttgtaaagcatgcgtggttttttctgtattgttttatgttgctggaaataatgggaagggaaagctccccaactgcagattttgattgtggaagaactgagctgtgtatgtttgtttactcatggattgttaaaggcttcagttgcatcattccttagaggtagggcagatacgaaagcatctgttcccttttgttgtggcctcctgactgtgacatgggcatgcgatgctgaattgagctctgtaaacttggtaagggtgttttgttgactggaagagattgttcttccttctttgwatacaacacaaggttggtgttttgaggggaggagaatgtggagatgatgagtgatgaagttggttgctctggctggctgttcattcttcaagtgtgtatgtatttatgccattttatcctcctgtgcattgagctactgtgagagagatcatgaaggcagagaaaaattcaggcgttgtacagatattgtgagtgtctgcatctttcatttatctctaatccaccattttcaaaaatatgagatttctcatattgtctatgattacattgagaaattcattattctaggttgtgaagct

SEQ ID NO: 39152 - DNA, 600 bp, Chicken  19866894272725_1
agatagtgtatgggatgctaaggtacaggcccaaggcagacagtccccaggttgtcttccagccttgcgacagcaagattggtagctgatgtattgcttctctatcctgagatgtgcaggctccaaattgtcctggtgtatccaagtctttgtgagccccaagaacactttctggctgtgatctaaggcagggggaagaaaagatgccttgagacttctctcttggcaccccagctgacgttacacatctgcaagagcggctcccggaatacaggatcatgcagcagggccaggaacagrggaggacaggaacagtatttggtcaggtgtgcagctgttgaatggtcaggtctgtaaagagagaaacctgttagtgcaagcttgactgtcgttctccagtcgttttcagtgcatggatgaatccatactcttaatttcaacttcccccaatggccacatgtctgccataacctgtgaacgcccaccttgcagtcacagtgtgcgggtgcagttgcgtgcccaagcaaggggaatgggccttgttgtccatgcttgcattcaggtagaaaaaaaatataggaaaagcaacaccaagatggt

SEQ ID NO: 39153 - DNA, 600 bp, Chicken  19866894272731_1
gaatacttgtgccaattaattcacttgtgaagagattgccaggaagcaaaagcaatagctagtccagtcccaagaagcctgaaaatctgctacgtatgtatttatataatgtctgcatgcaggtgccaagacatagctcagggcaccaacacagggataatagacttaactaccacaaactgcaaacaaatatgcttcaaaatcttaggagaaagtttacaaaggcctcatttttcaccacattttctaaatgtagccgattctgagcacccgatgcagatcaccaggtatcccagaacrygctgttaatcactggctccattcagacagctccgagcaatgctgaaaagccgtgagacattcttcagtggcccagttaaagtaaaacagaggctgatctcagaacaaagggcttgtcaagaagcaataatttcttgaggacagagtaatacaacctgcttcattcttgggcagctaacggtgtgtgacgatatcatccagctcctgctaacagcaaatgaaccaagccagggctgcgggaggtggcactgccagccaagcaggcagctgctccaatggcaccgttctcatgtccacggc

SEQ ID NO: 39154 - DNA, 600 bp, Chicken  19866894272731_2
aatacttgtgccaattaattcacttgtgaagagattgccaggaagcaaaagcaatagctagtccagtcccaagaagcctgaaaatctgctacgtatgtatttatataatgtctgcatgcaggtgccaagacatagctcagggcaccaacacagggataatagacttaactaccacaaactgcaaacaaatatgcttcaaaatcttaggagaaagtttacaaaggcctcatttttcaccacattttctaaatgtagccgattctgagcacccgatgcagatcaccaggtatcccagaacrygctgttaatcactggctccattcagacagctccgagcaatgctgaaaagccgtgagacattcttcagtggcccagttaaagtaaaacagaggctgatctcagaacaaagggcttgtcaagaagcaataatttcttgaggacagagtaatacaacctgcttcattcttgggcagctaacggtgtgtgacgatatcatccagctcctgctaacagcaaatgaaccaagccagggctgcgggaggtggcactgccagccaagcaggcagctgctccaatggcaccgttctcatgtccacggct

SEQ ID NO: 39155 - DNA, 600 bp, Chicken  19866894272731_3
ctgcaactccagtgatggaacagtcgtatttcgtagaatcatagaatcatttgagttggaagggacccttaaaggccatcaaggccaacttccctgcagtgaacagggacatccacagctcaatcagtttgctcagagctccatccagtctgaccttgagtgactccagggacagggcatccaccacctctctgggcaacctgtttcagtgcctcactttttctaatggatcaaaaataccttccttaccacagatttatcttaccactcacttagggagagggaagtttgaaccaaagygtaagaactgagttggagaattgtggtcagtaagccgtggacttgttcctgggccaccaaatggtggcacaagggttgggtgacacgtggcatakagtgagagatgaagtgaggttccagtgtgactgcagagggctttgctctctcacagatttcctgcgtgatgctgagtgctctctttatgtctcaccatctcacccttggctgcttgtttgcttaaattgaaaattgtcccatggatctgtatccttctatgcataccctgttaacctctttcttaaatttatttgctgctaggaa

SEQ ID NO: 39156 - DNA, 600 bp, Chicken  19866894272731_4
gcagtgaacagggacatccacagctcaatcagtttgctcagagctccatccagtctgaccttgagtgactccagggacagggcatccaccacctctctgggcaacctgtttcagtgcctcactttttctaatggatcaaaaataccttccttaccacagatttatcttaccactcacttagggagagggaagtttgaaccaaagygtaagaactgagttggagaattgtggtcagtaagccgtggacttgttcctgggccaccaaatggtggcacaagggttgggtgacacgtggcatakagtgagagatgaagtgaggttccagtgtgactgcagagggctttgctctctcacagatttcctgcgtgatgctgagtgctctctttatgtctcaccatctcacccttggctgcttgtttgcttaaattgaaaattgtcccatggatctgtatccttctatgcataccctgttaacctctttcttaaatttatttgctgctaggaatcccttggttttgattaactttgaatttgcataataagagagactgaattttagactgcatataaggaaaacattttttatcataaggatagttg

SEQ ID NO: 39157 - DNA, 600 bp, Chicken  19866894272731_5
gaaaacattttttatcataaggatagttgggcactggaacaggttgcccagagatgtgatgggtgccccacccttggagacatccaaggccaggctggggggtctctaagcaatctgactggactgtaggtgtccctgttcacttcaggggagttggtctggatggctacagtggaaatgctaagtcatggtttgaagtaatgagtgagactttggggctgcagctgttgttctgctttgaccttttggcagaaatgttttgccctgtctcaaatgaaaagcaaccatacatccatcagycatacacttctagaataaagtgtgatgcaccaaccctgcaggcagcatgtggattcaggagccagtgcagaggcagcagtgctattcatagcaattgcagatgtagcattgctctttgatgagcttccaggtggacagcttgcacatcaggcacaaatcacagggagcagcaggttttcacctgtgtgggctgccctgaggaagtgtttcctggtaattcacagaggattataaaatattgcccaaaactgcatgcagtgcatgactaaggggcagagcaaacaaaatttgccctttctg

SEQ ID NO: 39158 - DNA, 599 bp, Chicken  19866894272735_1
  misc_feature (1)..(119): n is any nucleotide
nnnnnnnnnnnnnnnnnnnnnnnnnnnnnnnnnnnnnnnnnnnnnnnnnnnnnnnnnnnnnnnnnnnnnnnnnnnnnnnnnnnnnnnnnnnnnnnnnnnnnnnnnnnnnnnnnnnnnnnttttaatctattacatactaagaggaagaattctcatctcatatctcctcttgaaaacgttgtccacatctcagttttaaaaatatttttgtttaggaaacacactccaccaatcataactgaaattatttaaaataataggaacttcgttagattaatgagcagcgctaatgtggacacrgttctgcagcttagtggttgagactttcactgggaaagacctgggaaagtaaatcttaacacagtcagaatgcttgttataatrtatatttaattgacattgtggagcaaaatcttccatctcaaacatgagatacaaaaccgtataaaacaracaaagacgggatagttaacaaagctttgaaatgaaaaataacagtatgtggctraagggttgtygagaattagacatctttgatagaaaggctcagaagaaaccatgctccyggagctttcaatagccctgaacataaactattg

SEQ ID NO: 39159 - DNA, 599 bp, Chicken  19866894272735_2
  misc_feature (1)..(35): n is any nucleotide
nnnnnnnnnnnnnnnnnnnnnnnnnnnnnnnnnnnttttaatctattacatactaagaggaagaattctcatctcatatctcctcttgaaaacgttgtccacatctcagttttaaaaatatttttgtttaggaaacacactccaccaatcataactgaaattatttaaaataataggaacttcgttagattaatgagcagcgctaatgtggacacrgttctgcagcttagtggttgagactttcactgggaaagacctgggaaagtaaatcttaacacagtcagaatgcttgttataatrtatatttaattgacattgtggagcaaaatcttccatctcaaacatgagatacaaaaccgtataaaacaracaaagacgggatagttaacaaagctttgaaatgaaaaataacagtatgtggctraagggttgtygagaattagacatctttgatagaaaggctcagaagaaaccatgctccyggagctttcaatagccctgaacataaactattggtcactcaagaactctagcctcagatgagacagattcacttccttctgacctctaaggagttccctatgcaccttttcatcagt

SEQ ID NO: 39160 - DNA, 600 bp, Chicken  19866894272735_3
catctcatatctcctcttgaaaacgttgtccacatctcagttttaaaaatatttttgtttaggaaacacactccaccaatcataactgaaattatttaaaataataggaacttcgttagattaatgagcagcgctaatgtggacacrgttctgcagcttagtggttgagactttcactgggaaagacctgggaaagtaaatcttaacacagtcagaatgcttgttataatrtatatttaattgacattgtggagcaaaatcttccatctcaaacatgagatacaaaaccgtataaaacaracaaagacgggatagttaacaaagctttgaaatgaaaaataacagtatgtggctraagggttgtygagaattagacatctttgatagaaaggctcagaagaaaccatgctccyggagctttcaatagccctgaacataaactattggtcactcaagaactctagcctcagatgagacagattcacttccttctgacctctaaggagttccctatgcaccttttcatcagtgattgaatgtgaggatcaagaggcaatgcttggaattttgagtgtttttgtatacttagaaaaaaaataa

SEQ ID NO: 39161 - DNA, 600 bp, Chicken  19866894272735_4
tgtttaggaaacacactccaccaatcataactgaaattatttaaaataataggaacttcgttagattaatgagcagcgctaatgtggacacrgttctgcagcttagtggttgagactttcactgggaaagacctgggaaagtaaatcttaacacagtcagaatgcttgttataatrtatatttaattgacattgtggagcaaaatcttccatctcaaacatgagatacaaaaccgtataaaacaracaaagacgggatagttaacaaagctttgaaatgaaaaataacagtatgtggctraagggttgtygagaattagacatctttgatagaaaggctcagaagaaaccatgctccyggagctttcaatagccctgaacataaactattggtcactcaagaactctagcctcagatgagacagattcacttccttctgacctctaaggagttccctatgcaccttttcatcagtgattgaatgtgaggatcaagaggcaatgcttggaattttgagtgtttttgtatacttagaaaaaaaataaccatacagctgcaaacacataaggagaaaattggcctccacagtctcaattaaat

SEQ ID NO: 39162 - DNA, 600 bp, Chicken  19866894272735_5
acacactccaccaatcataactgaaattatttaaaataataggaacttcgttagattaatgagcagcgctaatgtggacacrgttctgcagcttagtggttgagactttcactgggaaagacctgggaaagtaaatcttaacacagtcagaatgcttgttataatrtatatttaattgacattgtggagcaaaatcttccatctcaaacatgagatacaaaaccgtataaaacaracaaagacgggatagttaacaaagctttgaaatgaaaaataacagtatgtggctraagggttgtygagaattagacatctttgatagaaaggctcagaagaaaccatgctccyggagctttcaatagccctgaacataaactattggtcactcaagaactctagcctcagatgagacagattcacttccttctgacctctaaggagttccctatgcaccttttcatcagtgattgaatgtgaggatcaagaggcaatgcttggaattttgagtgtttttgtatacttagaaaaaaaataaccatacagctgcaaacacataaggagaaaattggcctccacagtctcaattaaatatacactata

SEQ ID NO: 39163 - DNA, 578 bp, Chicken  19866894272735_6
cgttagattaatgagcagcgctaatgtggacacrgttctgcagcttagtggttgagactttcactgggaaagacctgggaaagtaaatcttaacacagtcagaatgcttgttataatrtatatttaattgacattgtggagcaaaatcttccatctcaaacatgagatacaaaaccgtataaaacaracaaagacgggatagttaacaaagctttgaaatgaaaaataacagtatgtggctraagggttgtygagaattagacatctttgatagaaaggctcagaagaaaccatgctccyggagctttcaatagccctgaacataaactattggtcactcaagaactctagcctcagatgagacagattcacttccttctgacctctaaggagttccctatgcaccttttcatcagtgattgaatgtgaggatcaagaggcaatgcttggaattttgagtgtttttgtatacttagaaaaaaaataaccatacagctgcaaacacataaggagaaaattggcctccacagtctcaattaaatatacactatagcaagcattctgactatgttaagatt

SEQ ID NO: 39164 - DNA, 600 bp, Chicken  19866894272746_1
tctgtggatcagagaatcattgtgagctcagactgaaaacactgctgataacctttgataaaagcccactggagaagccgacattcacctgagcagcaacagacagcacaaacaatacttgtgctttacagctccattagaactgatggaatcaagccgcagtctgtattttccaaacaccgttcagcatccagcagggctttatgtggagcctgaggaataagacaggctgtgtcccttcccacctcctcacactgtgactccagcacttgagaacaggaggttcccccctctctggaygtcacccattgtcccttttgagactgaacccggggctcagggggtggctgctcccaccctgaccggctctgcccattcacatcacccaggagcacccagagggaccacagcttcactgcccttcaatgcaccaaacacttcagttccaaatgacctgaagttatcaggcagagaatagacagatacggggaaggctgtcgtaacagaagcagttgctgatatttattctatttaaaggaccggcaccaagctggctgctgccatcaccaaaaggtgacgatcctgacctcaaagagccag

SEQ ID NO: 39165 - DNA, 600 bp, Chicken  19866894272759_1
gcagggaccgaagaactgcagtagctgaacaagtaaatcattttaggctgtgaggagcagactcttacacccactgggaatcctttgaacttcagtagaaggggttgggatctacactagcaaactgccttgcagggctgtcatctgcaaattgaatttttgctgtaggggagaatcagcactagaaacatatgtaacatgtgacctttgattttattattccttgttacacttccacagacttttttgttactgattttatttggaaggaagtattttccctggttttccagttcaaawgatatgtaatttcactgcaaatgtagtattgcgtcctagttgtctgcagaataattttttcctccttaaaaaatggaagttgtttgccccagcagagtgaaatgccgctgtcagaattagtgatcctcagtctgcgttccgttgtaccacagcatcaaaaagatcagttccctttgcttggagtcatctgtgttgaagaactgcctcgcagagcaaggtggtacgacttggaggtttcagtggaagagaacagctcatttttttcaggcactatctgggtgctttttcatgagtcaaaac

SEQ ID NO: 39166 - DNA, 599 bp, Chicken  19866894272764_1
  misc_feature (1)..(139): n is any nucleotide
nnnnnnnnnnnnnnnnnnnnnnnnnnnnnnnnnnnnnnnnnnnnnnnnnnnnnnnnnnnnnnnnnnnnnnnnnnnnnnnnnnnnnnnnnnnnnnnnnnnnnnnnnnnnnnnnnnnnnnnnnnnnnnnnnnnnnnnnnnnatcaatattaagtaatagttacctgaatgccccttgcatgagaaatgctttttctaggcacacagtgcaaggtttcttttttctccactaatatatgcatttggcttcagggtataaaagtaggcaacaaactggacatattgccaaataaaaaaactcakgagaactgatagctggttagtaacaacattcgtaaatgtttctgaatacagcgcaacttttggagttgctacgtttattttagcagttgatcaatagacctaccaccaaggtgaagctgtgttcaggaagaatcccatacagttcaacaagctttgctctcttcacactgggaaggtcaggaagtctctcatgaatccaatcgatatttaccacttgctgatggttcacattagctggcaaagatttagcatcgtatagaatcaatgggggaagatttggctctggcataaacctaaag

SEQ ID NO: 39167 - DNA, 600 bp, Chicken  19866894272764_2
atagctggttagtaacaacattcgtaaatgtttctgaatacagcgcaacttttggagttgctacgtttattttagcagttgatcaatagacctaccaccaaggtgaagctgtgttcaggaagaatcccatacagttcaacaagctttgctctcttcacactgggaaggtcaggaagtctctcatgaatccaatcgatatttaccacttgctgatggttcacattagctggcaaagatttagcatcgtatagaatcaatgggggaagatttggctctggcataaacctaaagatgaagaaraacttctttaggaatactgtcagtcaaaagctaaacaagaaggaagaaaatacatacaatagctttatgctgacttgcacattacattgttacctttaacaaaatattaaaaattcatgatggtatgtcagtggtaagcagtaagagatcggttcatcagctgtagcaaagtccctattctcttaagtatttgcaactatttgtcaaagtcaatgatagaaaaagagtaattacattaacaatagcaataaaaacgatagttatggaaacaacctgttccttttggcatcaagcatgaat

SEQ ID NO: 39168 - DNA, 600 bp, Chicken  19866894272764_3
agttatggaaacaacctgttccttttggcatcaagcatgaattgtagatctagacaaaaatgggagtgggctggcagggagaaacccagattgacagccaaccgccaggagtgatttgggcaggctgcgaccttttccatgctgacttcaaaaaccttgatgaaagcccatgctgtgctaaaagcaaagttactgcgctcatcagggtgtcaccacagaacaaaaggctcgcttaaagacaaggccaattcagaccactgcaataactttgcagctgaagcagaaacctcactttcacaygatcaaccgaaaggttcaaaaatctcaggacaagggacatgaaacaccctctaaaatttttatttcagatctgtctgagcatagatcttaagtctgatgcataatgtgcaagcagtaatttacaaaaaatctgagaaaacagtttaatactaatcataatcttagcactactaataatctctctggtcttcatttgaagtatcttggactcaccggttttgcccaggtttgcctgagttttcttttgcatttgttcaaactagccttgttaaataagtcagcaactaccacattaaggaa

SEQ ID NO: 39169 - DNA, 600 bp, Chicken  19866894272767_1
ctgggtgggaaggcttctcccatagctgtgaatcactcctttttgacagcaatcaaaagagaaaaatcctaattttaggacatatgctagacctcggcttttctaacccaacagtatgctccccaaataacctcacattgcaaatagctatgactaatgtgttggctttgctgcatgagcagcaggtgcaggttagagaagtgacctggctcagcatcccttagcccagtgctcctctccttgcccagtatggcagatgcccaggtaacttgtctatcactgagaaagcactaggagacrctggactctaattaccrtttaccttggccagtagaatccacctgaggatctcaaactattttgcatgaagagcttaagtgatgctgagagtaaaatgggrgtaaagtcactccatgagaaatatcagggagatgacttgagtgaaacttttggattgtgtgaatgcagccctctgtccagggcagccagctctcctttctcacaagtactgacttctttcaattacagattgactttctcacagtcttcccgcrcatcttgactcttacatttctacagactgcagcaatggactgatcc

SEQ ID NO: 39170 - DNA, 600 bp, Chicken  19866894272767_2
tcccatagctgtgaatcactcctttttgacagcaatcaaaagagaaaaatcctaattttaggacatatgctagacctcggcttttctaacccaacagtatgctccccaaataacctcacattgcaaatagctatgactaatgtgttggctttgctgcatgagcagcaggtgcaggttagagaagtgacctggctcagcatcccttagcccagtgctcctctccttgcccagtatggcagatgcccaggtaacttgtctatcactgagaaagcactaggagacrctggactctaattaccrtttaccttggccagtagaatccacctgaggatctcaaactattttgcatgaagagcttaagtgatgctgagagtaaaatgggrgtaaagtcactccatgagaaatatcagggagatgacttgagtgaaacttttggattgtgtgaatgcagccctctgtccagggcagccagctctcctttctcacaagtactgacttctttcaattacagattgactttctcacagtcttcccgcrcatcttgactcttacatttctacagactgcagcaatggactgatccttccattgatcaccctc

SEQ ID NO: 39171 - DNA, 600 bp, Chicken  19866894272767_3
ttctaacccaacagtatgctccccaaataacctcacattgcaaatagctatgactaatgtgttggctttgctgcatgagcagcaggtgcaggttagagaagtgacctggctcagcatcccttagcccagtgctcctctccttgcccagtatggcagatgcccaggtaacttgtctatcactgagaaagcactaggagacrctggactctaattaccrtttaccttggccagtagaatccacctgaggatctcaaactattttgcatgaagagcttaagtgatgctgagagtaaaatgggrgtaaagtcactccatgagaaatatcagggagatgacttgagtgaaacttttggattgtgtgaatgcagccctctgtccagggcagccagctctcctttctcacaagtactgacttctttcaattacagattgactttctcacagtcttcccgcrcatcttgactcttacatttctacagactgcagcaatggactgatccttccattgatcaccctctcgactcagaaggaccttgaagagcaagtgtcgagttatctgtctacacctttcacaaaagggacttgtcagagtgatagatt

SEQ ID NO: 39172 - DNA, 600 bp, Chicken  19866894272767_4
agatgcccaggtaacttgtctatcactgagaaagcactaggagacrctggactctaattaccrtttaccttggccagtagaatccacctgaggatctcaaactattttgcatgaagagcttaagtgatgctgagagtaaaatgggrgtaaagtcactccatgagaaatatcagggagatgacttgagtgaaacttttggattgtgtgaatgcagccctctgtccagggcagccagctctcctttctcacaagtactgacttctttcaattacagattgactttctcacagtcttcccgcrcatcttgactcttacatttctacagactgcagcaatggactgatccttccattgatcaccctctcgactcagaaggaccttgaagagcaagtgtcgagttatctgtctacacctttcacaaaagggacttgtcagagtgatagattttcaaacacaatagggtaaacctgtcgaagtgttgtgatcattctctctcatgctctttttctttctctctctcgttcctttcactctattctctcatagacttttagggtaattgcatgaaataattcttgctctgaaatgcagtggcattca

SEQ ID NO: 39173 - DNA, 600 bp, Chicken  19866894272769_1
ttccagaaatggatttggatgaacttggaatctccaactcatactccacaaaagagtggcattgaacacctctttaacctaaccctgacttaccggcgtgattcagatattcaggtgccttatggctccatgatagttggtacaggcgcctttacatatgaagtgccaagtaaagaaaatttggtttgttgggttgtaagtaactggaaccctgagcatgctcgagtcaagtattacaatgagcttagcaagtacattgaaatccatacctacgggcaagcctttggagactacgtcaaygataaaaacttaattccaactatctccagttgcaaattctacctttcatttgaaaattcaatccacaaagattacattactgagaaactttacaatgctcttctggctggatcagtaccagttgtactgggcccttccagagaaaactacgagaattacattccagcagactcttttatccacgtggaagattttctatccccaagagagcttgcagaatatcttctgatgcttgacaaaaataacaagatgtaccttagttacttcaactggaggaaggatttctcagtgcatcttcct

SEQ ID NO: 39174 - DNA, 599 bp, Chicken  19866894272771_1
  misc_feature (1)..(111): n is any nucleotide
nnnnnnnnnnnnnnnnnnnnnnnnnnnnnnnnnnnnnnnnnnnnnnnnnnnnnnnnnnnnnnnnnnnnnnnnnnnnnnnnnnnnnnnnnnnnnnnnnnnnnnnnnnnnnnnttttttttttttttcctctcttgtcagagcaccactgaaagtagtacctactgttactagcagaaggcaaagtccagtgtcccgtacctattggcagtgatttatggtgggctgccagcagactgcagcaaaaatcatgcagcaaaacccagagattgttactagagcaatgacacaggtggtcaagaygtgaagyggggtgaatggttgattgtcacagcatgggcactgggttgggttcccaagggtggccacctttttgacatatatccattctgtcttctttgtgttgtctgccctttttgaagaaggttttgcaaaggatgctttgtttcttgctttgacacaatacagtgcagaaggataatgctggtgtgctccctctctctgaattcagcccaaatagccttaagggcctggcagattaagaagttttgctgcaacttgtttttactttccagcaagaccactttatagatgttccttgt

SEQ ID NO: 39175 - DNA, 599 bp, Chicken  19866894272771_2
  misc_feature (1)..(104): n is any nucleotide
nnnnnnnnnnnnnnnnnnnnnnnnnnnnnnnnnnnnnnnnnnnnnnnnnnnnnnnnnnnnnnnnnnnnnnnnnnnnnnnnnnnnnnnnnnnnnnnnnnnnnnnnttttttttttttttcctctcttgtcagagcaccactgaaagtagtacctactgttactagcagaaggcaaagtccagtgtcccgtacctattggcagtgatttatggtgggctgccagcagactgcagcaaaaatcatgcagcaaaacccagagattgttactagagcaatgacacaggtggtcaagaygtgaagyggggtgaatggttgattgtcacagcatgggcactgggttgggttcccaagggtggccacctttttgacatatatccattctgtcttctttgtgttgtctgccctttttgaagaaggttttgcaaaggatgctttgtttcttgctttgacacaatacagtgcagaaggataatgctggtgtgctccctctctctgaattcagcccaaatagccttaagggcctggcagattaagaagttttgctgcaacttgtttttactttccagcaagaccactttatagatgttccttgtaagtgaa

SEQ ID NO: 39176 - DNA, 600 bp, Chicken  19866894272771_3
tgaagaggagaaagatttacagttaacttcttcagaggaacgttgaggtgaacttgaggggattggaaagggtaagtggctgtttggaacccagagtttgttcctgttgtagccaagacagcatgtgatgctggtgtcagttttctgatcacttgtttttttttgacttgattaaatagatgagaacctggaatgagtggaagaaataggttaggctttttcttttgttcctccccagctgccactagtagcattgaactcccatcttaagcatttacacaagtgaccagccagcacctrcaagagtgggttgtacccattggagctgctactgcttaaaaatcacactgtaagagcaagttatgaaagttatggtagcaagagatgcagaataagagcttgttttttttcctctgctctyccctggtgctgtgtagccctgtatcttaaaagacactttccttgtctagctgttattaccattggtgcttgagaggtgacccaggcacataagcaatttgygccctcctgrgaaggaagggcaagaaggatggagggaggtggtagtgcaagcttggaaacagcagaaacagagaggtc

SEQ ID NO: 39177 - DNA, 600 bp, Chicken  19866894272771_4
catgtgatgctggtgtcagttttctgatcacttgtttttttttgacttgattaaatagatgagaacctggaatgagtggaagaaataggttaggctttttcttttgttcctccccagctgccactagtagcattgaactcccatcttaagcatttacacaagtgaccagccagcacctrcaagagtgggttgtacccattggagctgctactgcttaaaaatcacactgtaagagcaagttatgaaagttatggtagcaagagatgcagaataagagcttgttttttttcctctgctctyccctggtgctgtgtagccctgtatcttaaaagacactttccttgtctagctgttattaccattggtgcttgagaggtgacccaggcacataagcaatttgygccctcctgrgaaggaagggcaagaaggatggagggaggtggtagtgcaagcttggaaacagcagaaacagagaggtcttgtgattgatttattaatgccagtacttcagttttgtgcttcagttttgctaccacagactgagagtaggcagcttgtcttggagcacgtctgagatttgaaaaccacagcagccatyac

SEQ ID NO: 39178 - DNA, 600 bp, Chicken  19866894272771_5
ttttgttcctccccagctgccactagtagcattgaactcccatcttaagcatttacacaagtgaccagccagcacctrcaagagtgggttgtacccattggagctgctactgcttaaaaatcacactgtaagagcaagttatgaaagttatggtagcaagagatgcagaataagagcttgttttttttcctctgctctyccctggtgctgtgtagccctgtatcttaaaagacactttccttgtctagctgttattaccattggtgcttgagaggtgacccaggcacataagcaatttgygccctcctgrgaaggaagggcaagaaggatggagggaggtggtagtgcaagcttggaaacagcagaaacagagaggtcttgtgattgatttattaatgccagtacttcagttttgtgcttcagttttgctaccacagactgagagtaggcagcttgtcttggagcacgtctgagatttgaaaaccacagcagccatyactgttgagcaggcagaagctggctgagcttttaaggccaagtctgtgactagagtaaacactctaggaaatattgttgttggtttttttttttttttgagaa

SEQ ID NO: 39179 - DNA, 600 bp, Chicken  19866894272771_6
ccccagctgccactagtagcattgaactcccatcttaagcatttacacaagtgaccagccagcacctrcaagagtgggttgtacccattggagctgctactgcttaaaaatcacactgtaagagcaagttatgaaagttatggtagcaagagatgcagaataagagcttgttttttttcctctgctctyccctggtgctgtgtagccctgtatcttaaaagacactttccttgtctagctgttattaccattggtgcttgagaggtgacccaggcacataagcaatttgygccctcctgrgaaggaagggcaagaaggatggagggaggtggtagtgcaagcttggaaacagcagaaacagagaggtcttgtgattgatttattaatgccagtacttcagttttgtgcttcagttttgctaccacagactgagagtaggcagcttgtcttggagcacgtctgagatttgaaaaccacagcagccatyactgttgagcaggcagaagctggctgagcttttaaggccaagtctgtgactagagtaaacactctaggaaatattgttgttggtttttttttttttttgagaaaagctttggt

SEQ ID NO: 39180 - DNA, 600 bp, Chicken  19866894272771_7
tyccctggtgctgtgtagccctgtatcttaaaagacactttccttgtctagctgttattaccattggtgcttgagaggtgacccaggcacataagcaatttgygccctcctgrgaaggaagggcaagaaggatggagggaggtggtagtgcaagcttggaaacagcagaaacagagaggtcttgtgattgatttattaatgccagtacttcagttttgtgcttcagttttgctaccacagactgagagtaggcagcttgtcttggagcacgtctgagatttgaaaaccacagcagccatyactgttgagcaggcagaagctggctgagcttttaaggccaagtctgtgactagagtaaacactctaggaaatattgttgttggtttttttttttttttgagaaaagctttggtgcgatagaatagccagcctggctgtcatcagtgcagctgtccttggcatgggctggggcttagctctgattttctgccttaactctgaatagcctctccattgttggctcaaatgagaactgtgctgctgggctctgctctttctgtctttaagctggttgatgtcaatgagagttttgggcattgg

SEQ ID NO: 39181 - DNA, 600 bp, Chicken  19866894272774_1
ttattgtttgtgttcctgggaaagctagttttgatgcatgattttctccccagtcacctctaaatattcaagactggatctacaacagtgcacgtggaaatgatcagaaataagtcacttctggaagactgatttatgttaaactgtatataagtatatgaaatatgaaatatgctccttttctgccacagagtttactcataaataatccttctgactctcttcagaataaagtagtaactctatcaagagagaagccagagaagccaattaaatcattgtgacaagtagaaaacaaaygagggagaaagctctctacagaacagaaaattcctgttatttcttgatgctcaaaagtccacttaaagttcagatacttagataatttttcagggcttcatttctgtcatcaaagagaaactggaaatcaagagatgagtttttgtaagaaaaattgttctccagcatcttttgaatgcttgtcagttctttcacatagaagcatgaccgaaaaaccaacccgaagggataaaaccagaatgtggagacaatgttaggcctgaggaatccaacaggatgtaagatgaagacatctgtagc

SEQ ID NO: 39182 - DNA, 411 bp, Chicken  19866894272778_1
ctttaatttccactgttgtggaaagaatatcctcgtaacagaacagaatggttaaagaacagaatgatcccagaatattattatttttcccctatattccataggcactgtgattgtagcacaaaagtccttatgctgagaagacactatcgactggagaatgggcacgttatataatatgtattatacattcagtgtgtttatataaatgtgcattccttatgtaactgtgtcactaggaaaacagtgaggctgaacgagttcgtttcttctattgccgtgttttgcttgttgacgctygagcactgtcacaagactggagtttgtgttatactgctgcctgtgcccaagtgaatctcttcttttcaaaagctccattcacctttggggtttactgtgttttctcaaccg

SEQ ID NO: 39183 - DNA, 600 bp, Chicken  19866894272779_1
actgtttgaagtacggtgtacatttcatggacatgagaagaaaattgtgtattccgtctgggaattgtgtccattttgaactattctgtgaaatatgcgttgtgtggaccactgccaagatgagcataatggctttttatattaagtactgttccaaaaagcaaaataagaacagttgctattttcaaaggatttggtaatttttaattgtcttgaactgcacaatcagtttcacagcatgttctgaccagagcaggtaccaggacatatcatggctttaatttcaagactagaagcctyctaggcactcaggcttttgcacaagctattaaaggacccggaaatagcacaacaggaacaaatctcccacctttacccctctttgccttctgtggtcagaaagtatttcagtagtgctgcaatcaggctgccaatttgctgactcttcaagaaactgacttcaataatctgaggtatcactcaaacatgcaagaagtttctattaatattttattgctcataaaacatcaaagctagctcccttccttgtctgtcagcaagcaacaatttccccctttttaagctcaattaaactaaggg

SEQ ID NO: 39184 - DNA, 600 bp, Chicken  19866894272782_1
tatctattatgttccagaaggtctgtaataagactttcaggatgatgacatttttcttgacaaaaacactgtctaatgatgtaaactgatcaggctgatgtgtgtcactgtgatttaaattcaaacttcactcctccaaaaatcggtagagccacgaatgtcaactattcatggcaataagcatgctcattctgtatgagctaaccaggataactggagcagttgtggcagtgtggatcagtgcacctagttttgtagttgactgtggagtggaggtgtcatgatgagttcagttctctrtaagcttttgctttaattatttgacatcttaaaggtgttcaaaattgttaaatacagaattttattttccctttcctttgaactctgacaaggttttgaataaatgattttgctgtttcagcccatgtgatagctaaagccaaaggccttgcagttttgtctgttatcaaagctggatttttggtgactgctcgaggtggaagtggaattgtattagctcgtcttcctaatggcagtaagtggatattctccttttgtacttcataggagaattaaaagctttaaaatacatacacacac

SEQ ID NO: 39185 - DNA, 599 bp, Chicken  19866894272784_1
  misc_feature (1)..(140): n is any nucleotide
nnnnnnnnnnnnnnnnnnnnnnnnnnnnnnnnnnnnnnnnnnnnnnnnnnnnnnnnnnnnnnnnnnnnnnnnnnnnnnnnnnnnnnnnnnnnnnnnnnnnnnnnnnnnnnnnnnnnnnnnnnnnnnnnnnnnnnnnnnnncaatgaagctgcctccagcacaaggctaaggccacaggacagggcaggggtgccaatgctggggcaagggggcaatttccttttaataagaagctttttaattacaggaatatgctctctatgcttgttctgcttactccagggactctcccgacacacrctgcgctctacatcacctccctgagagcagaaataccaaatgctaacatrggaaccgtcctggtgccttggaacatggcccaggggaacccaaacaaccctcctgtcacagtcacccacaggctctcatgtgagtgctcacgagacctgtactgtaccacccgaaagggaaagatgtgtcctmcatagcctggtatagcagctgctgcaacctgcagcacagcgaggcatcacttaaaacggatgtgagcgctcagatgtttgatctggaaaccaaagtcacaggaaaacaactggctt

SEQ ID NO: 39186 - DNA, 599 bp, Chicken  19866894272784_2
  misc_feature (1)..(90): n is any nucleotide
nnnnnnnnnnnnnnnnnnnnnnnnnnnnnnnnnnnnnnnnnnnnnnnnnnnnnnnnnnnnnnnnnnnnnnnnnnnnnnnnnnnnnnnnnncaatgaagctgcctccagcacaaggctaaggccacaggacagggcaggggtgccaatgctggggcaagggggcaatttccttttaataagaagctttttaattacaggaatatgctctctatgcttgttctgcttactccagggactctcccgacacacrctgcgctctacatcacctccctgagagcagaaataccaaatgctaacatrggaaccgtcctggtgccttggaacatggcccaggggaacccaaacaaccctcctgtcacagtcacccacaggctctcatgtgagtgctcacgagacctgtactgtaccacccgaaagggaaagatgtgtcctmcatagcctggtatagcagctgctgcaacctgcagcacagcgaggcatcacttaaaacggatgtgagcgctcagatgtttgatctggaaaccaaagtcacaggaaaacaactggctttaggccagcccagtagtgagagctgcagcacctctgaggctactgctaat

SEQ ID NO: 39187 - DNA, 600 bp, Chicken  19866894272784_3
gcaggggtgccaatgctggggcaagggggcaatttccttttaataagaagctttttaattacaggaatatgctctctatgcttgttctgcttactccagggactctcccgacacacrctgcgctctacatcacctccctgagagcagaaataccaaatgctaacatrggaaccgtcctggtgccttggaacatggcccaggggaacccaaacaaccctcctgtcacagtcacccacaggctctcatgtgagtgctcacgagacctgtactgtaccacccgaaagggaaagatgtgtcctmcatagcctggtatagcagctgctgcaacctgcagcacagcgaggcatcacttaaaacggatgtgagcgctcagatgtttgatctggaaaccaaagtcacaggaaaacaactggctttaggccagcccagtagtgagagctgcagcacctctgaggctactgctaatcagccttatgctctgctctgtggtttcacagttcctcgtgggaaaaatgagataaacagagcagtgagcacagctctgcccacatgcaccctgacgcaaacgacacggctgtcaggacctttctgtgtgaggag

SEQ ID NO: 39188 - DNA, 600 bp, Chicken  19866894272785_1
ttgttaagttgcgtctgtcctggacctaatcctcttagagcattcaaagtagcagctgcttttgctgtccatccttgtccatcagtaaagtcacttgctttggatcagagcatcctgaaatcagcagtggccactgctgttttctctcctagcctgcgtagggagacttagcaatacggcacacagtcactgtgttatgctggtccagatgtgggagctgaagtcccatctgtgccaggttacccccttcccttgggcagtggcagcattccctggtggaggaccgccaggttcctgcargtgtcagcttttcaagccagtgcaacgtaggctaattgctgtgaggaatgttttttcccctgttttgtctcattctttcccacccttttgcattgcagctggtatgaaggcaggggtgatcggctgtggtggatttgctgctttttctgcagcaattgattactatctgcggtaacagcgggatcccttgggagcaagttttccttgcattccagtgctgctgctcagagcctgcatcacggcagaagaaccatcaggcttacctttccactgccttggagtcctgatcagtgcaagctg

SEQ ID NO: 39189 - DNA, 600 bp, Chicken  19866894272785_2
aggcaggggtgatcggctgtggtggatttgctgctttttctgcagcaattgattactatctgcggtaacagcgggatcccttgggagcaagttttccttgcattccagtgctgctgctcagagcctgcatcacggcagaagaaccatcaggcttacctttccactgccttggagtcctgatcagtgcaagctggatgatgctggctgcttttcctgaatgactaacaataatctggctgtgagccttggcatgctgcttcaggcaggcctgcaggaatgtacaaggatgaagccaggcgsagtgagcagtatcaccagtacggatcagctgactgtcagtttccaggaaacaagcctggactctgagctttctggatcctttgggtctgattttgattaagtctgttgctagcatcaaaagaggcaggaggacgatcttcataaagaaatacagtggtttgtgttactgtgtgcttgaatatgctgcaagtgtttagcagttactggtttgcagcttgctgctctgttggggagaggtaagatcctgtggagaaatagtttgttccaggcttttcttaaaataccaactgaagacaaacc

SEQ ID NO: 39190 - DNA, 600 bp, Chicken  19866894272789_1
tcttgcactttagaaaacactgagtgggcttgtgcttcaaagtgggttttgctacagcattttaagaagggagagttgggtttattgcataggtctgtaactgttaaattgctttaacatcttgaacttcagtaatcttcacttctgctttttttcctactttcttgggattctccatcagaaatgaagtatctagcaggtactgaaaacgagcatggatgtgcctgaattatacatcactgaaacactctttttatcctgtcagacttgagcactgtactcccttgcatgcttatatgyttcttttaaacttatgtcttgtaagagttcagatgactacatagtgaagtttattctgaagtagtgaaatgacatggaaaacatggagtttccagtgagaacaaagcaggacaatcattgctctcaataagtttgttcaaaaggctgcagttctggtttgaagaagtagtgtagtggcatgtgtaacttgaccttaagacaaaagtgcttgtgcatctttatggaaacttaagtcacatcataggcttagtggatttgagccagtagttgtaaactgcattggtgtcagcatttaacttc

SEQ ID NO: 39191 - DNA, 599 bp, Chicken  19866894272791_1
  misc_feature (1)..(70): n is any nucleotide
nnnnnnnnnnnnnnnnnnnnnnnnnnnnnnnnnnnnnnnnnnnnnnnnnnnnnnnnnnnnnnnnnnnnnntagggatacagttgagaggcatccgtattgccctctcattttcagccagatctctctacatgagtcatgcagtgtcctttatgctgacttttcctttgatacggttgacctttctctcatctctgtttgttgcagggcttttgcctgtcactcatcaccctgctgtcaaagcacctcacaaactgctgtagcctcacagttattctgtttagtatatagagtcactctcwttttttttccagtaaggaaatgggtcastatttgccctttgrtgttgtaccagcttttggggccaggtggaagagttggtgggccagcctagcaatgcaagccgtgccctgtgggtgcagttctgccaagcacaggcagtgtttactttcctcaggtgttgaaatggggtgatatgaagaagtatagcatgctgctttgagcaccaaaggcatgaagtggtttccctaaggtcacccagcaggtctcctgcagatccatggagagaaycgaggtgcaccatagcttcagtgcttggctg

SEQ ID NO: 39192 - DNA, 599 bp, Chicken  19866894272791_2
  misc_feature (1)..(42): n is any nucleotide
nnnnnnnnnnnnnnnnnnnnnnnnnnnnnnnnnnnnnnnnnntagggatacagttgagaggcatccgtattgccctctcattttcagccagatctctctacatgagtcatgcagtgtcctttatgctgacttttcctttgatacggttgacctttctctcatctctgtttgttgcagggcttttgcctgtcactcatcaccctgctgtcaaagcacctcacaaactgctgtagcctcacagttattctgtttagtatatagagtcactctcwttttttttccagtaaggaaatgggtcastatttgccctttgrtgttgtaccagcttttggggccaggtggaagagttggtgggccagcctagcaatgcaagccgtgccctgtgggtgcagttctgccaagcacaggcagtgtttactttcctcaggtgttgaaatggggtgatatgaagaagtatagcatgctgctttgagcaccaaaggcatgaagtggtttccctaaggtcacccagcaggtctcctgcagatccatggagagaaycgaggtgcaccatagcttcagtgcttggctgggcctggcctttacttctgcaccctcct

SEQ ID NO: 39193 - DNA, 599 bp, Chicken  19866894272791_3
  misc_feature (1)..(28): n is any nucleotide
nnnnnnnnnnnnnnnnnnnnnnnnnnnntagggatacagttgagaggcatccgtattgccctctcattttcagccagatctctctacatgagtcatgcagtgtcctttatgctgacttttcctttgatacggttgacctttctctcatctctgtttgttgcagggcttttgcctgtcactcatcaccctgctgtcaaagcacctcacaaactgctgtagcctcacagttattctgtttagtatatagagtcactctcwttttttttccagtaaggaaatgggtcastatttgccctttgrtgttgtaccagcttttggggccaggtggaagagttggtgggccagcctagcaatgcaagccgtgccctgtgggtgcagttctgccaagcacaggcagtgtttactttcctcaggtgttgaaatggggtgatatgaagaagtatagcatgctgctttgagcaccaaaggcatgaagtggtttccctaaggtcacccagcaggtctcctgcagatccatggagagaaycgaggtgcaccatagcttcagtgcttggctgggcctggcctttacttctgcaccctcctcatttggataggca

SEQ ID NO: 39194 - DNA, 600 bp, Chicken  19866894272791_4
gttattctgtttagtatatagagtcactctcwttttttttccagtaaggaaatgggtcastatttgccctttgrtgttgtaccagcttttggggccaggtggaagagttggtgggccagcctagcaatgcaagccgtgccctgtgggtgcagttctgccaagcacaggcagtgtttactttcctcaggtgttgaaatggggtgatatgaagaagtatagcatgctgctttgagcaccaaaggcatgaagtggtttccctaaggtcacccagcaggtctcctgcagatccatggagagaaycgaggtgcaccatagcttcagtgcttggctgggcctggcctttacttctgcaccctcctcatttggataggcagtttgtaaacgaaggccctcatcatggctgcagtcatgctgcaggaggatggtgccattttccaaagcctgccggccattggatcttggtgcttggtcactgctggatgctgcaagtccttcagacctgggaggagcaaggccagttgactgcagcgtttacatctaggccagggaccagtcctctttttcaccaacagtctttctgcatataggtttcaagttttc

SEQ ID NO: 39195 - DNA, 599 bp, Chicken  19866894272794_1
  misc_feature (1)..(41): n is any nucleotide
nnnnnnnnnnnnnnnnnnnnnnnnnnnnnnnnnnnnnnnnnctggaacacgcgagtagtttggcaagaaatcgcggcgaggcgcacgcaggcacaggcgcaggggctgccacacgtacacagcttgtcagcgtacagagggcagcagacccccgtgtcccaacatggggagatggagcccctcccgtgccccgtcctgcagcacggcggggagagcaaagagaaaggctgagagccagccaagagctggattttcccctaaacaccactgcaacgtcacacggcgtctacgctttcctgygtgcaacctctctgcagccctgaaygtcccagcagcctccttggaataggggcaggggaaaaaaaaamcagcggaggaggcctggaattgtggctggccctggtggtgaagggggaggggaggcaggatccgccaccaaagccacctagcccttccaccgaagtcccgagcgctggccagccttaccacgtactccatcgccggcggagggcagggaacaaacattcagcccctctggtctggcagcccgacctgcggttcggggayaaacagtgagttagccagccctgctgcaggca

SEQ ID NO: 39196 - DNA, 599 bp, Chicken  19866894272794_2
  misc_feature (1)..(16): n is any nucleotide
nnnnnnnnnnnnnnnnctggaacacgcgagtagtttggcaagaaatcgcggcgaggcgcacgcaggcacaggcgcaggggctgccacacgtacacagcttgtcagcgtacagagggcagcagacccccgtgtcccaacatggggagatggagcccctcccgtgccccgtcctgcagcacggcggggagagcaaagagaaaggctgagagccagccaagagctggattttcccctaaacaccactgcaacgtcacacggcgtctacgctttcctgygtgcaacctctctgcagccctgaaygtcccagcagcctccttggaataggggcaggggaaaaaaaaamcagcggaggaggcctggaattgtggctggccctggtggtgaagggggaggggaggcaggatccgccaccaaagccacctagcccttccaccgaagtcccgagcgctggccagccttaccacgtactccatcgccggcggagggcagggaacaaacattcagcccctctggtctggcagcccgacctgcggttcggggayaaacagtgagttagccagccctgctgcaggcagagcctgcttctcactgaccgcagg

SEQ ID NO: 39197 - DNA, 600 bp, Chicken  19866894272794_3
aatcgcggcgaggcgcacgcaggcacaggcgcaggggctgccacacgtacacagcttgtcagcgtacagagggcagcagacccccgtgtcccaacatggggagatggagcccctcccgtgccccgtcctgcagcacggcggggagagcaaagagaaaggctgagagccagccaagagctggattttcccctaaacaccactgcaacgtcacacggcgtctacgctttcctgygtgcaacctctctgcagccctgaaygtcccagcagcctccttggaataggggcaggggaaaaaaaaamcagcggaggaggcctggaattgtggctggccctggtggtgaagggggaggggaggcaggatccgccaccaaagccacctagcccttccaccgaagtcccgagcgctggccagccttaccacgtactccatcgccggcggagggcagggaacaaacattcagcccctctggtctggcagcccgacctgcggttcggggayaaacagtgagttagccagccctgctgcaggcagagcctgcttctcactgaccgcaggcagatggggggcagagagacccggggaaacctcctccttgatgg

SEQ ID NO: 39198 - DNA, 600 bp, Chicken  19866894272794_4
ctgcaacgtcacacggcgtctacgctttcctgygtgcaacctctctgcagccctgaaygtcccagcagcctccttggaataggggcaggggaaaaaaaaamcagcggaggaggcctggaattgtggctggccctggtggtgaagggggaggggaggcaggatccgccaccaaagccacctagcccttccaccgaagtcccgagcgctggccagccttaccacgtactccatcgccggcggagggcagggaacaaacattcagcccctctggtctggcagcccgacctgcggttcggggayaaacagtgagttagccagccctgctgcaggcagagcctgcttctcactgaccgcaggcagatggggggcagagagacccggggaaacctcctccttgatggccctatcccgggaaggatggtgccgggatgctccagggcaggagcacggggacaagatggggacagggctggctctgctcagatcttgcctgcaggcaaatggtgttggcagccacctgttggcagcgccccgaagcaaaaggaccttgtttacagtcgctctgtgacctgaaataagcactggtgccgatctctgccc

SEQ ID NO: 39199 - DNA, 600 bp, Chicken  19866894272794_5
ggggggcagagagacccggggaaacctcctccttgatggccctatcccgggaaggatggtgccgggatgctccagggcaggagcacggggacaagatggggacagggctggctctgctcagatcttgcctgcaggcaaatggtgttggcagccacctgttggcagcgccccgaagcaaaaggaccttgtttacagtcgctctgtgacctgaaataagcactggtgccgatctctgccctgaagctgtcaggacccaaaaatagagggcacaaaaggagagagagaagaggcgttcagacrtggaggagtgccctgctcctgcccacgccaccccctaggctggcacccactgccaaaggacacacaaagtccccagggaggagccaggatgtggccacaggagcgtgtgaaacggatcctggtgttaggaaggagcggtggaaaggggccacggaagggcagacgtgagcagagccaggaggggcaggaagctctgggagaagggcagcggtgaaaggaaaacacagcgagcaaagcaggagcacaatgagagcccctgccctccccagccagccctgcgccgctcccaccctcaccatg

SEQ ID NO: 39200 - DNA, 599 bp, Chicken  19866894272799_1
  misc_feature (1)..(32): n is any nucleotide
nnnnnnnnnnnnnnnnnnnnnnnnnnnnnnnnatataataaagaatctaaataggtttactatgaagatcctgatcatcatcaggtaagagtggaaaatatcaatggaaaatgaataaaattaactttgaagcaaaagtgctaatttcctaccttagtcctttcttcaaagtgtagaataatgaatactaaactgaatgtgaaagcacgtcaaaagctaagatggaggaatttcacaacatgccataattgccaggaatgcacaaaggcaattcaaaagatatcaagttttttgaaacaycttctgttgagaaatgctcatttactgtggtaaaaatgttgtatgagaacatgataatccagggaggcttgctttaaacacaaatcaagatatttttattttgtttgagatgaagttggaattctgtttcataaattgttaatgcaaaattaaaaagctgaaacagaagctaaacattcagctgaaaaaggaagaatttaaatcctctcattctatttccaatgaagaaaacttttaatatttatgaaagaacagaaattctgtatccctcacagctatggtaacaggcatggcagaat

SEQ ID NO: 39201 - DNA, 600 bp, Chicken  19866894272799_2
ttacttttgttgcctgtaaaactgacagatctctatttataaaagaaatttaacatgaatttgttatcttgtcagattttctcaacatctcacagagaaggagatctggttgcaactttgccaatggaaatgttagccactggcaaacactgatttgaagaaatcaagatatttcatgggaattttatcaattgccactgatagatagaagataagaaaggaggcaaaattccccatatcctctgaccttctggtgggcatttgagattctcagttcccatgttctgaattacagggctmactatctcaagaacaaataaatttgaattcttgtctrcagtgtataacagtttgtgcttgaatgcttaagagtatcacgatttccaaaaagcatatcgctgacagatttctgtttggaatggtgagaggtttagggctgcctatcccaagacagaaggaaaacttgaagagaccaccacggcagggactgttctaatccccgtggtactgtgttaaatgaagatgaagcataatcatgcctgttgtgggttctgtccttttttttttttttttttttttttcagttgaaccatctagtaa

SEQ ID NO: 39202 - DNA, 588 bp, Chicken  19866894272799_3
tataaaagaaatttaacatgaatttgttatcttgtcagattttctcaacatctcacagagaaggagatctggttgcaactttgccaatggaaatgttagccactggcaaacactgatttgaagaaatcaagatatttcatgggaattttatcaattgccactgatagatagaagataagaaaggaggcaaaattccccatatcctctgaccttctggtgggcatttgagattctcagttcccatgttctgaattacagggctmactatctcaagaacaaataaatttgaattcttgtctrcagtgtataacagtttgtgcttgaatgcttaagagtatcacgatttccaaaaagcatatcgctgacagatttctgtttggaatggtgagaggtttagggctgcctatcccaagacagaaggaaaacttgaagagaccaccacggcagggactgttctaatccccgtggtactgtgttaaatgaagatgaagcataatcatgcctgttgtgggttctgtccttttttttttttttttttttttttcagttgaaccatctagtaaattcatcttttatttgttttaaact

SEQ ID NO: 39203 - DNA, 599 bp, Chicken  19866894272808_1
  misc_feature (1)..(145): n is any nucleotide
nnnnnnnnnnnnnnnnnnnnnnnnnnnnnnnnnnnnnnnnnnnnnnnnnnnnnnnnnnnnnnnnnnnnnnnnnnnnnnnnnnnnnnnnnnnnnnnnnnnnnnnnnnnnnnnnnnnnnnnnnnnnnnnnnnnnnnnnnnnnnnnnnttagggaaaagtaatttatataaaaataagtcataaatgagaatatactagattttatttttaataagcatatttaaagtacttgtcttcaataagattctaggataagttaactatagaatcattacactttaagataacaaccaaaacaaagyaggatggggtggatgtgataaataagttccgtgaataacctcttccacttaaatcagagatgctagtttgatttttgtggcattttcttacagcttgtttgtgattcttatttaaatgcacagggagggctgtgactgtccgacaggactgcagctatacatggcatacagaacatatcactgtgtactgtaggtttctgctccacagaagagcaacacaaggcatatagtatagcttttctgtgccgtgtaagtccwgcactgtaaaagcaagaagcagtccacattacctgatactt

SEQ ID NO: 39204 - DNA, 600 bp, Chicken  19866894272808_2
tcaataagattctaggataagttaactatagaatcattacactttaagataacaaccaaaacaaagyaggatggggtggatgtgataaataagttccgtgaataacctcttccacttaaatcagagatgctagtttgatttttgtggcattttcttacagcttgtttgtgattcttatttaaatgcacagggagggctgtgactgtccgacaggactgcagctatacatggcatacagaacatatcactgtgtactgtaggtttctgctccacagaagagcaacacaaggcatatagtayagcttttctgtgccgtgtaagtccwgcactgtaaaagcaagaagcagtccacattacctgatacttgaatgtaaaatactgagaatggcatgagtagttacatagattttactaacacaaaataagccactgcaacctgggactgagttttatatcacataggaccctgaaataaaatttagtaaggaaaacattatagaaagctcaatagtttcttcttgaagtttccacagaggagcgggtgttcagttgattggtccccttaaataaaaccctaaatggaagaattaagcattatca

SEQ ID NO: 39205 - DNA, 600 bp, Chicken  19866894272808_3
ctatagaatcattacactttaagataacaaccaaaacaaagyaggatggggtggatgtgataaataagttccgtgaataacctcttccacttaaatcagagatgctagtttgatttttgtggcattttcttacagcttgtttgtgattcttatttaaatgcacagggagggctgtgactgtccgacaggactgcagctatacatggcatacagaacatatcactgtgtactgtaggtttctgctccacagaagagcaacacaaggcatatagtatagcttttctgtgccgtgtaagtccwgcactgtaaaagcaagaagcagtccacattacctgatacttgaatgtaaaatactgagaatggcatgagtagttacatagattttactaacacaaaataagccactgcaacctgggactgagttttatatcacataggaccctgaaataaaatttagtaaggaaaacattatagaaagctcaatagtttcttcttgaagtttccacagaggagcgggtgttcagttgattggtccccttaaataaaaccctaaatggaagaattaagcattatcatcctgaagcagtagctgtctgtaaa

SEQ ID NO: 39206 - DNA, 599 bp, Chicken  19866894272820_1
  misc_feature (1)..(124): n is any nucleotide
nnnnnnnnnnnnnnnnnnnnnnnnnnnnnnnnnnnnnnnnnnnnnnnnnnnnnnnnnnnnnnnnnnnnnnnnnnnnnnnnnnnnnnnnnnnnnnnnnnnnnnnnnnnnnnnnnnnnnnnnnnnnttaagttccttaatttatgtgtggattgttttcctgcagccctgaaatatgggaaatacttaattgctatgggggagtataaggcagtgatgacatcccatggtactggtagccaccatggcttcaagccaaggttattctactcattgagaaatactgtgactatgaacacacayaggaaactttctcgtgataggaaagtaagaaatataacactaagatctagacaggttaccttattcatgttgtattttgctatttgccttctacaggtgttcttgggtattcataggaaagatctttttctsaaaaggcctggggctagattattagctggtgcaagtcagtattgctgcaatgaatggaaaatgcagtttgatgcaatattcacaatctttttttctcctaaggcctttctcaactattctctgacagtatttagtgaagaatttttcctgaagttgagggtccgcaa

SEQ ID NO: 39207 - DNA, 600 bp, Chicken  19866894272820_2
cttaatttatgtgtggattgttttcctgcagccctgaaatatgggaaatacttaattgctatgggggagtataaggcagtgatgacatcccatggtactggtagccaccatggcttcaagccaaggttattctactcattgagaaatactgtgactatgaacacacayaggaaactttctcgtgataggaaagtaagaaatataacactaagatctagacaggttaccttattcatgttgtattttgctatttgccttctacaggtgttcttgggtattcataggaaagatctttttctsaaaaggcctggggctagattattagctggtgcaagtcagtattgctgcaatgaatggaaaatgcagtttgatgcaatattcacaatctttttttctcctaaggcctttctcaactattctctgacagtatttagtgaagaatttttcctgaagttgagggtccgcaaatatgagagttactggatctgtctcctgcatcagatgtgcttttcctttcctgcataaagcagaaggcaggggagcctcctggggaggagatacagatgtgctttgttctgcccaatcacctgctggtgtgga

SEQ ID NO: 39208 - DNA, 599 bp, Chicken  19866894272825_1
  misc_feature (1)..(35): n is any nucleotide
nnnnnnnnnnnnnnnnnnnnnnnnnnnnnnnnnnntatctgtatttatagcatatgcatccgttcagtgcttggagacctttggcgagcagtgtgcagcagaagttcaataaaacattcagagtgtgtgaatggtttcagttctgagatacaggtttttctacacttgagtgcccaatgtttttattgtctaactcaaacaagacattgataaattcctggcctggaagccaggagtatcacacagctgctggggagaaagagagccaactggaaaccaccgctgatctggcctgaaacrtgaaagtctccgtccttggagatactcagaactcagccagacaacgttctgggcagcctggctgagcttccaaatcctgctttcagtgcgaggtcagactggagagctccagaggtccttttccaacctaggtcattcaaccgggatagacccgtgatatccatctgtcactgtgaagggcaatctctccaaccaaatgacacagtctatagctatggctgaagaaagatctagatgaaaaagacatctccaagatgtctctcttgggcacaaaattctgcgtgttattttgtaatcca

SEQ ID NO: 39209 - DNA, 600 bp, Chicken  19866894272826_1
gaaaccattcacacactctgaatgttttattgaacttctgctgcacactgctcgccaaaggtctccaagcactgaacggatgcatatgctataaatacagatagctgtctagccatccatggctctacttggaaagtgcttccattttctttcccctttccatagcagaactcgtaagcaaggtagagagaagccatctgcagaagctgccctcatcctgagatgacccatctatcagttttgactcagagctctctcccagcctccaggtggcatttcccatacaaaaggtgcataacyacygtaactattatcatagagcactttaaaaagtgctcagaaactgttgaatcaaagcctgagataatggcttgaaactrtaccttcaatgatttgcctacactgctataataaagaaatagatgctgccttattgtgtggaatttggagtttagccacagccagctaaggctaatttgctgtaagaaactgaagaatatgtcagaatagatcagtaatgcattgtgaaataataacttcgttttttaaaaaaatcagaccaatccacaacaacattaaattccttatttaaaagactca

SEQ ID NO: 39210 - DNA, 600 bp, Chicken  19866894272826_2
accattcacacactctgaatgttttattgaacttctgctgcacactgctcgccaaaggtctccaagcactgaacggatgcatatgctataaatacagatagctgtctagccatccatggctctacttggaaagtgcttccattttctttcccctttccatagcagaactcgtaagcaaggtagagagaagccatctgcagaagctgccctcatcctgagatgacccatctatcagttttgactcagagctctctcccagcctccaggtggcatttcccatacaaaaggtgcataacyacygtaactattatcatagagcactttaaaaagtgctcagaaactgttgaatcaaagcctgagataatggcttgaaactrtaccttcaatgatttgcctacactgctataataaagaaatagatgctgccttattgtgtggaatttggagtttagccacagccagctaaggctaatttgctgtaagaaactgaagaatatgtcagaatagatcagtaatgcattgtgaaataataacttcgttttttaaaaaaatcagaccaatccacaacaacattaaattccttatttaaaagactcatac

SEQ ID NO: 39211 - DNA, 600 bp, Chicken  19866894272826_3
tgcatatgctataaatacagatagctgtctagccatccatggctctacttggaaagtgcttccattttctttcccctttccatagcagaactcgtaagcaaggtagagagaagccatctgcagaagctgccctcatcctgagatgacccatctatcagttttgactcagagctctctcccagcctccaggtggcatttcccatacaaaaggtgcataacyacygtaactattatcatagagcactttaaaaagtgctcagaaactgttgaatcaaagcctgagataatggcttgaaactrtaccttcaatgatttgcctacactgctataataaagaaatagatgctgccttattgtgtggaatttggagtttagccacagccagctaaggctaatttgctgtaagaaactgaagaatatgtcagaatagatcagtaatgcattgtgaaataataacttcgttttttaaaaaaatcagaccaatccacaacaacattaaattccttatttaaaagactcatacccagacaacagagagcattaactttcaggaatgaaattagacagagacagccagataaatatctgcctaattccttc

SEQ ID NO: 39212 - DNA, 541 bp, Chicken  19866894272834_1
accagcatacggaccaagcggcaggtcacccgcagctggacacaacttaacctctcctatgggctgctctgtgctttcgatgcagtgcatttcagcagcccctggcagacaccactgccggccttctgccccacacccaggcacaacagcaagagtctcgtggtagaaaaatcagactctgggttttcagatttcactcagcagtgtgtgatttgtagctgctgctgcatactggctctaagcacagtcggttttgcctactcatgcttctctcccctggttacaatagattctgtttckgatgaaaatattactctgatgagtttttctctggcttacttttatgcttcctgctaactagcacaagccttwttgttgctgttcctaatactttgcatcatttgtagttctagcaattttatttgtaaatagcatgaaaaaagtattaatatgtatcttccctcagtgctccagacagattggttcactgtggaacaattacatacatatatgctagcctatatttcttgtaaaatcaaat

SEQ ID NO: 39213 - DNA, 469 bp, Chicken  19866894272834_2
gctttcgatgcagtgcatttcagcagcccctggcagacaccactgccggccttctgccccacacccaggcacaacagcaagagtctcgtggtagaaaaatcagactctgggttttcagatttcactcagcagtgtgtgatttgtagctgctgctgcatactggctctaagcacagtcggttttgcctactcatgcttctctcccctggttacaatagattctgtttckgatgaaaatattactctgatgagtttttctctggcttacttttatgcttcctgctaactagcacaagccttwttgttgctgttcctaatactttgcatcatttgtagttctagcaattttatttgtaaatagcatgaaaaaagtattaatatgtatcttccctcagtgctccagacagattggttcactgtggaacaattacatacatatatgctagcctatatttcttgtaaaatcaaat

SEQ ID NO: 39214 - DNA, 600 bp, Chicken  19866894272854_1
atggaagtgtgctgggagtgctctgtgctaaaaacgatagcatcgagaacagggctggtgtgcgctaagggtgggaaagctccatagctaccgttaccttcagcaatcagctggcaaggggtcgctttgcagtgatgtggtattaaataccaggaaaatacagctggagagagcagaaggagctgcgctgtgcggacagcactgtctgatgccccacagccaacgccccgagcagcgtctgctgcagaggtgcatcccggtggccgctgcagcacacggtgctgctcaggagtggcagcygctgatggggcccggaggttggagcagttcatctttaggaacccttcggtgctggcagcttctgaaatgggtacagaagccaatacccagcaaacgactttacaacaactttgtactgcaatgagaaagcgacgcgattccagcttacgaagtggcaacaaaayctcctctagcrggggatgacatgcgcgggagcgcccggcagtgtgtgacagcaccacttcgtttaagcagcacagcccccgctcccgtctccgtgcgaggccgcggtcagcggctgcggggcgcaaatcaaaagga

SEQ ID NO: 39215 - DNA, 573 bp, Chicken  19866894272854_2
tggagagagcagaaggagctgcgctgtgcggacagcactgtctgatgccccacagccaacgccccgagcagcgtctgctgcagaggtgcatcccggtggccgctgcagcacacggtgctgctcaggagtggcagcygctgatggggcccggaggttggagcagttcatctttaggaacccttcggtgctggcagcttctgaaatgggtacagaagccaatacccagcaaacgactttacaacaactttgtactgcaatgagaaagcgacgcgattccagcttacgaagtggcaacaaaayctcctctagcrggggatgacatgcgcgggagcgcccggcagtgtgtgacagcaccacttcgtttaagcagcacagcccccgctcccgtctccgtgcgaggccgcggtcagcggctgcggggcgcaaatcaaaaggacccgacgggtggaatccccgggcctggaagggatcgcgcggcctcgcggccgcctccatcccacgtgcacggcgcgtgctcagggccgggctgcagcgccagccgagtgctgctgggcgggagctctgcggccgcag

SEQ ID NO: 39216 - DNA, 562 bp, Chicken  19866894272854_3
gaaggagctgcgctgtgcggacagcactgtctgatgccccacagccaacgccccgagcagcgtctgctgcagaggtgcatcccggtggccgctgcagcacacggtgctgctcaggagtggcagcygctgatggggcccggaggttggagcagttcatctttaggaacccttcggtgctggcagcttctgaaatgggtacagaagccaatacccagcaaacgactttacaacaactttgtactgcaatgagaaagcgacgcgattccagcttacgaagtggcaacaaaayctcctctagcrggggatgacatgcgcgggagcgcccggcagtgtgtgacagcaccacttcgtttaagcagcacagcccccgctcccgtctccgtgcgaggccgcggtcagcggctgcggggcgcaaatcaaaaggacccgacgggtggaatccccgggcctggaagggatcgcgcggcctcgcggccgcctccatcccacgtgcacggcgcgtgctcagggccgggctgcagcgccagccgagtgctgctgggcgggagctctgcggccgcag

SEQ ID NO: 39217 - DNA, 599 bp, Chicken  19866894272858_1
  misc_feature (1)..(252): n is any nucleotide
nnnnnnnnnnnnnnnnnnnnnnnnnnnnnnnnnnnnnnnnnnnnnnnnnnnnnnnnnnnnnnnnnnnnnnnnnnnnnnnnnnnnnnnnnnnnnnnnnnnnnnnnnnnnnnnnnnnnnnnnnnnnnnnnnnnnnnnnnnnnnnnnnnnnnnnnnnnnnnnnnnnnnnnnnnnnnnnnnnnnnnnnnnnnnnnnnnnnnnnnnnnnnnnnnnnnnnnnnnnnnnnnnnnnnnnnnnnnnnnnnnnnnnnnnnnntcaagttgatttttgttactatatctgaaccggcagagagaaaaaaawtggcaactttgtaagataaattatctgtgatgctttcaatttataaggaagattatgattcacttataaccatgaaatcatattggcaaatggcaatttaaaaagcacactttcactcctgttgactaccttataaactgtacacagagtaaacaaattgtggtctcactgaagcagagaatcacttccctcaacctgctggccactctttttaatgcatcccagaataccattggctttcatggctacaagggcacactgctggctcrtggtcaacctgttgtccatcaggacaccga

SEQ ID NO: 39218 - DNA, 600 bp, Chicken  19866894272858_2
actatatctgaaccggcagagagaaaaaaawtggcaactttgtaagataaattatctgtgatgctttcaatttataaggaagattatgattcacttataaccatgaaatcatattggcaaatggcaatttaaaaagcacactttcactcctgttgactaccttataaactgtacacagagtaaacaaattgtggtctcactgaagcagagaatcacttccctcaacctgctggccactctttttaatgcatcccagaataccattggctttcatggctacaagggcacactgctggctcrtggtcaacctgttgtccatcaggacaccgaggtccttctctgcagatctcccctccgtcaggtcaacccataacctgtactggtgtgtggttattcttcccagatgtaggacttcacatttgctcttgttgaacctcatcatgttcctttctgcccaactctccactctgtccagatatcactgaattgcagcacagccttctagtgtgtcatccactcctcccagctctagtttctcagcgttgatatatagatggtatcacataggtccttaacagttatgggagagcagragaaaag

SEQ ID NO: 39219 - DNA, 500 bp, Chicken  19866894272858_3
tggctcrtggtcaacctgttgtccatcaggacaccgaggtccttctctgcagatctcccctccgtcaggtcaacccataacctgtactggtgtgtggttattcttcccagatgtaggacttcacatttgctcttgttgaacctcatcatgttcctttctgcccaactctccactctgtccagatatcactgaattgcagcacagccttctagtgtgtcatccactcctcccagctctagtttctcagcgttgatatatagatggtatcacataggtccttaacagttatgggagagcagragaaaagagtcactgtggacagtaacagtgaacttttgttgtttccatctttgttgcatgcagaactcttcttccctgttccctgtgctaaggtggtagtcatttcacttcatgtcccagagtccataaaatgaacggatgaaatttcaggtttgtaatgggaggcttctgaagtaggacagtaaatagaactgcagttt

SEQ ID NO: 39220 - DNA, 600 bp, Chicken  19866894272859_1
aatttaaattcaacttgaagtgctgtttccactcctcgtgttgaattttaaaatgtgtgcatcattggcttcaaatattcattttgtcccagtgtttgaaagaaatccagttcaggtcataggaaagtggaggttatttggttttttttcagaggacaatgagatggctgaagaaggtgggtgcagcctgaggtaaatgaagaaactctgtgctattccattgtttaggccttttgtttattagaaaggaggcgcgagcttagcttgtgtagaatggtaatttctttgtaggcaacttaktctcaagctctggayctggaaaaattacatattctagtgtagttctagtgaagtcaataggtttccacttcacagtggctgcacagcaaagctggtgaagccttgttaattttcagtgattcttctctttttttcttcagcaaaaagggaattttgttctgatttaagtcatatgctgcagtgatagatacagtaaaacagtatcattcagaaaagtgtggaggctacacagacaacttgggtttagargtaacttatctgctgtgttttaaatgacaggaataaatctgttgctatcta

SEQ ID NO: 39221 - DNA, 600 bp, Chicken  19866894272859_2
tgaagtgctgtttccactcctcgtgttgaattttaaaatgtgtgcatcattggcttcaaatattcattttgtcccagtgtttgaaagaaatccagttcaggtcataggaaagtggaggttatttggttttttttcagaggacaatgagatggctgaagaaggtgggtgcagcctgaggtaaatgaagaaactctgtgctattccattgtttaggccttttgtttattagaaaggaggcgcgagcttagcttgtgtagaatggtaatttctttgtaggcaacttaktctcaagctctggayctggaaaaattacatattctagtgtagttctagtgaagtcaataggtttccacttcacagtggctgcacagcaaagctggtgaagccttgttaattttcagtgattcttctctttttttcttcagcaaaaagggaattttgttctgatttaagtcatatgctgcagtgatagatacagtaaaacagtatcattcagaaaagtgtggaggctacacagacaacttgggtttagargtaacttatctgctgtgttttaaatgacaggaataaatctgttgctatctaattgcttcatccaat

SEQ ID NO: 39222 - DNA, 600 bp, Chicken  19866894272859_3
aggcgcgagcttagcttgtgtagaatggtaatttctttgtaggcaacttaktctcaagctctggayctggaaaaattacatattctagtgtagttctagtgaagtcaataggtttccacttcacagtggctgcacagcaaagctggtgaagccttgttaattttcagtgattcttctctttttttcttcagcaaaaagggaattttgttctgatttaagtcatatgctgcagtgatagatacagtaaaacagtatcattcagaaaagtgtggaggctacacagacaacttgggtttagargtaacttatctgctgtgttttaaatgacaggaataaatctgttgctatctaattgcttcatccaatctatgccaagatttttgtgactttatgtcttgcaacacatccctgttgctgcatatagaaataattttctcaaatgctttccttttgaatactttaatattcagctcactttctgagttggttttcatgaggtcttaatcaaatttaacagaccctatctggattgccgttttattattccttatttgttcttgcattatgtgaggatttttctctgataaaagacctcaggga

SEQ ID NO: 39223 - DNA, 600 bp, Chicken  19866894272860_1
ggaaaaatgtctaaagagtattaagctattaagcatttatttatttatttattttaatctagcacttatatttccttagcacttggtacctaaacaacagtaataaaggtagttaggaataataccaggttgccatatttcaaaggcttcaagttatatttagcaggtaggcttgctactgaaggtgtaatgcagagtgaattacacctggacatgtgacatgctcttgaaacactgtgacctctatcctcattacagatccacccacaggaaatgactgctaccatttgcagaagacamatgacatccaaactattcacaggtgattttctgatgcaactgatgatacatccagtatcatgaaaccaccagcacgccagccaatactgtgctgtagtccttgtgactgtttgtctgaacatctgcattgctatctctaagtactagatcaggatgtagctgaagatggcctgcaaccaaatctctgaactttgcaattgtcaacatgtggatttggcaactgaaagatgagctgtttcatttccaaaagctaccagtgattcaaacaatgccactggaagatgttcagccaagctcttc

SEQ ID NO: 39224 - DNA, 600 bp, Chicken  19866894272861_1
gttattgattctctaagactagtaaattttgattcttaaaatctaccaaaaaaactagcactcttattacaagcagcaaagcctactaggaataaaatgtattaaatatcttataattagatgttatgaattatagttcacagagaggctcagattacacttcagacagaggcagaaagaggtgcaaaggacttcctgttaatatttcactgattaaaaaggctccactgataaaattgatgtctaaactgagaacaagctcgctttatgatttaaataatgttctccaagagagatacmctgtcaacaagccaagactattatccgttacttgtgctttgtgaaatgcagattttaccaatagatcaacatactaatttaaaacctttaaaaccaaatcttatgcacccttgaagacacaatcgcattctttaacaaaataaaccttgcacatgtttctttcaaaaacctctttcacctcagagcaaaggaagagttgagtggataaacaaattttgttacccaagaacaaatacagtataaagctgtttattctttcctacatagtacagtattaacattttccttccatataatagc

SEQ ID NO: 39225 - DNA, 600 bp, Chicken  19866894272874_1
gcactatgctgtaggacagaaggatggggtttttccttctctttctttcaccagccccttttatcttcaagatttctgggataaaataaactgaaatattgactacttatacatcagggccaaaattaaaaaggaaccaaactgaaaatcactcactgctaagttctgaacatcatcacagcctaggaaaccagaacgtggcagtggtgtctgagagctgctctggactcaagtcacagctcaactcgacgtaaaatcccctgcatccccaaattatttgctgctaaagctgtcacagcrttttaggaacaataaaaatatcccaccaaaatcaactgccgctgcttttatttgtcattaaacaccttgcttcccctatattctgctatatttttggatcagaggtttaaaatttaatatggcacagtacagtagatgtctgtttccttatacaaccctactacgccagactgaaaatgatgtaatttcaggcaccatgaacaatttcatgtgtcattttaaatataacttgttactgaattaggtgccagttcttctcattggatcaattagcaccagggacagaaagctcattctcca

SEQ ID NO: 39226 - DNA, 600 bp, Chicken  19866894272884_1
gttttccctcattcatcttcaccataagctgctggcctccttttgctgtcttgcagtactggtgccctaatgcaaaactgcctctgtatgtagcagtatcctcgtgaaaagcctttgggattgcagtctgtacagtccgaggtgcttgcctcagttaccactcaagagacagaaacccagaaccctcctgtggttactgaaatgcagtaagcagcagagacgcgtgctacttccctacagttcatccttactaccattctcttcctgacactgccagtctcatcagtctgtgtgctgtgrttgctccttcagccttgcttatatttcacatacttttttcccataccgtcaggcacagattcaggaggaggaaacgtggtgatggtagctgtatccttctgtacccttattaaaaccaattcattgctgtactgcttccaaacccgcaacagcctttgatgtgcaaaagctgcaaaagaagaaacaaagtacatgtttccctgttctgcatgtctgaccttagtcaactcaaacatttaacaactcccctgctgaacatgtaaaacaatctttcttcagcaacccataatttatccacat

SEQ ID NO: 39227 - DNA, 599 bp, Chicken  19866894272886_1
  misc_feature (1)..(24): n is any nucleotide
nnnnnnnnnnnnnnnnnnnnnnnnctgatggctgtgatggggaagcacccttggtacagcccaagcagagccatggcagcggtgagccctgaagtggggagtgggatcccccagtgaggggatggagggtgctccaaaatgggaggctgctgtcaccccatgggatgtggggtgctgctgccatgggatacaacagagggacacgagaaggggatggggcagacagctctcacctgcagcccgggcagcttctcacggggagcagacggctccttctcagccagcagcagcacggtgtgratgcagcctggtgagatgttctgcgaaggaaggacagccattcctgcatgcccagccacrctgccatggccatcacacccaagttagccacagccatgggtaaccaagggaaaagagccccgagctcgctggcatgggaaatggaaccagtccccatatcaccgtccctacccacagaatagatcccctggctgaaggaacccacggaaaggggcccgggaacaaatcccttccctcataccagtgacacttctctgcatgggggactctgctcaggggaagtggggtctttgtgcctg

SEQ ID NO: 39228 - DNA, 600 bp, Chicken  19866894272886_2
ccaagcagagccatggcagcggtgagccctgaagtggggagtgggatcccccagtgaggggatggagggtgctccaaaatgggaggctgctgtcaccccatgggatgtggggtgctgctgccatgggatacaacagagggacacgagaaggggatggggcagacagctctcacctgcagcccgggcagcttctcacggggagcagacggctccttctcagccagcagcagcacggtgtgratgcagcctggtgagatgttctgcgaaggaaggacagccattcctgcatgcccagccacrctgccatggccatcacacccaagttagccacagccatgggtaaccaagggaaaagagccccgagctcgctggcatgggaaatggaaccagtccccatatcaccgtccctacccacagaatagatcccctggctgaaggaacccacggaaaggggcccgggaacaaatcccttccctcataccagtgacacttctctgcatgggggactctgctcaggggaagtggggtctttgtgcctggtcaggggccgtctgtgccactgtggacgtgcccagaattagagactgagcagcaactttg

SEQ ID NO: 39229 - DNA, 600 bp, Chicken  19866894272890_1
tgacatggaggaaatgacatggaagccctggatgatgttggatgcctagaggaggaggttgtgaagctcctggatgagctgtgcacagtcagcatagttctggcagggctaatggaaatgagctctgtgtgtaaagcagtgtcttctattctttacttatctgtaacttattacaggaaaattaactcacctgttctgctttcttctagagttgtgcttcttgtctttttttcctaacagtctaaagcagcttacattatgcttatttttgttcttttggtataaatgctttttcttgartaaggacaaaaatgtgtgtattgcagcatccagagtgtgttgctatacatcttgaagaagttatgtcactatagttgagccaaaatctactttattttatgtgttctgatataactaaaaatacatagaaatacatcagctttagcttcttgcacttgttgtttgagaataagcaaaatcctgtaaccgagcatacctgtattttcagcagatgttgccatagcagttccatcatgttgctagagcatggaataaaggtaatataaaggatggtggaagaataaaacaaaatacaatgat

SEQ ID NO: 39230 - DNA, 558 bp, Chicken  19866894272899_1
cagtacaccaccaaatgttccacagtcttttcataaataacacacttttaaggtggtaacagaacctgttgatctttgatttcatatcacgatggcaaaaaagtgattcagatcagattcccttatgttgaagggaaattacagcattacagctactgtgtagtgaaattcaaagtttgtttggcaataacttcagtctttttccagaagctgatctttcgcaacagtggactgtaatcctcatgagggaacatatttaccaaacaacattcaatatgcaaaaagatgcaagtgaaaaartgctgccttagaactgtagccctttaccttactgacccacagtggatacacagagcaataatatgctgagaaccactttttttttttttttttttttttttgcatttgttgcctgcttcagctcaagtcttagttttctacacccctgaacaacctgagcactgaaacccaattgctaaaaaacaatactggaaagagatcagaagagttgaagttaaaataaacttctaatttcatgtgtctgaaaaatacaaagac

SEQ ID NO: 39231 - DNA, 599 bp, Chicken  19866894272904_1
  misc_feature (1)..(97): n is any nucleotide
nnnnnnnnnnnnnnnnnnnnnnnnnnnnnnnnnnnnnnnnnnnnnnnnnnnnnnnnnnnnnnnnnnnnnnnnnnnnnnnnnnnnnnnnnnnnnnnnntggcatttacaaagcattccctggtttttacagcttgagtttgcttataaacaacactaactgtttgtttcttgttaaaatttacctcataaacaaattttactgcgtgagtttgagccaataattgtttaatcctaactttctcatacccatagtgcagggactgtaaagctgcagtcgaaacttgatagaattttctgccmctctcctctgrgagcggtgcctgagctgtggtggcggggatggcgtggggccaggccagtgctgcggctgagggggcacagcgggtcctggccgtggcacccggccagcggcgttctgagctctcacagcaagaagcagaggaaagttcaaaagaagccagaaaataagatcttcctcctgtttctgaagtttgagttactttatgatgcaacagtaaagctatccagttatttacagcccatggcagtgcgtcgcccctcttgctgagtagcagggaaatgccgtggaagtgactgct

SEQ ID NO: 39232 - DNA, 599 bp, Chicken  19866894272904_2
  misc_feature (1)..(86): n is any nucleotide
nnnnnnnnnnnnnnnnnnnnnnnnnnnnnnnnnnnnnnnnnnnnnnnnnnnnnnnnnnnnnnnnnnnnnnnnnnnnnnnnnnnnnntggcatttacaaagcattccctggtttttacagcttgagtttgcttataaacaacactaactgtttgtttcttgttaaaatttacctcataaacaaattttactgcgtgagtttgagccaataattgtttaatcctaactttctcatacccatagtgcagggactgtaaagctgcagtcgaaacttgatagaattttctgccmctctcctctgrgagcggtgcctgagctgtggtggcggggatggcgtggggccaggccagtgctgcggctgagggggcacagcgggtcctggccgtggcacccggccagcggcgttctgagctctcacagcaagaagcagaggaaagttcaaaagaagccagaaaataagatcttcctcctgtttctgaagtttgagttactttatgatgcaacagtaaagctatccagttatttacagcccatggcagtgcgtcgcccctcttgctgagtagcagggaaatgccgtggaagtgactgcttatattgatta

SEQ ID NO: 39233 - DNA, 600 bp, Chicken  19866894272904_3
tggcagtgcgtcgcccctcttgctgagtagcagggaaatgccgtggaagtgactgcttatattgattagcgagacacgagagagttagagaccctcagcactgccacttaaagcgggcaggaaacccaaattgaccagtaataaagtgtttgaggttgtacaaggcggctcctggggaaactgtcttctcagagtggggatgctaggggtggaaagctgtcaattatccttgtttgatgaggagtaagtaaacgtgctactaaagtggcctattaaatgtgagagaaacatgctggggcygggttccctgtgcaaaactattcttgtaaagttggaaggaggggtgttcttggacccctaacaaagggtgctaccgtcagctgggagcctgagcttttttttgtccttttctctctctctctctctctctttttttttwtttttttggtgtggcctctacttacagataggagaacagtgaaaactgttattgtaagaaactgaattcttgttgcagcatgtaccactgtgtctggagaaggactatgtaaaaggaaygcagaaggcagggggacatcataggcaaaaggctagctggtt

SEQ ID NO: 39234 - DNA, 600 bp, Chicken  19866894272904_4
ttgaccagtaataaagtgtttgaggttgtacaaggcggctcctggggaaactgtcttctcagagtggggatgctaggggtggaaagctgtcaattatccttgtttgatgaggagtaagtaaacgtgctactaaagtggcctattaaatgtgagagaaacatgctggggcygggttccctgtgcaaaactattcttgtaaagttggaaggaggggtgttcttggacccctaacaaagggtgctaccgtcagctgggagcctgagcttttttttgtccttttctctctctctctctctctcyttttttttwtttttttggtgtggcctctacttacagataggagaacagtgaaaactgttattgtaagaaactgaattcttgttgcagcatgtaccactgtgtctggagaaggactatgtaaaaggaaygcagaaggcagggggacatcataggcaaaaggctagctggtttttgagttcagtacacaattaaatgacaaggataatcagcaaccatgaatatctcagatgtctaacatgagaattacagggaattattcagatctggagtctgaataattacataaatggaatcttttta

SEQ ID NO: 39235 - DNA, 600 bp, Chicken  19866894272904_5; identical to SEQ ID NO: 39234

SEQ ID NO: 39236 - DNA, 600 bp, Chicken  19866894272904_6; identical to SEQ ID NO: 39234

SEQ ID NO: 39237 - DNA, 600 bp, Chicken  19866894272904_7
aataaagtgtttgaggttgtacaaggcggctcctggggaaactgtcttctcagagtggggatgctaggggtggaaagctgtcaattatccttgtttgatgaggagtaagtaaacgtgctactaaagtggcctattaaatgtgagagaaacatgctggggcygggttccctgtgcaaaactattcttgtaaagttggaaggaggggtgttcttggacccctaacaaagggtgctaccgtcagctgggagcctgagcttttttttgtccttttctctctctctctctctctctttttttttwtttttttggtgtggcctctacttacagataggagaacagtgaaaactgttattgtaagaaactgaattcttgttgcagcatgtaccactgtgtctggagaaggactatgtaaaaggaaygcagaaggcagggggacatcataggcaaaaggctagctggtttttgagttcagtacacaattaaatgacaaggataatcagcaaccatgaatatctcagatgtctaacatgagaattacagggaattattcagatctggagtctgaataattacataaatggaatctttttatcaattgca

SEQ ID NO: 39238 - DNA, 600 bp, Chicken  19866894272904_8
actaaagtggcctattaaatgtgagagaaacatgctggggcygggttccctgtgcaaaactattcttgtaaagttggaaggaggggtgttcttggacccctaacaaagggtgctaccgtcagctgggagcctgagcttttttttgtccttttctctctctctctctctctctttttttttwtttttttggtgtggcctctacttacagataggagaacagtgaaaactgttattgtaagaaactgaattcttgttgcagcatgtaccactgtgtctggagaaggactatgtaaaaggaaygcagaaggcagggggacatcataggcaaaaggctagctggtttttgagttcagtacacaattaaatgacaaggataatcagcaaccatgaatatctcagatgtctaacatgagaattacagggaattattcagatctggagtctgaataattacataaatggaatctttttatcaattgcaaagtatcccagagcagagggaggatgcaaggtgtatgaaaccaccttgctgactgctgagagtgagtattaaagtacagcagaagcatgctctgataaaatcagagaggccaactcatg

SEQ ID NO: 39239 - DNA, 600 bp, Chicken  19866894272910_1
acatgcagcatcagcacggcacagggctaacagcagggcagaaaggtttatctgagctgtgatgggcgacacagcctgcctccacgggaggctgcagcattgggctgcgctgcccgtcaggcactcccagctgtgcggcaccgcagccctccgcagggatacccacacatggcagcgctgtgggctgcagcagtgggacaggcaggcaccgacccacagcccatggcacagagcacagtgaggtctcactttaacactgaaaaaatgcacgtttatgtaaaagtatgatcaaagcactgygtacgtagaatttcctagcaataaatcacataaacggatatctacactgggtcataaaactgagcagattctaaactgattggaaaagttgctcataaattgttgtttttagcgagctgtaaacaaaagctgtataaataccaagtamgccttgtaatgcagttagatacagagaagtgctccagcaggtctgtgctcagagaacatgcactggttttggaccatgtttggaactcttttgttattgcccagcacaagcgttagatctgctgcttgaagcactggtaataaagggagagg

SEQ ID NO: 39240 - DNA, 600 bp, Chicken  19866894272910_2
ctccgcagggatacccacacatggcagcgctgtgggctgcagcagtgggacaggcaggcaccgacccacagcccatggcacagagcacagtgaggtctcactttaacactgaaaaaatgcacgtttatgtaaaagtatgatcaaagcactgygtacgtagaatttcctagcaataaatcacataaacggatatctacactgggtcataaaactgagcagattctaaactgattggaaaagttgctcataaattgttgtttttagcgagctgtaaacaaaagctgtataaataccaagtamgccttgtaatgcagttagatacagagaagtgctccagcaggtctgtgctcagagaacatgcactggttttggaccatgtttggaactcttttgttattgcccagcacaagcgttagatctgctgcttgaagcactggtaataaagggagaggaaggagaaggaatcagcgctgcctgctttgctgcctgtcctggttctgctgctcacagagctttacatgcctctacataccttgctgccatttgctggggctgtgtgagccagattcctcctctgaactgttggcatttcatttaatt

SEQ ID NO: 39241 - DNA, 600 bp, Chicken  19866894272918_1
tgtcgtgcagtaagataggatgctgaagccttggggaattgaatcgtctaagttgaaaggggcactttgagatcatcttttctgactcccctgcaatgaacagagtgctaagctcctgttgtaccctgcagctgtactagtaaccgttgttgcctctgtgggagcagcaaagctctctgctcgttgccccatcgctgctttggaggaattcagtgaagagcctcatctgcacagagcaacactgactccatgtggctgctgggaccggcagtgcagcagtgtgacactgcccctgtgctyggtgtgcaattgacatttatagctgaagctgctggctggcctggagcagttattcacgtgccgctccatcactgtgtacagaagcagtctgaaaaataatggaggtgctctttctgcaaagctgggtgttgaagtccacgtgtaaaggattgttttccaaattaatgattacccttcttcactcgcaaaccactttgaaaacaaccagaaccacaaaccaacacccaccccattgccgagatggatctcctttgatttcaaactcagcttataatccaaacaaagggaaagcctcgcggt

SEQ ID NO: 39242 - DNA, 600 bp, Chicken  19866894272924_1
gtaaaaactagaattcagtgtgtaacgacttctaaaacgtcatagaaaggtgcaatgcaagatttatgttcaaagtaaacaagcaactattatctgtacccttatatgaaatttttcaagggcaaaagcaagatttatttttttaacctctgtattttattgcagatggaaaaaagataaaaatctgttgtgctgcagtaaaaacaaacactttgtggttatattttatagatggaaataaaatgactaaccttaaggtttctgtatttttccctccttaatttagattttaatccagcrctatggtcccttaggctatctcactctctctcacttcaatacatttggatatgttgtagagattgtacttaatccaactttttctattttgtcagcagaaacattaaagtaacagctttcttttttcttacttttgttctgtttttcacatttttaaattgcaaatgataatatgtaactgtaattgctctatttgcaggagaatccaagaggtacatggaaagtggctcacttcctgtttatcctcacattatgtgaaatacattttcaatgaagaaaattaaacttgtaaattgtagg

SEQ ID NO: 39243 - DNA, 599 bp, Chicken  19866894272931_1
  misc_feature (1)..(67): n is any nucleotide
nnnnnnnnnnnnnnnnnnnnnnnnnnnnnnnnnnnnnnnnnnnnnnnnnnnnnnnnnnnnnnnnnnnaattctattaacagttaaatttaaaaaagtattcaagccccagaatccctagggggaaaaatatttataataaattaattggatcgcttgcgtatggaatgtaactgagatgtttaacttgtttacatgtagatttttagtatctgatactactgtacataaggttattataatcctgagtcagatattctggttctcctgttcaagccataaagattcagatttcttaaacrttctatacttcatgttcataaaaagcatgccagtcagtatggcagcaagcatctactgagcatccaggacagacagacttccatgtgctgtactcattaccagaaaatcattttgagaagcaagaataaaggcagaaatattaatcctgtgccctttactctgtggataattatatcctcagggtagcattgaatttatccttcattagtaggctgaatgctgtttctgcacttggagagatattaaatagcctgtgtaggtgcagttttgattagcataattgttgcactggtgacgg

SEQ ID NO: 39244 - DNA, 600 bp, Chicken  19866894272931_2
ccttcattagtaggctgaatgctgtttctgcacttggagagatattaaatagcctgtgtaggtgcagttttgattagcataattgttgcactggtgacggagaaatgatcttcaaaagatagatgtgtcattcataaaaaaatctgatgcagggaacagatgcacaattgcaagactgtacagggatataacacacgcattcttaagctgacattgcttttccatgtatcaaaatcacaggacacactgcaggaggttacatggcccaacctcctctgagctggactaaatagaaagtcrgatcagttttgcattcagctgaggtagaattcagaagtcaatcttcatttaagaaatgggtgtctaaaagtgtttcctgcaagaatgcccttttcacctacaggtagaagaggccaatccattttcatgatgatgtgacttattgtcattcttttggctccgcataaggaactctgagacaccttgggaaattcatattttctgacagcattttaagtggtcaaaaggaaaccagagagttcaagcatatcttttttttttttggagttgatggtttcaagagtttaaaaatcctatgat

SEQ ID NO: 39245 - DNA, 600 bp, Chicken  19866894272938_1
gggaggagggaaatcaggtgattatgttgacagaagttacattatgctggctaaaatgaggagctgcagttctgaaaactcagaactctgtctgagtgcctttctgtttgttttgtaacttggtcaatattgtgcaacagctttacccccaaatttagacgtgattcatctgcaagattaaacttgtagttgactaaacgactgataatcatagtgtaatatccttttttttccctgtggacctaccctaaaactgtgtgaatgtctgctgttttacagatatcattgtgcaagtgctaracagtttttagagctgtaatgtgaggtctgacttctgaattgtgctctagggacaaaaacttccagttgcttgtttattccaactgtgcaggttggtttcttgtttggaactgttggtattgcatcagctggtgttatgcacagtcagacttgtggaagtagtgcacaaatacagaatctttgagatctgtttaagcatagcttctgggtgactggaaaaagaggcatctgtgaacggtggtgtgtggtacacccatgtttctttggcatggcaacttcttcctgcttctctaagttagt

SEQ ID NO: 39246 - DNA, 600 bp, Chicken  19866894272941_1
tgggactacagacctgttaggaaatgctcatattgctgatagctgccagtatcttttctagaagaggaggcagcgtcttcaagtttcaaagctgtcagaaactggttgcctttcatgactacttcgaagaagagagataacactattaaaaaaaaaaaaaaaacagcattaaaaattaacgtgctttcctacccccctttctaagtgtcttacactccctttcatgttgctgggatttcttttgaagcaattgtcatgtaaagtgtattgggcacactggcaataatttttttagagacyggatttcaaaaggyttggtttgtcatactgtaagctyttattttgatagcacttygtgttagaaaataaaaattaaaaaacttcccttcatctcctattgccttgcacagtatttgtgtagttaatggagaaatcgagcccaagaagtaggcttgctttgtaattatatgttctgcagattacttgctaataatacttggcattacttgctaactgtgttgtaccatatcatttgcagtagttttcctcttgtgctttaaaggaagtgcccatcagggtgatgaataatcccagaactgt

SEQ ID NO: 39247 - DNA, 600 bp, Chicken  19866894272941_2
tgttaggaaatgctcatattgctgatagctgccagtatcttttctagaagaggaggcagcgtcttcaagtttcaaagctgtcagaaactggttgcctttcatgactacttcgaagaagagagataacactattaaaaaaaaaaaaaaaacagcattaaaaattaacgtgctttcctacccccctttctaagtgtcttacactccctttcatgttgctgggatttcttttgaagcaattgtcatgtaaagtgtattgggcacactggcaataatttttttagagacyggatttcaaaaggyttggtttgtcatactgtaagctyttattttgatagcacttygtgttagaaaataaaaattaaaaaacttcccttcatctcctattgccttgcacagtatttgtgtagttaatggagaaatcgagcccaagaagtaggcttgctttgtaattatatgttctgcagattacttgctaataatacttggcattacttgctaactgtgttgtaccatatcatttgcagtagttttcctcttgtgctttaaaggaagtgcccatcagggtgatgaataatcccagaactgttttccaaagctgag

SEQ ID NO: 39248 - DNA, 600 bp, Chicken  19866894272941_3
gatagctgccagtatcttttctagaagaggaggcagcgtcttcaagtttcaaagctgtcagaaactggttgcctttcatgactacttcgaagaagagagataacactattaaaaaaaaaaaaaaaacagcattaaaaattaacgtgctttcctacccccctttctaagtgtcttacactccctttcatgttgctgggatttcttttgaagcaattgtcatgtaaagtgtattgggcacactggcaataatttttttagagacyggatttcaaaaggyttggtttgtcatactgtaagctyttattttgatagcacttygtgttagaaaataaaaattaaaaaacttcccttcatctcctattgccttgcacagtatttgtgtagttaatggagaaatcgagcccaagaagtaggcttgctttgtaattatatgttctgcagattacttgctaataatacttggcattacttgctaactgtgttgtaccatatcatttgcagtagttttcctcttgtgctttaaaggaagtgcccatcagggtgatgaataatcccagaactgttttccaaagctgagagaaaagggtctaccatgcaaga

SEQ ID NO: 39249 - DNA, 600 bp, Chicken  19866894272941_4
ttctagaagaggaggcagcgtcttcaagtttcaaagctgtcagaaactggttgcctttcatgactacttcgaagaagagagataacactattaaaaaaaaaaaaaaaacagcattaaaaattaacgtgctttcctacccccctttctaagtgtcttacactccctttcatgttgctgggatttcttttgaagcaattgtcatgtaaagtgtattgggcacactggcaataatttttttagagacyggatttcaaaaggyttggtttgtcatactgtaagctyttattttgatagcacttygtgttagaaaataaaaattaaaaaacttcccttcatctcctattgccttgcacagtatttgtgtagttaatggagaaatcgagcccaagaagtaggcttgctttgtaattatatgttctgcagattacttgctaataatacttggcattacttgctaactgtgttgtaccatatcatttgcagtagttttcctcttgtgctttaaaggaagtgcccatcagggtgatgaataatcccagaactgttttccaaagctgagagaaaagggtctaccatgcaagatttttatggggaggattt

SEQ ID NO: 39250 - DNA, 599 bp, Chicken  19866894272943_1
  misc_feature (1)..(130): n is any nucleotide
nnnnnnnnnnnnnnnnnnnnnnnnnnnnnnnnnnnnnnnnnnnnnnnnnnnnnnnnnnnnnnnnnnnnnnnnnnnnnnnnnnnnnnnnnnnnnnnnnnnnnnnnnnnnnnnnnnnnnnnnnnnnnnnnnnaatgttttgtacatattgctttatgtggatagctggtaatgtcattctgtgttttgtgttaacaagctagatttttttgtcactcttacttagtctgctccagtttgaaagagctgtaagctttatcagttatttctgagttctgcaagctgaggtttttgtttgttttyggagaagtagactagtatatcagctgggttaagaggctcttactgttatacttgagacacactgaggttgtttttttttaagctgtgaataaatgtacaaaaaaacttgatagagactttggagatattgttaacatgtcatgtcatgttagcatatgctaaatgcctttgtagatggcaagttcaatgcttataatttcatcattaattgtgtgaaatgtgtaccttgcagtgactagcagaaacttcaaaatgtcagttttaggtgttatgtcatgtccaaggtcacttacagatgt

SEQ ID NO: 39251 - DNA, 600 bp, Chicken  19866894272943_2
acaaaaaaacttgatagagactttggagatattgttaacatgtcatgtcatgttagcatatgctaaatgcctttgtagatggcaagttcaatgcttataatttcatcattaattgtgtgaaatgtgtaccttgcagtgactagcagaaacttcaaaatgtcagttttaggtgttatgtcatgtccaaggtcacttacagatgtgcattatggtatgtgaaaacttattcatacagattagattctgattaactttattttcttgtgtgttacttgatcactgcgtaaacaccaaaagagragtgcatacttcatataaaacagaagaaaaaaatayttgcatgaatctcactaaaaggatctgagtgtaataatacagggtacaaatgggaaaaattaatcctgaaaacaacattacattgtcggctgcactaacatcttgctgcttaatagtgtttgtgtttgcaagattatggtatttcttcagctaaagctcccacacaggaactggaggcagaagaaggccaaatattatttccatgctctttatcgtttgtttttctagattttggcagaaatcatgcattcttttgttttaatt

SEQ ID NO: 39252 - DNA, 600 bp, Chicken  19866894272943_3
aacatgtcatgtcatgttagcatatgctaaatgcctttgtagatggcaagttcaatgcttataatttcatcattaattgtgtgaaatgtgtaccttgcagtgactagcagaaacttcaaaatgtcagttttaggtgttatgtcatgtccaaggtcacttacagatgtgcattatggtatgtgaaaacttattcatacagattagattctgattaactttattttcttgtgtgttacttgatcactgcgtaaacaccaaaagagragtgcatacttcatataaaacagaagaaaaaaatayttgcatgaatctcactaaaaggatctgagtgtaataatacagggtacaaatgggaaaaattaatcctgaaaacaacattacattgtcggctgcactaacatcttgctgcttaatagtgtttgtgtttgcaagattatggtatttcttcagctaaagctcccacacaggaactggaggcagaagaaggccaaatattatttccatgctctttatcgtttgtttttctagattttggcagaaatcatgcattcttttgttttaatttttcacttaaccacacatgacactttatagccttta

SEQ ID NO: 39253 - DNA, 599 bp, Chicken  19866894272947_1
  misc_feature (1)..(178): n is any nucleotide
nnnnnnnnnnnnnnnnnnnnnnnnnnnnnnnnnnnnnnnnnnnnnnnnnnnnnnnnnnnnnnnnnnnnnnnnnnnnnnnnnnnnnnnnnnnnnnnnnnnnnnnnnnnnnnnnnnnnnnnnnnnnnnnnnnnnnnnnnnnnnnnnnnnnnnnnnnnnnnnnnnnnnnnnnnnnnnnnnnctgtgggtgttaaatctgtgattcttggttggaagagaaattgtttccttgcttcccaaagaagacaggaaacctggaatcctatacgtccagactacctaaaccataagcgaagaacaacrctattttacctacagcaggctacagccactgaacaaaccaacacartacttgggcactctgcctccagttcgtacagttatcaaattggaaaatggaartctttgtttcctccaattagaaagagaagtctgagtcatactggagaaggaatgggactgctgtagacttaatcggtacatttcaaaatattgtagattataggaaaaagcagtatagtgatttcgagacaaatattggtttccagactccagttaaacagggatttcatatcagcagtttcattttgatctagttaggc

SEQ ID NO: 39254 - DNA, 599 bp, Chicken  19866894272947_2
  misc_feature (1)..(132): n is any nucleotide
nnnnnnnnnnnnnnnnnnnnnnnnnnnnnnnnnnnnnnnnnnnnnnnnnnnnnnnnnnnnnnnnnnnnnnnnnnnnnnnnnnnnnnnnnnnnnnnnnnnnnnnnnnnnnnnnnnnnnnnnnnnnnnnnnnnnctgtgggtgttaaatctgtgattcttggttggaagagaaattgtttccttgcttcccaaagaagacaggaaacctggaatcctatacgtccagactacctaaaccataagcgaagaacaacrctattttacctacagcaggctacagccactgaacaaaccaacacartacttgggcactctgcctccagttcgtacagttatcaaattggaaaatggaartctttgtttcctccaattagaaagagaagtctgagtcatactggagaaggaatgggactgctgtagacttaatcggtacatttcaaaatattgtagattataggaaaaagcagtatagtgatttcgagacaaatattggtttccagactccagttaaacagggatttcatatcagcagtttcattttgatctagttaggctagtaatagctgcagtacaaatgcagtcaagcatgtaattgaaaac

SEQ ID NO: 39255 - DNA, 599 bp, Chicken  19866894272947_3
  misc_feature (1)..(79): n is any nucleotide
nnnnnnnnnnnnnnnnnnnnnnnnnnnnnnnnnnnnnnnnnnnnnnnnnnnnnnnnnnnnnnnnnnnnnnnnnnnnnnnctgtgggtgttaaatctgtgattcttggttggaagagaaattgtttccttgcttcccaaagaagacaggaaacctggaatcctatacgtccagactacctaaaccataagcgaagaacaacrctattttacctacagcaggctacagccactgaacaaaccaacacartacttgggcactctgcctccagttcgtacagttatcaaattggaaaatggaartctttgtttcctccaattagaaagagaagtctgagtcatactggagaaggaatgggactgctgtagacttaatcggtacatttcaaaatattgtagattataggaaaaagcagtatagtgatttcgagacaaatattggtttccagactccagttaaacagggatttcatatcagcagtttcattttgatctagttaggctagtaatagctgcagtacaaatgcagtcaagcatgtaattgaaaacttgttgttgagataaatagttatattgatcaaaagcatttggygagaaagaaa

SEQ ID NO: 39256 - DNA, 600 bp, Chicken  19866894272947_4
gaaaatggaartctttgtttcctccaattagaaagagaagtctgagtcatactggagaaggaatgggactgctgtagacttaatcggtacatttcaaaatattgtagattataggaaaaagcagtatagtgatttcgagacaaatattggtttccagactccagttaaacagggatttcatatcagcagtttcattttgatctagttaggctagtaatagctgcagtacaaatgcagtcaagcatgtaattgaaaacttgttgttgagataaatagttatattgatcaaaagcatttggygagaaagaaaagtaaatcagggagaaatgacaagagagagagaggaagggaagagatattcattatctttataccttaaaactggccatattgtagccattttccatgacagcttaaaagacgtgtatgggaaatacaggaatctaatgatttgtctattctgcatgtatcattccactgattagcttctgaatcccaggtcatgagaacaaatcagcctgcacttagctttaaatctggagctctatcatcagctaccatcacacagaaatgtgacagcttatctacttttatggacta

SEQ ID NO: 39257 - DNA, 600 bp, Chicken  19866894272954_1
atgtagtaaaattaacctggctgaaagatcaggtgggctgtctcatctatactcccactatctcttacaggtgaagagcttagacagtgtgcctgtggatgaggtgaggaggtgcgagattgtggctgatgttagcttctgttcccttgactaacttttatgagattccacaagagggtgcgccaaaaattttcccttcaaggcttttatatttcactggcagagggtcctgccctgccctgacctacagcaataaaatagcatatgtcaagtcagctgagctactgtaactgtcagggygaggtcagacctctcctgctcaaatgtatgataaactgcactgcaatgaaacagacacggacaaaggagtatagtacagctgctaacattttgttatgccaatacaccttgactgcccatttgagtgagcccaaactgccatacttatatttctaccttcctactttcttcatcctatttgtagaattaggcacctgttataaagagggcaagaaaactgagtgttgcaagctgcatgtgcttatgaagtccacaaggcagggtaaggaatggatagggaagtaataaacagtgaagaga

SEQ ID NO: 39258 - DNA, 600 bp, Chicken  19866894272957_1
aagaagtactcccttctagtgcatcctacctgcttttacatcgtattacattaccagacgcacacagggcataacttccacaacaaacttgaaagaataaactgcttttcacagtttcaatagcttccaaatatcaacaatagctgccttgaatttgagtttctattgtattcagctatctacagtacaaagcaaagaaaaggaaaccattattacaagggatcaagctgtgaagatacacagcaaattcaacaggaatagtggcccagaagaataatcacctgtaacctgaactaccakttgtagaaatgcaayggccatgtggagctagtcccaagttcccatccatattctactaacagaattataacaaaaccagtccaatatttataggtttctgaaacagctgaagtaggaaaggaattacaaaaaaggaaaccaccagtcagaggtagtttttctaagaacagtacctggaatagcatgtatcagaaatgtttattcataccaatacaagagcatcagcagtagtacttccatgtgaaatgggagcaattacctgatgaaaaccgacctcctaaattagtacaagtactgaga

SEQ ID NO: 39259 - DNA, 600 bp, Chicken  19866894272957_2
ctagtgcatcctacctgcttttacatcgtattacattaccagacgcacacagggcataacttccacaacaaacttgaaagaataaactgcttttcacagtttcaatagcttccaaatatcaacaatagctgccttgaatttgagtttctattgtattcagctatctacagtacaaagcaaagaaaaggaaaccattattacaagggatcaagctgtgaagatacacagcaaattcaacaggaatagtggcccagaagaataatcacctgtaacctgaactaccakttgtagaaatgcaayggccatgtggagctagtcccaagttcccatccatattctactaacagaattataacaaaaccagtccaatatttataggtttctgaaacagctgaagtaggaaaggaattacaaaaaaggaaaccaccagtcagaggtagtttttctaagaacagtacctggaatagcatgtatcagaaatgtttattcataccaatacaagagcatcagcagtagtacttccatgtgaaatgggagcaattacctgatgaaaaccgacctcctaaattagtacaagtactgagataattaagccccatc

SEQ ID NO: 39260 - DNA, 600 bp, Chicken  19866894272959_1
cacacaaatgatctttaggctgaaggaaatgaggatggtctctagcgttttgattaagctgttagacttaagttatgtcccaaaatagatgctgctatttaagtccacagtctggtagctgtcgaaacgtgccctttctgtgtatttataagtaccttactctactcagatattgtctaataaaagatgcatgggatattaaattacagatacagtatagcctgcaaagcttaaaaaatgctgatagacttgctaccctgatgtattgtccagagcctggaatccttcattttgggtgtwggatagctcatctctgtgatatgagaacacagtcatttgaaagtaccctggaagataactgaagaggaaattctgtgtttaggtgtattactgatgttctctgccacctgagcaaactgagattgacagcgtaatccaaacggtagtcaggtttttcagcttgttcagcctgtcttaacgtattaatggtgctaaatgagtgatgcttaaacatatgtgttttgggcatgtgagcatccattcattttagcgggtcagccatgtataaataccaactgtggtccttctgaacctctctcc

SEQ ID NO: 39261 - DNA, 600 bp, Chicken  19866894272971_1
tttatcattgtgagctatgtaattttattgcatgggttaatacatttatttctatctgcctgtaactgaagacttggaaaactgtacttatgcggatgcactcaccttgaaaaaaaagatctgaaaaacatctttagcttttcttccttgttatgatggaaagcagactatacagatgaatgattcatgttaatttataaaactattttaactacctgtctttatttataagtgcttcaactcatgcagtttccgtgtaagctgctctccccaagtaccacagtagtactcacagtagtrctcacaaaagctgctgcatttttacatgtcttctcatctttattctctatgtcactgcttcttttgtttgtttgttttgttttgttttttggagaattaggatatccatagtgttaaaagctgctaagcaaggatgtgtgggtgtgtgggggtgtgtttttattacaagctccaatcaagtaaatgcgctttccaaggttcagttctgtagtttaaaatgagtttatgtctatacatatacaatctaggatatcttctaatagcaagtcttcattagtttttaattgtctttgctgaatg

SEQ ID NO: 39262 - DNA, 599 bp, Chicken  19866894272977_1
  misc_feature (1)..(13): n is any nucleotide
nnnnnnnnnnnnngatccaaaagactctgtttgcaccaaccctgattatttgcgtgcttcagccaggaattttttgtgccacttctccacattgtgttcatccattccatgtgtgctgtacacctggaaattaatgaacttgtaagtaatgccaacaaccgtaccatctgaagatctgggatttcagtcgctcaggggcacaattctttaagttcttgcattttcccttaactgtatggaattctgtcttgtagaagggtttgttttttgacctttaaagaatgctaatgcccccagcakgaatgacacactgcagcatgatcattacaggcttgtcgatattcactaacaacagtgaattaagagtacctgtcaccaccttgttccattgatcaaaggcgcattgattgtattttgctatgacataatccagatagtccaaggagagaacatggacaacctcttgcagggagactgctgctgaagcagggctgtaggtaccagtcctctggggatcttttctgcagccgtgcaggaatattacattcccacagttgccactgctctaggaaaaccattcaactgtgtgtccctttcat

SEQ ID NO: 39263 - DNA, 600 bp, Chicken  19866894272977_2
tctggggatcttttctgcagccgtgcaggaatattacattcccacagttgccactgctctaggaaaaccattcaactgtgtgtccctttcataccttaggtttgtaaccaatccattcagtacagccagtgataaaaatgattctcctggatagcgggaatatttgaatatacggctctgaacgtacagttaagattctggggctggaaactaactggcacaaccccagcaaagaagctgtggttttgagtcagaacactgagtttctgtaaggattttcctgttttatttcctctttcrgaaaggcttgcactcccttgtaaattggctttgtagtcagaaataggaagctgcaagaaaagcatgaacactgggagatatgtgggtgtgagaggtatatgggcaggagagagagagcgagtaaaatgtgaacgcagatatttcttctgagttcctttccctgagaactggtgggagttttgttagaaggacaaagtcaggaggactcagaagtttgtaaatagttcactcgctgaagtgcttaaacggggactttgacatctaacttgctgcactacatgcactaccttgctggtacct

SEQ ID NO: 39264 - DNA, 600 bp, Chicken  19866894272979_1
gataagaatgattattgtggccattagggacgaacttgggcagtgtccaatattatcagccaaaagaaatagagaaatgtaatactgtgtgaaaatgcttatttatcctgacagagtactgacccgcaaacacggttttggtatgtaattaagccagaggcattacttacagtagctcgacactcctgcctgtcctgagcctcgggtgcctgatccgaagcccgggagcagcccagccggcggttggggtgaggtgacacagtgacagcctggggtgaccttgactgcggcacggctgtrctgccacgtaccgctggaggacgtgtggctttggacagcgttcagagtcggctgcgctgtgtgagaatgagctgctgtcacctagagcactgcacgatccctgctttgtgcctgtgctgcgctgccatccagccgcaccgagggcgccttggctgaggctgyggggctgccagcgggaccaggatcctgcaggagcaggaatgaaggcttacatggcaaggctctgaagtgtgttctgtgagcagatttgcaaggagtgagcccgtcctcgtttgctggtgcagtgtggatgatgctgag

SEQ ID NO: 39265 - DNA, 600 bp, Chicken  19866894272979_2
ttacttacagtagctcgacactcctgcctgtcctgagcctcgggtgcctgatccgaagcccgggagcagcccagccggcggttggggtgaggtgacacagtgacagcctggggtgaccttgactgcggcacggctgtrctgccacgtaccgctggaggacgtgtggctttggacagcgttcagagtcggctgcgctgtgtgagaatgagctgctgtcacctagagcactgcacgatccctgctttgtgcctgtgctgcgctgccatccagccgcaccgagggcgccttggctgaggctgyggggctgccagcgggaccaggatcctgcaggagcaggaatgaaggcttacatggcaaggctctgaagtgtgttctgtgagcagatttgcaaggagtgagcccgtcctcgtttgctggtgcagtgtggatgatgctgagccctataccaaccatgctccatgagctgcagctcccagacaggcctgtgagcggctcgcagtagtgaacctgcctcactctctattgaaacatatttgtatctcacaccttgggtttgccttcagctcaggagaagttttttgaaagacataaaaagtcaca

SEQ ID NO: 39266 - DNA, 600 bp, Chicken  19866894272985_1
tgcggctaaattctcagtgtttgttctgcacaacatttttccccaggtgataagcctgcaagtctactggagaaaaagcacggtgaagtgcaggtgggaaatgcataaagcagctttcaccgtggtgtaattgggagggctaactttattctgctgtgcagcttatctcagcaagctctgccttttcctaatacgactgcgaacgtgccaaggcgttccaggaaaaacaaaacagaacgtgaaaccaccttcacttacagggatgacgcagactaagttcagaagagacgaggaagactkaggtttttgctcaggtaaactttacattgtttccttttcatgaaccaagaggatgaccctctcaaatgcttgaaatctgttgcagccttgtagaaggaccaccttcaattgctcctggaaattttcttagagttctttyaagaactcagttctcattgttgatgagtttttctgttttcatgatagcccttagtgaaagctatcaaaatgtactagaagagcacttgctggggagagaaaagcatgggaatgcaacaagcagttggtgttttacatctcytttcttataaagggtttgat

SEQ ID NO: 39267 - DNA, 600 bp, Chicken  19866894272985_2
ctaactttattctgctgtgcagcttatctcagcaagctctgccttttcctaatacgactgcgaacgtgccaaggcgttccaggaaaaacaaaacagaacgtgaaaccaccttcacttacagggatgacgcagactaagttcagaagagacgaggaagactkaggtttttgctcaggtaaactttacattgtttccttttcatgaaccaagaggatgaccctctcaaatgcttgaaatctgttgcagccttgtagaaggaccaccttcaattgctcctggaaattttcttagagttctttyaagaactcagttctcattgttgatgagtttttctgttttcatgatagcccttagtgaaagctatcaaaatgtactagaagagcacttgctggggagagaaaagcatgggaatgcaacaagcagttggtgttttacatctcytttcttataaagggtttgataggactgaatgtccagttccagtccttctccagcagcagcatagcagccattcacgttgcttattgtgcttctttcacctgcatatacctgacctacacttctgcattacatccctttgtactcaggtttttttttttt

SEQ ID NO: 39268 - DNA, 568 bp, Chicken  19866894272985_3
agaagagacgaggaagactkaggtttttgctcaggtaaactttacattgtttccttttcatgaaccaagaggatgaccctctcaaatgcttgaaatctgttgcagccttgtagaaggaccaccttcaattgctcctggaaattttcttagagttctttyaagaactcagttctcattgttgatgagtttttctgttttcatgatagcccttagtgaaagctatcaaaatgtactagaagagcacttgctggggagagaaaagcatgggaatgcaacaagcagttggtgttttacatctcytttcttataaagggtttgataggactgaatgtccagttccagtccttctccagcagcagcatagcagccattcacgttgcttattgtgcttctttcacctgcatatacctgacctacacttctgcattacatccctttgtactcaggttttttttttttaatgtttctgtgtagttctttaaacacagatgctgtattcactcaattcctttttacgttaataagatctttgcttttccttttattttccaagtactttttttctatt

SEQ ID NO: 39269 - DNA, 600 bp, Chicken  19866894272987_1
atttgaaatatttcattactcataccacactaatttagcacaaatagatggtttgcatggcctttatggtattaaaatgttgcaagcgtcgactatgtgacgtttgttagaattctgttgaacgcaacatgttttctcccactccttctgcaaatctttcctacagagaaggcattagtcaaggtgaaggaaactctctttacaggtagttatttatggttgcctgtggaattattttgcaatcaaagctttgttttgcatgatctgactgatgcaaaaagcagaaaataaatatcttcmttctcataacctgattgcctgagggatttacaatgtatatccagatggcatattgtgtggcctatcaaataagggcatggttattaaatttcagagcaggaaggtgcaggcaactaatttcaggcaagggaacagtcatttcatttgatcaactgaataattctttgttcaatatttacccaaatccaagccatgtgagctactgagctctcaatattcgagaccatacacaaacagacaaagcacattcatctttgtctttgaaaatataagcaaagatgaaactttaaagaactatta

SEQ ID NO: 39270 - DNA, 600 bp, Chicken  19866894272995_1
ttcaacattatttaaggaacactttttctcaggtgtgtactccatcatccctcaaagctaagaatcaaaattaaccaaatgtagatgcattttttcatgttcagcagaggagcattaacagttcaggaatgaggggaaagatagtctttctgcaataagaaattaaattgatgcatattttgttactttattcatggtgaaatatgtaatgatatctatatgtgggtatgtatctatctgtcttcagcagttttaatcttaaagagaacagctaaaacaaagggtagagaatgggcagayagataacactgaaggaaaaatggcacattgattagaacttttacaaggaaatttgaaaggaagcatgacaaaagttgtgataaacaaaaactgaaatatcccaaaaactgaaatgtccccgattgcttttatgacaaaataaatgtttattttatcttctagtacacctgacttcagcatttcttcatgttttgatttcaagaagcattctaagaaaggtatttcattcccaattaatgacatataaaattcaaaaaaagtgggtggattgaactacaatcttacgtttttgaaagtacc

SEQ ID NO: 39271 - DNA, 466 bp, Chicken  19866894272996_1
gcactcactttcaggcagggttgtgttcttgcatcctcagtacgcagcactgcatactcccttttagctggaaaaagcttgaggtctattcttaaatttaatttcaccttaaaagaaaccatgtgtttaaataacaaggggagagtgctaatgtaatctgggtttaccaaacctaaacaacgtgaactcaaactcttgcttcccttaagcaaaataacacaggctctcggagagctttgcactagccctgcttgcacattcctgctttaaacgcagcttctgcagatccctttacatccrgatagattcagatatatacattgattttaatctgaaacactcaaccatgcaaggcaggatgtatcaagtcaggaatgtgcatgcacacgtggtctctccgcttggcatcttacgtggggcttcccaaacttctcacatgctcacctttactaaccactggggaaaa

SEQ ID NO: 39272 - DNA, 600 bp, Chicken  19866894272999_1
cttcactcttaaagagcacaacagattcataatcttcacaaaatcactgaaggcttaagaggatgcctccctctgggcccagtctttgtggcatttcagaggtcagcaagcttctttgtcttcagattaacctccttgaatatgttaaaggataaacttctttacagagctctacaccctccacaggtcctttggtaagcacatcccttcatcccatgtagggtagggaaataaaaagtcctcaaattcatggcagtgattttcacgttgagcaaaacaagaaaaataaatctaggccaygttagctcttgttggtgtaaatacaagctaaatactgtgatggaggacaacgtgttagtggctatcatatcataaagtacaaatcagaatttcctttgaagaacagcaagttaaaatgatttctcaaaatagtgagatttttcatcatttgtgaacaattttaattcaagagagatttttcaccaagtttattcttatcatccattataccagactaacagatacatgggcatgcattccctatagattctattttgccccatacataacatattcctacagagatgccagtcagtatca

SEQ ID NO: 39273 - DNA, 600 bp, Chicken  19866894273000_1
aatgagcatcaagtagtttgaataggtctcttctcaaggatcttaaaaacataataacaaaagcaagatggtaagaaagaagtatgtattctttattaaaagctgtagtagtgcagtcttctgggaaaagaagattaaataatgccttatttaagagaaacagtagttactggcttattcagtaggatgagttgctgggttagctgtctttgtttaggaaactgtcattatgtttgtgccaaatgaggtacagtgtcagaaatcacagatctcaactttgatctgcaagtctatctatcrtcattgattgtgcaaagatctctctcagctctccaatgggagaattaatatccacattcttaacaggcttatatgaagtctttataggctgtatttgagatagattttatgctgctagttcaatttgattgacagtttgcatattgaatgtttaccactgcagcaaagaattcacaaaatactgaactacagaccaatcttacaagcttacacttttaaacaaagtcaatatttcttacagaatacttgatgtatttcgttttagtatacttcagtgcagtgatgtaatgctctgaccta

SEQ ID NO: 39274 - DNA, 599 bp, Chicken  19866894273028_1
  misc_feature (1)..(196): n is any nucleotide
nnnnnnnnnnnnnnnnnnnnnnnnnnnnnnnnnnnnnnnnnnnnnnnnnnnnnnnnnnnnnnnnnnnnnnnnnnnnnnnnnnnnnnnnnnnnnnnnnnnnnnnnnnnnnnnnnnnnnnnnnnnnnnnnnnnnnnnnnnnnnnnnnnnnnnnnnnnnnnnnnnnnnnnnnnnnnnnnnnnnnnnnnnnnnnnnnnnngctgcacgcctgagtgtcctcttcccactcggtcggtacccaccgccaacgtgaaatcatagaatagcagaatggctgaggttggaagggacctccagcccctscactgcccygggcccagccatggctgtgggcacctccagggatggggcaccacagctctgcgcactgctggggcctccccgcctccgaggaaagaacttctcccaggccccagtgtggacaccaacrgtccccatataaatgtgcaaaagagatgacacagcactcccaccccacgtgagaaccccaggcagccaagctacggggtggctccagacaccgtatggttcttgtctttggggttcgctgcaggctgcttccccacctcagaggaatgccagctgggggtctgatcaaagca

SEQ ID NO: 39275 - DNA, 599 bp, Chicken  19866894273028_2
  misc_feature (1)..(187): n is any nucleotide
nnnnnnnnnnnnnnnnnnnnnnnnnnnnnnnnnnnnnnnnnnnnnnnnnnnnnnnnnnnnnnnnnnnnnnnnnnnnnnnnnnnnnnnnnnnnnnnnnnnnnnnnnnnnnnnnnnnnnnnnnnnnnnnnnnnnnnnnnnnnnnnnnnnnnnnnnnnnnnnnnnnnnnnnnnnnnnnnnnnnnnnnnnngctgcacgcctgagtgtcctcttcccactcggtcggtacccaccgccaacgtgaaatcatagaatagcagaatggctgaggttggaagggacctccagcccctscactgcccygggcccagccatggctgtgggcacctccagggatggggcaccacagctctgcgcactgctggggcctccccgcctccgaggaaagaacttctcccaggccccagtgtggacaccaacrgtccccatataaatgtgcaaaagagatgacacagcactcccaccccacgtgagaaccccaggcagccaagctacggggtggctccagacaccgtatggttcttgtctttggggttcgctgcaggctgcttccccacctcagaggaatgccagctgggggtctgatcaaagcaaggcctatt

SEQ ID NO: 39276 - DNA, 599 bp, Chicken  19866894273028_3
  misc_feature (1)..(69): n is any nucleotide
nnnnnnnnnnnnnnnnnnnnnnnnnnnnnnnnnnnnnnnnnnnnnnnnnnnnnnnnnnnnnnnnnnnnngctgcacgcctgagtgtcctcttcccactcggtcggtacccaccgccaacgtgaaatcatagaatagcagaatggctgaggttggaagggacctccagcccctscactgcccygggcccagccatggctgtgggcacctccagggatggggcaccacagctctgcgcactgctggggcctccccgcctccgaggaaagaacttctcccaggccccagtgtggacaccaacrgtccccatataaatgtgcaaaagagatgacacagcactcccaccccacgtgagaaccccaggcagccaagctacggggtggctccagacaccgtatggttcttgtctttggggttcgctgcaggctgcttccccacctcagaggaatgccagctgggggtctgatcaaagcaaggcctattagagggggcagggaggggatgtaaacctcagatgtcatcactcagcattatcagtgcacatttttctcatctgaagcyagatacaaatcagccccatggtaacaggaggtgcctggtg

SEQ ID NO: 39277 - DNA, 600 bp, Chicken  19866894273028_4
gaggaaagaacttctcccaggccccagtgtggacaccaacrgtccccatataaatgtgcaaaagagatgacacagcactcccaccccacgtgagaaccccaggcagccaagctacggggtggctccagacaccgtatggttcttgtctttggggttcgctgcaggctgcttccccacctcagaggaatgccagctgggggtctgatcaaagcaaggcctattagagggggcagggaggggatgtaaacctcagatgtcatcactcagcattatcagtgcacatttttctcatctgaagcyagatacaaatcagccccatggtaacaggaggtgcctggtgttgctactcaaaaccctgtgtgccaggaccgggggctgcaccgcctcttgctttctcagggacagtggccaaggacatccccacgagccacagggatgctcctgtggagaaacagagcccggagagctcctatatgagcttgcctaggatgggccccaagacaccatgtgagcagctgctcccccatgccacacagctcaggtcagagtgggaatccatccccacctccattaaaagccaggaacctgctggacacgggg

SEQ ID NO: 39278 - DNA, 600 bp, Chicken  19866894273028_5
acctgctggacacggggctggggccaccagtactgcgccgtgcgtgcgaccaagggcggcaggagctgcgtgatgtcgagccactatttatcagatgggctgactgcacggaaagtgaaatgaacttgtagtgaaagaagaatgatctgatcttatccacttctaatgaagaaatccgaggagaaaggagagctgggaagttcgcagcacagggagcacagacggtgtgctcggctctcatcccacacccacgagcacagactgctgccagcagcagccaggggcacccagaggcagtcrgaggtcacatctgggcctaagatgggacagagctgcatctcagagtgaggggatgccttttgaacagagaggaaccgaaccggcgtggagaagaagcgctctccccgtgttcggggttgggaggttcgggagatgccgcagttcccacccggggggaaggggattttcagcccccgcgctgcacgtatctgggagcggcggcagcggggggaggaggaggagagccgctgggaggtggcggattgacagctcaagaatgagcccttctctcctgacaaaacccacggagctgaacgctcc

SEQ ID NO: 39279 - DNA, 600 bp, Chicken  19866894273030_1
ttactgtctgttttgtctagtttgtctcattctcatgaattaatgtattgcctcaagcattgcagagagtggtgttgtagctcagatgaaatcattgacatggataggattatgctctaaaggcaataaacgtttctgctacagagtttaaataatttattttgtttagatatcatattccttgggctttttagtaatgtatttgcttaataaaacagcaaaacaaagaaaaaacacagaagagccccctgaaagtgaggggtgatcaagaagatggtgtgggctgtgaacagcgtaacygatttctggcctctctgggctatcaggatttctttgatgctgagaacttggactgtatattggagagtgtggttggctcagccagcagcagcgcaggctcaaatcttgttttctttctagagcttcactgtmcccactttgggcccagtctgccatctagctgtgttttgctttcatgtagggaaataattaaatttcaaagrtgttgaaggatgcctgatttcttgctccagagattcacttctctagttgcatcactagtcaatgygtaggtgaattttcctcccctcttgcctcaag

SEQ ID NO: 39280 - DNA, 600 bp, Chicken  19866894273030_2
tttctgctacagagtttaaataatttattttgtttagatatcatattccttgggctttttagtaatgtatttgcttaataaaacagcaaaacaaagaaaaaacacagaagagccccctgaaagtgaggggtgatcaagaagatggtgtgggctgtgaacagcgtaacygatttctggcctctctgggctatcaggatttctttgatgctgagaacttggactgtatattggagagtgtggttggctcagccagcagcagcgcaggctcaaatcttgttttctttctagagcttcactgtmcccactttgggcccagtctgccatctagctgtgttttgctttcatgtagggaaataattaaatttcaaagrtgttgaaggatgcctgatttcttgctccagagattcacttctctagttgcatcactagtcaatgygtaggtgaattttcctcccctcttgcctcaagttctggagtctttagccttggaattttctgctgtatgcatcttaaaggatggtttatggtatgggatttttggtctctgggctgtgatggccattgctttgttaaacacaggctattgaacagccatcacat

SEQ ID NO: 39281 - DNA, 600 bp, Chicken  19866894273030_3
tgcttaataaaacagcaaaacaaagaaaaaacacagaagagccccctgaaagtgaggggtgatcaagaagatggtgtgggctgtgaacagcgtaacygatttctggcctctctgggctatcaggatttctttgatgctgagaacttggactgtatattggagagtgtggttggctcagccagcagcagcgcaggctcaaatcttgttttctttctagagcttcactgtmcccactttgggcccagtctgccatctagctgtgttttgctttcatgtagggaaataattaaatttcaaagrtgttgaaggatgcctgatttcttgctccagagattcacttctctagttgcatcactagtcaatgygtaggtgaattttcctcccctcttgcctcaagttctggagtctttagccttggaattttctgctgtatgcatcttaaaggatggtttatggtatgggatttttggtctctgggctgtgatggccattgctttgttaaacacaggctattgaacagccatcacattgaaaggatggattcctccctgacttatctcagagctcccatgtaccagagggttgctgtgctctgcctta

SEQ ID NO: 39282 - DNA, 600 bp, Chicken  19866894273030_4
agaagatggtgtgggctgtgaacagcgtaacygatttctggcctctctgggctatcaggatttctttgatgctgagaacttggactgtatattggagagtgtggttggctcagccagcagcagcgcaggctcaaatcttgttttctttctagagcttcactgtmcccactttgggcccagtctgccatctagctgtgttttgctttcatgtagggaaataattaaatttcaaagrtgttgaaggatgcctgatttcttgctccagagattcacttctctagttgcatcactagtcaatgygtaggtgaattttcctcccctcttgcctcaagttctggagtctttagccttggaattttctgctgtatgcatcttaaaggatggtttatggtatgggatttttggtctctgggctgtgatggccattgctttgttaaacacaggctattgaacagccatcacattgaaaggatggattcctccctgacttatctcagagctcccatgtaccagagggttgctgtgctctgccttaggacatcagttccttcactgtcactgtgccttgtgtgcagagatattgctggaaggaaatgcaga

SEQ ID NO: 39283 - DNA, 600 bp, Chicken  19866894273033_1
gagctaccaacagaggaaatatgctagcacaacatttttagtgcaccttcatttttatagaagaagctccaattgaaattagttacatcatctattagtaacatggtcccagggccttaacaaatgacttttgctgggtttagctgccatgttttttgtttatttgctttttaagtggcaagaatcactgccctagctggctgctgcatttcattgccagtggttcttgtccccagaacaggaacaagagaataagatcccttcttatatcaccgtgagctcacagacctttgccactaraaggtggagattaagaggcagaacaccaaaaagacaaaagtttcctggtgaagaaacaagtccacaacaaagggagaatcttgccttccatagacacaaattgcacagaattgccatgctaaaaagcctttgtcctatagaaagttaacagcttaatttggatcggagaacactcactggaagacagattgtttctctttgtaagtctataatacaacaaagactgacatcatcattttgatgcttatcttgaacaagcagcctagaaggcgatgtctaataagaaaaaaatttaggaag

SEQ ID NO: 39284 - DNA, 600 bp, Chicken  19866894273035_1
aaaaaaggttaaggatcctgcctgggagcttttccccccagcagccatagcacttgcatgagttctctattcctgcagcatctggtaatgagaaatgaacagattatctggctgtctccatagtgctcatcttgccaagaaaatcccccacccagcaagagaaatccatgctaacatgatcaagatgtgcacactttcagtgtaataaacagaaccgaccctcagtcttggtcacagcaatgtctcacagagaaggccttgatttctcctcaaataacagtttaaaatagaagaaaattraaaaaaaaaacagaccaagaaaataaattatacccttcatcagagaatcaaactttttaattggctttgaagaattaagggagtagactgatgccwgtagattttatgaagagaatacatttttcagtgttatrtttttgtggaggtggcattctttgtatgtgcaccagtgctctggcttccccgccttcctcaggtcttctagatgtcaaagcccaccagcacttgcccaaggcaattcagagccacttagtcaaataggatcgagaaggagaaagtgtttataattcacagcatgag

SEQ ID NO: 39285 - DNA, 600 bp, Chicken  19866894273035_2; identical to SEQ ID NO: 39284

SEQ ID NO: 39286 - DNA, 600 bp, Chicken  19866894273035_3
aaaaaggttaaggatcctgcctgggagcttttccccccagcagccatagcacttgcatgagttctctattcctgcagcatctggtaatgagaaatgaacagattatctggctgtctccatagtgctcatcttgccaagaaaatcccccacccagcaagagaaatccatgctaacatgatcaagatgtgcacactttcagtgtaataaacagaaccgaccctcagtcttggtcacagcaatgtctcacagagaaggccttgatttctcctcaaataacagtttaaaatagaagaaaattaraaaaaaaaacagaccaagaaaataaattatacccttcatcagagaatcaaactttttaattggctttgaagaattaagggagtagactgatgccwgtagattttatgaagagaatacatttttcagtgttatrtttttgtggaggtggcattctttgtatgtgcaccagtgctctggcttccccgccttcctcaggtcttctagatgtcaaagcccaccagcacttgcccaaggcaattcagagccacttagtcaaataggatcgagaaggagaaagtgtttataattcacagcatgaga

SEQ ID NO: 39287 - DNA, 600 bp, Chicken  19866894273035_4
gaacagattatctggctgtctccatagtgctcatcttgccaagaaaatcccccacccagcaagagaaatccatgctaacatgatcaagatgtgcacactttcagtgtaataaacagaaccgaccctcagtcttggtcacagcaatgtctcacagagaaggccttgatttctcctcaaataacagtttaaaatagaagaaaattaaaaaaaaaaacagaccaagaaaataaattatacccttcatcagagaatcaaactttttaattggctttgaagaattaagggagtagactgatgccwgtagattttatgaagagaatacatttttcagtgttatrtttttgtggaggtggcattctttgtatgtgcaccagtgctctggcttccccgccttcctcaggtcttctagatgtcaaagcccaccagcacttgcccaaggcaattcagagccacttagtcaaataggatcgagaaggagaaagtgtttataattcacagcatgagacttcaagaccagatattatctgtcaaccacacagacttgagtatctttctaaaaaacaaactaatcttttcatgctgcaaaagctaagtcatcct

SEQ ID NO: 39288 - DNA, 600 bp, Chicken  19866894273035_5
ccaagaaaatcccccacccagcaagagaaatccatgctaacatgatcaagatgtgcacactttcagtgtaataaacagaaccgaccctcagtcttggtcacagcaatgtctcacagagaaggccttgatttctcctcaaataacagtttaaaatagaagaaaattaaaaaaaaaaacagaccaagaaaataaattatacccttcatcagagaatcaaactttttaattggctttgaagaattaagggagtagactgatgccwgtagattttatgaagagaatacatttttcagtgttatrtttttgtggaggtggcattctttgtatgtgcaccagtgctctggcttccccgccttcctcaggtcttctagatgtcaaagcccaccagcacttgcccaaggcaattcagagccacttagtcaaataggatcgagaaggagaaagtgtttataattcacagcatgagacttcaagaccagatattatctgtcaaccacacagacttgagtatctttctaaaaaacaaactaatcttttcatgctgcaaaagctaagtcatcctatggagagataagggttctgcaacaggatttgtccaac

SEQ ID NO: 39289 - DNA, 599 bp, Chicken  19866894273040_1
  misc_feature (1)..(5): n is any nucleotide
nnnnntttcatatgtgaagataggctaccattcagtgctgcatgtgaggcttcagagaagtacacagatactgtgctgagtaacaaaggtcctgttaatgaaacaggaggtgtggcactcttcaatcagactgggtaaagtcaggaacaaaagcacttacatacaaaccaaagctcaaatgacaacatttgaaactattaattacaactgtttagttctcactgagtttcctcctatagcatcattgatcagttctaccaaactgaattgaattgtaaggcttttctttaacatttgacsgaatgattaaaaaaacaagaccacaattgttctataaaggtatgttccttgatgtgctgcaggactttgtgtatcattttagagactttgcagttcaatgagttgaagtgcaatcagtccctcagggactgtaaccagcctcagcatagtcacctccacagtggccaccaaccaaagatgtcactgctatgtctacaccattttctgtcccagcttcccacagtaacataaaggataagagatgtggcttctttcttagaactgcaatactacttaattgcaggctgcttcagcttaga

SEQ ID NO: 39290 - DNA, 599 bp, Chicken  19866894273051_1
  misc_feature (1)..(215): n is any nucleotide
nnnnnnnnnnnnnnnnnnnnnnnnnnnnnnnnnnnnnnnnnnnnnnnnnnnnnnnnnnnnnnnnnnnnnnnnnnnnnnnnnnnnnnnnnnnnnnnnnnnnnnnnnnnnnnnnnnnnnnnnnnnnnnnnnnnnnnnnnnnnnnnnnnnnnnnnnnnnnnnnnnnnnnnnnnnnnnnnnnnnnnnnnnnnnnnnnnnnnnnnnnnnnnnnnnnnnnnggaagaggctgaaggcattgagccttgatcaagccaagtgtgacacccaccccacaggtgcccattgcccatccttgccctcccyctggcaggactgcaggggacagtgctgggtgccaatgcccactccaccagtctgggcagtccctgctggtgaccaacaagcagcyaccaggaaccagatctgaggacaaatccaccctaatggggctggctcataggaaccttgcagcacccccagaaaccccaaaccccgcacccacagcctggcagctgatggaggagcccagtgagaatgaagcaggtggggrtgtggggacacattcccctgggcactcacctggcactttctccctgttgtgtcccagccagtgccagaggggc

SEQ ID NO: 39291 - DNA, 599 bp, Chicken  19866894273051_2
  misc_feature (1)..(130): n is any nucleotide
nnnnnnnnnnnnnnnnnnnnnnnnnnnnnnnnnnnnnnnnnnnnnnnnnnnnnnnnnnnnnnnnnnnnnnnnnnnnnnnnnnnnnnnnnnnnnnnnnnnnnnnnnnnnnnnnnnnnnnnnnnnnnnnnnnggaagaggctgaaggcattgagccttgatcaagccaagtgtgacacccaccccacaggtgcccattgcccatccttgccctcccyctggcaggactgcaggggacagtgctgggtgccaatgcccactccaccagtctgggcagtccctgctggtgaccaacaagcagcyaccaggaaccagatctgaggacaaatccaccctaatggggctggctcataggaaccttgcagcacccccagaaaccccaaaccccgcacccacagcctggcagctgatggaggagcccagtgagaatgaagcaggtggggrtgtggggacacattcccctgggcactcacctggcactttctccctgttgtgtcccagccagtgccagaggggcaggatgctgcaggagcacatccagggatttccattcaggaagatcgcttggagctggggcaaggcatgcagcacccccgcctcca

SEQ ID NO: 39292 - DNA, 600 bp, Chicken  19866894273051_3
aaggcattgagccttgatcaagccaagtgtgacacccaccccacaggtgcccattgcccatccttgccctcccyctggcaggactgcaggggacagtgctgggtgccaatgcccactccaccagtctgggcagtccctgctggtgaccaacaagcagcyaccaggaaccagatctgaggacaaatccaccctaatggggctggctcataggaaccttgcagcacccccagaaaccccaaaccccgcacccacagcctggcagctgatggaggagcccagtgagaatgaagcaggtggggrtgtggggacacattcccctgggcactcacctggcactttctccctgttgtgtcccagccagtgccagaggggcaggatgctgcaggagcacatccagggatttccattcaggaagatcgcttggagctggggcaaggcatgcagcacccccgcctccagctcctccaggcctgttgtagcctaagttgagcatagacaggctggtgagaggcaggaaggtctcggggttcagcacagacaggtagttgtcactgaggtccagctcctgcagctccctgagccccagcagcgcctgcctgt

SEQ ID NO: 39293 - DNA, 600 bp, Chicken  19866894273051_4
tgagccgcagcagcaccggcagggaggggaaagcacgggccccgagcacggcgatgaggttgtagccgagccagagggtgctggcattggtgggcaggagcggcggcacctcgtgcagggcacgctggcggcagtccacgtcccctgcccagcagtggcaggtatggggacacgctggagcgggcagcgggcgcaggaggagcagtacggccagcaggatgctgggacccctccatctgcccatggttacccacccatgcggtgagggctccccagtccctggcatcagggttgcccccrggcaggatgcccagcacccctcgccttgcccagccacgcgtccctgcctggcacccttgggtgcagtgagcagctggatgtgcccggctcccggtagctgcatgcattccccaccgcacgctgtgctctcctcggggtggagctgcacttttcttagcaaatatttttgcartgatgcttgccctggcaaggtgcggctgtgccttcacccctccccttgccaggcactgctccagccaggtaagtagtcagatctgtgctgtccatggttaactgcttgtgtgcactgcaggctgggga

SEQ ID NO: 39294 - DNA, 600 bp, Chicken  19866894273051_5
cgctggagcgggcagcgggcgcaggaggagcagtacggccagcaggatgctgggacccctccatctgcccatggttacccacccatgcggtgagggctccccagtccctggcatcagggttgcccccrggcaggatgcccagcacccctcgccttgcccagccacgcgtccctgcctggcacccttgggtgcagtgagcagctggatgtgcccggctcccggtagctgcatgcattccccaccgcacgctgtgctctcctcggggtggagctgcacttttcttagcaaatatttttgcartgatgcttgccctggcaaggtgcggctgtgccttcacccctccccttgccaggcactgctccagccaggtaagtagtcagatctgtgctgtccatggttaactgcttgtgtgcactgcaggctggggagggggaaaaaaatgatcttctgacctccatcctgctcacaggatgcatagaggacccagggcaatgtacctggcaaggatgggacaaagagtcaatcrtgtcatcrgcagaggtcatgccaggtatccccagtgggcaggtcttggctgggctctgcttcccctggcagggg

SEQ ID NO: 39295 - DNA, 532 bp, Chicken  19866894273051_6
tgcatgcattccccaccgcacgctgtgctctcctcggggtggagctgcacttttcttagcaaatatttttgcartgatgcttgccctggcaaggtgcggctgtgccttcacccctccccttgccaggcactgctccagccaggtaagtagtcagatctgtgctgtccatggttaactgcttgtgtgcactgcaggctggggagggggaaaaaaatgatcttctgacctccatcctgctcacaggatgcatagaggacccagggcaatgtacctggcaaggatgggacaaagagtcaatcrtgtcatcrgcagaggtcatgccaggtatccccagtgggcaggtcttggctgggctctgcttcccctggcaggggactggcagccgaggcaggatgaggagagctgggatgtgacctccacccgaggtggcacaagggaggtggctgtgccaggctgctgccacttggaacatgttcatcctggccttggcatggcagtgccggcaccggcgggctcaaagtctgcccccacc

SEQ ID NO: 39296 - DNA, 524 bp, Chicken  19866894273051_7
ttccccaccgcacgctgtgctctcctcggggtggagctgcacttttcttagcaaatatttttgcartgatgcttgccctggcaaggtgcggctgtgccttcacccctccccttgccaggcactgctccagccaggtaagtagtcagatctgtgctgtccatggttaactgcttgtgtgcactgcaggctggggagggggaaaaaaatgatcttctgacctccatcctgctcacaggatgcatagaggacccagggcaatgtacctggcaaggatgggacaaagagtcaatcrtgtcatcrgcagaggtcatgccaggtatccccagtgggcaggtcttggctgggctctgcttcccctggcaggggactggcagccgaggcaggatgaggagagctgggatgtgacctccacccgaggtggcacaagggaggtggctgtgccaggctgctgccacttggaacatgttcatcctggccttggcatggcagtgccggcaccggcgggctcaaagtctgcccccacc

SEQ ID NO: 39297 - DNA, 600 bp, Chicken  19866894273053_1
aaagatgaggcagcctttaaaaaaataaaaacttcttgccgtaacattcctagatctcaagaaagcttgttaattaacaatattaatattagtcacaatacaatgtgataaaatgtgttgggtccccatggtgcaatgtagaggttttctgtttgctttttaaattagaacttcattaacgctttgtagagccacaatgagaattcactgccctgtatcaggctgtgtgttgtgttaataactgagtgcctggcttccttccagtttggttcacaactccctctcactacgaagataackaggagaacaaccacggtctccatcatctcacacaccagaaccattttctgtggaagttttgaggggcggcagaactctgaatttgctttttcttttgaaaaggcttaaaatgaagctatgtttattcatcatacaatgttgacacaactgtaagacaatatgacacaactgcaaccaagagagccccttcacaaagcttaagtcaaaaacctaagatcatcagttcacaatctaaacatgactattaattttgggggaacaaaatatcttattagcacagagcccaaaaggagtgcaaga

SEQ ID NO: 39298 - DNA, 600 bp, Chicken  19866894273056_1
ttgaatatcccacctccagagttttctgagaaacaaatggtcctttgactgtttcaccttctttattatgaaggtaggcatgactcctatgtattaggctgtcttcagactgtgtattgaaatctattaaagtgaatatgtttcaccaatactcaaggctctttacagaatttacagtggaaaaatagttggttagagtagtgccttttgaatatcacggttatttcctgcctgctatagaaatcctcaggaacccttcaaatctcaagcatatttctgtcaaatcattgtatctatatyaaaaaatctaagcctgagttacaggtatctggtgttccctcattatgcacatagtgaagatgctagttgtttttcactcaggttttgcaagtctgctataatgtttgctttcctcagaaacatcaaaagagaccttttgaggaggtgggaagakttttcagatgccaaatacttctgctttatctggaagctgtatcaaatttgtaacgatttccttgacatgtagaacagtccaaatttcaattaagatatgaaaaatatgaaaaataaagaaaatgtaaaaaacattttcccccgttt

SEQ ID NO: 39299 - DNA, 600 bp, Chicken  19866894273056_2
aaggctctttacagaatttacagtggaaaaatagttggttagagtagtgccttttgaatatcacggttatttcctgcctgctatagaaatcctcaggaacccttcaaatctcaagcatatttctgtcaaatcattgtatctatatyaaaaaatctaagcctgagttacaggtatctggtgttccctcattatgcacatagtgaagatgctagttgtttttcactcaggttttgcaagtctgctataatgtttgctttcctcagaaacatcaaaagagaccttttgaggaggtgggaagakttttcagatgccaaatacttctgctttatctggaagctgtatcaaatttgtaacgatttccttgacatgtagaacagtccaaatttcaattaagatatgaaaaatatgaaaaataaagaaaatgtaaaaaacattttcccccgttttcatgttcaccagkatatgtttttgcaactcttgaaacacgagatggaaagtgaatcagttgttaaagtcttgtatattcttttattctactggctgccacagttctggtttcactgtttgggcgaggggagcaaggctgatgcataagatctc

SEQ ID NO: 39300 - DNA, 556 bp, Chicken  19866894273056_3
tgagttacaggtatctggtgttccctcattatgcacatagtgaagatgctagttgtttttcactcaggttttgcaagtctgctataatgtttgctttcctcagaaacatcaaaagagaccttttgaggaggtgggaagakttttcagatgccaaatacttctgctttatctggaagctgtatcaaatttgtaacgatttccttgacatgtagaacagtccaaatttcaattaagatatgaaaaatatgaaaaataaagaaaatgtaaaaaacattttcccccgttttcatgttcaccagkatatgtttttgcaactcttgaaacacgagatggaaagtgaatcagttgttaaagtcttgtatattcttttattctactggctgccacagttctggtttcactgtttgggcgaggggagcaaggctgatgcataagatctctggctatccggcaaaaagtaaagatgacacatctgatatttacccctgtgtagaactgggcaagaaaggaaagcttggaagtgatggagtccttgataaaatctttcagcttccag

SEQ ID NO: 39301 - DNA, 600 bp, Chicken  19866894273057_1
ttttcttctatgagcttatacagtttccaaatagccctacctgtcttatttgcactgtattactccatcttctaagagtaaaagcttataatcattaagacattaagaatcatctgactcctgaatcaggaccactaaacgtcttttctgacttcagaactcattatgagattctagattgtcaggtttttgcatccaagcattttcttcctgggccagatcctttcctattgatgttctgtttggctgaatctagaagaaaaacaatagttaaaacaacaggtcaacacagcacagaayaacacagtgtttctgaacatcaatacctcatcatataatacaccctacacacttgctagaaactaagataattagaagtgatatacatacgaagaaattaggaaacttaaaaaatgtagtaaaaaaaaattttacatataaaagcatcacgaaaaaggaaaggtaacctaaatgattaagtttcttatagagtttgtttatccacatatacccacaaccatgctgtacagtctgtggcagttcttaagctcagagatagttgaaacatcagattccctcaagtttcttaccagtatacag

SEQ ID NO: 39302 - DNA, 600 bp, Chicken  19866894273060_1
atgacctagcagaagtctgaggccgcctgaaggactgctatcagaatgtgcttatttcaaaatccaacttagcagaagtgtatgacatccactcacactacaggggctgtctgcaggagctccactccagctacaaaagcacagcaagggaccgcagcgacagccacatgctgccagggaacagcggtgctgtggggatgagaacagagagtaaagcaccgcttcactccaggagtgaagagctgcagatgtgcaaagaggaagagcctgcaggaacaaaaccactgtcgctgtgtctcytctgctgtgaggagcaggattacacttaatcagtttatcaggatgctcaggaactgaagccaccacgacgccttcccatttgtcttggaaaaccatactattaaccctaacaagctaaaccggtataccaattaacctaaccaatcgctcaattaaatgttcccatacccagccacatgcataatgagaattcataaactcctttgtaaggagaggtggaattccagcactgttggtccccagcagggcaggggggatttactgctggtgcccaggctgtgtcagctccacacagccart

SEQ ID NO: 39303 - DNA, 600 bp, Chicken  19866894273060_2
ytctgctgtgaggagcaggattacacttaatcagtttatcaggatgctcaggaactgaagccaccacgacgccttcccatttgtcttggaaaaccatactattaaccctaacaagctaaaccggtataccaattaacctaaccaatcgctcaattaaatgttcccatacccagccacatgcataatgagaattcataaactcctttgtaaggagaggtggaattccagcactgttggtccccagcagggcaggggggatttactgctggtgcccaggctgtgtcagctccacacagccartgcagactcatcagaacctgttggcaagggaagagcctcggaaacatctttctcctcttgctactccactctctgctcgggtccaaatgctgttatgaaggcaaacaacaaaacaggaatctcccattactttgtcctgcctcagcctcccataggggtccttccataccaggaggcatcgccacgctgcctggacacagccctaaggcctggcaatgcccctctgagctgcacttctcttgtggaaatggctacatggaagattggccatcaaagagctgcaggttctcggctgcatca

SEQ ID NO: 39304 - DNA, 600 bp, Chicken  19866894273061_1
ggagggctgaaaaatgctactgtggatggagcaggaggcattgcagaagttatcaaatgctaatagaaagaggatattgggtgagttggcacctgttggctttttctatgagaggtactacagaccagattcagtagcactgatcaaaaagtgcatgcctttcatgtgcaaaaaatgcctcgtttggagagtgttgggcaggtgatggttgcaagagtggtgtttgaacagactgtcccatgtaaattgtcctgggattgtatatagggatgaaacctgtctctttagagcagaagaaawaggaggttagtctattggtagttggggggatcacagtttttccctgacaatgattcttcaacttcttgtcttctagttctctctgcttttagcacgttgcagcttcttccagagcaggatttgcctggatcctttggccggtatgaagtctaggctggagatgggagctgggggagcacatttgtcagggaaatgatagctagattgagagtcatggtctctgcagctattggaagttctctctcagtgttcagcttcacagtctttctgcctcttactcctgccactcttcatctcctc

SEQ ID NO: 39305 - DNA, 599 bp, Chicken  19866894273062_1
  misc_feature (1)..(73): n is any nucleotide
nnnnnnnnnnnnnnnnnnnnnnnnnnnnnnnnnnnnnnnnnnnnnnnnnnnnnnnnnnnnnnnnnnnnnnnnnctgctattacaatgtaaataaggcagtaaaaccctaataaggagataaaaagtaaattattatagtgtatgaactctgcaaaaaattaagtggtcagcttaatcatctcctgataatggagactaataaaaactgcttgaaaatacctacaggcagaagagctaagcaactttccttacagagctttacaaactctcttctatagtacaattgggtgtgtgtttgasgggaaaaaaagggtccaaaactttatgaattattcaagatatctaggagtattataagggatgtgccctagaacagtctctctagttcagagcytctgcacagtagtacagtctgaagcaaagtaaattcagaggccgtgtacttggtacctactggtgatcacttgcatggataggtagcacacactcacttttttctcttaagtgtcagcataggtacggagaagcagtcttcactgccttccttctccattgctatgctgctatcttcagatacgtggattaagcagaacagaaaa

SEQ ID NO: 39306 - DNA, 600 bp, Chicken  19866894273062_2
ggcagtaaaaccctaataaggagataaaaagtaaattattatagtgtatgaactctgcaaaaaattaagtggtcagcttaatcatctcctgataatggagactaataaaaactgcttgaaaatacctacaggcagaagagctaagcaactttccttacagagctttacaaactctcttctatagtacaattgggtgtgtgtttgasgggaaaaaaagggtccaaaactttatgaattattcaagatatctaggagtattataagggatgtgccctagaacagtctctctagttcagagcytctgcacagtagtacagtctgaagcaaagtaaattcagaggccgtgtacttggtacctactggtgatcacttgcatggataggtagcacacactcacttttttctcttaagtgtcagcataggtacggagaagcagtcttcactgccttccttctccattgctatgctgctatcttcagatacgtggattaagcagaacagaaaaacactccacaccataaactttactcctgctcataagttcctgacttgtgagtggaacttaccaccagtttgtgcccctgatgcagctgtataaat

SEQ ID NO: 39307 - DNA, 599 bp, Chicken  19866894273066_1
  misc_feature (1)..(181): n is any nucleotide
nnnnnnnnnnnnnnnnnnnnnnnnnnnnnnnnnnnnnnnnnnnnnnnnnnnnnnnnnnnnnnnnnnnnnnnnnnnnnnnnnnnnnnnnnnnnnnnnnnnnnnnnnnnnnnnnnnnnnnnnnnnnnnnnnnnnnnnnnnnnnnnnnnnnnnnnnnnnnnnnnnnnnnnnnnnnnnnnnnnnnagccggcatgttgtgcttgcaaaaatctgcattagtggaagtgaccttctgttaccactgctgaaacatactacccaccacctctctgtgctcacatgcagtttttggtctccataaaygttcagcaagcatagatgaatggcagtgtacacctggctgcatgaccatactcaggcttttttcactcataagtggcacccaagccaggcagamgtgtccttagtctactccataaaaacatcacccataatctcagttacttttgcagatttcttcttgttctcaggaagctttctgacagttacactgtcctaaatgcacaagcttgtcagctaacagacacagtagcaagaaggctagcatttaccattgctgacatccatcagagacctgatagcagtttttcagtatataaagg

SEQ ID NO: 39308 - DNA, 599 bp, Chicken  19866894273066_2
  misc_feature (1)..(87): n is any nucleotide
nnnnnnnnnnnnnnnnnnnnnnnnnnnnnnnnnnnnnnnnnnnnnnnnnnnnnnnnnnnnnnnnnnnnnnnnnnnnnnnnnnnnnnnagccggcatgttgtgcttgcaaaaatctgcattagtggaagtgaccttctgttaccactgctgaaacatactacccaccacctctctgtgctcacatgcagtttttggtctccataaaygttcagcaagcatagatgaatggcagtgtacacctggctgcatgaccatactcaggcttttttcactcataagtggcacccaagccaggcagamgtgtccttagtctactccataaaaacatcacccataatctcagttacttttgcagatttcttcttgttctcaggaagctttctgacagttacactgtcctaaatgcacaagcttgtcagctaacagacacagtagcaagaaggctagcatttaccattgctgacatccatcagagacctgatagcagtttttcagtatataaaggaagcatgtaagaaaagaaggggcactctttagcagggtctgttgtgacaggatgaggggaaatggtttcaaactaaaactggggagattaagat

SEQ ID NO: 39309 - DNA, 599 bp, Chicken  19866894273072_1
  misc_feature (1)..(28): n is any nucleotide
nnnnnnnnnnnnnnnnnnnnnnnnnnnntatttgaacgaccttgaggtgctaccacaatgactccatggggggccttacagtgttgtatctatttctgggggagtagaggaatatggataaattaaaaacaaacaaacaaacaaacaaacaaacaaacaaaaaaacccaagaacattttttcttgaatgataaggctaggttatagctagaagaatcaagaacacgtaggcatggcacatgatgattatgatttatgagagcattataaaggaagaaaatcaatatatattctaaaattyctgtttactcagattagtctaaaccttctccttcagttcatgataacagaggaaggctacattgataagartgttttctttattcccatcaaaataatctcaataactgttaatgtacaaatccagttttggaaaaggaacattttctaacccttgattttaattaaaaaacaacaacagcaacaaaaacccagcaggtatgaccctgcaataaatatcttacgtttaagttcaagagtgacataagatatgcaactgctactaataaacactgtgacaatgcagtatatgaagattct

SEQ ID NO: 39310 - DNA, 600 bp, Chicken  19866894273072_2
ggccttacagtgttgtatctatttctgggggagtagaggaatatggataaattaaaaacaaacaaacaaacaaacaaacaaacaaacaaaaaaacccaagaacattttttcttgaatgataaggctaggttatagctagaagaatcaagaacacgtaggcatggcacatgatgattatgatttatgagagcattataaaggaagaaaatcaatatatattctaaaattyctgtttactcagattagtctaaaccttctccttcagttcatgataacagaggaaggctacattgataagartgttttctttattcccatcaaaataatctcaataactgttaatgtacaaatccagttttggaaaaggaacattttctaacccttgattttaattaaaaaacaacaacagcaacaaaaacccagcaggtatgaccctgcaataaatatcttacgtttaagttcaagagtgacataagatatgcaactgctactaataaacactgtgacaatgcagtatatgaagattctattacaagcatacaaaatcaaaatattaatctgtcttcccttcaactctttcagttctctttgctatgcctg

SEQ ID NO: 39311 - DNA, 600 bp, Chicken  19866894273081_1
atcgacagactcacacaggctttttttctaagccacttgtaacaccgcggtatgcgttcaactcatgttatgcactatgtgatttataagagaattatcagcatttgactaatagtattttgaagatacaaattccagaaaaattgaaatcattatttcaacactaagtagcaatctgtcaaaaaatcattcttccaggagttaagattttaacaagaaaagcagtattcactgaaaatatcctgacaaaagacttctgagcaagcctaatccatccctgcctgctctgatgacatttastaygggaacattctgtagatattctgctttattattgttaatatatctgagtaacagcccctccagaaccagttattcagcctaagctattttctggtcattcctcataacacagctgagtattttcactgtgatgcagagagtgtgcataaaatgttaactacatgctaacacttcccctttcattgcagctgttcaagaaaataggtatagatgcatgggraagatgactaaacatctgtctctggtgtaggatggcacatgtggtggccctggagccgatgagcacaggactgtttt

SEQ ID NO: 39312 - DNA, 600 bp, Chicken  19866894273081_2
gacagactcacacaggctttttttctaagccacttgtaacaccgcggtatgcgttcaactcatgttatgcactatgtgatttataagagaattatcagcatttgactaatagtattttgaagatacaaattccagaaaaattgaaatcattatttcaacactaagtagcaatctgtcaaaaaatcattcttccaggagttaagattttaacaagaaaagcagtattcactgaaaatatcctgacaaaagacttctgagcaagcctaatccatccctgcctgctctgatgacatttastaygggaacattctgtagatattctgctttattattgttaatatatctgagtaacagcccctccagaaccagttattcagcctaagctattttctggtcattcctcataacacagctgagtattttcactgtgatgcagagagtgtgcataaaatgttaactacatgctaacacttcccctttcattgcagctgttcaagaaaataggtatagatgcatgggraagatgactaaacatctgtctctggtgtaggatggcacatgtggtggccctggagccgatgagcacaggactgttttggg

SEQ ID NO: 39313 - DNA, 600 bp, Chicken  19866894273081_3
agtattcactgaaaatatcctgacaaaagacttctgagcaagcctaatccatccctgcctgctctgatgacatttastaygggaacattctgtagatattctgctttattattgttaatatatctgagtaacagcccctccagaaccagttattcagcctaagctattttctggtcattcctcataacacagctgagtattttcactgtgatgcagagagtgtgcataaaatgttaactacatgctaacacttcccctttcattgcagctgttcaagaaaataggtatagatgcatgggraagatgactaaacatctgtctctggtgtaggatggcacatgtggtggccctggagccgatgagcacaggactgttttgggggtaggagcttgggtagaacttggtatatatgacgcttccagccagctgtttgagggctagacctgtagacaaagactttagagagatggaagttattcagattatcttcctgcgctcagcacatctgattgccttctcccagtgcagcatgggatgtctcaagcagcaacacattcactaactttctttaggagggtgttcattaccttgctacacatc

SEQ ID NO: 39314 - DNA, 600 bp, Chicken  19866894273084_1
acagttctttccccctacccacaatataacagcgtagctattttcagggaccctgagctaccattcactccatgcctctagtctatttgaggcatcctatttcatatttttatttagttcactgggaagctaacacctggaaatctgaggcaataaaatctaattcagaccttaatttaattaaaggctctacataaaacatttgaataatagccacttaaaggtgctgatttttcacttgtaaatgaaacaattattactatgcaaggacattctatagtaatacaagcttttttatgsttaatggagacaaccaccggaagtttctaatttttggagtatgatgtaatttagagcccccagcatcaactccacacattttgctgtcacaatggcagatttcagtatggtttaaattctgtgtctgaatatggcagacaacacacaatgctaagaactgcattctttcagaggactgattaataaacttgaaagaggcaatgaatttaaagaacaacacagtagttatcttctggagatgtgcagcctttatgaatgagttgtgctcagcatctcttctacataatgttaagttaactt

SEQ ID NO: 39315 - DNA, 599 bp, Chicken  19866894273098_1
  misc_feature (1)..(10): n is any nucleotide
nnnnnnnnnnaaatgttcttacaccctgattactgcttgtcacagtgagacattaccatctgttagctgaaacacagtagccagctttgagtgcagcccctattagtacctcgtaaccttaaacttcagactgtttcaagttacatgttattgcaaatattggactgtcttcaaaacacactgctcccgctcccctcttctgcactgcatctagccattaagtaactacacacgaactgtcaccggagagtcaaataattaaaactggcattacttgtaactatttttcttcagaacacrttgctattaagtaaccatgttacagtagcactgcaggactcctgtcatgatgtcatgactccctgagacaagttcaaactaaccggaacattgctacttgaagtgaaggtctttgtgcctatggaaggaaactttgtgcctatggaaggaatcagcctgccttacaaagcttcactcccatcagtgctcctaccagttactgtcttcctgcaaacaggatattctggcttatttgtaaatgcatctctacattcaaaatattgtgagtcaagtatcaactagtagagtgacaactacct

SEQ ID NO: 39316 - DNA, 537 bp, Chicken  19866894273098_2
gacaagttcaaactaaccggaacattgctacttgaagtgaaggtctttgtgcctatggaaggaaactttgtgcctatggaaggaatcagcctgccttacaaagcttcactcccatcagtgctcctaccagttactgtcttcctgcaaacaggatattctggcttatttgtaaatgcatctctacattcaaaatattgtgagtcaagtatcaactagtagagtgacaactacctgcaatttcctcttcaagccaaaattcttaaatatttcttatagataccatatgttagctgacttgtraatggtgatacaaaggaagaaaaataattatattataaaccagtggaactgagaataaaracaaacaaaacaaacaaacaacaacaacaagcaactggtgcaactgggatagaacaggagaactgtgtttaaactacaaaatctaagagcatattgctgccattgtagatccagagaaagtgagacatggcaagggacagacagagaatcggaaagaggaagataacaaagagctat

SEQ ID NO: 39317 - DNA, 477 bp, Chicken  19866894273098_3
ggaaactttgtgcctatggaaggaatcagcctgccttacaaagcttcactcccatcagtgctcctaccagttactgtcttcctgcaaacaggatattctggcttatttgtaaatgcatctctacattcaaaatattgtgagtcaagtatcaactagtagagtgacaactacctgcaatttcctcttcaagccaaaattcttaaatatttcttatagataccatatgttagctgacttgtraatggtgatacaaaggaagaaaaataattatattataaaccagtggaactgagaataaaracaaacaaaacaaacaaacaacaacaacaagcaactggtgcaactgggatagaacaggagaactgtgtttaaactacaaaatctaagagcatattgctgccattgtagatccagagaaagtgagacatggcaagggacagacagagaatcggaaagaggaagataacaaagagctat

SEQ ID NO: 39318 - DNA, 599 bp, Chicken  19866894273101_1
  misc_feature (1)..(48): n is any nucleotide
nnnnnnnnnnnnnnnnnnnnnnnnnnnnnnnnnnnnnnnnnnnnnnnnaagaacagaaagtcctatttaaagtgccactatgacaccatcatgtatcacctgatcctagtggaaatggggcagtgaaatggagtgcatgatttagaattttttccctagtggggaaaaaaaaatcatcatagtaaatggtaaattgtacattgaaaaacagagttatctacaatctctctcattgttatgaaatgtatactaaattctttatttctacctgcagggtaaagctcattaaaagtatctaaytttccttttctattgttctgatgattggcattagtaatttgtctgctgggtgaatctcaccactactattttcttaccttcatgtatatgaaatcttatttagcactgtgggaatggatgtattggagcagaaaagaataggggtaaggtctgctagatagttcagagaggtgaaatttaagaactratttyagtttaattcttgtatgtatgttgataagttagtctggatacttcttcaatgtgtacttcctcacaacttgcatgcaaartacgcaacaagtgtactcctagtctag

SEQ ID NO: 39319 - DNA, 600 bp, Chicken  19866894273101_2
ggtaaattgtacattgaaaaacagagttatctacaatctctctcattgttatgaaatgtatactaaattctttatttctacctgcagggtaaagctcattaaaagtatctaaytttccttttctattgttctgatgattggcattagtaatttgtctgctgggtgaatctcaccactactattttcttaccttcatgtatatgaaatcttatttagcactgtgggaatggatgtattggagcagaaaagaataggggtaaggtctgctagatagttcagagaggtgaaatttaagaactratttyagtttaattcttgtatgtatgttgataagttagtctggatacttcttcaatgtgtacttcctcacaacttgcatgcaaartacgcaacaagtgtactcctagtctaggtaaattagatgagatgctcacttaagatggaaagcttgaaattcaggaagtggtagatgatcaatacttgagctgacaggcattcttctataacagaatgtggtattaaaattgtaaaatcaggtaaatactgagactctagatttcttgcaatctggacaaacaataaccttgtaggcttatgcat

SEQ ID NO: 39320 - DNA, 600 bp, Chicken  19866894273101_3
attgtacattgaaaaacagagttatctacaatctctctcattgttatgaaatgtatactaaattctttatttctacctgcagggtaaagctcattaaaagtatctaaytttccttttctattgttctgatgattggcattagtaatttgtctgctgggtgaatctcaccactactattttcttaccttcatgtatatgaaatcttatttagcactgtgggaatggatgtattggagcagaaaagaataggggtaaggtctgctagatagttcagagaggtgaaatttaagaactratttyagtttaattcttgtatgtatgttgataagttagtctggatacttcttcaatgtgtacttcctcacaacttgcatgcaaartacgcaacaagtgtactcctagtctaggtaaattagatgagatgctcacttaagatggaaagcttgaaattcaggaagtggtagatgatcaatacttgagctgacaggcattcttctataacagaatgtggtattaaaattgtaaaatcaggtaaatactgagactctagatttcttgcaatctggacaaacaataaccttgtaggcttatgcatttatc

SEQ ID NO: 39321 - DNA, 600 bp, Chicken  19866894273101_4
agggtaaagctcattaaaagtatctaaytttccttttctattgttctgatgattggcattagtaatttgtctgctgggtgaatctcaccactactattttcttaccttcatgtatatgaaatcttatttagcactgtgggaatggatgtattggagcagaaaagaataggggtaaggtctgctagatagttcagagaggtgaaatttaagaactratttyagtttaattcttgtatgtatgttgataagttagtctggatacttcttcaatgtgtacttcctcacaacttgcatgcaaartacgcaacaagtgtactcctagtctaggtaaattagatgagatgctcacttaagatggaaagcttgaaattcaggaagtggtagatgatcaatacttgagctgacaggcattcttctataacagaatgtggtattaaaattgtaaaatcaggtaaatactgagactctagatttcttgcaatctggacaaacaataaccttgtaggcttatgcatttatccagaataaaagtacaattttctaagcagagaatatgaggtatcacctacaccccttaaagctggcttggccaagaatcgc

SEQ ID NO: 39322 - DNA, 504 bp, Chicken  19866894273107_1
tctcatcttgcctgctatacctggcatgtcaggcagcagtgaagcagttagagctagctttgggatcttgttcttcctcaccctggaatcccattcgttcagagttttgatgttgatgaatgacacttcgccgttagctcctgtcatcactccgtcatgctcacagcggacgatgagatctatgtcatctcccagcttccaccttcggtacctgcaaacacgcagtccagccggttactgctgaccctggttctttgccagacctttccaagtactcagcaaaaccctttcatcctttayccgttcaccagttttgactgttttttccctgcaaaccacactgacgtcctgcactcttgtcaaagctgggagtaagagatacatcaacatacctgtaggcaacagaagctacttcgttcttatccatgtcatcctccacaaaggggtttgggttgggaaacttgtatttctccttcccctgtgtaaggaaacagaaaggcttat

SEQ ID NO: 39323 - DNA, 599 bp, Chicken  19866894273108_1
  misc_feature (1)..(13): n is any nucleotide
nnnnnnnnnnnnnattgctaattagatactgtctcatatattttgtgtaacaactttattctgtttctaagaaaggacgtgcgggtgtttgatcagcaagctgaaattcagtctgtaaacatgttaggtagtgcggatcttgcatagaatgatgtcgtttccacagaatttacattaaaacctataaaacatgctgtaagttgattttgaaaactctgcctgaagaatttctcatgtagcaccacatgtgtatgagcttgggtggaagttgattttctggggctgaaccaaggtatacarttcctacttctccctcatattttggtcttggagacattattgttagggtccaytctgtcatcacatsgggagccaggcrgcaggaattgttagggggaatttgattaactaagcatagatgcctctgccacttggagggcgctgaacctgacagatgtgatgtgggatctataggagtagatctggagtttgagctgttggccagatggaataatataaggaatctacaatgatgtcagactcctgtatttagacagctgaattgctctctcagtgacctgtgctgcattttatcacat

SEQ ID NO: 39324 - DNA, 600 bp, Chicken  19866894273108_2
ctttattctgtttctaagaaaggacgtgcgggtgtttgatcagcaagctgaaattcagtctgtaaacatgttaggtagtgcggatcttgcatagaatgatgtcgtttccacagaatttacattaaaacctataaaacatgctgtaagttgattttgaaaactctgcctgaagaatttctcatgtagcaccacatgtgtatgagcttgggtggaagttgattttctggggctgaaccaaggtatacarttcctacttctccctcatattttggtcttggagacattattgttagggtccaytctgtcatcacatsgggagccaggcrgcaggaattgttagggggaatttgattaactaagcatagatgcctctgccacttggagggcgctgaacctgacagatgtgatgtgggatctataggagtagatctggagtttgagctgttggccagatggaataatataaggaatctacaatgatgtcagactcctgtatttagacagctgaattgctctctcagtgacctgtgctgcattttatcacatacacatcaccagaaatactggtttaacaatttgagatagaaggcctagaggtgg

SEQ ID NO: 39325 - DNA, 600 bp, Chicken  19866894273108_3
taagaaaggacgtgcgggtgtttgatcagcaagctgaaattcagtctgtaaacatgttaggtagtgcggatcttgcatagaatgatgtcgtttccacagaatttacattaaaacctataaaacatgctgtaagttgattttgaaaactctgcctgaagaatttctcatgtagcaccacatgtgtatgagcttgggtggaagttgattttctggggctgaaccaaggtatacarttcctacttctccctcatattttggtcttggagacattattgttagggtccaytctgtcatcacatsgggagccaggcrgcaggaattgttagggggaatttgattaactaagcatagatgcctctgccacttggagggcgctgaacctgacagatgtgatgtgggatctataggagtagatctggagtttgagctgttggccagatggaataatataaggaatctacaatgatgtcagactcctgtatttagacagctgaattgctctctcagtgacctgtgctgcattttatcacatacacatcaccagaaatactggtttaacaatttgagatagaaggcctagaggtgggagtcagtggtagt

SEQ ID NO: 39326 - DNA, 600 bp, Chicken  19866894273108_4
tgcgggtgtttgatcagcaagctgaaattcagtctgtaaacatgttaggtagtgcggatcttgcatagaatgatgtcgtttccacagaatttacattaaaacctataaaacatgctgtaagttgattttgaaaactctgcctgaagaatttctcatgtagcaccacatgtgtatgagcttgggtggaagttgattttctggggctgaaccaaggtatacarttcctacttctccctcatattttggtcttggagacattattgttagggtccaytctgtcatcacatsgggagccaggcrgcaggaattgttagggggaatttgattaactaagcatagatgcctctgccacttggagggcgctgaacctgacagatgtgatgtgggatctataggagtagatctggagtttgagctgttggccagatggaataatataaggaatctacaatgatgtcagactcctgtatttagacagctgaattgctctctcagtgacctgtgctgcattttatcacatacacatcaccagaaatactggtttaacaatttgagatagaaggcctagaggtgggagtcagtggtagttcaatgctaagc

SEQ ID NO: 39327 - DNA, 600 bp, Chicken  19866894273108_5
ggaatttgattaactaagcatagatgcctctgccacttggagggcgctgaacctgacagatgtgatgtgggatctataggagtagatctggagtttgagctgttggccagatggaataatataaggaatctacaatgatgtcagactcctgtatttagacagctgaattgctctctcagtgacctgtgctgcattttatcacatacacatcaccagaaatactggtttaacaatttgagatagaaggcctagaggtgggagtcagtggtagttcaatgctaagcctgcaggccatctagraacctccgtgaaacaagtwgtaatagagaagacctgcatcaggatttctttatctattgcttgactgaagtctgtacaaaatcttaaaccgtctctttttgtccatgtttggatttctttttaaacacttactggatgtctttctagtaatgttagtatagcaagataattactatcttctttataaataacaaatgtggagtatccacaactaagtagatcaaacgtggttgacaggttaagtgttttttcctgagttcttgtttcaacatttctctttttctttctaatgaagtgaaa

SEQ ID NO: 39328 - DNA, 600 bp, Chicken  19866894273108_6
atagatgcctctgccacttggagggcgctgaacctgacagatgtgatgtgggatctataggagtagatctggagtttgagctgttggccagatggaataatataaggaatctacaatgatgtcagactcctgtatttagacagctgaattgctctctcagtgacctgtgctgcattttatcacatacacatcaccagaaatactggtttaacaatttgagatagaaggcctagaggtgggagtcagtggtagttcaatgctaagcctgcaggccatctagraacctccgtgaaacaagtwgtaatagagaagacctgcatcaggatttctttatctattgcttgactgaagtctgtacaaaatcttaaaccgtctctttttgtccatgtttggatttctttttaaacacttactggatgtctttctagtaatgttagtatagcaagataattactatcttctttataaataacaaatgtggagtatccacaactaagtagatcaaacgtggttgacaggttaagtgttttttcctgagttcttgtttcaacatttctctttttctttctaatgaagtgaaatttcttacttatttatttg

SEQ ID NO: 39329 - DNA, 600 bp, Chicken  19866894273112_1
ctcagccagctttgctactgatatcttggttacattttgaatacctgctcttgagaattttctgttcccattaaatatagtttagaaggacacgctcatctgttagtggtccagaaataacgtgctgaatgcaccagcagctgatgcgactgaacgtgatacaaaagtgtatcattctgttagagtttgttggtaggcatcattatggaaatgtttttgagccttaaaaaagggaatagtgtatcggaaattgaatcaaacgttaacagaagctgcagtttgtggtttacttttccctcryagctagttctttaggaattattcctgttcacataatccyttaagttaatgtatttattccgtgcgtgctttataatttctattcattcatatgtcaagtagctgaaggtgctgcttcaattagtatttacttcagtgttatactgttttgaattggttgtttgttacagtcacaatgcagtgaataaacgtgttaatatttgaagtgggaagggaggtaaaatgggaaaccgtctgctccagtcgcggcccagctttctggttacaacatattataatttatttaaacccaatcaatac

SEQ ID NO: 39330 - DNA, 600 bp, Chicken  19866894273112_2
tcagccagctttgctactgatatcttggttacattttgaatacctgctcttgagaattttctgttcccattaaatatagtttagaaggacacgctcatctgttagtggtccagaaataacgtgctgaatgcaccagcagctgatgcgactgaacgtgatacaaaagtgtatcattctgttagagtttgttggtaggcatcattatggaaatgtttttgagccttaaaaaagggaatagtgtatcggaaattgaatcaaacgttaacagaagctgcagtttgtggtttacttttccctcryagctagttctttaggaattattcctgttcacataatccyttaagttaatgtatttattccgtgcgtgctttataatttctattcattcatatgtcaagtagctgaaggtgctgcttcaattagtatttacttcagtgttatactgttttgaattggttgtttgttacagtcacaatgcagtgaataaacgtgttaatatttgaagtgggaagggaggtaaaatgggaaaccgtctgctccagtcgcggcccagctttctggttacaacatattataatttatttaaacccaatcaatact

SEQ ID NO: 39331 - DNA, 569 bp, Chicken  19866894273112_3
atacctgctcttgagaattttctgttcccattaaatatagtttagaaggacacgctcatctgttagtggtccagaaataacgtgctgaatgcaccagcagctgatgcgactgaacgtgatacaaaagtgtatcattctgttagagtttgttggtaggcatcattatggaaatgtttttgagccttaaaaaagggaatagtgtatcggaaattgaatcaaacgttaacagaagctgcagtttgtggtttacttttccctcryagctagttctttaggaattattcctgttcacataatccyttaagttaatgtatttattccgtgcgtgctttataatttctattcattcatatgtcaagtagctgaaggtgctgcttcaattagtatttacttcagtgttatactgttttgaattggttgtttgttacagtcacaatgcagtgaataaacgtgttaatatttgaagtgggaagggaggtaaaatgggaaaccgtctgctccagtcgcggcccagctttctggttacaacatattataatttatttaaacccaatcaatacttaatctgg

SEQ ID NO: 39332 - DNA, 600 bp, Chicken  19866894273116_1
ctactagagagcgcaaatgaacttcaatagattcacttccatcccagacaatgaaacacaaccactacaaatctgtacagaattacataaagcctatcactgttttcagagtggatcgcagctacagaggtaaagatcaaaagaagaaagaggttaatattatcccactattattttccacaagcaagaacatttgctgaaataaggcaagtgttaacgtatcatgcaaaacactttgaataaggtggtacagtacagacaccacatactagtcaatacagatgaataacccacagttamaagctttgcaacagctctaattattaaagtgtttgtgataagccaataatgatcagctctgagaaaacaacagctattttactgcaaaggaacctgtgcaccaagctggatcataagaagctgcttagtggcaaaagccaacagaaacagaccttacactggtagaaagaatctcagctggctgcttggtgtcacttacacttcttggttaatgcctttagttcccaaattaagctataaagaaccttacctatcccaccagctatgacacttcaaagagggatactaatcaaagagcca

SEQ ID NO: 39333 - DNA, 600 bp, Chicken  19866894273123_1
tctgatctgttttgttggacacaggaaaaataaggagacaggagatgctgtcttctctaagggttctgctgcctacagccaatgtttgtctctgtaaattcttccccaaggcttttccttaggtccaagttctcactgtttgtacgctggttccctttccttcacgtgcatgtgatgaatgtcagatcacatcacagggcactgctgcctaaatccctgttcctacttcagattttgtctttagggctgttcagctcttgtgtatctacactcatctgcagtgaaaggtgtgggcaatamtgaatgtttaaacagaggtgtaataatctatagcacaatgtttaaaagcagcattcagtactccttcaaggatgtgtagcttaaagaagtcaaaagaatggatcaggggagtaggatcactttactgggattgctaaggcttatgctgcaatagaaagagaatgtttaatgatcagaacaatgatatggctctttcatggctatctgtgcaaagatgtgaaggcccttcacttctgttgactgttactgagtccttaaattattcttgacacatgcagtggaaaaatttcagacagagag

SEQ ID NO: 39334 - DNA, 600 bp, Chicken  19866894273133_1
ctctatgtgctttagcatagcccaggaaagcacaagggttgttctcagctgaagcacattttagaggtcctgtcacactgatgaatgtcattgcaattgggcttttctgttggctactttggtgccttatcaaagcacttgcttgttaggattgctaccagggtactgattacctgaaatagcctccattgctaacaagccagtcttttactttgggtgaaaatatctaaatcatatatcaccatgaccttaaattggaatgaacataatggtaattgctacttcctattcataacttamattcctctgagatatcattctctctatggtacaggactaagaatcacaaagtttggtgcattgtcagatgtttaatgtatgaacgctgaatttctctgcaccagaatttgctgaatcaactacactcaaacagcaaaattatcctttaaatgaaaaacatgctgccttttctaaccaggcatctccattccattttttgtttaaatcaaacatcagtttaggttaacaaaattagcagttctgcagtctcacaggtcattatgaaaccttttcagattccaaatatttgggcactgcaat

SEQ ID NO: 39335 - DNA, 600 bp, Chicken  19866894273146_1
agtattgtgtccagttttgggcccctcactgtgagaaagacattgaggccctggagcgtgtccagaggagggcaacaaagctggtgaggggtctggagcacagaccttatgaagagctgctgaaggagctgggattgttcagtctagagaagaggaggctcaggggagaccttattgctctctataactacctgaagggaggttgtagtgagctgggggtcagcctcttctcttgggtgactagtgataggactagagggaatggcttcaagctgcgccagggaagattcaggctggacrttaggaagtactacttctctgaaagggtggtcaggcgctggaatgagctgcccagagaggtggtggagtcaccgaccctggtggtgttcaaagagcatttggatgttgtgttgagggacatggcttagtgggaaccattggtgaagggcgaatggttgaactggataatcctgtgggtcttttccaaccttagcgattctatgactctatgattctatgataaaagcctctgctcaaggtcagtgcagtcatgatgcccattggggaagacacgaggagaaaactacagagaggtaggag

SEQ ID NO: 39336 - DNA, 600 bp, Chicken  19866894273155_1
attcctctcctgcagatatgaatacagtcctgatacacatctgtgtcttacctagagctcattaaaggtacagggaatctttcaacggcctttagcaacatctggaacaggttctcaggtctgccatagagcatcttcagtattaaatgcagagctgtgcaaaactaaatgccaatgcagcctgaactacactgaaaaaaaaatacaaccctttatagtttttgttttcatgcaaattgacaattaacaaagagaaacagaaaaagacaagctgtggaatactctggcacaacctcttcrtaccaatgaatttagactgcgtgttttcttttgtgtctagtctgctgcaagggcttggcacgagctggggccaaggcagccagtggggagcattagcttggaccttcccacagagctcttggcatgcacagcagacttacagagaaacgtctcttttctgtgcagacagccagccaaatcctggccctgatttcatcactttgtgagtgaagtaacacaaatgacttctccagatcaacccaggagttacagggaggaaagcaggctaaggatctggtccctgtgctactaaggggcttg

SEQ ID NO: 39337 - DNA, 600 bp, Chicken  19866894273155_2
tcttactttgctgttaaacagaattttctacccagtgaagtggtgacagccctgaaattctgcctatacatgaaacagcaagaagctctccaagtttccccaaactgtcccccactgcagcttaacttcaacttggagaaacaagcttttatctctgcactcactgagtccttgagccctcagaagagactgctgacagagtacattgcatataaagcagaacagagaggtttcaaacatgggcactgaagtactactagcagaaaagaagccaaaaactaccactcagagctaacactwcttcaccacygataagtcaccacgtcaaataaatcaagaaagtttatgtaggagaaaaagtacagtaggttctaaagttcaccctccagagcagttttatgctatagatcaatattaattctgacttttccagttcctgagtgcctatgtttatggtcatgtgtactgcacgcatcccttctgcaacctgaaacctaaggcacactcccacatatcaaagagcgtcaactccaggaatgcaggaaggctgtgactcagctcctacctctgcattagctttcagaccaccaacctggagaa

SEQ ID NO: 39338 - DNA, 600 bp, Chicken  19866894273155_3
ctgttaaacagaattttctacccagtgaagtggtgacagccctgaaattctgcctatacatgaaacagcaagaagctctccaagtttccccaaactgtcccccactgcagcttaacttcaacttggagaaacaagcttttatctctgcactcactgagtccttgagccctcagaagagactgctgacagagtacattgcatataaagcagaacagagaggtttcaaacatgggcactgaagtactactagcagaaaagaagccaaaaactaccactcagagctaacactwcttcaccacygataagtcaccacgtcaaataaatcaagaaagtttatgtaggagaaaaagtacagtaggttctaaagttcaccctccagagcagttttatgctatagatcaatattaattctgacttttccagttcctgagtgcctatgtttatggtcatgtgtactgcacgcatcccttctgcaacctgaaacctaaggcacactcccacatatcaaagagcgtcaactccaggaatgcaggaaggctgtgactcagctcctacctctgcattagctttcagaccaccaacctggagaagcaggctgaa

SEQ ID NO: 39339 - DNA, 599 bp, Chicken  19866894273157_1
  misc_feature (1)..(30): n is any nucleotide
nnnnnnnnnnnnnnnnnnnnnnnnnnnnnntaaaaaaaaaaaaaaaaagtactgagcttagatctacccaaggacagcactgacttttgcactgtcatttaagtgaacttgtggtcttgcaattactgctggatcaccctcagaaaaatctgctcccttctttttaagtaatgagtgggtgcaggaattatttgtgggttactgaacacatctctagtcattagtttaccattcatttcaggagaggttgattacattaacaactcaactagcacaaaagatctggagatagagcattcyttttttttttttttttttttttttttttaaataacatcttgtaccacaaagtaaagcaagcataaaaatatgcattctgtttttgtacaagagtaatatccacaataatatttgaagaataaagtaacgacagtgcaaaggaacatattaaatcaatgaactggtctaagattctgcttatttcatatacagcttatttttcattgctcttgcagctttcaaacaaagatggaaatgcacgtctgcagcatttcacaagttccacttttctatctagttcattcaacaaccttatccac

SEQ ID NO: 39340 - DNA, 600 bp, Chicken  19866894273157_2
gcattaacaaactgccaagataactgataaactacagaaatgagttctttttgttccccacaggcctccccattctctgtagtttcttctcaggttgaattgagctgcacatacaggttacattttcccagatgtccttgtataagtattaccttttcaatacattatgtaaattgtcattagagccaataaatctatatgtttcaaacttagcagtgggtactttctccattaatgactcagtctagaaccaaaagtgacctttatagatttccttattatttttgctccaaatcatasaaattaaaaatttttcttttagtcttcttcattatctcgtcaatattgttgtagtattagtgtccttatataggatcaattttttttctaaaagttgaatcataacaaaatgcaaaataagytggcactttaagttagagattaaagtaatttctttagggaaaaaaaatgttttaagtagtgtataaaccatccgtttctttgatacttatcttttcagctccctaaaaattgagagaatgtataaggtgaacaaattcactacatatactgtaggaatagctgtaggttataataaat

SEQ ID NO: 39341 - DNA, 600 bp, Chicken  19866894273157_3
ttttcccagatgtccttgtataagtattaccttttcaatacattatgtaaattgtcattagagccaataaatctatatgtttcaaacttagcagtgggtactttctccattaatgactcagtctagaaccaaaagtgacctttatagatttccttattatttttgctccaaatcatasaaattaaaaatttttcttttagtcttcttcattatctcgtcaatattgttgtagtattagtgtccttatataggatcaattttttttctaaaagttgaatcataacaaaatgcaaaataagytggcactttaagttagagattaaagtaatttctttagggaaaaaaaatgttttaagtagtgtataaaccatccgtttctttgatacttatcttttcagctccctaaaaattgagagaatgtataaggtgaacaaattcactacatatactgtaggaatagctgtaggttataataaatagttaaatgaaaaggggaagtttctgaattgacacaatcacaaacaaaaccttttagaaggttgctcaattcttgtatggatggaaccacataaatctgatcctttaataaggaaaacaaac

SEQ ID NO: 39342 - DNA, 468 bp, Chicken  19866894273157_4
catgccacagatataaagaattactactctgttttgtgctgtgctgcagtacaaaagccacagcacagctgtcttctcagaagctgaggaatagtaggaaggactgtcctagggctggggaacaatgcggcaaaaaggttatcacagaacattcccttctcccccagtttatatgtgatatgccactgaagggaatagctatttgttagcttgaatatattgttagagtgaccacctgttagatatttaaaagggagttacatgatgactcaccatagtaagacagttaagcacttcttyaacatttaacctgtagcctcacaaaagcaagtatctgccaaacccatttttaccccgaagtatcttcaagtatctaaacatacagcagccagctgcacaccgaagactttaaaagaataaaacactaacacaaggaatgtgccctaaatattatactcattcatacat

SEQ ID NO: 39343 - DNA, 599 bp, Chicken  19866894273162_1
  misc_feature (1)..(109): n is any nucleotide
nnnnnnnnnnnnnnnnnnnnnnnnnnnnnnnnnnnnnnnnnnnnnnnnnnnnnnnnnnnnnnnnnnnnnnnnnnnnnnnnnnnnnnnnnnnnnnnnnnnnnnnnnnnnnttatcctgtcactaccaaactgtgtaaaaagccactcctcctcctgtttgtaagctttcttcaagtactggaaggctgcaatgaggtctccccacagacatctcttcctccaaaggcacaactccaggtagatgacatcagttgcccttcctttgcccaccaatgccgtcactccatcacagaatgccacmggatgggtcaggcacgctctgcccttggtgaagctgtctcggattaccccttcatctcagtgtgccttaacatctctttcaggaggatccactccatgatcttcccaggcacagaggtgaggctccccagcctgtagttcccaggtcttcctttctccctttcttagaaacaggagagacgtttctccttttcccatcaccagggactttgtctgacagctatgacttctcaaatatgatggagagcagcttggcagccgaggttgtctctgctcagctgaagctgtggccatgccctg

SEQ ID NO: 39344 - DNA, 600 bp, Chicken  19866894273163_1
actgttcaaatatgaactcttgttgggatcttctctttttctctgcctgctggctccggtgtccccctgtggctgtgtcagccacagtgctcactgaagggatgcagccctcgtggcattcagctgcaggaatggggcttccaagtgggggtatggggcgaacctgaagatgattcggacagagcaaagtgatctcatcccttttctggcacaggactgaactattgcagatggatttttgctcgcctcaaatctgtgttcccccctctcccgtgctgccattgccctgaaaaagtcccygtgtttctttctggccaactgattcgttcctcctgctcggcttctcgcygtgtgctcggcctcagaagaggcggtaggatgtgctgggagggggctgttagggcacaaagcatgtgcaccatcatcatctgtggattctgcagagtcctccagcgtcgtgccgcagttatcagcactgcacaaagctgctgttaccacctggggcttactggatattttcaagctgtttttgcttccctccatcaccttctcatccatctgaccttgaaaaagtccctttcagtgcagagctgttttcct

SEQ ID NO: 39345 - DNA, 600 bp, Chicken  19866894273163_2
ctggctccggtgtccccctgtggctgtgtcagccacagtgctcactgaagggatgcagccctcgtggcattcagctgcaggaatggggcttccaagtgggggtatggggcgaacctgaagatgattcggacagagcaaagtgatctcatcccttttctggcacaggactgaactattgcagatggatttttgctcgcctcaaatctgtgttcccccctctcccgtgctgccattgccctgaaaaagtcccygtgtttctttctggccaactgattcgttcctcctgctcggcttctcgcygtgtgctcggcctcagaagaggcggtaggatgtgctgggagggggctgttagggcacaaagcatgtgcaccatcatcatctgtggattctgcagagtcctccagcgtcgtgccgcagttatcagcactgcacaaagctgctgttaccacctggggcttactggatattttcaagctgtttttgcttccctccatcaccttctcatccatctgaccttgaaaaagtccctttcagtgcagagctgttttcctggctcctgcagccggcgcggtagctgccaatcccactccgctagcctaa

SEQ ID NO: 39346 - DNA, 600 bp, Chicken  19866894273166_1
gtatcaaactaatattcagagctatgagatttttcatattctctcatttggaataaagtttcagtagcatatatcttgtgcatcctaatgtggatagaagacacgtttgactgtgaatattaagtatgtatcccagaggaactcttacagaagctggtcaactgaaaggaggtagaatgttcgtgcaataacattttttcaagttctctgatgaaatacgatcttagtatttgccttaatgacttctttttcacttctggaataacccttcttttttgttacagtttggctgctcttaayattttgycatcattcagaagaaaaagaaattaaacatcatcgtttattgtaagctagtttttgtaaaaccctaatgccagacacagactatttgtccaaatgacaaatatatgtgctgggaaaattttacatatttcttctgactatarataagttatgcatgaaaatcttatctgtttatttagatatgtatgaagtcccccttgatcaactaaacaatcagtctgtttgcttacagagacaaatggcaattatgcaacttgactctcatgggaaagaaaagtgtgggcactgaatcat

SEQ ID NO: 39347 - DNA, 600 bp, Chicken  19866894273166_2
actaatattcagagctatgagatttttcatattctctcatttggaataaagtttcagtagcatatatcttgtgcatcctaatgtggatagaagacacgtttgactgtgaatattaagtatgtatcccagaggaactcttacagaagctggtcaactgaaaggaggtagaatgttcgtgcaataacattttttcaagttctctgatgaaatacgatcttagtatttgccttaatgacttctttttcacttctggaataacccttcttttttgttacagtttggctgctcttaayattttgycatcattcagaagaaaaagaaattaaacatcatcgtttattgtaagctagtttttgtaaaaccctaatgccagacacagactatttgtccaaatgacaaatatatgtgctgggaaaattttacatatttcttctgactatarataagttatgcatgaaaatcttatctgtttatttagatatgtatgaagtcccccttgatcaactaaacaatcagtctgtttgcttacagagacaaatggcaattatgcaacttgactctcatgggaaagaaaagtgtgggcactgaatcatagaatca

SEQ ID NO: 39348 - DNA, 600 bp, Chicken  19866894273166_3
gaagctggtcaactgaaaggaggtagaatgttcgtgcaataacattttttcaagttctctgatgaaatacgatcttagtatttgccttaatgacttctttttcacttctggaataacccttcttttttgttacagtttggctgctcttaayattttgycatcattcagaagaaaaagaaattaaacatcatcgtttattgtaagctagtttttgtaaaaccctaatgccagacacagactatttgtccaaatgacaaatatatgtgctgggaaaattttacatatttcttctgactatarataagttatgcatgaaaatcttatctgtttatttagatatgtatgaagtcccccttgatcaactaaacaatcagtctgtttgcttacagagacaaatggcaattatgcaacttgactctcatgggaaagaaaagtgtgggcactgaatcatagaatcatagaatggcctgggttgaaaaggaccacggtgatcatctagtttccaccccctgctatgtgcagggtcaccaacaactagaccaggctgcccgagccacatccagccttgccttaaatcttctgcttaactttcaaagagtg

SEQ ID NO: 39349 - DNA, 600 bp, Chicken  19866894273166_4
ggttacctgtatgatcatatggagtagatatgagtctgcataatttaatttctcttgtcacatactggaaaaactaacacagatatggtggcatttcacttcatagtttgtagtaagtagttttgtatgaacaaaattatttacagccagacaataacagagatagaaattagatagcagtttttagatcatggtagaagaaatcatctagtttttaaatgacctggcaaaaatgcagtaaggatgcaatgatctgtaactaaattttgagtgcaaaaacctcattttctaatttgcatscaggtattaactgacaagacagaaaatgtaaagctgatacctgaaattaacaaatgctccctaagaagaagcacattaagtacttcacagagctgttcagaacaatttataggaaaatatgctggtgttccattacacatactgtgagctagcagcaaaaatccactctttaaaamaatgcactttatatataattggtgctgtccatttcatctgaatttagaatagcaattccatttgaaattaagaaaacaaaatctaggtgtatgtatgaaaggtgtctatatttgagctaaacat

SEQ ID NO: 39350 - DNA, 600 bp, Chicken  19866894273166_5
gcagtttttagatcatggtagaagaaatcatctagtttttaaatgacctggcaaaaatgcagtaaggatgcaatgatctgtaactaaattttgagtgcaaaaacctcattttctaatttgcatscaggtattaactgacaagacagaaaatgtaaagctgatacctgaaattaacaaatgctccctaagaagaagcacattaagtacttcacagagctgttcagaacaatttataggaaaatatgctggtgttccattacacatactgtgagctagcagcaaaaatccactctttaaaamaatgcactttatatataattggtgctgtccatttcatctgaatttagaatagcaattccatttgaaattaagaaaacaaaatctaggtgtatgtatgaaaggtgtctatatttgagctaaacatctgaacacccatcttaggcagcggagatgaaaaactccctttgattgctctatatcacatcagcatctataatcatctgtgatatcctaggatatctgatatgtgttaagattgtcttaacacaagacccatgggagaccattcccctctgaactgcaggtgaagctcatataaca

SEQ ID NO: 39351 - DNA, 600 bp, Chicken  19866894273173_1
caccattcgtgatacaagccaggatgctattggccttcttggccacctgggcacactgctggctcatattcagctgactgtctaacagtacacccacgtcccttcctatcaggcagctttccagccactcctccccagggccttactgaagtgcaggtagaccacaaggctgcattgacagccttgcctttatccactaagtgggtcaccttgtcataggatgaaatctggtttgtcagataggatctaccacttgtaaactcatgctgactgggcctgatcccctggttgacctttaaktggtccacgatggttcctgggattatccattccataaccttccccagcactgaggtgagactgataggtgcgtagctaccaagatcatctttctggcccattttgaaggtgagtgtcacatttgccagtctccagtttgacaggacatttccagttagccaggtctgctgaagaatgatggagagagacttagcaaccatatctgtcaactacctcagcactctagggtgcagtccatccagtcccatggacttgtgagcatccagctttcaaagcaggtccaaaaccatctcattgtgg

SEQ ID NO: 39352 - DNA, 528 bp, Chicken  19866894273179_1
acagagaggagaaatagaaaaagtagagctttgttccaatttagttttcagtcattgatatagacttggtgggattttcatgtacaagaaatgcacaaaaattcctaagtcactacaattttgaaaatgtgtttcattatgtagagtaatcttcaagactactgtccacagaattctaaacacttaatacctttaagggacttaagtatgttgtggcctcataaggagtgagaatctttgtgattcgagccaaaaaggaaaactgtgtactgtaaaattttgtaccagaagaagtggggraaaaaaaaaaaaaaaaaaaggatttgagatctaaaaacagtcctcagatgtatcattttagccagtttaaagtttattgttgcatttaattaaaacattgaataatattatatacatatttatgactaaaaacaaaagcaaagcaatctatatcttttgacaaaaatagttcagctaaaagaatcttgatcaattctctcattcgcattgacattacctttgcatcta

SEQ ID NO: 39353 - DNA, 600 bp, Chicken  19866894273181_1
aagttagctataatagaggatagtctaatgctctgtattcttatacaggaagcagcatgcaaactccctaaaaagagcctaggtttagcatttgtttcaatttttattcactgtctccagacatgatcacttcaactagaaaaattaattcctctaaattaggctcactctacctacatatttcttgcacagtatgttgtttttttttttttattcgggagatacacagagctctaacactactgatgaatgcaacctcaaaacaggcttcatttcagatagtgagaagtgatggtacaraagcacattctaagattaagtctgaacaggagacttccaagaatgttagcaacatgttgtcttgccttccagctatacacattcatcttttatttctgtctatcccaatgctacagtctcatcttttttcttaaccattatacttggtaaactgcatgaactgggaagtgagatgtttttagtggcagtacgtactacacagccccttaggcattttcaggacctttctccggtaatcaaccttttctaacaaccgaagggactgaattcacccctcaggagtgtcaacataccgattta

SEQ ID NO: 39354 - DNA, 600 bp, Chicken  19866894273191_1
cgcttttgggctatctagtctccctgtaaggtagggcctcttacaactgcagcttcctccacctaccctctttaaacttgggctgtttttctcagcctccatattttcaggcctcctacctgcccctccaacctccttccccaatgcaacattccatccaaaagaccttttccataaacagaaatcacatcatcattgacattacgcatgcaaagaggcctaaaaaaataaaaataaaaagagctggcttgcagatagcatctgagatgcatatgcagcaactgggcacactcatgaacyawttggaaatctgtctcctggcagttaaattgcagacagacatgatctaagctttcacagctttctcccatcatggccagatggtgcctgacccctgcaatcatttctgccatattctaccccatatgcaaacctcactgcttccatcaagctgttactaccaataaacatttttagaaattgagattttaataaagcattaatagaaaaatgaacagaaaaatgtgaagatttcatacattctctcacacacatctattctttagggatcaccttaggctcttctaaagcatctccatc

SEQ ID NO: 39355 - DNA, 600 bp, Chicken  19866894273191_2
cttttgggctatctagtctccctgtaaggtagggcctcttacaactgcagcttcctccacctaccctctttaaacttgggctgtttttctcagcctccatattttcaggcctcctacctgcccctccaacctccttccccaatgcaacattccatccaaaagaccttttccataaacagaaatcacatcatcattgacattacgcatgcaaagaggcctaaaaaaataaaaataaaaagagctggcttgcagatagcatctgagatgcatatgcagcaactgggcacactcatgaacyawttggaaatctgtctcctggcagttaaattgcagacagacatgatctaagctttcacagctttctcccatcatggccagatggtgcctgacccctgcaatcatttctgccatattctaccccatatgcaaacctcactgcttccatcaagctgttactaccaataaacatttttagaaattgagattttaataaagcattaatagaaaaatgaacagaaaaatgtgaagatttcatacattctctcacacacatctattctttagggatcaccttaggctcttctaaagcatctccatctg

SEQ ID NO: 39356 - DNA, 599 bp, Chicken  19866894273193_1
  misc_feature (1)..(57): n is any nucleotide
nnnnnnnnnnnnnnnnnnnnnnnnnnnnnnnnnnnnnnnnnnnnnnnnnnnnnnnnncagactggcctcattatagagcatagaagctggagcatgcttatataaatctgtgaactagaaactatgaacttccttgttttgttttctttggggattgctaagtagtttgccttgtgcattatggtgccattgaatcaggcagttctctggttcagccccatacagagagttgttggtgcaaccagacaaaacagcaaatggcccagcctggttgatcctgagaagctatccatgcctatraaggtctgcaggagggttgaatcctcctagagcagcagagcacatttggctttgagctattggccttaagctatcctagcatcattactatgcaacttttctggtcagaaagtctctaaaccactgaggttgggaagcactgtggaagaagcaaacaagtccaagccgtgctacctaccctcaaaggtccctgtgggcagcacctgtgcaggtgccccttctccatgtttccctgccctgctgttcccagagctgctgagcagtgtccatgaggacatctctgcttctgtgcgtgggag

SEQ ID NO: 39357 - DNA, 600 bp, Chicken  19866894273207_1
tgcaaagttccatttgctttcatgtagattttataaaataaggtgaattaaaggaaaaagacaacaattggaagttccagaaatagtttatataataatttgtaacaaaaaaaaattctatcctgttatctgagcaaagcttcaattgctgaagagtttacaagctgtctgtgaaaggtccaacattctcatctggaaaaactttcagattttattcctttatttggcatgaaacagcacttttttgcttttgttaaatctttaactgaggtctgggccacagcataagtaagaggcaayatgcgtggctggaggccatcgttttacattttagaagaaggatttggagtgaaaacagatgaaagctgtgggggccctggtcagatggcagtgtaaggatccacaggagccaggatgaagagagtccagcatatcctgggtcagaagaaatcaatgagcagctgaaattggggatgatgcaaggaaaaataataataataattaaaaaaaactaatttaaaaagtgttccttgaggtattgcttcagctcttggaatagtaaataatggaaaaataccatcaagaggagatcttcctaat

SEQ ID NO: 39358 - DNA, 562 bp, Chicken  19866894273215_1
gaaaagacttgaaatcaaaaatgaccaaatgggtttgttctttatttcctgagaaattgatagcatgtttctttttcatattttttttttatttgccaatcattaataagcacatattcgagtagcctgatcccatgtttgcaagtcaatgcacctgaatactaagatctgtcacacgaataaagcttcagagcaagcagtcttcaagataactgacagcctacctttttcattaaagttaattaacagtagctgtgttgtttacaataattaaatatatattggcaatttatatatatwttttttcactaatcagtttctgagcttatgataggaagattgtagtcaatctcctctgtcttgtcagtcttctgcatgcaactggggttctgcccagccacactgagttgttatcaaacatcacctaaaacggcatgtgaaaagctgctcctagagtacttgtatctacacttaggactgcttacatccatttagaaggtaaacagggatactttaacactctattattctgcaaaaagctgatgctatagcactttaatgg

SEQ ID NO: 39359 - DNA, 600 bp, Chicken  19866894273218_1
tttgcacatattctgcaaaagctgactttcttccttgaatgccctaaggcaccctgtgttatccaaagcacatcacagctgcaaatgtttaggttaccagcacctactcactgaaaaagtagaatctttctttcaaggttaaggcatagtatcccacccttggcagatatctgaaaactttgcaaaacagtaaaatgccatagggaaaagaataaataaataaataaataaataaggccaggctcctagccctcctgcagccagtgctagaagtcctggtcatgtgtctggggccacaarcactcctttaagtgatttccatccccagccacctgctgctggaggctgtccctatgctagagaaaataccagtcagtaaaggacatttggaacrgtgcttatctcccttatttacccagctgaaagctaggtacatagtttgagctaagtaaacaatggcttctgtgaaaagaagaggataagtccaccagtgtacatccctctctactgatggacccaaggcaagtagcttagggcagctgcctgacagtaaatggctgaagctatgtgagatgaatcctgccctaatgcatcttctgc

SEQ ID NO: 39360 - DNA, 600 bp, Chicken  19866894273218_2
taccagcacctactcactgaaaaagtagaatctttctttcaaggttaaggcatagtatcccacccttggcagatatctgaaaactttgcaaaacagtaaaatgccatagggaaaagaataaataaataaataaataaataaggccaggctcctagccctcctgcagccagtgctagaagtcctggtcatgtgtctggggccacaarcactcctttaagtgatttccatccccagccacctgctgctggaggctgtccctatgctagagaaaataccagtcagtaaaggacatttggaacrgtgcttatctcccttatttacccagctgaaagctaggtacatagtttgagctaagtaaacaatggcttctgtgaaaagaagaggataagtccaccagtgtacatccctctctactgatggacccaaggcaagtagcttagggcagctgcctgacagtaaatggctgaagctatgtgagatgaatcctgccctaatgcatcttctgccagggttacagtgcatattgatatctttctacttaagttcactggagaatattaagatcataatcctagagtaagttcaaaaaaatgaattctc

SEQ ID NO: 39361 - DNA, 599 bp, Chicken  19866894273221_1
  misc_feature (1)..(40): n is any nucleotide
nnnnnnnnnnnnnnnnnnnnnnnnnnnnnnnnnnnnnnnnaaaagattatttcaaatcacttactatatttcatttcatgtaagctgtcaaagattaaagaaataaaagcaaatgaaccaaatctttcaaatcagctttacattttacattcacaggtaggtacttttaaaaaaggaaactgtattttctaattgtatgttgctgggttttactgtacatttaaatatcattattcaaaaataaatggatggggcaacaatttttttttttatcattgaaaatagttttgcataaaactrtttgctgggctgtaagcagtgctgcttccttgagtaaaaaatgaaagcttgctactaaattaattgcgaaacaaaagacaaagagttttccatttttcttatcaacaaacgatgttctgtgttgtcagcttcctttcgtaccttggttcattctctatgatctctttattttgtatgtaattttccctgactcttacttccattgtaactgaaaacaacatacttatagtttattttcattgatcaaggatgccttctgccttttggcctctttgataagtcagaatacataatgagtg

SEQ ID NO: 39362 - DNA, 600 bp, Chicken  19866894273221_2
tcaacaaacgatgttctgtgttgtcagcttcctttcgtaccttggttcattctctatgatctctttattttgtatgtaattttccctgactcttacttccattgtaactgaaaacaacatacttatagtttattttcattgatcaaggatgccttctgccttttggcctctttgataagtcagaatacataatgagtgagcacagaacaaagcagtgaaaagaaattccaaatgggactgctgtatcaaggaagttactagcagctgacatactaggccaaagaaattatttcagaatawaacataatctattcaactgcagaccagtgcaatggaactactagggtcagtcctgacccaccaatcacaaaagatgtaaatttatgtatcagaaatcaatgtgctattttaaactataggtggaagggaaaataaacctgacttatctctgaactcaaacctatctaaaygaagacaagatggctgcggccaccattttccctgtgcagccgggccagcgccagcaggcctatattgggcgtggcagagcagggagccacacggagggcggtcggaagagccgtgaggctgctgtgttgt

SEQ ID NO: 39363 - DNA, 598 bp, Chicken  19866894273221_3
tttgataagtcagaatacataatgagtgagcacagaacaaagcagtgaaaagaaattccaaatgggactgctgtatcaaggaagttactagcagctgacatactaggccaaagaaattatttcagaatawaacataatctattcaactgcagaccagtgcaatggaactactagggtcagtcctgacccaccaatcacaaaagatgtaaatttatgtatcagaaatcaatgtgctattttaaactataggtggaagggaaaataaacctgacttatctctgaactcaaacctatctaaaygaagacaagatggctgcggccaccattttccctgtgcagccgggccagcgccagcaggcctatattgggcgtggcagagcagggagccacacggagggcggtcggaagagccgtgaggctgctgtgttgtggctgccggtgcctgagcacctcctcgtgggccctgggtggcactgctgtgagagaggctgacagcatgagaccagatgaaacatctaagggcctggagggctgggccacctctcctacaaagaaaggctaaaggggctgggcttgttcagcctggagaatgctccag

SEQ ID NO: 39364 - DNA, 600 bp, Chicken  19866894273231_1
ctcttttagaccctacccaaaatagagaggaccaaaaggaaaaggtatggcatgtgtttcttattattatgacagctaacagcaggcatatgtatttagagcaagcaggacttgttttggattagactaccgggtcaggccatagaaagacatagacctcaaaaattcagtttccttgaagaatttctctggcagcgccagactgtcgtactggtaggtgtggggccttgcctagctgcctgtcccagccgctctctaaccctttgaccgaatagggggaagagaggaagacggaaaaaytcacagatctcaataaagatcacttattagtttctatcacaagccaaaaaaactccacttggggaaaataaattaaaaatagactttggtaatgagaaacaaggataaaaccactttctcccaaccctccttttactcaggctcaccattcctccttcactcccaagctcttccaaccctcccctgctcgggcagtgcagggcagtggggaaggcggtggggtgtggggctgtcagtatgcagtggttcctctcagttcccctactccttgtgagctccccaggggctgccggraatctg

SEQ ID NO: 39365 - DNA, 600 bp, Chicken  19866894273231_2
aaaaaytcacagatctcaataaagatcacttattagtttctatcacaagccaaaaaaactccacttggggaaaataaattaaaaatagactttggtaatgagaaacaaggataaaaccactttctcccaaccctccttttactcaggctcaccattcctccttcactcccaagctcttccaaccctcccctgctcgggcagtgcagggcagtggggaaggcggtggggtgtggggctgtcagtatgcagtggttcctctcagttcccctactccttgtgagctccccaggggctgccggraatctgtygcagcacagcattgtttgtgttactgtgtcagaaaatctttgcacatcttatgctgcctaagcttctattttatggcatttacagaattgttctagaaccatttttaagaaaaaaatcactaagaaggcaacacaaaattaaatggtatatcactggattgagacattcctagtcatatacgagctcttattaaaaatgctggaaattatgtgcataattttctataagtcacatttagctgtgtcacttctacgaaacagaatacaggaaaaactttagacgcatagcctg

SEQ ID NO: 39366 - DNA, 600 bp, Chicken  19866894273231_3
acagatctcaataaagatcacttattagtttctatcacaagccaaaaaaactccacttggggaaaataaattaaaaatagactttggtaatgagaaacaaggataaaaccactttctcccaaccctccttttactcaggctcaccattcctccttcactcccaagctcttccaaccctcccctgctcgggcagtgcagggcagtggggaaggcggtggggtgtggggctgtcagtatgcagtggttcctctcagttcccctactccttgtgagctccccaggggctgccggraatctgtygcagcacagcattgtttgtgttactgtgtcagaaaatctttgcacatcttatgctgcctaagcttctattttatggcatttacagaattgttctagaaccatttttaagaaaaaaatcactaagaaggcaacacaaaattaaatggtatatcactggattgagacattcctagtcatatacgagctcttattaaaaatgctggaaattatgtgcataattttctataagtcacatttagctgtgtcacttctacgaaacagaatacaggaaaaactttagacgcatagcctgcatgtctg

SEQ ID NO: 39367 - DNA, 600 bp, Chicken  19866894273244_1
cagtttcaatgaacatcatttcctctattatcagtattatgaacatcaaaaacaaacagtaggcaattaagtaacaggtctgagcactatgaaccccataccacaaaaagttgagattggcaaaagctacaaaatgtgaacatgacaggagaaggatgcagtcagaaaaggtgatgacagggcactgtttgagtaacaagttgggtatttttatctgttgcacttgaaagaaaaatagcttcaggatcactgaggaaattacattaaaatggaagaggaaccagcaatacagatatggcytggtgaaagaagcagcaaagaaatgaaagagacttgtagatattagggttggatgatagaggaagtagtaacacttactgatgctttttaaaaaataggagaaaaaaaatgcagtagaaaaggtgttatcctagaggtgatacacaggtcctgggtgatgagatctgtgagtataggtggcagcacagtgatatcctctgagtagatgattacagatatttaaaccaagacaaggaactaaagtaaaagtgacgtcatccatatagataatgcgtttcataaacttaatgctgaggagct

SEQ ID NO: 39368 - DNA, 600 bp, Chicken  19866894273245_1
cattcaatatcactatttataaacaaaggccagattgaactatctgtgttcacagctccttagcttttattctcagcccttctcaatttttcctcagttttatcccacttgtgaccatataaactacatgagcaattgtgcttctgtcaggctggtgaccctgctggaactgccagaatcaaactgggctgataaatctcagtttggtagctgctgccagacataacaaggacactcactgatgtcagtgaagctctatgtgaagcgaggtgcccctccaggggagtaaatgtatctcayrttgttcggcttgctagcagtttgaaagtcaggggagcaacagcagacaattattaagaagtctttttgagtggttaaacacttattataaatacttacattaattaggcaaagactaagtcaattaaaatgattcttcacatgaaagctaatgcacagcaatgaaaaaaatcacatattccaacagaaaatccatcagtatttacctccttctggtaatacagtcatagcttaggctaagctcatcataaaacttaaatgaactggaaaaaagaacattttgttttgcaactgttaaaa

SEQ ID NO: 39369 - DNA, 600 bp, Chicken  19866894273245_2
attcaatatcactatttataaacaaaggccagattgaactatctgtgttcacagctccttagcttttattctcagcccttctcaatttttcctcagttttatcccacttgtgaccatataaactacatgagcaattgtgcttctgtcaggctggtgaccctgctggaactgccagaatcaaactgggctgataaatctcagtttggtagctgctgccagacataacaaggacactcactgatgtcagtgaagctctatgtgaagcgaggtgcccctccaggggagtaaatgtatctcayrttgttcggcttgctagcagtttgaaagtcaggggagcaacagcagacaattattaagaagtctttttgagtggttaaacacttattataaatacttacattaattaggcaaagactaagtcaattaaaatgattcttcacatgaaagctaatgcacagcaatgaaaaaaatcacatattccaacagaaaatccatcagtatttacctccttctggtaatacagtcatagcttaggctaagctcatcataaaacttaaatgaactggaaaaaagaacattttgttttgcaactgttaaaaa

SEQ ID NO: 39370 - DNA, 600 bp, Chicken  19866894273245_3
aggggagcaacagcagacaattattaagaagtctttttgagtggttaaacacttattataaatacttacattaattaggcaaagactaagtcaattaaaatgattcttcacatgaaagctaatgcacagcaatgaaaaaaatcacatattccaacagaaaatccatcagtatttacctccttctggtaatacagtcatagcttaggctaagctcatcataaaacttaaatgaactggaaaaaagaacattttgttttgcaactgttaaaaacaattgactatgatgtaaagttcccatcrgctctggcagcaagtccttgttcctttaaactcttatgtacacactttttaatcttttgtawtagggacttaaaaatacatcagtttgacttagtttgaatgggaatgatgctatctggagagtagtgtttgaaaaagattgtttgcaaggttgtactgggtgacagccgctcataggtctgtcaaaaatctgaaacatacactcactctgggaaagattggaacagggaaggaaagtaaggtgatgcaggtccccgagctgcatctccagagtcctatggcacataaccaggcccgtgg

SEQ ID NO: 39371 - DNA, 600 bp, Chicken  19866894273245_4
tacttacattaattaggcaaagactaagtcaattaaaatgattcttcacatgaaagctaatgcacagcaatgaaaaaaatcacatattccaacagaaaatccatcagtatttacctccttctggtaatacagtcatagcttaggctaagctcatcataaaacttaaatgaactggaaaaaagaacattttgttttgcaactgttaaaaacaattgactatgatgtaaagttcccatcrgctctggcagcaagtccttgttcctttaaactcttatgtacacactttttaatcttttgtawtagggacttaaaaatacatcagtttgacttagtttgaatgggaatgatgctatctggagagtagtgtttgaaaaagattgtttgcaaggttgtactgggtgacagccgctcataggtctgtcaaaaatctgaaacatacactcactctgggaaagattggaacagggaaggaaagtaaggtgatgcaggtccccgagctgcatctccagagtcctatggcacataaccaggcccgtgggcaggtccagagcacaccagctttctccactagcagaaatcccagaatagatctgatacaga

SEQ ID NO: 39372 - DNA, 599 bp, Chicken  19866894273246_1
  misc_feature (1)..(60): n is any nucleotide
nnnnnnnnnnnnnnnnnnnnnnnnnnnnnnnnnnnnnnnnnnnnnnnnnnnnnnnnnnnnttattaaattagtgatagccaagtctcagaagactctcttctagatacaagcaaacctacgtttaaacttctgccttcagagaggcaggtttgcagatttgttggtggccatttataccaaggtccaataaaggacagtgaaaaaaaaaaatagcaaagtacttttgctctatttctagtatgagtacggttatcaaggatatagtgagcatatactgcctcatacactaaacaggtttmatgggtagatagataacctcaagcacactgattcccatggatattctgctgtctgaaccagatgtttctttaccttttatacattaatgaaatgcaacatgtataatgtagtgcatggacttgggaatacccaatacacaaagaaatctgctgggagaagttaataaaatattgctgctactaggatacctaattgtgcctccaacaacttctactcatacccttaatgctttcctactcaagcaagcagatgcatcacttcaatttatcattatgattagcagtccccatctacctca

SEQ ID NO: 39373 - DNA, 567 bp, Chicken  19866894273246_2
gataacctcaagcacactgattcccatggatattctgctgtctgaaccagatgtttctttaccttttatacattaatgaaatgcaacatgtataatgtagtgcatggacttgggaatacccaatacacaaagaaatctgctgggagaagttaataaaatattgctgctactaggatacctaattgtgcctccaacaacttctactcatacccttaatgctttcctactcaagcaagcagatgcatcacttcaatttatcattatgattagcagtccccatctacctcaacattttctatyattagaatattaatgtgtaactatacatgctaccatagctcctatatcacagttacacactctgcacaaggtgaagatgggtggaattacagtattgtttttgttgcaagcaaaaaaaataaacacaacacttctgtaaggagagcatgactataacatatactcatttacatatgcagaagtagaagaaacagcattttctcatcatatgacaggaactgaggttggagtaagcagcctgtgattggtctgatgcataccttgata

SEQ ID NO: 39374 - DNA, 558 bp, Chicken  19866894273249_1
atatctcttgcaaagatatattgaaataatcacagcaaatactttaaatttgaatgacagaatagacaggaagtgaacattttatgtatttaccatgcagtggtccaaatgtgactgcactacttcctgctcaacactcttcgtctccaacttgggcacttgcaacttcacttcatctagaattcttttgcattcttgtagacgctgttcaaaattagctggtttctgaaacaagcgaaacttcatggagacatcctgcagctttttctgaaaagtaaagaggggtgagtagaagatgtraaatgacatcaaaattgaagacaattcttggatccattccatgatgctcagaatccattatcaatcagcacagcttttcattcaaatgtctgaaatcctctggggaaaatatcagcagtagagaatcttggtttccacgggraaaaaaaaaaaaaaccttgcatcatccagggtattggatgcagcacagccaatgacaaaggatcctgtatactggactgaagaaagggaaggttttcatattttccaatgtgtata

SEQ ID NO: 39375 - DNA, 416 bp, Chicken  19866894273249_2
gtctccaacttgggcacttgcaacttcacttcatctagaattcttttgcattcttgtagacgctgttcaaaattagctggtttctgaaacaagcgaaacttcatggagacatcctgcagctttttctgaaaagtaaagaggggtgagtagaagatgtraaatgacatcaaaattgaagacaattcttggatccattccatgatgctcagaatccattatcaatcagcacagcttttcattcaaatgtctgaaatcctctggggaaaatatcagcagtagagaatcttggtttccacgggraaaaaaaaaaaaaaccttgcatcatccagggtattggatgcagcacagccaatgacaaaggatcctgtatactggactgaagaaagggaaggttttcatattttccaatgtgtata

SEQ ID NO: 39376 - DNA, 600 bp, Chicken  19866894273251_1
acatctatggatgtctcatgtttctgtgggaacttgcagagtgatgccaggcactgttctgctgcatttgtcctgtggcagtctctgcttggggcttaaactagtacagatatgttagggaatgtatctttcatcaacctgtctcataaggtgtgtgatttaagtgtgtgtttgtgggacaatgtgctgtggtatggcctctccccctttcccaccaagccctggaattattcagcacgttaagctggagcatggcaattagcactggatagatgtaagaagcagctggtagtaaactascacctagaatgatctatggacacaatctgagaggtcaaccataagatctttgataggacagactaggcaggagtgcaggattaagcctaataaaagtagtttctaaaattcttcctagcaagtttgcctcatgtgtagctccaagtcttggtgtgtattaagatttgtgatttcttctatgaatactacagagmaaacattttcttcctttatataattgcacttagagaaatataacgttatgttggagcctgccatttttagaagtgattgtatttatgtgatgaggaacttgtctgc

SEQ ID NO: 39377 - DNA, 600 bp, Chicken  19866894273251_2
tggcctctccccctttcccaccaagccctggaattattcagcacgttaagctggagcatggcaattagcactggatagatgtaagaagcagctggtagtaaactascacctagaatgatctatggacacaatctgagaggtcaaccataagatctttgataggacagactaggcaggagtgcaggattaagcctaataaaagtagtttctaaaattcttcctagcaagtttgcctcatgtgtagctccaagtcttggtgtgtattaagatttgtgatttcttctatgaatactacagagmaaacattttcttcctttatataattgcacttagagaaatataacgttatgttggagcctgccatttttagaagtgattgtatttatgtgatgaggaacttgtctgcttgtggctgtgcagcttgctttttgctggttaggtttgcttgttaggtgcagcagctccagtgccagtgcttgaactcttaatggatttgtatgcatctggcactttttaagagtggaaagactgcagcctttaagtggcattaattattctgggaggatttttgaagaactgtaatgagaaactcataattca

SEQ ID NO: 39378 - DNA, 600 bp, Chicken  19866894273251_3
attattcagcacgttaagctggagcatggcaattagcactggatagatgtaagaagcagctggtagtaaactascacctagaatgatctatggacacaatctgagaggtcaaccataagatctttgataggacagactaggcaggagtgcaggattaagcctaataaaagtagtttctaaaattcttcctagcaagtttgcctcatgtgtagctccaagtcttggtgtgtattaagatttgtgatttcttctatgaatactacagagmaaacattttcttcctttatataattgcacttmgagaaatataacgttatgttggagcctgccatttttagaagtgattgtatttatgtgatgaggaacttgtctgcttgtggctgtgcagcttgctttttgctggttaggtttgcttgttaggtgcagcagctccagtgccagtgcttgaactcttaatggatttgtatgcatctggcactttttaagagtggaaagactgcagcctttaagtggcattaattattctgggaggatttttgaagaactgtaatgagaaactcataattcaggaaagctgtgagacaaaggaaaggagaaacc

SEQ ID NO: 39379 - DNA, 599 bp, Chicken  19866894273252_1
  misc_feature (1)..(168): n is any nucleotide
nnnnnnnnnnnnnnnnnnnnnnnnnnnnnnnnnnnnnnnnnnnnnnnnnnnnnnnnnnnnnnnnnnnnnnnnnnnnnnnnnnnnnnnnnnnnnnnnnnnnnnnnnnnnnnnnnnnnnnnnnnnnnnnnnnnnnnnnnnnnnnnnnnnnnnnnnnnnnnnnnnnnnnnnaacgaaggcaaaataaggtgggccatcctgtttggattttgatttgtttttgcttgtaggcagtggactgatgtaagaaatggttaaataaatgtaccataatgcagtatttagaaagatcagatcagagtygtgggtaagatagttacttttaaaccctgtatcttaaatgtaacagttgggggaaaataaaaggaaaaaagaaaggagagtgttgaaattgaagtgtgagttgttgcacaggtagttgatgcgttttgcagcacagatccraacagcagcaagtatccttctgctggctgaagtgctccggygcatcgctccttcaaaaaacagagcaacaaaacccacagaaactgttgagcacagcagcatctccgtgggcccgggagcctgcggttaaagattacccaaatacrtggaaagtaatc

SEQ ID NO: 39380 - DNA, 599 bp, Chicken  19866894273252_2
  misc_feature (1)..(27): n is any nucleotide
nnnnnnnnnnnnnnnnnnnnnnnnnnnaacgaaggcaaaataaggtgggccatcctgtttggattttgatttgtttttgcttgtaggcagtggactgatgtaagaaatggttaaataaatgtaccataatgcagtatttagaaagatcagatcagagtygtgggtaagatagttacttttaaaccctgtatcttaaatgtaacagttgggggaaaataaaaggaaaaaagaaaggagagtgttgaaattgaagtgtgagttgttgcacaggtagttgatgcgttttgcagcacagatccraacagcagcaagtatccttctgctggctgaagtgctccggygcatcgctccttcaaaaaacagagcaacaaaacccacagaaactgttgagcacagcagcatctccgtgggcccgggagcctgcggttaaagattacccaaatacrtggaaagtaatccttatttgtctgactggataaatatggctttcgttggtttccatcgctccggtaatttttgcagaccggcttcccctgttagcagctgccctgctcgttatttggttttgatcagatttaattgcgggtgacattcaggag

SEQ ID NO: 39381 - DNA, 600 bp, Chicken  19866894273252_3
aaggtgggccatcctgtttggattttgatttgtttttgcttgtaggcagtggactgatgtaagaaatggttaaataaatgtaccataatgcagtatttagaaagatcagatcagagtygtgggtaagatagttacttttaaaccctgtatcttaaatgtaacagttgggggaaaataaaaggaaaaaagaaaggagagtgttgaaattgaagtgtgagttgttgcacaggtagttgatgcgttttgcagcacagatccraacagcagcaagtatccttctgctggctgaagtgctccggygcatcgctccttcaaaaaacagagcaacaaaacccacagaaactgttgagcacagcagcatctccgtgggcccgggagcctgcggttaaagattacccaaatacrtggaaagtaatccttatttgtctgactggataaatatggctttcgttggtttccatcgctccggtaatttttgcagaccggcttcccctgttagcagctgccctgctcgttatttggttttgatcagatttaattgcgggtgacattcaggagcgagatttactgcttttcatcctttcccttgtggtgaaaacg

SEQ ID NO: 39382 - DNA, 600 bp, Chicken  19866894273252_4
tcagatcagagtygtgggtaagatagttacttttaaaccctgtatcttaaatgtaacagttgggggaaaataaaaggaaaaaagaaaggagagtgttgaaattgaagtgtgagttgttgcacaggtagttgatgcgttttgcagcacagatccraacagcagcaagtatccttctgctggctgaagtgctccggygcatcgctccttcaaaaaacagagcaacaaaacccacagaaactgttgagcacagcagcatctccgtgggcccgggagcctgcggttaaagattacccaaatacrtggaaagtaatccttatttgtctgactggataaatatggctttcgttggtttccatcgctccggtaatttttgcagaccggcttcccctgttagcagctgccctgctcgttatttggttttgatcagatttaattgcgggtgacattcaggagcgagatttactgcttttcatcctttcccttgtggtgaaaacgtctgttcctctctgggtcagttttactgcagttccgtgcgtgttgtcatactgcaactttaaatgaaagcgtggacgaaagaaaagacgtatttgaatttattta

SEQ ID NO: 39383 - DNA, 600 bp, Chicken  19866894273253_1
ttttctgctatctagaaatagcgacggggcatccgaagtcatttgaggacagtctgctctcatagagtcattaaggttggaaaagaccactaagatcgtctactcaacccgtcagcgctcctgagcatccacagcacttcatgaaattgttgaatttggagatacaacttaaagctgtaatacaaaatatactcccatagttctgcctcttgtgttctaaacacaatcagaagtattttctttctgagatcctgcagtgaggacaaagagatgttaggctgtggaaagttttgcagagargcttattactgtttgctagtgtgttaaaataggaaattaattctaagctgtttttctcaaccattctaacctaaatggctgagctttgtctttttacctgcaattwaaaaaaaaataaaaaaatcaacatttgttgaaggcgaggaggataattatatagtaagattgttgctgttctcttcttctaaagacaaagaaaaatccagcagaacagatgtgaatctgcagacctgtagtatttaaaaataattgctgtactcaataatctacgatattctttctctgtagtttcagcgtagc

SEQ ID NO: 39384 - DNA, 600 bp, Chicken  19866894273253_2
acccgtcagcgctcctgagcatccacagcacttcatgaaattgttgaatttggagatacaacttaaagctgtaatacaaaatatactcccatagttctgcctcttgtgttctaaacacaatcagaagtattttctttctgagatcctgcagtgaggacaaagagatgttaggctgtggaaagttttgcagagargcttattactgtttgctagtgtgttaaaataggaaattaattctaagctgtttttctcaaccattctaacctaaatggctgagctttgtctttttacctgcaattwaaaaaaaaataaaaaaatcaacatttgttgaaggcgaggaggataattatatagtaagattgttgctgttctcttcttctaaagacaaagaaaaatccagcagaacagatgtgaatctgcagacctgtagtatttaaaaataattgctgtactcaataatctacgatattctttctctgtagtttcagcgtagcttttcctcttcatttccagggcagcagggctttttccataggctttatcttaggttaggccatgcttctttcctgtgcttgattaatcctctttttggaagcggca

SEQ ID NO: 39385 - DNA, 599 bp, Chicken  19866894273260_1
  misc_feature (1)..(154): n is any nucleotide
nnnnnnnnnnnnnnnnnnnnnnnnnnnnnnnnnnnnnnnnnnnnnnnnnnnnnnnnnnnnnnnnnnnnnnnnnnnnnnnnnnnnnnnnnnnnnnnnnnnnnnnnnnnnnnnnnnnnnnnnnnnnnnnnnnnnnnnnnnnnnnnnnnnnnnnnnncgcgtagccagcgagcagtgccagccgtgcacgctgcagcgagccggtgttacagaaatcaacctgcctcgctcacctcccctgcccctctccggcacatcccgacagctctctgcctctccccctcctcctctctccatctcagygctggggtgagggctgggcagatcagccccagcctcgctgcatgatctgrggcaaatcgccggctgtcctgtgccgtggggcrgttcaccctccgcgtgcagccccacagccccatgcggtgctcgggtaggcagagaagaaggaggtgagctgagtgccgggcaccagcaacgctggattgagctgctggccgcttctctctgtccttgggaggggaaggatggctgtgaccttcgctgtacagctgtgctggacgcggtccccgtgcctgtgccttcccccgcacgcagcgatgtgg

SEQ ID NO: 39386 - DNA, 599 bp, Chicken  19866894273260_2
  misc_feature (1)..(104): n is any nucleotide
nnnnnnnnnnnnnnnnnnnnnnnnnnnnnnnnnnnnnnnnnnnnnnnnnnnnnnnnnnnnnnnnnnnnnnnnnnnnnnnnnnnnnnnnnnnnnnnnnnnnnnnncgcgtagccagcgagcagtgccagccgtgcacgctgcagcgagccggtgttacagaaatcaacctgcctcgctcacctcccctgcccctctccggcacatcccgacagctctctgcctctccccctcctcctctctccatctcagygctggggtgagggctgggcagatcagccccagcctcgctgcatgatctgrggcaaatcgccggctgtcctgtgccgtggggcrgttcaccctccgcgtgcagccccacagccccatgcggtgctcgggtaggcagagaagaaggaggtgagctgagtgccgggcaccagcaacgctggattgagctgctggccgcttctctctgtccttgggaggggaaggatggctgtgaccttcgctgtacagctgtgctggacgcggtccccgtgcctgtgccttcccccgcacgcagcgatgtggccttttcctccctctgcagctccggagcgcggaggcgagagctgctcgcc

SEQ ID NO: 39387 - DNA, 599 bp, Chicken  19866894273260_3
  misc_feature (1)..(71): n is any nucleotide
nnnnnnnnnnnnnnnnnnnnnnnnnnnnnnnnnnnnnnnnnnnnnnnnnnnnnnnnnnnnnnnnnnnnnnncgcgtagccagcgagcagtgccagccgtgcacgctgcagcgagccggtgttacagaaatcaacctgcctcgctcacctcccctgcccctctccggcacatcccgacagctctctgcctctccccctcctcctctctccatctcagygctggggtgagggctgggcagatcagccccagcctcgctgcatgatctgrggcaaatcgccggctgtcctgtgccgtggggcrgttcaccctccgcgtgcagccccacagccccatgcggtgctcgggtaggcagagaagaaggaggtgagctgagtgccgggcaccagcaacgctggattgagctgctggccgcttctctctgtccttgggaggggaaggatggctgtgaccttcgctgtacagctgtgctggacgcggtccccgtgcctgtgccttcccccgcacgcagcgatgtggccttttcctccctctgcagctccggagcgcggaggcgagagctgctcgcctcccctctctgcaaagccccgcacgccggggag

SEQ ID NO: 39388 - DNA, 600 bp, Chicken  19866894273261_1
tttccctagtccaaccatcagcctatccccaccaggaccactaaccacggccctcagtgccacgtgcacacaacacctccagggactgtgactctaccacctccccgggcagcctgtactaattcgccaccactattgccaagaagaaatttttcctaatatccaacctgaacctccccagtgcaacttaaggccattacttctcatcctgtcattttgcagaaataaaattgtttttaaaagcaggaaagacaaatgtaaacattaagagctctacacccgctaaaagcgtggtgcacyttaaactgacaattcaagaagtaaacttaagagttttgcacaatccacaggtcacaraagtgaattaagcaggaatcataataaggtgatggcaacaagtgtttgaggaattgtaaaccatgagagatttcaaaacagttttgcagctagagggtgaaggggaggtatgagtacataaaaccatatgctcatacgtgggtgatttttctccctttaatgtgagatttccacacgggttttttgcattctgtaagttagttaatactctgttctcctaaactccaaaactcaataaaagca

SEQ ID NO: 39389 - DNA, 600 bp, Chicken  19866894273261_2
tgccacgtgcacacaacacctccagggactgtgactctaccacctccccgggcagcctgtactaattcgccaccactattgccaagaagaaatttttcctaatatccaacctgaacctccccagtgcaacttaaggccattacttctcatcctgtcattttgcagaaataaaattgtttttaaaagcaggaaagacaaatgtaaacattaagagctctacacccgctaaaagcgtggtgcacyttaaactgacaattcaagaagtaaacttaagagttttgcacaatccacaggtcacaraagtgaattaagcaggaatcataataaggtgatggcaacaagtgtttgaggaattgtaaaccatgagagatttcaaaacagttttgcagctagagggtgaaggggaggtatgagtacataaaaccatatgctcatacgtgggtgatttttctccctttaatgtgagatttccacacgggttttttgcattctgtaagttagttaatactctgttctcctaaactccaaaactcaataaaagcagttttgtcaaaataaataaatagttttccttgaaaagcttstgcattctcaaagtgg

SEQ ID NO: 39390 - DNA, 600 bp, Chicken  19866894273261_3
aatccacaggtcacaraagtgaattaagcaggaatcataataaggtgatggcaacaagtgtttgaggaattgtaaaccatgagagatttcaaaacagttttgcagctagagggtgaaggggaggtatgagtacataaaaccatatgctcatacgtgggtgatttttctccctttaatgtgagatttccacacgggttttttgcattctgtaagttagttaatactctgttctcctaaactccaaaactcaataaaagcagttttgtcaaaataaataaatagttttccttgaaaagcttstgcattctcaaagtggtgctcagatgtcactgaacttaactttcaagaggcacagtagaggcatataaatatttttaggttacgcacccgtaattaagttgtgattgatctgccctcctaaagagccaagaaggcgagccactctagtccttactgcttccaaggagggattgtcatcctgaataattcagaagatggatattagtgaaggaagaattatgtctatgtctatgtaagttggttgacacagtgaatgaaggattgatagcacttattagcgtatggatgaagaaggaagag

SEQ ID NO: 39391 - DNA, 599 bp, Chicken  19866894273273_1
  misc_feature (1)..(145): n is any nucleotide
nnnnnnnnnnnnnnnnnnnnnnnnnnnnnnnnnnnnnnnnnnnnnnnnnnnnnnnnnnnnnnnnnnnnnnnnnnnnnnnnnnnnnnnnnnnnnnnnnnnnnnnnnnnnnnnnnnnnnnnnnnnnnnnnnnnnnnnnnnnnnnnnnttcccgcgcgtggcgagcagagcgccgtgcggttttgtgtctgcggcgcgaagcgaggcctgggcgcggcgggacctcagccgtgcggtgaaggtcgcggctgcgggtcgggagcggcctgtggggagcgaaagcaaaagcaaagccaggccggrcaggaggagccttgcgctgagggacgggcggcctgcggaccgcgcctggccggctctccaggcataggggcagctgctgccgtcggtctgagctcgcaagtttgaggccgctgctgagagccgaacgagatgtggaagaccccgtaggtcccgaggggaaagtcagcgactgccccctcctctcacaacgtttcacaactaaatcaaaagtcatcgtgcagcagaagagggtgaaaggagataacgacagaaggggaggagcggggctgtgtcctttcacagaccgggcagtgaatgcg

SEQ ID NO: 39392 - DNA, 600 bp, Chicken  19866894273283_1
caccactgtatctgtgaaaatacacttggacagtctaggattgctgccccaaagtaagcctgcagatcagtcatgcaagcactgcaggtgatcatgaaataccttcttcacaatgatgatgaaacaggaaggcataaggcatgaaagcctggtagaggaaggaaagaaaaagaagcagtggatgctctgatgcatagcttcaaacagaagcatgaaaggaacaaattaaagaaagcagtgactcaaagagggctgtctctaggtctcccaaatctgaaattcattaatgcatgaaaagckttctgacattaggatttgagtcatcrttctacatataggcaaggtagtggtagttaatggagatcccttaagatgagcttctagggttcatggggtggaaaaaattacttggcctggagcactttgcaaaactcttagaggctaaaagaggaagactattgcagacacaagaatatttgtttatctttccatttcccctttcttcctcactctgtttcacatttgtgaaaaaagcagagaatactcttgagttacgtgaatttctgtcgtcactgtccctcagtttctttccacagtttc

SEQ ID NO: 39393 - DNA, 600 bp, Chicken  19866894273283_2
tggacagtctaggattgctgccccaaagtaagcctgcagatcagtcatgcaagcactgcaggtgatcatgaaataccttcttcacaatgatgatgaaacaggaaggcataaggcatgaaagcctggtagaggaaggaaagaaaaagaagcagtggatgctctgatgcatagcttcaaacagaagcatgaaaggaacaaattaaagaaagcagtgactcaaagagggctgtctctaggtctcccaaatctgaaattcattaatgcatgaaaagckttctgacattaggatttgagtcatcrttctacatataggcaaggtagtggtagttaatggagatcccttaagatgagcttctagggttcatggggtggaaaaaattacttggcctggagcactttgcaaaactcttagaggctaaaagaggaagactattgcagacacaagaatatttgtttatctttccatttcccctttcttcctcactctgtttcacatttgtgaaaaaagcagagaatactcttgagttacgtgaatttctgtcgtcactgtccctcagtttctttccacagtttcttaggaaaactcaatgtaataaagac

SEQ ID NO: 39394 - DNA, 600 bp, Chicken  19866894273287_1
agataaaattctcagttataaagaactatttatcagcatagtgatcactatttgccaatttgcacaggtgagttgatcaagacactcatcattttgtggtgtgacagctatgcatgacaatccaaaccatggcttgtatttcaggttactgtcactgctgcagaaatacaccacccaccacctcactgtgctcacatccactctttgttctccataaatattcagcaaacattgatcaatgtcaatgggtgtcctttttttcttttgctcaggggaattcagtcgcacctgtttgcttcyacctgtgcttccacataagatgccattctgagagactgtccctctgctgccatctgtcacataataaccaaatatgatggaattttggtggaaagattccacctctgctcccatgccacgaccatctgcctctgacattgtggaccaacaccatgaaataggaaattactttcagagcagccctggtattatgaatgctttttgtctaaggcttctccaagcctgatttaaattattagccaacagtgtcaatgcattccttcaccttttcacagaatctcaattttgagatacttaaga

SEQ ID NO: 39395 - DNA, 599 bp, Chicken  19866894273290_1
  misc_feature (1)..(12): n is any nucleotide
nnnnnnnnnnnntcatgtctgatagcattcatcatccattgggtttttatggtagtatcataggaaggtaaactacattatctgagggcagcgagcagattagggccagagcctttggtcagatgtggttttacctacttgcttttttctcctttgactttgccaagtcttaccgaaagttcccagaaaactgtgcttggaaatacaaagcaaatctacacagattccttacatgtttagttagtttgatttcagaccataaaatgcattgtgtactgttggggctgcaaagtacttctrtttctgaactaacttgtgtcacttggaaataaytgaaaatctcagtggcagggcagactgctgattggtattagtctgggttagtcaggtattttttgaacatattttagttagtcccaaggactggttatatactgtctgttatacatagaatcgtggaatgactgaagttggaaagatcttaaagttcatcaagttccaaacacgtcatgggcagagttggcatctgctagatcaggttgcccaaggctccatccagcatgcctttgagcacttccagggatgacgcatccacagct

SEQ ID NO: 39396 - DNA, 600 bp, Chicken  19866894273290_2
atccattgggtttttatggtagtatcataggaaggtaaactacattatctgagggcagcgagcagattagggccagagcctttggtcagatgtggttttacctacttgcttttttctcctttgactttgccaagtcttaccgaaagttcccagaaaactgtgcttggaaatacaaagcaaatctacacagattccttacatgtttagttagtttgatttcagaccataaaatgcattgtgtactgttggggctgcaaagtacttctrtttctgaactaacttgtgtcacttggaaataaytgaaaatctcagtggcagggcagactgctgattggtattagtctgggttagtcaggtattttttgaacatattttagttagtcccaaggactggttatatactgtctgttatacatagaatcgtggaatgactgaagttggaaagatcttaaagttcatcaagttccaaacacgtcatgggcagagttggcatctgctagatcaggttgcccaaggctccatccagcatgcctttgagcacttccagggatgacgcatccacagcttctctgggcagcctgttctagcatctcaccactc

SEQ ID NO: 39397 - DNA, 600 bp, Chicken  19866894273290_3
aaaatctaatctaaatctcctctcttttagtttaaggccattactgcttgtcctgtcaccacacttcctgacaaagagtcctccaactttcctgtaggccacctttaggtactgaaaggctgctagaatgtctgcccagagctttctcttctccaggctgaacaagaccagctccctcagcctgttctcatagaagagttgctccagccctttatttactccaggtggggcctcatgagggcagagtgggggggaggggggaaacaatcacctctctcgttctgctggcttttggtgaakccgaggatatgtgttcccctcactgctgatacatgcacaccttgacaaccctactaagttatttccacttcmgagacttccttttcatagaattagttatgttctactcaattgttaggtatcatttgataaactaaagctatgtcctaaagcttgagaattctctaacaatttgcaagtgtttgttataattaagtctgttaccacgtatatgtagatgttgcaacaacgtgttgtactgttgcaataacaacagtatatttcactctgtattgtatgtcatccctgtggaatagtaac

SEQ ID NO: 39398 - DNA, 600 bp, Chicken  19866894273290_4
aaagagtcctccaactttcctgtaggccacctttaggtactgaaaggctgctagaatgtctgcccagagctttctcttctccaggctgaacaagaccagctccctcagcctgttctcatagaagagttgctccagccctttatttactccaggtggggcctcatgagggcagagtgggggggaggggggaaacaatcacctctctcgttctgctggcttttggtgaakccgaggatatgtgttcccctcactgctgatacatgcacaccttgacaaccctactaagttatttccacttcmgagacttccttttcatagaattagttatgttctactcaattgttaggtatcatttgataaactaaagctatgtcctaaagcttgagaattctctaacaatttgcaagtgtttgttataattaagtctgttaccacgtatatgtagatgttgcaacaacgtgttgtactgttgcaataacaacagtatatttcactctgtattgtatgtcatccctgtggaatagtaactgctaaaacaaaaggttgtgggtcgcagttaacaggattcctttgacgcccttcaggactgctcttcagtat

SEQ ID NO: 39399 - DNA, 599 bp, Chicken  19866894273294_1
  misc_feature (1)..(198): n is any nucleotide
nnnnnnnnnnnnnnnnnnnnnnnnnnnnnnnnnnnnnnnnnnnnnnnnnnnnnnnnnnnnnnnnnnnnnnnnnnnnnnnnnnnnnnnnnnnnnnnnnnnnnnnnnnnnnnnnnnnnnnnnnnnnnnnnnnnnnnnnnnnnnnnnnnnnnnnnnnnnnnnnnnnnnnnnnnnnnnnnnnnnnnnnnnnnnnnnnnnnnntcagcatgcagacagagcacaacagtgtgcacagaacacaacagtgtgcacgcagagcacaaccgctcagctggccgtgccggagcggccgcaggaccctcygttgccctcaccaggaatttcctcttctgcttccagtggctgccctgcgcgttggtgctgcggtgcgcctcggtcaccacgtggatcagctcccactcctctgcgctggggctgggccggtgctgcagggatttgatcatctcctccttgcgccgccgctcccggttctcctcgatcagcttccgcttggctacgcgcttcgagtcgtccagcaccactgcggggcagcaatcagcacagccccacccccagcactgctgggtgccccaaactgccccgcagctgcaccaggcgtcccc

SEQ ID NO: 39400 - DNA, 600 bp, Chicken  19866894273294_2
tcctcttctgcttccagtggctgccctgcgcgttggtgctgcggtgcgcctcggtcaccacgtggatcagctcccactcctctgcgctggggctgggccggtgctgcagggatttgatcatctcctccttgcgccgccgctcccggttctcctcgatcagcttccgcttggctacgcgcttcgagtcgtccagcaccactgcggggcagcaatcagcacagccccacccccagcactgctgggtgccccaaactgccccgcagctgcaccaggcgtccccatctgccccacggcgctgcrcacggggtcctccccaaccgctcccacagctgcaaaaggatcccccacaacgccccacagcaccgccggctgtgctgggcaccctgaccttctctatggccacatcaggcaccccgacctgccccacggcgtgcacgtatcccatgcatccgcacctgcacctgcaaaagggtcccccaaacccctgtggctgtacacactgcgagctccccagcttagccctgcagcgggcaccctaagctgcaccatggcaccgccagctgtgccgggcaccccaacctggtcctgcagaggcaccag

SEQ ID NO: 39401 - DNA, 599 bp, Chicken  19866894273296_1
  misc_feature (1)..(47): n is any nucleotide
nnnnnnnnnnnnnnnnnnnnnnnnnnnnnnnnnnnnnnnnnnnnnnnttcacgcgcagcccataatcgcgctccaactgcgccgcgaacttcgccttgttctcctgccccacagcgacccacggcacaccgtcagacccacagcgacccacagcgacccacagcgacccacagcacaccgtcagacccacagcgacccacagcgacccacggcacaccgtcagacccacagcgacccatggcacgccatcagacccacagccactcacagcgacccacggcacgccgtcagacccacagmgacccatagaggcccacagagaccagtagagacccacagcgacccacggcacaccgtcagacccacagcgacccacagcacaccgtcacacccacagccatgccatcagacccacagcgacccacagcgacccacagtgacccacagcgacccacggcacgccgtcagacccacagcgacccacagcgacccacagccacactgtgagacccacagccacccacagcgacccacggcacactgtcacacccacagcgacccacagcacgccgtcagacccacagcgacccatagggacc

SEQ ID NO: 39402 - DNA, 600 bp, Chicken  19866894273300_1
gcacttgtaacctcagctgggaggggtcagcatctggccaagcacggtggaagaatttcttgactttcttgatttcaggcttcagatgtggtttaagaatacactcatacagcaatggaaactgaaaccagaggctcgctgtgctacgtgacagcccaaagcctgttctgccctgggaatggctgtgagaaggcaggagcatcacctcactgcctccaaagggagcagaaaagccaggaacggagctgggttttgagttcctaaaatgtcactttttcatcacggagaaaaactacaggmaacaaacctctggacayagtaactagaatttacatttgggtccgtagtaactttatggcactcctcaacgctttgctcagcaacagtttgtaaaagtctctggaaaaagcatcccccgggttcctaaatatttggctatttttctcaccttggggcaggggagtttaaagctaaaaaaaattaagattccttcatttttgtcatccaatagactgcagcaaagcaagagtactttcctttggagcagacgatcccaccccttatttgttatttaagaggcagtcagtagtacaaagcctc

SEQ ID NO: 39403 - DNA, 600 bp, Chicken  19866894273300_2
cacttgtaacctcagctgggaggggtcagcatctggccaagcacggtggaagaatttcttgactttcttgatttcaggcttcagatgtggtttaagaatacactcatacagcaatggaaactgaaaccagaggctcgctgtgctacgtgacagcccaaagcctgttctgccctgggaatggctgtgagaaggcaggagcatcacctcactgcctccaaagggagcagaaaagccaggaacggagctgggttttgagttcctaaaatgtcactttttcatcacggagaaaaactacaggamacaaacctctggacayagtaactagaatttacatttgggtccgtagtaactttatggcactcctcaacgctttgctcagcaacagtttgtaaaagtctctggaaaaagcatcccccgggttcctaaatatttggctatttttctcaccttggggcaggggagtttaaagctaaaaaaaattaagattccttcatttttgtcatccaatagactgcagcaaagcaagagtactttcctttggagcagacgatcccaccccttatttgttatttaagaggcagtcagtagtacaaagcctca

SEQ ID NO: 39404 - DNA, 600 bp, Chicken  19866894273300_3
acttgtaacctcagctgggaggggtcagcatctggccaagcacggtggaagaatttcttgactttcttgatttcaggcttcagatgtggtttaagaatacactcatacagcaatggaaactgaaaccagaggctcgctgtgctacgtgacagcccaaagcctgttctgccctgggaatggctgtgagaaggcaggagcatcacctcactgcctccaaagggagcagaaaagccaggaacggagctgggttttgagttcctaaaatgtcactttttcatcacggagaaaaactacaggaamcaaacctctggacayagtaactagaatttacatttgggtccgtagtaactttatggcactcctcaacgctttgctcagcaacagtttgtaaaagtctctggaaaaagcatcccccgggttcctaaatatttggctatttttctcaccttggggcaggggagtttaaagctaaaaaaaattaagattccttcatttttgtcatccaatagactgcagcaaagcaagagtactttcctttggagcagacgatcccaccccttatttgttatttaagaggcagtcagtagtacaaagcctcat

SEQ ID NO: 39405 - DNA, 600 bp, Chicken  19866894273300_4
cttgtaacctcagctgggaggggtcagcatctggccaagcacggtggaagaatttcttgactttcttgatttcaggcttcagatgtggtttaagaatacactcatacagcaatggaaactgaaaccagaggctcgctgtgctacgtgacagcccaaagcctgttctgccctgggaatggctgtgagaaggcaggagcatcacctcactgcctccaaagggagcagaaaagccaggaacggagctgggttttgagttcctaaaatgtcactttttcatcacggagaaaaactacaggaaamaaacctctggacayagtaactagaatttacatttgggtccgtagtaactttatggcactcctcaacgctttgctcagcaacagtttgtaaaagtctctggaaaaagcatcccccgggttcctaaatatttggctatttttctcaccttggggcaggggagtttaaagctaaaaaaaattaagattccttcatttttgtcatccaatagactgcagcaaagcaagagtactttcctttggagcagacgatcccaccccttatttgttatttaagaggcagtcagtagtacaaagcctcatc

SEQ ID NO: 39406 - DNA, 600 bp, Chicken  19866894273300_5
tgggaggggtcagcatctggccaagcacggtggaagaatttcttgactttcttgatttcaggcttcagatgtggtttaagaatacactcatacagcaatggaaactgaaaccagaggctcgctgtgctacgtgacagcccaaagcctgttctgccctgggaatggctgtgagaaggcaggagcatcacctcactgcctccaaagggagcagaaaagccaggaacggagctgggttttgagttcctaaaatgtcactttttcatcacggagaaaaactacaggaaacaaacctctggacayagtaactagaatttacatttgggtccgtagtaactttatggcactcctcaacgctttgctcagcaacagtttgtaaaagtctctggaaaaagcatcccccgggttcctaaatatttggctatttttctcaccttggggcaggggagtttaaagctaaaaaaaattaagattccttcatttttgtcatccaatagactgcagcaaagcaagagtactttcctttggagcagacgatcccaccccttatttgttatttaagaggcagtcagtagtacaaagcctcatctggcaaatttctcc

SEQ ID NO: 39407 - DNA, 600 bp, Chicken  19866894273303_1
gtaaagaccatctctggaatttcctctggagcgctgaaaaatctcaaaacaatcccttagatagcctaaattaaaaaaaaaaaaaaagttttaaattaaatttctgtttaattcttttttttttttttttttttttttttttaactttgtcctccagagtaagtgcatgattgccttgatctggctggaaactgactcagactaacttcagcccatctggtgggcatacattaggctaaaaggggatgattagagggcagaacacactgaaatatttcacggaaagcatggcaagatgamaatttttggaaaaaaaaaccaaaggaaaaatatttccaaatataaaaataataaaagttcagaaaaaaacacctttccttgacaaaagcattgaccagagattccctgctaatcctttactgaacacattcttccccagttattagctgtaatgcacartgaggacagctaaatttttaatcagcctttgttttgttagggtaacttatgttaggataaaaaagttctgttattattttgtgtaagataaatcttctggttctcaattattttagaagcttttcagctgcaaatttatct

SEQ ID NO: 39408 - DNA, 600 bp, Chicken  19866894273303_2
taagtgcatgattgccttgatctggctggaaactgactcagactaacttcagcccatctggtgggcatacattaggctaaaaggggatgattagagggcagaacacactgaaatatttcacggaaagcatggcaagatgamaatttttggaaaaaaaaaccaaaggaaaaatatttccaaatataaaaataataaaagttcagaaaaaaacacctttccttgacaaaagcattgaccagagattccctgctaatcctttactgaacacattcttccccagttattagctgtaatgcacartgaggacagctaaatttttaatcagcctttgttttgttagggtaacttatgttaggataaaaaagttctgttattattttgtgtaagataaatcttctggttctcaattattttagaagcttttcagctgcaaatttatctcctagaatgtgaattacgtttacacattgcattgcagatggtgcctctgatttgtccctattctttttagaaacacttctgctcwtgaattcaaggattgaacttgtagcattttgtttctattaatctagacttcaatttttggatctttataactgg

SEQ ID NO: 39409 - DNA, 600 bp, Chicken  19866894273303_3
aagcattgaccagagattccctgctaatcctttactgaacacattcttccccagttattagctgtaatgcacartgaggacagctaaatttttaatcagcctttgttttgttagggtaacttatgttaggataaaaaagttctgttattattttgtgtaagataaatcttctggttctcaattattttagaagcttttcagctgcaaatttatctcctagaatgtgaattacgtttacacattgcattgcagatggtgcctctgatttgtccctattctttttagaaacacttctgctcwtgaattcaaggattgaacttgtagcattttgtttctattaatctagacttcaatttttggatctttataactggtaagtcctaaccttgaagtaaaatctggatttccatactttattttttatcccatcagtattacttaagtatatctaacttttttttccctgtaataatctggctcctcatatcgacatttctctatatcatgtaaagaatgaaattttatcagtatattcctatcactgcttcagtatacttagtaatactaaaaagttcacttagaagcaaacatttccagact

SEQ ID NO: 39410 - DNA, 520 bp, Chicken  19866894273305_1
cagtgctgatccctttcacacctgtgttgcaccatcaatgaacttgacccattgcaatcctgttctgctttgctagagcagctgcacggcattttgccatatatgttgtgtaggtcattcctaagttaatctcactgcatttatttctgtaagcatcctcgcattataagcacttcttagaagtcatttctaattgtaatcctgctctgtctctatgcttccctctgaactgccctcttactaatccactctactctgtaggagaaaacatagcacacgagactttgtgggacgtagcartgcggtgagatcctccttctgtgagtgcctttctaagcgttttgcaccaccttgagcagttttacacaggtcgtgttttctcaaacagcttttgagagtgtcacgtccatgtcagcagccttgttaaagagaagatggatgacatgtgctgcttcttccctatccacaagcgccacaggactggatctgacacactctcactgaatgttatttattcctt

SEQ ID NO: 39411 - DNA, 600 bp, Chicken  19866894273308_1
aaaaaataaatacttgtggaacaggctatccacctggaagagttttctcctttcttgttctccagaataacaggaaagcctttggttaggactagaattactcataattgacaggacaggcttggctttgctttgcgttagcttgattactctaggggggcaattttgcattgtggagagatgttctgcccagctagattgcccttttgacatctgggagttctagaggagtagacacttgaattacatccgagatcctcgctcttgaagaatctgaaaaagaagaaaacctctataaarmwctcaggcaagtttagaagccaaagttcatgatccaagtctggcttttgtagaagaaggaaaagaagtccaacaagagaaagaatgagagagttgcctgctggcttttatactaccataccaaatgacaagctggttaaaacagagtctcttctctagaaatgctttagctgcctgccaggagttaaaaatattctgttgctatactggggaaaatgcatggactgaacgagaaaaaacaatgtcagtccttttcccacagtatccttcagtcaaaaaatccttccccccccccccccc

SEQ ID NO: 39412 - DNA, 600 bp, Chicken  19866894273308_2; identical to SEQ ID NO: 39411

SEQ ID NO: 39413 - DNA, 600 bp, Chicken  19866894273308_3; identical to SEQ ID NO: 39411

SEQ ID NO: 39414 - DNA, 600 bp, Chicken  19866894273308_4; identical to SEQ ID NO: 39411

SEQ ID NO: 39415 - DNA, 600 bp, Chicken  19866894273308_5
aaaaataaatacttgtggaacaggctatccacctggaagagttttctcctttcttgttctccagaataacaggaaagcctttggttaggactagaattactcataattgacaggacaggcttggctttgctttgcgttagcttgattactctaggggggcaattttgcattgtggagagatgttctgcccagctagattgcccttttgacatctgggagttctagaggagtagacacttgaattacatccgagatcctcgctcttgaagaatctgaaaaagaagaaaacctctataaatmwctcaggcaagtttagaagccaaagttcatgatccaagtctggcttttgtagaagaaggaaaagaagtccaacaagagaaagaatgagagagttgcctgctggcttttatactaccataccaaatgacaagctggttaaaacagagtctcttctctagaaatgctttagctgcctgccaggagttaaaaatattctgttgctatactggggaaaatgcatggactgaacgagaaaaaacaatgtcagtccttttcccacagtatccttcagtcaaaaaatccttccccccccccccccca

SEQ ID NO: 39416 - DNA, 600 bp, Chicken  19866894273308_6
aaaataaatacttgtggaacaggctatccacctggaagagttttctcctttcttgttctccagaataacaggaaagcctttggttaggactagaattactcataattgacaggacaggcttggctttgctttgcgttagcttgattactctaggggggcaattttgcattgtggagagatgttctgcccagctagattgcccttttgacatctgggagttctagaggagtagacacttgaattacatccgagatcctcgctcttgaagaatctgaaaaagaagaaaacctctataaatmwctcaggcaagtttagaagccaaagttcatgatccaagtctggcttttgtagaagaaggaaaagaagtccaacaagagaaagaatgagagagttgcctgctggcttttatactaccataccaaatgacaagctggttaaaacagagtctcttctctagaaatgctttagctgcctgccaggagttaaaaatattctgttgctatactggggaaaatgcatggactgaacgagaaaaaacaatgtcagtccttttcccacagtatccttcagtcaaaaaatccttcccccccccccccccaa

SEQ ID NO: 39417 - DNA, 600 bp, Chicken  19866894273309_1
tttatgcacattaagagagtgtataaatgagaacagaagagtctttatatgaagtaacctgtcagatgtttctgtttgatttgccattacaaagagatctctttctgctaatcaaagtacggaaaggaaaattttgcatttgccagttcccattctaatttgaatgataaagtgtattgaaagattaaagcaaaaattgtttattaatcttgtttaccagtgtcaaagtcttacatttctgtttggaaaaacattcttgttttttttctttttctgactgggtaacaataaaaataaaaygaatggaaaatcaacagaaatcctatgcactactctgtgtagcccctgaatggctaagtacctatttaaaaacccggtctagaaggtaggtcagtactgaggtgatcatgagtgtagcttctacaaactctcagacaggccatgtatctcctgtatagactggcttttcattataagaacagtaaattcagagtttagtgtagacacctctgccatttctcaggaaagcgagcaaactgctgcaaaagtaggtaagcagtgggttaccactaaaagcagcagtctaatgtcaagagtagt

SEQ ID NO: 39418 - DNA, 600 bp, Chicken  19866894273311_1
tctgctggcaaagatacttttgtcctgcttagtgagggagtttccatctctctcaggctgacaataatcctcaaacagggtcccacagcagtagaaaccaaatcctcattgccaacatcagctgcgtagccaactgttggcacatagtatcagtcccatttcctcacacccttaatgacaagattgaaaacatcagcagagtcccccatgccataaacacccccagagctttgcaaccatgtctgtattctccagatggtccctggcagcatcactggtgtcatgtagaagaacagcaayagtaatagagggcaggacccactttggctgtttccacatcrttscacatctagtgtagaatgtgccctatggaatgtcaccaccgtatcwgagaatatttatgctggtctgaactgagaggaggaygcattctttgtgccaaacctgatctgaataaatcaaagcccatattacgttttttgctgtaaaccaagaacaaatttgtgggctttaataaatcttggatgagtttttgaaataaaataacccaccttctatcattttgcctggcataatctttatgcatgtgtggacaaagtg

SEQ ID NO: 39419 - DNA, 600 bp, Chicken  19866894273311_2
ttccatctctctcaggctgacaataatcctcaaacagggtcccacagcagtagaaaccaaatcctcattgccaacatcagctgcgtagccaactgttggcacatagtatcagtcccatttcctcacacccttaatgacaagattgaaaacatcagcagagtcccccatgccataaacacccccagagctttgcaaccatgtctgtattctccagatggtccctggcagcatcactggtgtcatgtagaagaacagcaayagtaatagagggcaggacccactttggctgtttccacatcrttscacatctagtgtagaatgtgccctatggaatgtcaccaccgtatcwgagaatatttatgctggtctgaactgagaggaggaygcattctttgtgccaaacctgatctgaataaatcaaagcccatattacgttttttgctgtaaaccaagaacaaatttgtgggctttaataaatcttggatgagtttttgaaataaaataacccaccttctatcattttgcctggcataatctttatgcatgtgtggacaaagtgtacattattttaaaaactaattttctcagttgtatacagga

SEQ ID NO: 39420 - DNA, 600 bp, Chicken  19866894273311_3
catctctctcaggctgacaataatcctcaaacagggtcccacagcagtagaaaccaaatcctcattgccaacatcagctgcgtagccaactgttggcacatagtatcagtcccatttcctcacacccttaatgacaagattgaaaacatcagcagagtcccccatgccataaacacccccagagctttgcaaccatgtctgtattctccagatggtccctggcagcatcactggtgtcatgtagaagaacagcaayagtaatagagggcaggacccactttggctgtttccacatcrttscacatctagtgtagaatgtgccctatggaatgtcaccaccgtatcwgagaatatttatgctggtctgaactgagaggaggaygcattctttgtgccaaacctgatctgaataaatcaaagcccatattacgttttttgctgtaaaccaagaacaaatttgtgggctttaataaatcttggatgagtttttgaaataaaataacccaccttctatcattttgcctggcataatctttatgcatgtgtggacaaagtgtacattattttaaaaactaattttctcagttgtatacaggaaag

SEQ ID NO: 39421 - DNA, 600 bp, Chicken  19866894273311_4
gtagaaaccaaatcctcattgccaacatcagctgcgtagccaactgttggcacatagtatcagtcccatttcctcacacccttaatgacaagattgaaaacatcagcagagtcccccatgccataaacacccccagagctttgcaaccatgtctgtattctccagatggtccctggcagcatcactggtgtcatgtagaagaacagcaayagtaatagagggcaggacccactttggctgtttccacatcrttscacatctagtgtagaatgtgccctatggaatgtcaccaccgtatcwgagaatatttatgctggtctgaactgagaggaggaygcattctttgtgccaaacctgatctgaataaatcaaagcccatattacgttttttgctgtaaaccaagaacaaatttgtgggctttaataaatcttggatgagtttttgaaataaaataacccaccttctatcattttgcctggcataatctttatgcatgtgtggacaaagtgtacattattttaaaaactaattttctcagttgtatacaggaaaggattaaaaaaaatacataaatgaaagaaaataaattacaggcaaaa

SEQ ID NO: 39422 - DNA, 600 bp, Chicken  19866894273311_5
tagccaactgttggcacatagtatcagtcccatttcctcacacccttaatgacaagattgaaaacatcagcagagtcccccatgccataaacacccccagagctttgcaaccatgtctgtattctccagatggtccctggcagcatcactggtgtcatgtagaagaacagcaayagtaatagagggcaggacccactttggctgtttccacatcrttscacatctagtgtagaatgtgccctatggaatgtcaccaccgtatcwgagaatatttatgctggtctgaactgagaggaggaygcattctttgtgccaaacctgatctgaataaatcaaagcccatattacgttttttgctgtaaaccaagaacaaatttgtgggctttaataaatcttggatgagtttttgaaataaaataacccaccttctatcattttgcctggcataatctttatgcatgtgtggacaaagtgtacattattttaaaaactaattttctcagttgtatacaggaaaggattaaaaaaaatacataaatgaaagaaaataaattacaggcaaaatgtgttagaaatatagctgtttaactccatctagct

SEQ ID NO: 39423 - DNA, 600 bp, Chicken  19866894273325_1
gcgagagaagtcagtgctgagatgagacaaaactcattcacagccatttactgaacaaagaaagtgtggtctctaagcactacaggtaaaacaatgagacgaaggattcgttttgcatcattgcactgaggattaacttatttataagttaatttaactttgcctgcacactacaacagcccactgacagcagccaacataggaacactggagaggagcttagcacgtagtgggcaagaacagacatctctgttaagggactttctccagcatccaggcatcctaccaaatcctaaatgrgatggctcaagtagttcagctttgcatgccctcttattcacacagcctaagcagaacacaagctaaagggactacacagattctacaacaatgctagaactrttccttcacttgttaaattgtctggctgtacacaaagagatgaaatgctcccattaaagccagtaacatctgtaagcacaacatgagggactatgaatgaaggaaccactaccacttgatttgctttggacagacattttccgagcatcagttgataacccacaaacttctatctggtcaccccttccctcccctata

SEQ ID NO: 39424 - DNA, 600 bp, Chicken  19866894273325_2
aggattcgttttgcatcattgcactgaggattaacttatttataagttaatttaactttgcctgcacactacaacagcccactgacagcagccaacataggaacactggagaggagcttagcacgtagtgggcaagaacagacatctctgttaagggactttctccagcatccaggcatcctaccaaatcctaaatgrgatggctcaagtagttcagctttgcatgccctcttattcacacagcctaagcagaacacaagctaaagggactacacagattctacaacaatgctagaactrttccttcacttgttaaattgtctggctgtacacaaagagatgaaatgctcccattaaagccagtaacatctgtaagcacaacatgagggactatgaatgaaggaaccactaccacttgatttgctttggacagacattttccgagcatcagttgataacccacaaacttctatctggtcaccccttccctcccctataggcaggwcatgatagttaagatgggaaattcatctgtcagcagtacctttccacgttgcccagctgcaacacatgcttctgtatgcatactagtgtacaaaa

SEQ ID NO: 39425 - DNA, 421 bp, Chicken  19866894273325_3
caagtagttcagctttgcatgccctcttattcacacagcctaagcagaacacaagctaaagggactacacagattctacaacaatgctagaactrttccttcacttgttaaattgtctggctgtacacaaagagatgaaatgctcccattaaagccagtaacatctgtaagcacaacatgagggactatgaatgaaggaaccactaccacttgatttgctttggacagacattttccgagcatcagttgataacccacaaacttctatctggtcaccccttccctcccctataggcaggwcatgatagttaagatgggaaattcatctgtcagcagtacctttccacgttgcccagctgcaacacatgcttctgtatgcatactagtgtacaaaatgaagggactgtttctcaaagcaaat

SEQ ID NO: 39426 - DNA, 600 bp, Chicken  19866894273332_1
tgcgtgttgtatagtttttcattgtcttaggagcaaaaagtaacagcaacataaaaatcaaggcatgcaaagttctcaattgtgaacgtgcaataaccaacccccataacatcacttcatacctgaacatcatctggtaagaaaatactgttaacagtaatacccaggtacttaccagttccaattccactgacaaccgccccatcaataagtcctgtcgtgacagcattattggtgggtgcattgtggggagccaaacttggcaagaacagacagctgttaaacagaaaatcagcatcrcactwgagtatatgaaagccaggataatcagagttcaatacacagtacatataacctagaaaaacataccatgagtacatcatcactctctattaatgcaagtatttctgaaaagtggaaattaattcttaagatttctccttgtgaggttaaattatctttagcgcagagacctttggtactctatgtctttggtgtaaaggcacagagacttatattcatgttgccccatagcattatctgttcccttgtggatgaccataactctcttcacaccctttgagacgctctggacactca

SEQ ID NO: 39427 - DNA, 600 bp, Chicken  19866894273332_2
gttgtatagtttttcattgtcttaggagcaaaaagtaacagcaacataaaaatcaaggcatgcaaagttctcaattgtgaacgtgcaataaccaacccccataacatcacttcatacctgaacatcatctggtaagaaaatactgttaacagtaatacccaggtacttaccagttccaattccactgacaaccgccccatcaataagtcctgtcgtgacagcattattggtgggtgcattgtggggagccaaacttggcaagaacagacagctgttaaacagaaaatcagcatcrcactwgagtatatgaaagccaggataatcagagttcaatacacagtacatataacctagaaaaacataccatgagtacatcatcactctctattaatgcaagtatttctgaaaagtggaaattaattcttaagatttctccttgtgaggttaaattatctttagcgcagagacctttggtactctatgtctttggtgtaaaggcacagagacttatattcatgttgccccatagcattatctgttcccttgtggatgaccataactctcttcacaccctttgagacgctctggacactcagagtt

SEQ ID NO: 39428 - DNA, 600 bp, Chicken  19866894273339_1
gtcaagaccggcgggaacgcaacccttctctgcacgtacacgagttcacagccgctgggaaacttcttcatccagtggagcttttacagcgccaaagagagccaactgcacaccgtaagatatttatttattactaatataaagttcttaaaaaattattacattttgtgctgttaccttcactgaagacccaggaggcaggtaacatccatgttcctgcatttaagactgagctgcagtgaaatttaggagagatgcaccaagtcagcctaggctcccagctcctaccagctgcccgcrctcctgctgaaacttatgagaaggtgccagagggactcgaatgttgaaagccttgctccaagccacagtcagtgtgatggggagccaagttcaggtgtccaacaatcacacaagcgctcctgccctgggccagctcccttttctcttgtctggcagatatttccttctattgtgagagctgttttcctagtgagacgcccttgcctatgacactgtgttccccaaccaagggtcagatacaagctcccggctcagtcaccactgccgctgccaggcagctctgcatgggagtggtgccaa

SEQ ID NO: 39429 - DNA, 537 bp, Chicken  19866894273344_1
aaatttctactgtgaatttgtgttgtcagttggtgaatgaaaaaccttctgagagaataaaaattaacgtaaacacaacttgaccaaatcagaaggtagcaagcttgtcagacttctgtgttcagggacaattgcaccgacttctacttctgcagcaaagatccaagctaccagtaggaccgctcctctacaaacccgatgcagtaagaaactagcacactgttagctctgcactttaatccttgaagatcccaataagatgatgtgagtccggtgaatgcacgcattatgtgatgtcartgctgaaaggagctcgcaagctgagtgtgctttggctccatcagtargtttgatgactaacgtgacagatccagaactccatatgtatggatgccaatggcaaacttccactggtgtacggaggactggtacacctcaggtggctatgagaagagacttcagaagtgctatactgcctgtgcaaagtgaaagactgatttcactctcagctgatgctgagcttacaaactattgcat

SEQ ID NO: 39430 - DNA, 490 bp, Chicken  19866894273344_2
tctgagagaataaaaattaacgtaaacacaacttgaccaaatcagaaggtagcaagcttgtcagacttctgtgttcagggacaattgcaccgacttctacttctgcagcaaagatccaagctaccagtaggaccgctcctctacaaacccgatgcagtaagaaactagcacactgttagctctgcactttaatccttgaagatcccaataagatgatgtgagtccggtgaatgcacgcattatgtgatgtcartgctgaaaggagctcgcaagctgagtgtgctttggctccatcagtargtttgatgactaacgtgacagatccagaactccatatgtatggatgccaatggcaaacttccactggtgtacggaggactggtacacctcaggtggctatgagaagagacttcagaagtgctatactgcctgtgcaaagtgaaagactgatttcactctcagctgatgctgagcttacaaactattgcat

SEQ ID NO: 39431 - DNA, 599 bp, Chicken  19866894273346_1
  misc_feature (1)..(166): n is any nucleotide
nnnnnnnnnnnnnnnnnnnnnnnnnnnnnnnnnnnnnnnnnnnnnnnnnnnnnnnnnnnnnnnnnnnnnnnnnnnnnnnnnnnnnnnnnnnnnnnnnnnnnnnnnnnnnnnnnnnnnnnnnnnnnnnnnnnnnnnnnnnnnnnnnnnnnnnnnnnnnnnnnnnnnntgtggtattgattattttttggataattaattttattgcagacacttgaaagagataatgagctgcaaagggagaaggcaaaggaaaatgaagaaaagttccttaatcttcagaatgagcatgagaaagcactragaatttggaaaaaagatgtaggtttattaaattaaatgttatagtattaaaagggttttgaaatagtcatcaagcatttcagataattcctaaaaaccaagaaaatattgcagaaatactacaataaaaacaaccaatttattttccagtaatgcagactcatctagaaatgaatatttttaaaaggtagatttaggagagatgctgaattctatgctttaaaaggtcagtgcagttctataaagcaagagccctagggcattaggtgttgtcttgtcttcagtgctttaaaatattc

SEQ ID NO: 39432 - DNA, 600 bp, Chicken  19866894273358_1
tataatatcctattttattcaatgagtactgaaggattagagtggcactgaggtgatgggtggtgggaaagagagtaagaacgaagttggaaagagatgagtatcaaatgaaattgttgtttactactttgttctctgcatatgaacgattaattcttagaatactgcactacatagaagaagaatgtgtgaactccaactgcttttctgactcttcaaccaaactgtcataccctgatattgcattacttgaggttgaatattatcccatacttccaagttgccagctttcaacctgtrgttaagagaaaattataaaaggggaaaaaaacaataaaaattcaagtagaactcctgccagcaggactgccagtcctgctacaataaatagcccctagaaatagcacagtaaggcaagaaggctgaaaatgaatatgtgcctggtccctgaaaggctactcaagacaaacagaatagggcaggaaagaagtagcaagaaaacagaacagtagggtacgactgaagtataaggaaggacatggaacagtaaagtgatgacttcacagatccaggacagagattagactctagctctccctc

SEQ ID NO: 39433 - DNA, 599 bp, Chicken  19866894273360_1
  misc_feature (1)..(49): n is any nucleotide
nnnnnnnnnnnnnnnnnnnnnnnnnnnnnnnnnnnnnnnnnnnnnnnnnaggatgtttgtttatctatctcttccgacaaactttgctgattttaagctgcaccctcctcattacctacattataattgctctcaggcagaacacattttcctcctagcaccagatctcactagtcaatgctgagaagaaggttgtgaactgaaacatcctgacaggctcattccagctttaagaggtactatcccacagacccaactatttcagaaacacttcagtagtaacccttctctgtctctctycaggcacagcaaaagtcagaaaaacagttctttgaagtccaagcttgtcttcattaacacacagccccacatctcagtgccacacatttgttctgtttataccctatgacctctcatatgcacggatgaaatccactcccagtacaacacttgaaaacatcagttattactagcatcaaagaaaaccacacttcaggaattgctcattttgtctacagtagtcacctatcgtatctcaaatacacacttggaaaagtcttctttgttaacagccactgatgatagtctttaggtcatct

SEQ ID NO: 39434 - DNA, 600 bp, Chicken  19866894273365_1
cacagcgatgtggggtccagaagcagctgaatgatactccacacttatccaaaccatggtaacaagattctcagagatgcatatttttcctttgattgaatcctcggtgaaatcaaagacgtgtgctgtttttggaaggcttccagtatcttcagaggaaggcactgaattgtagagtataactaaaacattttcagaagttacatcttaaattttcaaagcattttctgggcttcttctgaggacaaaaatattctttaaaatatctttaattaactgtatcatttttcaatgttgggyacttcttgaaagcttttaactcaccatattgacaactactgtaatttgcagcacttctttttctctctctgctagttttctggcctgcttgcaggggatgggccagaagcccctccttttgggcagacaggaactggactcttctggcttttgtcagagtgatctcagcgcttccaacaaacaggtgaatggactcagagtgggttggtctgagcaagcgtccaaactgttagaagttcttcttgtcctgaggcagtaggtgggtcgtgttttaaaaagctgactgacagtactttcagc

SEQ ID NO: 39435 - DNA, 600 bp, Chicken  19866894273366_1
agctaaaaataagtaataaagaagcgtgttaattataagagaacagaaaggcaatagaataggtaatgggcagattaggctgtgagattttcattaagcaatgtgtgatatgaaatattacacccgctgctcaggagcatggccaggtctgggggaaagaagataatccaggcaccgggaggggatgggaagaagattcatgcatgtattttaatttcactgcaggaatactttaaatagtccaaggatttatccaacagccctgctcccctcagctttcagatggaaggctgcatgtgrcatagtttgactgatagaaatgttggggactagcagaataaatgcagtgttcccttacagaggcaggatgagactccagggcagaaacaaggtatgattaaccccagggtttctgagcacacaaccaaatacagcaaggggatgcctgagtctacacgttgagtcttcactctgtgcattcctggtggtgctgtctccagtgcctgggccagatttgttacggaggcaggagatgccgctgcttcctgcacccattgtaaccagttccattttaagggccaggaatccttttgccttttg

SEQ ID NO: 39436 - DNA, 600 bp, Chicken  19866894273366_2
tcttgcttctggtacagaacgtaacagttccccttggccttacctgtcactgtgaacgccacataacagcatgcagcttcccactaacccctcactgccagcactgacagattgtctgcacggccgtgctgcagagcggcgctctctggcacaccaggaacgagctgaagcagtagtgaggctacgacaagctaacagaatgagcaaatccaagctgttagtgtgtcacagctcctcctgttttgcccaagcgactgtgcagactggtactgtgtacgataacagacgtgcatcctctgrcagtcctgcaggcactgcagtgcggatggatgccactggatcccattcagcggcagattccacctgatctctcctcagtgcattgatgaagacctctccagtgcaatacctggaacaggagctgcatcttgagtgcagtggaagggagaagaacatgcatcrgttgcaattttccaaaaatgaacctaatattctgcaatgattttaggatcagccttcccagcactgaaacacggtgacatcaaaatgctcctctaccaatatctcaacacatgtgcttgtttcacccagggaactgtt

SEQ ID NO: 39437 - DNA, 600 bp, Chicken  19866894273366_3
agctgaagcagtagtgaggctacgacaagctaacagaatgagcaaatccaagctgttagtgtgtcacagctcctcctgttttgcccaagcgactgtgcagactggtactgtgtacgataacagacgtgcatcctctgrcagtcctgcaggcactgcagtgcggatggatgccactggatcccattcagcggcagattccacctgatctctcctcagtgcattgatgaagacctctccagtgcaatacctggaacaggagctgcatcttgagtgcagtggaagggagaagaacatgcatcrgttgcaattttccaaaaatgaacctaatattctgcaatgattttaggatcagccttcccagcactgaaacacggtgacatcaaaatgctcctctaccaatatctcaacacatgtgcttgtttcacccagggaactgttggcatgagtaacagcatctctgccttcactacacagtacaaccagycagacaacgtggaagtctaacatgtaggctgcacatacagtgtgagttagaactgtctgtgtgaggtgcagcatccaagacatttgttttgaggtgtgatggattctgttctctga

SEQ ID NO: 39438 - DNA, 600 bp, Chicken  19866894273366_4
tcagcggcagattccacctgatctctcctcagtgcattgatgaagacctctccagtgcaatacctggaacaggagctgcatcttgagtgcagtggaagggagaagaacatgcatcrgttgcaattttccaaaaatgaacctaatattctgcaatgattttaggatcagccttcccagcactgaaacacggtgacatcaaaatgctcctctaccaatatctcaacacatgtgcttgtttcacccagggaactgttggcatgagtaacagcatctctgccttcactacacagtacaaccagycagacaacgtggaagtctaacatgtaggctgcacatacagtgtgagttagaactgtctgtgtgaggtgcagcatccaagacatttgttttgaggtgtgatggattctgttctctgatgccgctccaggatgcaagtttaggagagcgaaaaatgttccaaaatgttccaaagcttcgctgctcatttcaagagattagaagtattatgaagaactcccagcctgcctaaagtgaatctacattttggacatccctgcagtaatgtgcaggtggtgggacagctgattttatgtcactggg

SEQ ID NO: 39439 - DNA, 600 bp, Chicken  19866894273369_1
ggatggtgacggagcagcgacggggctgtcacatcccggctgccacaagaaataggctttgctgccatctacctctgctgggctcccccgcagctggctcagctccgtgggggtgctctgctctgggggctgccccacagctcctgggagccccagcacctcctgactggggactgaagtctggatggagtcttgcaatggcagcacttgggcttcttggtcctcccgtctgcctctgtccttctgctttgctttggtcaccaagtggtggctcttgcaacatggtcctcaagcagcacygcccccaaggctgccttctccccttcagwgcatggggttgatgcattctaacctctatgacttggggggrtaaaccatccccagacatcctgcttcacccatcatctgccaccaaaccaggtgttgttccagcagggcctccgarggcagcagactgttccctctgttctccccatttcactgttttttggctggcccacactgcacatctgggtggggttttcccctatacctgcagacaaacctgctcccagctctccatcctgcacagggggtagaagacctttcagatccctttca

SEQ ID NO: 39440 - DNA, 600 bp, Chicken  19866894273369_2
cacatcccggctgccacaagaaataggctttgctgccatctacctctgctgggctcccccgcagctggctcagctccgtgggggtgctctgctctgggggctgccccacagctcctgggagccccagcacctcctgactggggactgaagtctggatggagtcttgcaatggcagcacttgggcttcttggtcctcccgtctgcctctgtccttctgctttgctttggtcaccaagtggtggctcttgcaacatggtcctcaagcagcacygcccccaaggctgccttctccccttcagwgcatggggttgatgcattctaacctctatgacttggggggrtaaaccatccccagacatcctgcttcacccatcatctgccaccaaaccaggtgttgttccagcagggcctccgarggcagcagactgttccctctgttctccccatttcactgttttttggctggcccacactgcacatctgggtggggttttcccctatacctgcagacaaacctgctcccagctctccatcctgcacagggggtagaagacctttcagatccctttcaacccaagccattctccgatccctgctggg

SEQ ID NO: 39441 - DNA, 600 bp, Chicken  19866894273369_3
acctctgctgggctcccccgcagctggctcagctccgtgggggtgctctgctctgggggctgccccacagctcctgggagccccagcacctcctgactggggactgaagtctggatggagtcttgcaatggcagcacttgggcttcttggtcctcccgtctgcctctgtccttctgctttgctttggtcaccaagtggtggctcttgcaacatggtcctcaagcagcacygcccccaaggctgccttctccccttcagwgcatggggttgatgcattctaacctctatgacttggggggrtaaaccatccccagacatcctgcttcacccatcatctgccaccaaaccaggtgttgttccagcagggcctccgarggcagcagactgttccctctgttctccccatttcactgttttttggctggcccacactgcacatctgggtggggttttcccctatacctgcagacaaacctgctcccagctctccatcctgcacagggggtagaagacctttcagatccctttcaacccaagccattctccgatccctgctgggtgacaatgcagcagcagtggggtggccctgtcctttccctc

SEQ ID NO: 39442 - DNA, 600 bp, Chicken  19866894273369_4
gggagccccagcacctcctgactggggactgaagtctggatggagtcttgcaatggcagcacttgggcttcttggtcctcccgtctgcctctgtccttctgctttgctttggtcaccaagtggtggctcttgcaacatggtcctcaagcagcacygcccccaaggctgccttctccccttcagwgcatggggttgatgcattctaacctctatgacttggggggrtaaaccatccccagacatcctgcttcacccatcatctgccaccaaaccaggtgttgttccagcagggcctccgarggcagcagactgttccctctgttctccccatttcactgttttttggctggcccacactgcacatctgggtggggttttcccctatacctgcagacaaacctgctcccagctctccatcctgcacagggggtagaagacctttcagatccctttcaacccaagccattctccgatccctgctgggtgacaatgcagcagcagtggggtggccctgtcctttccctcccatggctctgccatcctgctgcccctgtcctactgctgttttgcacccaccagccgacagcaatgccgagttca

SEQ ID NO: 39443 - DNA, 600 bp, Chicken  19866894273374_1
ctgatcatctttgtgactctcctctggacctgctccaagagctccacgtccttcctgtacaaggggccccagtcctggacgcagtactccagatcgggcctcacaacagctgagtagaggggccaatcacctccctgtccctgctggccaccccttttttaatgcagcccagaacacagttggccttacgggcttcaagtgcacattgctggctcatgctcagcttctcgtctaccaggaccctcaagtccttctccacagggctgctctcaaggagatcttcccccattttgtataaayacccgggattgccccaatccaagtgcagcaccctgcactttgccttattgaacctgattaggttttcatgggcccacttctccagcctgtccaggctcccatccttccagtgtatcgatgtcatggttttataattttgctattggtattccacataacatcatgtacagcacaggtaatttaagagttaatactccagttccatggattgacaaccttccatatacctgcctctcaaaagagaataagaactacatatcccaaaggacctcacagtcagtgcaggaagatacgtcacag

SEQ ID NO: 39444 - DNA, 600 bp, Chicken  19866894273382_1
gagggttaggttagatattaggaggaagtttttcacacagggtgtggtgatgcactggaacagtttgcccaaggaggttgtggaagccccacccctggaggcactcaaggccaggctggatgtggctctgggcaccctggtctagtggttggcgaccctgcacatcgcagaggggttgaaactaaatggtctttgaggtccttttcaacacaggccattctatgattctatgattctgtgattagaagttagactaggatgctatttactctctccatatgctaatcttgaaaagagaawgcatgaaaagtagaaaataatcatttcaaatatagggattcagtgaaaattttgggtttctccaggcattstacattcaartgagccttagaaagacacatacctacagtcataattttaaaataaaatgtaccatctaaaccaatcttccttagtatagtgaatacagaatacctctatccacagtagtaytactggagtaattgtagcaatagttcactagacaaaactaaggaattaaaaaattgagagaagcataaaaatccttattcttcatttgctcaggttcttcatttttcc

SEQ ID NO: 39445 - DNA, 545 bp, Chicken  19866894273382_2
aggaggttgtggaagccccacccctggaggcactcaaggccaggctggatgtggctctgggcaccctggtctagtggttggcgaccctgcacatcgcagaggggttgaaactaaatggtctttgaggtccttttcaacacaggccattctatgattctatgattctgtgattagaagttagactaggatgctatttactctctccatatgctaatcttgaaaagagaawgcatgaaaagtagaaaataatcatttcaaatatagggattcagtgaaaattttgggtttctccaggcattstacattcaartgagccttagaaagacacatacctacagtcataattttaaaataaaatgtaccatctaaaccaatcttccttagtatagtgaatacagaatacctctatccacagtagtaytactggagtaattgtagcaatagttcactagacaaaactaaggaattaaaaaattgagagaagcataaaaatccttattcttcatttgctcaggttcttcatttttccctgtccttagaaacat

SEQ ID NO: 39446 - DNA, 535 bp, Chicken  19866894273382_3
ggaagccccacccctggaggcactcaaggccaggctggatgtggctctgggcaccctggtctagtggttggcgaccctgcacatcgcagaggggttgaaactaaatggtctttgaggtccttttcaacacaggccattctatgattctatgattctgtgattagaagttagactaggatgctatttactctctccatatgctaatcttgaaaagagaawgcatgaaaagtagaaaataatcatttcaaatatagggattcagtgaaaattttgggtttctccaggcattstacattcaartgagccttagaaagacacatacctacagtcataattttaaaataaaatgtaccatctaaaccaatcttccttagtatagtgaatacagaatacctctatccacagtagtaytactggagtaattgtagcaatagttcactagacaaaactaaggaattaaaaaattgagagaagcataaaaatccttattcttcatttgctcaggttcttcatttttccctgtccttagaaacat

SEQ ID NO: 39447 - DNA, 424 bp, Chicken  19866894273382_4
ttgaggtccttttcaacacaggccattctatgattctatgattctgtgattagaagttagactaggatgctatttactctctccatatgctaatcttgaaaagagaawgcatgaaaagtagaaaataatcatttcaaatatagggattcagtgaaaattttgggtttctccaggcattstacattcaartgagccttagaaagacacatacctacagtcataattttaaaataaaatgtaccatctaaaccaatcttccttagtatagtgaatacagaatacctctatccacagtagtaytactggagtaattgtagcaatagttcactagacaaaactaaggaattaaaaaattgagagaagcataaaaatccttattcttcatttgctcaggttcttcatttttccctgtccttagaaacat

SEQ ID NO: 39448 - DNA, 600 bp, Chicken  19866894273394_1
ttcgatattctactggtgtcacatagacttggtttttaatgtaagatttattttcttttattctctttttttattcgtggttcctaaagagtgttgtttggaataaccatatacttattaagcaacaacatcaggaaccgaatcactattatagtctcgtagaattagaggttatacaggtcttaaatgacaagcccttgttccacaggtttacagcaagctaattggcaaaaaaagaatcatagaatcatagaatggctgtgggttaggaggcacgtcaaaaaatcatccattcctacsccgctgctgtgggcagggttgccagtctctagatcaagcaccagatagtgaatatgtgcattggacaaatcagaagtgtagaggagaaaaggacacattttcctgctgacaggaagacagccaatgttacactcatctacataaagtgcatgtgaaacccaggaaactatggacacattattctaacctcagttcctggaaaagctatggagattagcctgggagatgtgaaaggcagtttaaggacaaaactattatcaggcatagtccacatggattcattaagtgaaaatattacct

SEQ ID NO: 39449 - DNA, 600 bp, Chicken  19866894273399_1
tttaactgctcttaaataggcttttaatgtcaacaacaggcacctcttttatttgcagttttgtactgaagctactactgtttttaaaagtttttacttttttttttacgtactgaaatctcttggttctgctattcctggctggatggcagacgttctgcaggtgaggagctctggttgcacacagcccatttctgtgggctcgcagagcagccgtcctggtgtgaactggaagagggtacggtgtgatgggatcctcctacttaaccgattcatttcagtggattacgttactgatgwcgctatcctggaacgctctgtccccatctagatcacgtaatgaaaagattgcacagcagtactggggagatggacacaacagtggtggaactgagcagaaartgaactcggaaggacttcagaggctttytmcggatttcagagtacctcatcagcagtcctgtaggtgcctcgcatgtctgtgcctttggggagcaaagctcctgctggttgacagctcatttattccagcctctcttcttcatgagaatgacctccagcagcacacagatgcactgagcttttccattcagtgggcat

SEQ ID NO: 39450 - DNA, 600 bp, Chicken  19866894273399_2
tttttacgtactgaaatctcttggttctgctattcctggctggatggcagacgttctgcaggtgaggagctctggttgcacacagcccatttctgtgggctcgcagagcagccgtcctggtgtgaactggaagagggtacggtgtgatgggatcctcctacttaaccgattcatttcagtggattacgttactgatgwcgctatcctggaacgctctgtccccatctagatcacgtaatgaaaagattgcacagcagtactggggagatggacacaacagtggtggaactgagcagaaartgaactcggaaggacttcagaggctttytmcggatttcagagtacctcatcagcagtcctgtaggtgcctcgcatgtctgtgcctttggggagcaaagctcctgctggttgacagctcatttattccagcctctcttcttcatgagaatgacctccagcagcacacagatgcactgagcttttccattcagtgggcattctctccgttcagaatctttctttttttaattcctccacctcttggtgcgttttattgtacgtagcgcagcgcttcactctacaatccattcccctcctccc

SEQ ID NO: 39451 - DNA, 600 bp, Chicken  19866894273399_3
gctattcctggctggatggcagacgttctgcaggtgaggagctctggttgcacacagcccatttctgtgggctcgcagagcagccgtcctggtgtgaactggaagagggtacggtgtgatgggatcctcctacttaaccgattcatttcagtggattacgttactgatgwcgctatcctggaacgctctgtccccatctagatcacgtaatgaaaagattgcacagcagtactggggagatggacacaacagtggtggaactgagcagaaartgaactcggaaggacttcagaggctttytmcggatttcagagtacctcatcagcagtcctgtaggtgcctcgcatgtctgtgcctttggggagcaaagctcctgctggttgacagctcatttattccagcctctcttcttcatgagaatgacctccagcagcacacagatgcactgagcttttccattcagtgggcattctctccgttcagaatctttctttttttaattcctccacctcttggtgcgttttattgtacgtagcgcagcgcttcactctacaatccattcccctcctcccacaggcattatttttcccgtggacaggt

SEQ ID NO: 39452 - DNA, 600 bp, Chicken  19866894273399_4
tattcctggctggatggcagacgttctgcaggtgaggagctctggttgcacacagcccatttctgtgggctcgcagagcagccgtcctggtgtgaactggaagagggtacggtgtgatgggatcctcctacttaaccgattcatttcagtggattacgttactgatgwcgctatcctggaacgctctgtccccatctagatcacgtaatgaaaagattgcacagcagtactggggagatggacacaacagtggtggaactgagcagaaartgaactcggaaggacttcagaggctttytmcggatttcagagtacctcatcagcagtcctgtaggtgcctcgcatgtctgtgcctttggggagcaaagctcctgctggttgacagctcatttattccagcctctcttcttcatgagaatgacctccagcagcacacagatgcactgagcttttccattcagtgggcattctctccgttcagaatctttctttttttaattcctccacctcttggtgcgttttattgtacgtagcgcagcgcttcactctacaatccattcccctcctcccacaggcattatttttcccgtggacaggtga

SEQ ID NO: 39453 - DNA, 496 bp, Chicken  19866894273399_5
cgttttattgtacgtagcgcagcgcttcactctacaatccattcccctcctcccacaggcattatttttcccgtggacaggtgagaaccacacctcacacaatcacaaggctgcgctctgttggcagcaggtcgggataccgccgagtcacgctgtgagtttcccacaccattccagatttgtgtttacttcatggaaacgcgctctgaacgccatcgctcaccgagaggctctgtgtgagaagaccaattgtaacctttcagctcgcaaatcattcctgtgacactcagcatccttacrgtgcggctgtggccgtgcacgccgcctggagcagcccagcagttgtgctgttactgagggcattcagacggagaagtgctttcttggtttacagccgtagctatttctgtgggatttctattagagcagccttactgcttgagtgctaaccccgctctgcgggaccccggtgctgcgctgggctcgcctggaggag

SEQ ID NO: 39454 - DNA, 600 bp, Chicken  19866894273400_1
gaatgaacactgagtttacttatccactggagacacgcaagaatatgtttctgccagcccaactactctgttgcagctaagttttctttattcctaactcagggaagagaatatgtgaaatagtctgagtgtatatacattagacaaagatagaacacttttatcattaagcttagacatttttgcatgaaacatagatacttcatctaaagaaaggttttgtttatgctctattgccatgcccagatattttacaacctattccaaggcttcataatagttttaatataccaagtatcyatactgataccctctcaatacatacttaaaaataatacccaatgtacacttgagtgcttgcattggatttttatgaattatttctgtgtgaattgccagcattgcaaattcaagcctgaagcacatttatttttgtttactgtaarygtattatgtaattagaagtaaataattttttaaaaaaagaagtcataactttctcatttctgatagccaaaactttgttgggtcaaagacaatcttggatgtattttcaccactaataattgcactttagtaccagaagcagttgaatatatt

SEQ ID NO: 39455 - DNA, 600 bp, Chicken  19866894273400_2
aagatagaacacttttatcattaagcttagacatttttgcatgaaacatagatacttcatctaaagaaaggttttgtttatgctctattgccatgcccagatattttacaacctattccaaggcttcataatagttttaatataccaagtatcyatactgataccctctcaatacatacttaaaaataatacccaatgtacacttgagtgcttgcattggatttttatgaattatttctgtgtgaattgccagcattgcaaattcaagcctgaagcacatttatttttgtttactgtaarygtattatgtaattagaagtaaataattttttaaaaaaagaagtcataactttctcatttctgatagccaaaactttgttgggtcaaagacaatcttggatgtattttcaccactaataattgcactttagtaccagaagcagttgaatatattgaatttatagtgtgacattcgcactgtctgtatctcaacctaggctcttgtaatttaaaggaaagtcatttattctccagtgagtcctctgtcagagcactgtgaaagctttcaaaggcatcatttaaacagagcatccatcacat

SEQ ID NO: 39456 - DNA, 600 bp, Chicken  19866894273400_3
agatagaacacttttatcattaagcttagacatttttgcatgaaacatagatacttcatctaaagaaaggttttgtttatgctctattgccatgcccagatattttacaacctattccaaggcttcataatagttttaatataccaagtatcyatactgataccctctcaatacatacttaaaaataatacccaatgtacacttgagtgcttgcattggatttttatgaattatttctgtgtgaattgccagcattgcaaattcaagcctgaagcacatttatttttgtttactgtaarygtattatgtaattagaagtaaataattttttaaaaaaagaagtcataactttctcatttctgatagccaaaactttgttgggtcaaagacaatcttggatgtattttcaccactaataattgcactttagtaccagaagcagttgaatatattgaatttatagtgtgacattcgcactgtctgtatctcaacctaggctcttgtaatttaaaggaaagtcatttattctccagtgagtcctctgtcagagcactgtgaaagctttcaaaggcatcatttaaacagagcatccatcacatg

SEQ ID NO: 39457 - DNA, 600 bp, Chicken  19866894273401_1
gtgcatgctgtatgatgtagaacacctaatgttctcagcagttactgcataaattgttcctttctatattaaccatagactgagttgttcttactgtattggtcactgtgtaatatggtaatgatgttggcttgagctctgtaagtgacctccaatgtcatccttccaagcaaccacctcagttgctgttaagctgagggtgtattttagttaccaaggtaaaagctcttctgtttcggtcccttctagtatgcctgctatgctattgggaaggacgtgcaggccatgaaggctgtagtwggtgaggaagctcttacctcagatgatcttctttatctggagtttctgcagaagtttgagaagaacttcattgctcagggtaagtgtcagtttcaagaacatcacagtacacattaacacctagaaggtcttgttttgagatacccttgctgctgagacactttcctgccccatatttcagtctgtggttgatttctgtaggtccttatgaaaatcgtactgtttacgagaccttggacattggatggcagcttttgcgaatcttccccaaggagatgttgaagagaattccccaaacaa

SEQ ID NO: 39458 - DNA, 600 bp, Chicken  19866894273406_1
ggcgttcagagctcagcaaaattcctggatctgcttccttctatgctacagagacattattaaaactgactgaagaatggcaggatcaagcccagtggctaatttcttacatgctttcttgagctgaaaagggtgattggtatcaatgttcaacatctttactgatttaaagaccttcagatctgggttttacagatctcaggcacatcaggctgaaatttctgactcaccttttgaaagacaacttcaaaccagtattcttatctaaacagccttatccacctgactgtactcatacaygccaccacgtccatacttcctaaggtggcttgcatgagacctgggcacttcacttccacaggcacttgcaggaatctctcttctcaagcctaaaagcagctgaaaggaaaacgaattggaagttgttttgatgatatctgccctctctcttcctagctacacagagsatgttgcaactggagcctagatggcaagcttttgggggccataaatcaaagtaggcacaagctgaacactgttccttgaggcaggtgcacacttcagtcaagaacactcttcccccctcttcctattacaaag

SEQ ID NO: 39459 - DNA, 600 bp, Chicken  19866894273406_2
taaagaccttcagatctgggttttacagatctcaggcacatcaggctgaaatttctgactcaccttttgaaagacaacttcaaaccagtattcttatctaaacagccttatccacctgactgtactcatacaygccaccacgtccatacttcctaaggtggcttgcatgagacctgggcacttcacttccacaggcacttgcaggaatctctcttctcaagcctaaaagcagctgaaaggaaaacgaattggaagttgttttgatgatatctgccctctctcttcctagctacacagagsatgttgcaactggagcctagatggcaagcttttgggggccataaatcaaagtaggcacaagctgaacactgttccttgaggcaggtgcacacttcagtcaagaacactcttcccccctcttcctattacaaagttttccctgttcagaaacagcaattgctcattytgtaaaggagatataagaggtctgaaattaagcttcttctaataagacaattgcataaagggaggaggggaaagattcaactcagagaaaaatggaaacagtttaagagacaaaaagcacacaaatatccatca

SEQ ID NO: 39460 - DNA, 600 bp, Chicken  19866894273406_3
atgagacctgggcacttcacttccacaggcacttgcaggaatctctcttctcaagcctaaaagcagctgaaaggaaaacgaattggaagttgttttgatgatatctgccctctctcttcctagctacacagagsatgttgcaactggagcctagatggcaagcttttgggggccataaatcaaagtaggcacaagctgaacactgttccttgaggcaggtgcacacttcagtcaagaacactcttcccccctcttcctattacaaagttttccctgttcagaaacagcaattgctcattytgtaaaggagatataagaggtctgaaattaagcttcttctaataagacaattgcataaagggaggaggggaaagattcaactcagagaaaaatggaaacagtttaagagacaaaaagcacacaaatatccatcagcagctgcagccttgacatttcttgatactaagttctccactccccactaagagcctgtctcttctaggaaagttcctatttatcacgccctgtgccataacgcagggctgatgcactgtgcaataaccatgtgttatcttatctgtgtatatggaatcaaactgt

SEQ ID NO: 39461 - DNA, 600 bp, Chicken  19866894273410_1
cttgttgttttttttcactgatgagttcaccacaaacatctcttattcctctgtttaagtgtaaggctgctcataggtacagctgtgtcttgcatgcatgcccagctgcgccctctgtgagctcaggcttctgctcaacatgccacgctcttgccttgagttttaggggcttttctacctgagcacaacaacctaagctgcagtgaggctggcaggtttgacccttcaacacacattgagagagcatttcctggtcatcactggatagtgtgagaatgtcatactggttgtgagaaaaarcaacatgaaactctagagaacaagactgcagtttctttacaagcatcctrtaggcactcttgctgtctctgtcagaaattccatctggataaagcattcagtcttctgtttgtcaatgaataaccagtttatttttttccctctcattctttttgatgatgtgacagcatttagtcactctttccatgtcagacttctgaactaggagctagcagatgcaggttcttgtttaaccctgcttttcttgtctttcagaatcattcagcagttggtcaatggtattattgcacctacaacaat

SEQ ID NO: 39462 - DNA, 600 bp, Chicken  19866894273410_2
ctgtttaagtgtaaggctgctcataggtacagctgtgtcttgcatgcatgcccagctgcgccctctgtgagctcaggcttctgctcaacatgccacgctcttgccttgagttttaggggcttttctacctgagcacaacaacctaagctgcagtgaggctggcaggtttgacccttcaacacacattgagagagcatttcctggtcatcactggatagtgtgagaatgtcatactggttgtgagaaaaarcaacatgaaactctagagaacaagactgcagtttctttacaagcatcctrtaggcactcttgctgtctctgtcagaaattccatctggataaagcattcagtcttctgtttgtcaatgaataaccagtttatttttttccctctcattctttttgatgatgtgacagcatttagtcactctttccatgtcagacttctgaactaggagctagcagatgcaggttcttgtttaaccctgcttttcttgtctttcagaatcattcagcagttggtcaatggtattattgcacctacaacaataccaaacttaggacttggtccttggtgagttgaagctcaactgttctttc

SEQ ID NO: 39463 - DNA, 600 bp, Chicken  19866894273411_1
acatggaatttttcaaccagaaactgagagcatgttgtagttgctctttggaaaatgtgcatctgagattttgaattactctctgtgtgatacattattgactggaagttgtccgtagcttttatagatgctttaaactctgttgaaaaatgatataaatatgtggtcttctttgttagtcttgaaactgtcagagtaccgatttccgtattttttttccccatttaatacagggtttgttaaacgaccatatgaatgcagtagattttcttatggatcagaacaatgtcgtttctcatrtaaaccccagtattcttggagcagaaagaagatacctacatttcagatctacatctggtaactacttttctcagtgtaattgtttattattattttccttttttaagtctaacacgttgtattttacattttgcagttccatttgatgtacaggacttctctactttctcctttttggactcacaagataaaactgctgtaatttcagacagcatgaagtatttaacaaaaaagggtacgttaattttaagtatatgcactgcatgtatatgttatgtatatgggtattagaaactgata

SEQ ID NO: 39464 - DNA, 600 bp, Chicken  19866894273413_1
tttctctcctaatcaatataaattatgaacgtgggtccctagaacgtagaagaacagggaaactaagatgtttcacagctttgcagtatttttgttgctgtttcaactcaacatctttatcttgcatggtatgtgctaaaatatgctcattcccaagactgttttcctcactgacctctcccttctcagaggtcactgaaaccatccccaaagctatgagaaactatccttcatgcacaacacaaagtttgttagaactcattagtttccagaacttaaccaacattaagaaaatactaygtgcaactaagcctgtttcttycccagggaaaaaaarggggaaaagccctaaacaaggcaatccccagtccaagggatccagaaattcagtttgaatttaaaaggcaaatttgaaaaaacacttcaccctcatatcatctcacagagcagcagtgaaaactgactgacacacacacacacacacacaccagaagcttttgcaggtcacccctcgcatctcccaacactcatagatgttattgctggctttgacatccaggattcccctaccctatagtagattcttcctttctatagctg

SEQ ID NO: 39465 - DNA, 600 bp, Chicken  19866894273413_2
ttatgaacgtgggtccctagaacgtagaagaacagggaaactaagatgtttcacagctttgcagtatttttgttgctgtttcaactcaacatctttatcttgcatggtatgtgctaaaatatgctcattcccaagactgttttcctcactgacctctcccttctcagaggtcactgaaaccatccccaaagctatgagaaactatccttcatgcacaacacaaagtttgttagaactcattagtttccagaacttaaccaacattaagaaaatactaygtgcaactaagcctgtttcttycccagggaaaaaaarggggaaaagccctaaacaaggcaatccccagtccaagggatccagaaattcagtttgaatttaaaaggcaaatttgaaaaaacacttcaccctcatatcatctcacagagcagcagtgaaaactgactgacacacacacacacacacacaccagaagcttttgcaggtcacccctcgcatctcccaacactcatagatgttattgctggctttgacatccaggattcccctaccctatagtagattcttcctttctatagctgggaaagcagagcagagaacaaa

SEQ ID NO: 39466 - DNA, 600 bp, Chicken  19866894273413_3
cctagaacgtagaagaacagggaaactaagatgtttcacagctttgcagtatttttgttgctgtttcaactcaacatctttatcttgcatggtatgtgctaaaatatgctcattcccaagactgttttcctcactgacctctcccttctcagaggtcactgaaaccatccccaaagctatgagaaactatccttcatgcacaacacaaagtttgttagaactcattagtttccagaacttaaccaacattaagaaaatactaygtgcaactaagcctgtttcttycccagggaaaaaaarggggaaaagccctaaacaaggcaatccccagtccaagggatccagaaattcagtttgaatttaaaaggcaaatttgaaaaaacacttcaccctcatatcatctcacagagcagcagtgaaaactgactgacacacacacacacacacacaccagaagcttttgcaggtcacccctcgcatctcccaacactcatagatgttattgctggctttgacatccaggattcccctaccctatagtagattcttcctttctatagctgggaaagcagagcagagaacaaatgaaccaagaatgca

SEQ ID NO: 39467 - DNA, 600 bp, Chicken  19866894273415_1
ctgaaattagtgtctttgaatacagcattcaggatcccactgaaactcagtaatttttgtgtctatataaagattttttttcctcttaacttttgggagagaattaaattattaggcttgaagtattcaatagtgataagacttaaaatatagtattgattgaatacatctgctgcattggtttcataatatagtattggaaagagaggatccctagaagatgtggcttcttgttcccgctgagattcaaaataatgacttgaactcaattccaaattaggaagaggcaaaaatgatttwaacgtactgtttttccaggttttgtaccactttctttggtatcatagggggttactaaaaagtaatttaaaaaatgtacaaatcacaagttagaattgtacttatgataaccagaaagatacagtagtcttgtaaaaattagagaacaataacaacaaaaagcaatgaaccaacaaacaaaaaacaaacttgaaggcaatattagtgaaaactgttgcatttaagggtgtcagaagagtcataaaatgtcagtctaaagctcggtctgagctgatttcctgtctccagtaggagtctagt

SEQ ID NO: 39468 - DNA, 600 bp, Chicken  19866894273423_1
ccatgcttgtcttcaaatagggaagctgatcttgtggttaaagaagtgggattgagtggctcctggctcttctataggtttcctgtgcgtctctccgtgccttggtttcaccccccactcagtacactgctagcttctgaaagatctcagtcatgctttttgagtacactgacagttctactcagagaactgtagaaatgtataataccattcctagacatcttcgcagtctgcaatgaactcagaactcatgtgcaaggaggctgtgtgcattttatctagctaataatcattttcatyragttgatgtatactgtagaacctggagtttcagtcaatctcaytttcagtgttcaaaatacttgctggagttacaggtagtgttgattttgcacattttattattgaggaaaaataaatgtcagtagaagtatatgagaatgggaaaaactttcaggtaaaagtaattttccatactattggcctatctaagaattctagaacctcgaacagttctgcatatttttctcacagcaggtaatatatttgctttcaaatgaagagtatttattttttaaaataaagtgctagcattttacc

SEQ ID NO: 39469 - DNA, 600 bp, Chicken  19866894273423_2
catgcttgtcttcaaatagggaagctgatcttgtggttaaagaagtgggattgagtggctcctggctcttctataggtttcctgtgcgtctctccgtgccttggtttcaccccccactcagtacactgctagcttctgaaagatctcagtcatgctttttgagtacactgacagttctactcagagaactgtagaaatgtataataccattcctagacatcttcgcagtctgcaatgaactcagaactcatgtgcaaggaggctgtgtgcattttatctagctaataatcattttcatyragttgatgtatactgtagaacctggagtttcagtcaatctcaytttcagtgttcaaaatacttgctggagttacaggtagtgttgattttgcacattttattattgaggaaaaataaatgtcagtagaagtatatgagaatgggaaaaactttcaggtaaaagtaattttccatactattggcctatctaagaattctagaacctcgaacagttctgcatatttttctcacagcaggtaatatatttgctttcaaatgaagagtatttattttttaaaataaagtgctagcattttacca

SEQ ID NO: 39470 - DNA, 600 bp, Chicken  19866894273423_3
agtgggattgagtggctcctggctcttctataggtttcctgtgcgtctctccgtgccttggtttcaccccccactcagtacactgctagcttctgaaagatctcagtcatgctttttgagtacactgacagttctactcagagaactgtagaaatgtataataccattcctagacatcttcgcagtctgcaatgaactcagaactcatgtgcaaggaggctgtgtgcattttatctagctaataatcattttcatyragttgatgtatactgtagaacctggagtttcagtcaatctcaytttcagtgttcaaaatacttgctggagttacaggtagtgttgattttgcacattttattattgaggaaaaataaatgtcagtagaagtatatgagaatgggaaaaactttcaggtaaaagtaattttccatactattggcctatctaagaattctagaacctcgaacagttctgcatatttttctcacagcaggtaatatatttgctttcaaatgaagagtatttattttttaaaataaagtgctagcattttaccaggttattaaatattttgaaagcccttttttgttcagtataatt

SEQ ID NO: 39471 - DNA, 600 bp, Chicken  19866894273425_1
gcttgtctgcagaagcagaggctgttgtgctgtacaaccaaattgtgccacgaggctcaaaagaaagcaaccgaaataattattttttgtttcatgtttggttacgacttgcactaataaatgcttgataaaagcccagtgaatgatttgtaggcactgtgagcatgttaaagatccatgtgtggttacaagcaaaggtcataagccctattgactttgcgggctctataacaattgattagctgtttattaaaagcatttattcatcacttgtaaatactttacctagttggttcatcycaagccaattcggataccacccttaagcaaagacaccttacttgtgaggtgttctcatcaactcagatctaaattgagagagagacccacagatgttatgatgtcttcttagaacagcaaaggcagctttgcaaacagctgtaacctcagacaggctcagcagggcttccgaggccccattctgtctgtcctggaggtcccaytctgtctatcctaaaagtcctgacgtcccactttgtctgtcctgaaggtcttgaggtcccacttcgtcagcccctgacacgctgagcctccacaatt

SEQ ID NO: 39472 - DNA, 600 bp, Chicken  19866894273425_2
agccctattgactttgcgggctctataacaattgattagctgtttattaaaagcatttattcatcacttgtaaatactttacctagttggttcatcycaagccaattcggataccacccttaagcaaagacaccttacttgtgaggtgttctcatcaactcagatctaaattgagagagagacccacagatgttatgatgtcttcttagaacagcaaaggcagctttgcaaacagctgtaacctcagacaggctcagcagggcttccgaggccccattctgtctgtcctggaggtcccaytctgtctatcctaaaagtcctgacgtcccactttgtctgtcctgaaggtcttgaggtcccacttcgtcagcccctgacacgctgagcctccacaattacatagtggcaactcctgcaacactgcacttccgcagggtacctgggaaggggtgactaaatgacccggaccaccgagaaaagctgaacaggcagcacggcatcccgcaggggatgcaggaacacctgcacacacagctccctttatgaatgccacagggactgtctgtcgctgataagggttaatcagtactaattagtacc

SEQ ID NO: 39473 - DNA, 600 bp, Chicken  19866894273431_1
tagatgaaatttgtacatctagagaccatctcttataaaaatatgtgaagtaagaatgaacaccaggagacagaattatccgtgtatgggatgggatttacagaagagagcttccttgtgatgctcaaaccagcaaaatgcctttgaaagtttattgtggctttctgtaatatccagacaggatcctattcctgctctgctcctactttttcatggcaagtgtaaaaagtagaaagtttcttgctgttgttcgtgtacttgctgggagagtaaaaaaagtgaacttctgcagcctctgcrctaacagacaatggctagcagggataaatgcctggcctaaactccctggaattttaagttccagcctcaaaagcatctgactgatccttcacatgtttacagaaagcaatgtcaaatatcacacagattaaatgttcgctccctgagatgtgcaagatttaaagttctcttttctgctgcagtaaaaagcactgcagcacctcaccattccccatgagggtttgtctcgttgtttctaaattgcctttttatcacacctgctctggttcagaggggtgctgagcaggactctctccctgc

SEQ ID NO: 39474 - DNA, 600 bp, Chicken  19866894273436_1
aaagttgctagctttcggagccagacagcctcttcacatacttcaaaatttattgcttctgagagtcactcatccacacaacaccagccagccacggacctacgcgtgccatgggacagtggtgcaagttctttgcaaaaagagcagcgtgagctgtagcagccagagctctcatttgaccaggacgaacttccctagctggttggaagtcaagtcctccatctcacaatccccatgctgcaaagtgacagcatcatagctcggagactgagcagagaagctctgttgctgagagaaggyggtgccaaccggagagacgttgctgctgatatacaggtgagtgtctaagaggtgagctgctgaggacaccggtgacacgctgacaccgaagaaatgaggttggagcagttggctgttgccaccaaaggccaactcaaatgagttctctctttgtagctctgacaacagaagagaattggatgctttgcaggtacctgcgctatcagatggggggaggccatttgtcgcagatgtttgagatgtctggggacaagctggctggagtagctggtgatgctgaagctggagcattctgaacag

SEQ ID NO: 39475 - DNA, 580 bp, Chicken  19866894273438_1
gtagttactttgtaggttaaatcagatgacaactcttttctgtgctgaaagttgaatggcttttgagccataaattttaactcactcaatgcttgcagcatgctgaggggggcaactcatgggcaagggactgtgagccacgagtttcctttgcctggattagtaataatagtaatatagtgatcactgttcaaaaattaaacattcctaaaagcaagtcattgtacggaatctgtacattactacaaaacagcactaaatcagttccatcagattctatgaaatatttttttcaggggmagctcactaagaaagtaaagaattcattgtgtttctgtgattgcggttctctataagagcaattaatgtattgtatcagcctatatgactatgtagcagcagtgaaaaactgcgtagaaaaacttagctttctgaaagatgaagcagctgaaacagcatgcgacttctgacaaaggtagagtattagcccttctttgattccttggtctaattccaaattttgtcattgcttcatgtgaacaataaaaatatggcacaaagattgtgaagtctgtttaaa

SEQ ID NO: 39476 - DNA, 600 bp, Chicken  19866894273440_1
gacagggattttgacatgtagttgtgctgtgagctggtggtaagcccttaagcaagtctcttatcactgcctacgtcttcttgcactcttaaaggtaggtgcacccgcctaaggcacagcgtgagctgatgaatactgctggagacccaaatacagaaaggacttgtgactcacaaataacaaaggagtgaaataggtgaggagtaaatattgaggagagtgataaaccagcatggaaataggcacgcatctttaagcattcacttggatgggactgcactgaatacattgttaatactrttcctgggttgctttgtttcagcaagttttttatggcccatgtgtgggttcgtgttttgatttagattgtggatggactcatgaaaacactgctctttaactttttaaagacgtgtcattttataggtctttttccattgaaaatccctctttttatggcttctttggaataatcttgatgatgaaaggtcttgaggaaaaaaatgcaacttcttaaaatcaaaacttccatgaaataacttcttttattattaacttttgaggtgaatatggcctgtcagcttaatatgaactttcctc

SEQ ID NO: 39477 - DNA, 600 bp, Chicken  19866894273444_1
tatactagttgacctaactttttgttaaaacagatcatttgtgtctggtagactacaatgctgttagtgcagcttgcactccttggtttcacagaacaccaggccttcttttggatgatcacctcaactctgtttgttttctgcttcctagggtagcttacccagccaaagccaagggctccttcactgctgacagccatcagaattttgctctatccttccagctgatagatgtgaacagtggagctgatctcattcctcaccaggttagaacaaattcttgtcattactgtgtcagcrcagcgttccwttttgcagcatctgagatgacagttgctcttggaaagattcagtaggtttcgaaaagccttatgtttttgacatggactgtggaaaaattacttgtcttggtaggaggggggtggattcagcccatttgttttgtctgtatgttcgatgaagtctctcattgctctgacactgcatgtactgcagcaaaataagtgtcggcagtttgcgctgtaaaagtacatttctgtccttttgaatatagattgtttgctgaggaaagtccacaattgcagactttttcgttatttt

SEQ ID NO: 39478 - DNA, 600 bp, Chicken  19866894273444_2
gacctaactttttgttaaaacagatcatttgtgtctggtagactacaatgctgttagtgcagcttgcactccttggtttcacagaacaccaggccttcttttggatgatcacctcaactctgtttgttttctgcttcctagggtagcttacccagccaaagccaagggctccttcactgctgacagccatcagaattttgctctatccttccagctgatagatgtgaacagtggagctgatctcattcctcaccaggttagaacaaattcttgtcattactgtgtcagcrcagcgttccwttttgcagcatctgagatgacagttgctcttggaaagattcagtaggtttcgaaaagccttatgtttttgacatggactgtggaaaaattacttgtcttggtaggaggggggtggattcagcccatttgttttgtctgtatgttcgatgaagtctctcattgctctgacactgcatgtactgcagcaaaataagtgtcggcagtttgcgctgtaaaagtacatttctgtccttttgaatatagattgtttgctgaggaaagtccacaattgcagactttttcgttattttttttaatata

SEQ ID NO: 39479 - DNA, 600 bp, Chicken  19866894273448_1
cgttggcttcagtgcattgaaaacaatggcatcaacagcggaatatagcaaagtttgcacacggcgggtcccacgaacacacacacaggagcagaaacaacactgcatgcaaattagcaagaaacaactgaacccatttagggtccacggtgacagtttcctggatcacatcattaccattggtgcactgtggcgtcagaactatgagccggagtcaaaagagacagagcccatggagtagcaacgtgagaattctcgattggagaaaaagttgaagacacagtcctcagtggggatagkgatgcgcactgttttttgggagaggaaaggaagcggtgatccttctggatttactagaacctggacaatccatcaactcgtaccactcagtctcagtactgataacaacgaaggcccacatttccagaatcaggtcagagaagaagactatctttcactttcaatacagtaatgctaggctccataatgatttgaagactgtggtggatggagcttattttgactgaacaatgtgtcatggagttatctagatcaatctagatcaatctacgccctgacagggatgcagtaggcccgtgg

SEQ ID NO: 39480 - DNA, 600 bp, Chicken  19866894273453_1
ttgcattgtagttaaatgccagaatagcagattctgactgagaatgctatgtttgtacatgaaaatcatgttttatacagtcactgctgtctgtttcacaaataattggtaaaatctaatgttagtcgtgctacaaaaaaaaaaaaaaaatcaaatagttcagatgcatagtttggaaagctaagctatgagacttctgaatggagagctagtcacttaagaatgcgtttgtttgtcatttgggtaaattagaaccagacaatctaagtgtatccagctggaaagtattattataataaraaaataaaaaataaaacaagaatgccagaaaattatatctgagtatgcactggcctatagggctacttaaatgctcaaagaaagcccgtggarcacaatattcccataggatccccctaactttttcaagattacagagaagcctttgctgaaggagttcaatttcttttgaaatacagtatgagaaactcctgccaggttttacagtggtttatttcaacagtcacrgtgattgcatgcttcttcagcataaaagctagatggcttgtaatacagtattactgcaccaggacatatgta

SEQ ID NO: 39481 - DNA, 600 bp, Chicken  19866894273453_2
tttcacaaataattggtaaaatctaatgttagtcgtgctacaaaaaaaaaaaaaaaatcaaatagttcagatgcatagtttggaaagctaagctatgagacttctgaatggagagctagtcacttaagaatgcgtttgtttgtcatttgggtaaattagaaccagacaatctaagtgtatccagctggaaagtattattataataaraaaataaaaaataaaacaagaatgccagaaaattatatctgagtatgcactggcctatagggctacttaaatgctcaaagaaagcccgtggarcacaatattcccataggatccccctaactttttcaagattacagagaagcctttgctgaaggagttcaatttcttttgaaatacagtatgagaaactcctgccaggttttacagtggtttatttcaacagtcacrgtgattgcatgcttcttcagcataaaagctagatggcttgtaatacagtattactgcaccaggacatatgtacaggatcattaagggcagctaaattaaacagatatgcaggaaacccagactagccttacagccctaaagtgcaatcagctgcttccacaaagc

SEQ ID NO: 39482 - DNA, 600 bp, Chicken  19866894273453_3
ttgtttgtcatttgggtaaattagaaccagacaatctaagtgtatccagctggaaagtattattataataaraaaataaaaaataaaacaagaatgccagaaaattatatctgagtatgcactggcctatagggctacttaaatgctcaaagaaagcccgtggarcacaatattcccataggatccccctaactttttcaagattacagagaagcctttgctgaaggagttcaatttcttttgaaatacagtatgagaaactcctgccaggttttacagtggtttatttcaacagtcacrgtgattgcatgcttcttcagcataaaagctagatggcttgtaatacagtattactgcaccaggacatatgtacaggatcattaagggcagctaaattaaacagatatgcaggaaacccagactagccttacagccctaaagtgcaatcagctgcttccacaaagctcgcctaagtggcccacagcttggcaagctgaagtatgaaccatgtgtatgtrtcttactcataaatcattctcagagcacgcctgagccatgggaataaaacattttttgcttgtaggtttgtgactttgggag

SEQ ID NO: 39483 - DNA, 600 bp, Chicken  19866894273453_4
tgctgaaggagttcaatttcttttgaaatacagtatgagaaactcctgccaggttttacagtggtttatttcaacagtcacrgtgattgcatgcttcttcagcataaaagctagatggcttgtaatacagtattactgcaccaggacatatgtacaggatcattaagggcagctaaattaaacagatatgcaggaaacccagactagccttacagccctaaagtgcaatcagctgcttccacaaagctcgcctaagtggcccacagcttggcaagctgaagtatgaaccatgtgtatgtrtcttactcataaatcattctcagagcacgcctgagccatgggaataaaacattttttgcttgtaggtttgtgactttgggagaacaagaatttttacacaggaaatataaatctcctttaaaaagcaaaatacataaacaagggaataggagcctccccaagtctgtgtcctcagatacacaggagctctctacagcttcagatgctgaccctgcattgcacasggtgcttctcaggagagatgagctctccatcagcctttacaggctgacccagggaatcaccgcagagccagagaga

SEQ ID NO: 39484 - DNA, 600 bp, Chicken  19866894273453_5
gcaatcagctgcttccacaaagctcgcctaagtggcccacagcttggcaagctgaagtatgaaccatgtgtatgtrtcttactcataaatcattctcagagcacgcctgagccatgggaataaaacattttttgcttgtaggtttgtgactttgggagaacaagaatttttacacaggaaatataaatctcctttaaaaagcaaaatacataaacaagggaataggagcctccccaagtctgtgtcctcagatacacaggagctctctacagcttcagatgctgaccctgcattgcacasggtgcttctcaggagagatgagctctccatcagcctttacaggctgacccagggaatcaccgcagagccagagagatcaacccaaagggctgcaattagagcctggtgcgaaaacaaagtttgcttcagctttacattttgaagctgcttcgtgttccaacaaatgcctcccagcttygctcccagcccctttctcctcacccagctctggaggaaaccctcactggatattaatggatattaaggatattaatggaatacaactaaaggaagaaggactattttaacccaacctaaggt

SEQ ID NO: 39485 - DNA, 600 bp, Chicken  19866894273453_6
aaatataaatctcctttaaaaagcaaaatacataaacaagggaataggagcctccccaagtctgtgtcctcagatacacaggagctctctacagcttcagatgctgaccctgcattgcacasggtgcttctcaggagagatgagctctccatcagcctttacaggctgacccagggaatcaccgcagagccagagagatcaacccaaagggctgcaattagagcctggtgcgaaaacaaagtttgcttcagctttacattttgaagctgcttcgtgttccaacaaatgcctcccagcttygctcccagcccctttctcctcacccagctctggaggaaaccctcactggatattaatggatattaaggatattaatggaatacaactaaaggaagaaggactattttaacccaacctaaggtacactgaggcagctgacattgctaggcaatagttacccagtatccatgttttggaaagaaaatgctgaaaagtctattgaaagcaaaagaaaatgtctgtaaatgtgaacccaaatacacattctcagaaagaaacaagaactagactgcttacttaaaaggcagatgttatctttag

SEQ ID NO: 39486 - DNA, 600 bp, Chicken  19866894273454_1
agggaataaaccagaaagaagatatgatgacagcgtaactactgataagtaaagtagacccctacatggttaatgaaagtgtctcctctcctggagtcttatttactggtaaagcagtccctgaacaaactccagacttttcttttctgtagttgtgcagatgtacatgtgtgaagatgtgcctgactactttaaatacattcatacaactttcccaggttttgagctcttaccctgacaaaccatgtaacattttacaaagaaacttcatactgagtattctgaaaacacttgggttaygcagaggaacaaaacatactgcttcatctttttagagcatgtgcagtcagatagcaaggagcagagaaaatggaaaaaaactgcagacagctgtttgaagtctcccatctctctggggcagaaattgggtaggctacagggaggcagaagtttccctaagtattttgctattgacgtctgctgcagcttttctggtggtgacagagaaccacaatgttccactggagcattagcacttcagatggcagaacacctcctgcccagtacagcacaaaggcattaattagagagaaagagaga

SEQ ID NO: 39487 - DNA, 600 bp, Chicken  19866894273461_1
cagttattgtatcctgcaaggattcagtgaagcctggtggaattaaattcccggcttctgtaagtcttaatgcgttccttccctttttgctcccggaatctcttctctgctattgtgtgctgcagaaccagggagatgaaaaggtgcttacgggctgccccgcaggctgcccacagtgcctgctcagcggcgcgtggcaggcttactggatgataaagatttcttccccatatttttattcctttaaccaaactgtcttttgaattgtcaccgtggcttttgtatcggaacaaatgggtygtggcactgggcagccttgctggcaggggctctttgatctccacggcgtgtcaagctgaatcaggctcgaggtatataataactgggggtggctgggtttggccagggatgaggcttttagctggctctgtgtcctggggtgcagatattacagagcagtgctacgagtgtgcgtgcgttgggacccacttaactccttgttggatgcygagggctgacatctttgaaagtcccgagcaccaaaaggcagagtgcaggagagctcaaatgcactgtgctgcagctgagccctcgtgtttg

SEQ ID NO: 39488 - DNA, 600 bp, Chicken  19866894273461_2
atgataaagatttcttccccatatttttattcctttaaccaaactgtcttttgaattgtcaccgtggcttttgtatcggaacaaatgggtygtggcactgggcagccttgctggcaggggctctttgatctccacggcgtgtcaagctgaatcaggctcgaggtatataataactgggggtggctgggtttggccagggatgaggcttttagctggctctgtgtcctggggtgcagatattacagagcagtgctacgagtgtgcgtgcgttgggacccacttaactccttgttggatgcygagggctgacatctttgaaagtcccgagcaccaaaaggcagagtgcaggagagctcaaatgcactgtgctgcagctgagccctcgtgtttgagctccttgaggtttgttgygctgrattagaacagttatctttgacaaaagcaaaggagatggaagctgttaaacctttggtgccgggatgttttgttgctttccgataggatggtcttaaaacttccagctgatgtgaaaggtgtgagagctgctcccagctgggtatcgtccattcagcctttgtgtgcggaagccttcagcttggc

SEQ ID NO: 39489 - DNA, 600 bp, Chicken  19866894273461_3
tgggtygtggcactgggcagccttgctggcaggggctctttgatctccacggcgtgtcaagctgaatcaggctcgaggtatataataactgggggtggctgggtttggccagggatgaggcttttagctggctctgtgtcctggggtgcagatattacagagcagtgctacgagtgtgcgtgcgttgggacccacttaactccttgttggatgcygagggctgacatctttgaaagtcccgagcaccaaaaggcagagtgcaggagagctcaaatgcactgtgctgcagctgagccctcytgtttgagctccttgaggtttgttgygctgrattagaacagttatctttgacaaaagcaaaggagatggaagctgttaaacctttggtgccgggatgttttgttgctttccgataggatggtcttaaaacttccagctgatgtgaaaggtgtgagagctgctcccagctgggtatcgtccattcagcctttgtgtgcggaagccttcagcttggccagaatctcctggctggagatgtcaatacgtgattaaacagaaagcaatgcctctgctttgaatgtggacgcggggctgaagtaa

SEQ ID NO: 39490 - DNA, 600 bp, Chicken  19866894273461_4
gggtygtggcactgggcagccttgctggcaggggctctttgatctccacggcgtgtcaagctgaatcaggctcgaggtatataataactgggggtggctgggtttggccagggatgaggcttttagctggctctgtgtcctggggtgcagatattacagagcagtgctacgagtgtgcgtgcgttgggacccacttaactccttgttggatgcygagggctgacatctttgaaagtcccgagcaccaaaaggcagagtgcaggagagctcaaatgcactgtgctgcagctgagccctcgygtttgagctccttgaggtttgttgygctgrattagaacagttatctttgacaaaagcaaaggagatggaagctgttaaacctttggtgccgggatgttttgttgctttccgataggatggtcttaaaacttccagctgatgtgaaaggtgtgagagctgctcccagctgggtatcgtccattcagcctttgtgtgcggaagccttcagcttggccagaatctcctggctggagatgtcaatacgtgattaaacagaaagcaatgcctctgctttgaatgtggacgcggggctgaagtaac

SEQ ID NO: 39491 - DNA, 600 bp, Chicken  19866894273461_5
tggcaggggctctttgatctccacggcgtgtcaagctgaatcaggctcgaggtatataataactgggggtggctgggtttggccagggatgaggcttttagctggctctgtgtcctggggtgcagatattacagagcagtgctacgagtgtgcgtgcgttgggacccacttaactccttgttggatgcygagggctgacatctttgaaagtcccgagcaccaaaaggcagagtgcaggagagctcaaatgcactgtgctgcagctgagccctcgtgtttgagctccttgaggtttgttgygctgrattagaacagttatctttgacaaaagcaaaggagatggaagctgttaaacctttggtgccgggatgttttgttgctttccgataggatggtcttaaaacttccagctgatgtgaaaggtgtgagagctgctcccagctgggtatcgtccattcagcctttgtgtgcggaagccttcagcttggccagaatctcctggctggagatgtcaatacgtgattaaacagaaagcaatgcctctgctttgaatgtggacgcggggctgaagtaacggtgccctgatagcagcttaatgct

SEQ ID NO: 39492 - DNA, 600 bp, Chicken  19866894273461_6
ggggctctttgatctccacggcgtgtcaagctgaatcaggctcgaggtatataataactgggggtggctgggtttggccagggatgaggcttttagctggctctgtgtcctggggtgcagatattacagagcagtgctacgagtgtgcgtgcgttgggacccacttaactccttgttggatgcygagggctgacatctttgaaagtcccgagcaccaaaaggcagagtgcaggagagctcaaatgcactgtgctgcagctgagccctcgtgtttgagctccttgaggtttgttgygctgrattagaacagttatctttgacaaaagcaaaggagatggaagctgttaaacctttggtgccgggatgttttgttgctttccgataggatggtcttaaaacttccagctgatgtgaaaggtgtgagagctgctcccagctgggtatcgtccattcagcctttgtgtgcggaagccttcagcttggccagaatctcctggctggagatgtcaatacgtgattaaacagaaagcaatgcctctgctttgaatgtggacgcggggctgaagtaacggtgccctgatagcagcttaatgctgcacg

SEQ ID NO: 39493 - DNA, 600 bp, Chicken  19866894273466_1
ctgcagggaagtgcttgtgatacacttcagactggcctaacctccattcttgtcctggcaggagaaagaagagcgatatttcttgctgttttcaaatgttctgctcatgctgtctgcaagcccgcggatgagcgggttcatctatcaggtaggcacgcttgatttgaagctgcaaggcatcaggtgtggaaaggatatcatgatatctcgttatcaaatgcgaatctctgttgtgatgtaaatgggctgggaagcggggctgtgttctgccacgtgtgccaggacacactgcgagcaccygtgtgctgccagagggttagacagcatttgggaagtgtgagtgctctgaagttagaacacaaaaccacaccgtgccygtcctgcgtgctgttctcaagcattcagcatgtgttgggcgtcctgagctcactgtggggtttttccccatacaaactgtctgtcagtggacgatagctcacagtcatatgtgaaggtgatgaggcagacggtgaaggtttgggaaggattttgctgggttttgaggtgtcagccttcagtgggagggagctgagcgggcagcgcatcacacaaagcagaggc

SEQ ID NO: 39494 - DNA, 600 bp, Chicken  19866894273466_2
atttcttgctgttttcaaatgttctgctcatgctgtctgcaagcccgcggatgagcgggttcatctatcaggtaggcacgcttgatttgaagctgcaaggcatcaggtgtggaaaggatatcatgatatctcgttatcaaatgcgaatctctgttgtgatgtaaatgggctgggaagcggggctgtgttctgccacgtgtgccaggacacactgcgagcaccygtgtgctgccagagggttagacagcatttgggaagtgtgagtgctctgaagttagaacacaaaaccacaccgtgccygtcctgcgtgctgttctcaagcattcagcatgtgttgggcgtcctgagctcactgtggggtttttccccatacaaactgtctgtcagtggacgatagctcacagtcatatgtgaaggtgatgaggcagacggtgaaggtttgggaaggattttgctgggttttgaggtgtcagccttcagtgggagggagctgagcgggcagcgcatcacacaaagcagaggcacagggaaggtgctcagaaggaccaggggaagttggtagtcctggcttctgtgtaaaaggggtgagtagaaagagtg

SEQ ID NO: 39495 - DNA, 600 bp, Chicken  19866894273471_1
gtgaagtacctttatcttagttttgataattttatgcaactataacaagcaaatacctattacaaaatattttgcttcctgtgtgaaatcaggcagttctgtgctatgtctgggcacaaggcaaacacaacaaaatcaacatcaaacattgaaattccctgccagctgactggacaaacttatctatattaggttgctagataatgtactgagcctgcaatttgttcgtatcatcattctctaaaagccagatcatcatattacacactgctgtgggagtgatcttctgttttagactayactaaaacatttttcacttaatgccaaaaagatggattygtttttgctttatactcacacgcttagcaaatctgagatgcatgagtgagctctcttttaaaataaagctttgttgccrccactaaggyattcccaaactaccmatggaagattatttcattttatccaattctgatggagaaattaggtatgtcttcagtgacccacaggtcagtgaactcagtaaccaccaaataagagggcagatgtaaatttcagagttgaragytttcctccacccttttctagctgccagtttcc

SEQ ID NO: 39496 - DNA, 600 bp, Chicken  19866894273471_2
ctataacaagcaaatacctattacaaaatattttgcttcctgtgtgaaatcaggcagttctgtgctatgtctgggcacaaggcaaacacaacaaaatcaacatcaaacattgaaattccctgccagctgactggacaaacttatctatattaggttgctagataatgtactgagcctgcaatttgttcgtatcatcattctctaaaagccagatcatcatattacacactgctgtgggagtgatcttctgttttagactayactaaaacatttttcacttaatgccaaaaagatggattygtttttgctttatactcacacgcttagcaaatctgagatgcatgagtgagctctcttttaaaataaagctttgttgccrccactaaggyattcccaaactaccmatggaagattatttcattttatccaattctgatggagaaattaggtatgtcttcagtgacccacaggtcagtgaactcagtaaccaccaaataagagggcagatgtaaatttcagagttgaragytttcctccacccttttctagctgccagtttccagatactcaaatttagatgctgtcagcttagatgtccca

SEQ ID NO: 39497 - DNA, 600 bp, Chicken  19866894273471_3
aggcaaacacaacaaaatcaacatcaaacattgaaattccctgccagctgactggacaaacttatctatattaggttgctagataatgtactgagcctgcaatttgttcgtatcatcattctctaaaagccagatcatcatattacacactgctgtgggagtgatcttctgttttagactayactaaaacatttttcacttaatgccaaaaagatggattygtttttgctttatactcacacgcttagcaaatctgagatgcatgagtgagctctcttttaaaataaagctttgttgccrccactaaggyattcccaaactaccmatggaagattatttcattttatccaattctgatggagaaattaggtatgtcttcagtgacccacaggtcagtgaactcagtaaccaccaaataagagggcagatgtaaatttcagagttgaragytttcctccacccttttctagctgccagtttccagatactcaaatttagatgctgtcagcttagatgtcccaaatgatttccagggcttggctgtgcactgctggattggaaaagatgtccaggaatggagcagtgctctgatgtcacagg

SEQ ID NO: 39498 - DNA, 600 bp, Chicken  19866894273471_4
aacaaaatcaacatcaaacattgaaattccctgccagctgactggacaaacttatctatattaggttgctagataatgtactgagcctgcaatttgttcgtatcatcattctctaaaagccagatcatcatattacacactgctgtgggagtgatcttctgttttagactayactaaaacatttttcacttaatgccaaaaagatggattygtttttgctttatactcacacgcttagcaaatctgagatgcatgagtgagctctcttttaaaataaagctttgttgccrccactaaggyattcccaaactaccmatggaagattatttcattttatccaattctgatggagaaattaggtatgtcttcagtgacccacaggtcagtgaactcagtaaccaccaaataagagggcagatgtaaatttcagagttgaragytttcctccacccttttctagctgccagtttccagatactcaaatttagatgctgtcagcttagatgtcccaaatgatttccagggcttggctgtgcactgctggattggaaaagatgtccaggaatggagcagtgctctgatgtcacaggctgtgagatc

SEQ ID NO: 39499 - DNA, 600 bp, Chicken  19866894273471_5
aaacattgaaattccctgccagctgactggacaaacttatctatattaggttgctagataatgtactgagcctgcaatttgttcgtatcatcattctctaaaagccagatcatcatattacacactgctgtgggagtgatcttctgttttagactayactaaaacatttttcacttaatgccaaaaagatggattygtttttgctttatactcacacgcttagcaaatctgagatgcatgagtgagctctcttttaaaataaagctttgttgccrccactaaggyattcccaaactaccmatggaagattatttcattttatccaattctgatggagaaattaggtatgtcttcagtgacccacaggtcagtgaactcagtaaccaccaaataagagggcagatgtaaatttcagagttgaragytttcctccacccttttctagctgccagtttccagatactcaaatttagatgctgtcagcttagatgtcccaaatgatttccagggcttggctgtgcactgctggattggaaaagatgtccaggaatggagcagtgctctgatgtcacaggctgtgagatccttctttggataaaa

SEQ ID NO: 39500 - DNA, 600 bp, Chicken  19866894273471_6
cactgctgtgggagtgatcttctgttttagactayactaaaacatttttcacttaatgccaaaaagatggattygtttttgctttatactcacacgcttagcaaatctgagatgcatgagtgagctctcttttaaaataaagctttgttgccrccactaaggyattcccaaactaccmatggaagattatttcattttatccaattctgatggagaaattaggtatgtcttcagtgacccacaggtcagtgaactcagtaaccaccaaataagagggcagatgtaaatttcagagttgaragytttcctccacccttttctagctgccagtttccagatactcaaatttagatgctgtcagcttagatgtcccaaatgatttccagggcttggctgtgcactgctggattggaaaagatgtccaggaatggagcagtgctctgatgtcacaggctgtgagatccttctttggataaaagctgatcagtctccaaagccaatactttactcatttctactcttggagggctgcctgggaacctcactgcttttctgattcattcactattctgggaaaatttaaacatgtatttttatatc

SEQ ID NO: 39501 - DNA, 600 bp, Chicken  19866894273471_7
tgctgtgggagtgatcttctgttttagactayactaaaacatttttcacttaatgccaaaaagatggattygtttttgctttatactcacacgcttagcaaatctgagatgcatgagtgagctctcttttaaaataaagctttgttgccrccactaaggyattcccaaactaccmatggaagattatttcattttatccaattctgatggagaaattaggtatgtcttcagtgacccacaggtcagtgaactcagtaaccaccaaataagagggcagatgtaaatttcagagttgaragytttcctccacccttttctagctgccagtttccagatactcaaatttagatgctgtcagcttagatgtcccaaatgatttccagggcttggctgtgcactgctggattggaaaagatgtccaggaatggagcagtgctctgatgtcacaggctgtgagatccttctttggataaaagctgatcagtctccaaagccaatactttactcatttctactcttggagggctgcctgggaacctcactgcttttctgattcattcactattctgggaaaatttaaacatgtatttttatatccat

SEQ ID NO: 39502 - DNA, 599 bp, Chicken  19866894273475_1
  misc_feature (1)..(156): n is any nucleotide
nnnnnnnnnnnnnnnnnnnnnnnnnnnnnnnnnnnnnnnnnnnnnnnnnnnnnnnnnnnnnnnnnnnnnnnnnnnnnnnnnnnnnnnnnnnnnnnnnnnnnnnnnnnnnnnnnnnnnnnnnnnnnnnnnnnnnnnnnnnnnnnnnnnnnnnnnnnnctgcgagcgcagccacgagagggcacaaagccccctcctgcagccgtgtcaccatgtcaccatgcagctgtgccaccatgcagccatgtcactgagcagccacggcatcgtgcagctgtgccacaccatgcagccatgtcactmgactgctgtgtcattgtgcaacttggcagctgtgtcaccatgcagccgtaccactgtaaaacagtgcccctgtgttagtgggcagctctgttaccattcagcactgtcagcatgcagcctggccacttggcagctgtgccaccatgcagttgtgccactgtgcagcagtgccgccatctcaccggacagctttgttaccatgcaacattggcaccgtgcagccatgccatcatgcagccatgcaatcctttaactgtgtgattgtgccatcaygcagccatgcaactgtgccatcaata

SEQ ID NO: 39503 - DNA, 580 bp, Chicken  19866894273475_2
gtgccacaccatgcagccatgtcactmgactgctgtgtcattgtgcaacttggcagctgtgtcaccatgcagccgtaccactgtaaaacagtgcccctgtgttagtgggcagctctgttaccattcagcactgtcagcatgcagcctggccacttggcagctgtgccaccatgcagttgtgccactgtgcagcagtgccgccatctcaccggacagctttgttaccatgcaacattggcaccgtgcagccatgccatcatgcagccatgcaatcctttaactgtgtgattgtgccatcaygcagccatgcaactgtgccatcaataaagtgtgcatttgggtgtctgtgccgctgtgcagcttgtcaccagtgtcaccacwcagctgtatcaccacrcagaagcatcagcgctggggtgtttgcacagcyctgcactgtctgcactcaggccatcatctccccctccccacgatgctctatctcttggaagacccagagaatccaattataaaaagagctaattatattaataggttaattaagacaccgctgatttcagatagggctggaaggaagcct

SEQ ID NO: 39504 - DNA, 499 bp, Chicken  19866894273475_3
tgtaaaacagtgcccctgtgttagtgggcagctctgttaccattcagcactgtcagcatgcagcctggccacttggcagctgtgccaccatgcagttgtgccactgtgcagcagtgccgccatctcaccggacagctttgttaccatgcaacattggcaccgtgcagccatgccatcatgcagccatgcaatcctttaactgtgtgattgtgccatcaygcagccatgcaactgtgccatcaataaagtgtgcatttgggtgtctgtgccgctgtgcagcttgtcaccagtgtcaccacwcagctgtatcaccacrcagaagcatcagcgctggggtgtttgcacagcyctgcactgtctgcactcaggccatcatctccccctccccacgatgctctatctcttggaagacccagagaatccaattataaaaagagctaattatattaataggttaattaagacaccgctgatttcagatagggctggaaggaagcct

SEQ ID NO: 39505 - DNA, 483 bp, Chicken  19866894273475_4
tgtgttagtgggcagctctgttaccattcagcactgtcagcatgcagcctggccacttggcagctgtgccaccatgcagttgtgccactgtgcagcagtgccgccatctcaccggacagctttgttaccatgcaacattggcaccgtgcagccatgccatcatgcagccatgcaatcctttaactgtgtgattgtgccatcaygcagccatgcaactgtgccatcaataaagtgtgcatttgggtgtctgtgccgctgtgcagcttgtcaccagtgtcaccacwcagctgtatcaccacrcagaagcatcagcgctggggtgtttgcacagcyctgcactgtctgcactcaggccatcatctccccctccccacgatgctctatctcttggaagacccagagaatccaattataaaaagagctaattatattaataggttaattaagacaccgctgatttcagatagggctggaaggaagcct

SEQ ID NO: 39506 - DNA, 450 bp, Chicken  19866894273475_5
ctgtcagcatgcagcctggccacttggcagctgtgccaccatgcagttgtgccactgtgcagcagtgccgccatctcaccggacagctttgttaccatgcaacattggcaccgtgcagccatgccatcatgcagccatgcaatcctttaactgtgtgattgtgccatcaygcagccatgcaactgtgccatcaataaagtgtgcatttgggtgtctgtgccgctgtgcagcttgtcaccagtgtcaccacwcagctgtatcaccacrcagaagcatcagcgctggggtgtttgcacagcyctgcactgtctgcactcaggccatcatctccccctccccacgatgctctatctcttggaagacccagagaatccaattataaaaagagctaattatattaataggttaattaagacaccgctgatttcagatagggctggaaggaagcct

SEQ ID NO: 39507 - DNA, 600 bp, Chicken  19866894273477_1
gcgagctctcgagcagcgctgccgcaatatgatgaggtcatgagtcacccaaccaccgaaaccagccagccagccccatacagcacatggctgggaggctggggctgcccttctctgcactgcctggagagcaggggttgggatggagggagcagatgcgtcccctgccccagggaagatggggagatgcatctccagcatcaaaatcccaggagcacctggagtccagcaaagcatggtgacaacactgcctgcatggggcttcctaaaagcctcctaaagctgcaaatgcacagcctkggaggggaagagatgagggacgtgctatgcaatgtgcacgaccctgcaaagccccagccccagatctccatccaaagatactgctggagaagacagcagaggaatcctgctgctgccagcccaatcgcagccccgtccttcagggacggttgcaaacaaaacaaaggagatggaagatgaacgctgcattaccctgacagccacgagttaggctatgatacatctctacctctgggatacgtgacagatattattcattgttcccttctcacttgtcaccgtgcaatcagggctgggaac

SEQ ID NO: 39508 - DNA, 599 bp, Chicken  19866894273478_1
  misc_feature (1)..(37): n is any nucleotide
nnnnnnnnnnnnnnnnnnnnnnnnnnnnnnnnnnnnnttgaaggatggaagatttaggttgcatatcagggggaactatgagagtggtaaggtgatggaacaggctgcccagagaggttgtggatgccccgtccctggaagtgttcaagcccaggttggatggggccctcggcagcctggtctagtattaaatgtggaggttggcggccctgcctgcagcaggggagttggagcttgatgatccttgaggttcttgaggacccatgccattctatgatgctatgattccatgatacgtgmagcttatttttgygagcgctgaaaaagcctttggggagactgaatctggccaataccacatccagatttacagctctgaagattgagataggacaagaagaagaytgcagaagacttcgaaagctacctcaacaacaacaaaaacaaaaagattgtttttcctgactggccatcaaatrcagaaagaaaagagccytgacaataggtaacagcgctaccaygtccctggtaaacatgctccatgatgaacctgtaatggttttctgtgagatggcagtaatttattgtggaattttgac

SEQ ID NO: 39509 - DNA, 599 bp, Chicken  19866894273478_2
  misc_feature (1)..(24): n is any nucleotide
nnnnnnnnnnnnnnnnnnnnnnnnttgaaggatggaagatttaggttgcatatcagggggaactatgagagtggtaaggtgatggaacaggctgcccagagaggttgtggatgccccgtccctggaagtgttcaagcccaggttggatggggccctcggcagcctggtctagtattaaatgtggaggttggcggccctgcctgcagcaggggagttggagcttgatgatccttgaggttcttgaggacccatgccattctatgatgctatgattccatgatacgtgmagcttatttttgygagcgctgaaaaagcctttggggagactgaatctggccaataccacatccagatttacagctctgaagattgagataggacaagaagaagaytgcagaagacttcgaaagctacctcaacaacaacaaaaacaaaaagattgtttttcctgactggccatcaaatrcagaaagaaaagagccytgacaataggtaacagcgctaccaygtccctggtaaacatgctccatgatgaacctgtaatggttttctgtgagatggcagtaatttattgtggaattttgacctgattttgacaa

SEQ ID NO: 39510 - DNA, 600 bp, Chicken  19866894273478_3
tgcccagagaggttgtggatgccccgtccctggaagtgttcaagcccaggttggatggggccctcggcagcctggtctagtattaaatgtggaggttggcggccctgcctgcagcaggggagttggagcttgatgatccttgaggttcttgaggacccatgccattctatgatgctatgattccatgatacgtgmagcttatttttgygagcgctgaaaaagcctttggggagactgaatctggccaataccacatccagatttacagctctgaagattgagataggacaagaagaagaytgcagaagacttcgaaagctacctcaacaacaacaaaaacaaaaagattgtttttcctgactggccatcaaatrcagaaagaaaagagccytgacaataggtaacagcgctaccaygtccctggtaaacatgctccatgatgaacctgtaatggttttctgtgagatggcagtaatttattgtggaattttgacctgattttgacaagcccttagatgctcttgtcagtagagtcatctctaattttaaggagctctgttgaccagaagtgcctgattattaaatcgagtaggtaccatc

SEQ ID NO: 39511 - DNA, 600 bp, Chicken  19866894273478_4
gtctagtattaaatgtggaggttggcggccctgcctgcagcaggggagttggagcttgatgatccttgaggttcttgaggacccatgccattctatgatgctatgattccatgatacgtgmagcttatttttgygagcgctgaaaaagcctttggggagactgaatctggccaataccacatccagatttacagctctgaagattgagataggacaagaagaagaytgcagaagacttcgaaagctacctcaacaacaacaaaaacaaaaagattgtttttcctgactggccatcaaatrcagaaagaaaagagccytgacaataggtaacagcgctaccaygtccctggtaaacatgctccatgatgaacctgtaatggttttctgtgagatggcagtaatttattgtggaattttgacctgattttgacaagcccttagatgctcttgtcagtagagtcatctctaattttaaggagctctgttgaccagaagtgcctgattattaaatcgagtaggtaccatcttgactaatttttgtatcaataagaatttttcaggataaggatgacttgaagtcattcatctcgctgttatctt

SEQ ID NO: 39512 - DNA, 600 bp, Chicken  19866894273478_5
gaggttggcggccctgcctgcagcaggggagttggagcttgatgatccttgaggttcttgaggacccatgccattctatgatgctatgattccatgatacgtgmagcttatttttgygagcgctgaaaaagcctttggggagactgaatctggccaataccacatccagatttacagctctgaagattgagataggacaagaagaagaytgcagaagacttcgaaagctacctcaacaacaacaaaaacaaaaagattgtttttcctgactggccatcaaatrcagaaagaaaagagccytgacaataggtaacagcgctaccaygtccctggtaaacatgctccatgatgaacctgtaatggttttctgtgagatggcagtaatttattgtggaattttgacctgattttgacaagcccttagatgctcttgtcagtagagtcatctctaattttaaggagctctgttgaccagaagtgcctgattattaaatcgagtaggtaccatcttgactaatttttgtatcaataagaatttttcaggataaggatgacttgaagtcattcatctcgctgttatctttttgtttttcatttaaa

SEQ ID NO: 39513 - DNA, 600 bp, Chicken  19866894273478_6
ggggagttggagcttgatgatccttgaggttcttgaggacccatgccattctatgatgctatgattccatgatacgtgmagcttatttttgygagcgctgaaaaagcctttggggagactgaatctggccaataccacatccagatttacagctctgaagattgagataggacaagaagaagaytgcagaagacttcgaaagctacctcaacaacaacaaaaacaaaaagattgtttttcctgactggccatcaaatrcagaaagaaaagagccytgacaataggtaacagcgctaccaygtccctggtaaacatgctccatgatgaacctgtaatggttttctgtgagatggcagtaatttattgtggaattttgacctgattttgacaagcccttagatgctcttgtcagtagagtcatctctaattttaaggagctctgttgaccagaagtgcctgattattaaatcgagtaggtaccatcttgactaatttttgtatcaataagaatttttcaggataaggatgacttgaagtcattcatctcgctgttatctttttgtttttcatttaaagttctttgagctacttactcaataa

SEQ ID NO: 39514 - DNA, 600 bp, Chicken  19866894273478_7
agctctgttgaccagaagtgcctgattattaaatcgagtaggtaccatcttgactaatttttgtatcaataagaatttttcaggataaggatgacttgaagtcattcatctcgctgttatctttttgtttttcatttaaagttctttgagctacttactcaataaatccctccaatggcattgacatttactctctttcaatgagctgaaaaggagatacgatatttatttctacagcttatctgatataagcctctcttcagcgcccagtagcaagatggtaagtaggtgggaaacagygaatgttgttactttcaactatgctgaaaatgagtgcagatcttgaatatgactttttttttcccaagctgctctctgccagtatttatgagcacacatagagcacaagcaaaaggaaagtaacttaaacagtgtagtacaaaattactaaccaatttgaaagacagaagggctatataccaacatctgaagttcaaatttctacttttaatcacacaagagctacataaaggccttctttcctaataaaaattacatttgcaaacagaaacggacagccagaataggaaatgatgatga

SEQ ID NO: 39515 - DNA, 600 bp, Chicken  19866894273478_8
taatttttgtatcaataagaatttttcaggataaggatgacttgaagtcattcatctcgctgttatctttttgtttttcatttaaagttctttgagctacttactcaataaatccctccaatggcattgacatttactctctttcaatgagctgaaaaggagatacgatatttatttctacagcttatctgatataagcctctcttcagcgcccagtagcaagatggtaagtaggtgggaaacagygaatgttgttactttcaactatgctgaaaatgagtgcagatcttgaatatgacyttttttttcccaagctgctctctgccagtatttatgagcacacatagagcacaagcaaaaggaaagtaacttaaacagtgtagtacaaaattactaaccaatttgaaagacagaagggctatataccaacatctgaagttcaaatttctacttttaatcacacaagagctacataaaggccttctttcctaataaaaattacatttgcaaacagaaacggacagccagaataggaaatgatgatgagcagcagtagttgaagtaatcatcactcacatatcaacagaaaatttcaaactg

SEQ ID NO: 39516 - DNA, 600 bp, Chicken  19866894273483_1
gaggctgggaaaagtaagcatccacttttagtaactgtctcatttatttccataggagcttcaggtctctcaagaggccagcattttgttataaggatgacacaggagctaggaatgagactgggcttgtggaaatctgtagaagtaatatactttctattaaaaaaaaaattgtacctcaaggcagaaggacagctagaattatgtagtgtccttctttaacggaatgatacggtctccttctttagcaggagccaggctgggatgcagaaggagagtttgtacgtggttgctgtttastttttcctttcccattttgcatatctcttccagagattcctggaaacagacttctgctgacttttgattattatgaaacagagcagtcctggaaagaaacyggggtctgaaaacacatcagggcaatgggcagctcaataaatacgctgttgttatctgtcattgtagccttcacaagctcactacttgagctgttgtatacatgggaggggctgccagacctttccagtgacagctttctgcattgtgagatgcttttacttcttgtatcttgagggtgttcagctaaagcaggctggg

SEQ ID NO: 39517 - DNA, 600 bp, Chicken  19866894273483_2
acaggagctaggaatgagactgggcttgtggaaatctgtagaagtaatatactttctattaaaaaaaaaattgtacctcaaggcagaaggacagctagaattatgtagtgtccttctttaacggaatgatacggtctccttctttagcaggagccaggctgggatgcagaaggagagtttgtacgtggttgctgtttastttttcctttcccattttgcatatctcttccagagattcctggaaacagacttctgctgacttttgattattatgaaacagagcagtcctggaaagaaacyggggtctgaaaacacatcagggcaatgggcagctcaataaatacgctgttgttatctgtcattgtagccttcacaagctcactacttgagctgttgtatacatgggaggggctgccagacctttccagtgacagctttctgcattgtgagatgcttttacttcttgtatcttgagggtgttcagctaaagcaggctgggagtgacatcaagatgggctcctgcatgggtctgtgaggggtctggaagcagtttgtctcaaggattttcctcattttgttctctgcaatgtacagaagaat

SEQ ID NO: 39518 - DNA, 600 bp, Chicken  19866894273483_3
caagcagccagtggtattttggttcattttaagtgggcctaagtaaggaccacagcaactgcacaaacactgagccccatacagtgtcttgccacctgtttctgtgatttctttggcctgttgactcatacatatatatttttttctggaagctaaggatgcttgccatgctgaaaatgcccttggtttggttttgagcttggatgaagttcctccaaaatgcttccacggtgattaagtttctgacttctttattttttacttcagtgtggcagggagtgaaatgagagcccctcatgygctagggagagaygtgggtttggtagcttccttcctgccgccatcctgcttgtgtcaggctggatggggattgtccaggaaatcatagaatcacagaacaatttgaggggatctcaaggcccacccagccctagctcccagccatggccagggctgccccccagctcagctgcccagggctccatccaacctgaccttgagcacctccagggatgtgacatcacagcttctctgggcagctgtgccagggcctgactgccattgtcggtcaaaatcttccccctgatattttatctaaat

SEQ ID NO: 39519 - DNA, 600 bp, Chicken  19866894273483_4
gtattttggttcattttaagtgggcctaagtaaggaccacagcaactgcacaaacactgagccccatacagtgtcttgccacctgtttctgtgatttctttggcctgttgactcatacatatatatttttttctggaagctaaggatgcttgccatgctgaaaatgcccttggtttggttttgagcttggatgaagttcctccaaaatgcttccacggtgattaagtttctgacttctttattttttacttcagtgtggcagggagtgaaatgagagcccctcatgygctagggagagaygtgggtttggtagcttccttcctgccgccatcctgcttgtgtcaggctggatggggattgtccaggaaatcatagaatcacagaacaatttgaggggatctcaaggcccacccagccctagctcccagccatggccagggctgccccccagctcagctgcccagggctccatccaacctgaccttgagcacctccagggatgtgacatcacagcttctctgggcagctgtgccagggcctgactgccattgtcggtcaaaatcttccccctgatattttatctaaatctctcatcttcta

SEQ ID NO: 39520 - DNA, 600 bp, Chicken  19866894273494_1
gctgcagccaaatgagacatggggatcactctgattttccgcggctcgctggcaggtggagcctattaggctgagagtgagcagaaaatcaaggaaataggatccaggggctcagggctgggggtttgggcagcacagggaggggaggaggagggggaaaaccccagggtgcagcttgagcaccccaggatgccagagggagggtgatgaacgaagccattcccacacacagggtgctgggggtcgtggcgtggtgcggggctgagcaggtggccatgcgtggggagcgttggagccccrgtgcctctcatccctcgttgctccccccgtcgaggctgcggcggctgcaaagcggctccaagagctgggaatttgtcaccatgctctgggaaagctccttcccaccagctgtcagcatcgccaggggtcccgggggtcggatttggtgtggttaaagctggaggggggctgtggggcagagcccagggcttgggatgggcatcctccactggtgccgcatatatgtacccaaaatgccccaacctacctgatgctgggcagcctccagtgatggggggggctcatgctgaccttatgggg

SEQ ID NO: 39521 - DNA, 593 bp, Chicken  19866894273495_1
caaattcactgtacttcatacgtagcataaggtagagggcccaggaagacagatgtgatgatttcacaactgagagaacagtaggatatgtttgttaccacagcaggccctgattcatgtggatgcagagctcaagctaattgcgtgctcctaaagattgctatttatctacagactgatgtaaagcctgctggaagcaatggctctctactctgatatgaaatagtctgccttaagccttgatttattttgaatccttctaaggattgtttcttccttttgttattctaaagctaatgkttttttttagttttgcacaaatgttaacacttaaagatgactaaatatatcattgtcagtggaaaaaataatcaggcagctgaagtgcactggttctaatgtcatatgcaagtgttgaagttttcatgaatgacctgatgccaacctgtcaccttcccttctacaaacctgaatcacttttgttacaacaggctatttacagttttctcacttgttttgatttttgtgcctggtttctcagtaggttctttgagtttgttttgaactatgtgtgccatttccaaaggaaacaa

SEQ ID NO: 39522 - DNA, 600 bp, Chicken  19866894273505_1
gattttcattaagtaacagagaaacagtggcaggctgaagtcttagagcaatatgtggacatttctttacaaaccaaattatttattctgtgggtagaagctgtaattctcgtgacattttcacttcagttttttatctttctttttcctcactgtgttgtgaaataaaagtagatcaaacacaaacagtacaacctggtacttcatttacagacatacctccatccacagtgaactttcattaagactcaaatttacaattcaatacacatacatctgcaatattaattcaacaaataytttaacatcartaagttagcactgaaatttaccaaactgttgcagggatcttaattttgttccttctcatttaaaagatacagatttgtgttaatgggattcagaatgcaatctacagcaacaggaatttgggcattttatacatccaaacagtgttcatgttgttcttgctattatcaaagtatgctaattgacagacaatgagcagtatgaaagggcattaggctgctgttcatgtatttatgtagcattcttcactccagagaataaccttatcaagtatgaaaatgcatcaacatt

SEQ ID NO: 39523 - DNA, 600 bp, Chicken  19866894273505_2
agtaacagagaaacagtggcaggctgaagtcttagagcaatatgtggacatttctttacaaaccaaattatttattctgtgggtagaagctgtaattctcgtgacattttcacttcagttttttatctttctttttcctcactgtgttgtgaaataaaagtagatcaaacacaaacagtacaacctggtacttcatttacagacatacctccatccacagtgaactttcattaagactcaaatttacaattcaatacacatacatctgcaatattaattcaacaaataytttaacatcartaagttagcactgaaatttaccaaactgttgcagggatcttaattttgttccttctcatttaaaagatacagatttgtgttaatgggattcagaatgcaatctacagcaacaggaatttgggcattttatacatccaaacagtgttcatgttgttcttgctattatcaaagtatgctaattgacagacaatgagcagtatgaaagggcattaggctgctgttcatgtatttatgtagcattcttcactccagagaataaccttatcaagtatgaaaatgcatcaacattacctaataata

SEQ ID NO: 39524 - DNA, 600 bp, Chicken  19866894273517_1
gtcttctgggcactccgctctgtgtgcatctcaatggttctcacctcagcgaccagtcctccagtcagtatacatctcctcaagagttaaatatggattctttataacgttacttcactggtccccaagaggcatttcatgcctggtctttcacccatatctctgtatcttgtgagtgatgctgctgttcagacagcttccttggcagcttatggcctggtctggtgcagtcctggtagtcattgcggataataactgtgtcttgaggtgtgttttgttagggctgtgactacaaggagrgggggggttgcagtatgtatgagtcctgttctgggaactgccagttgtggttgtcaggaggtgcagacacttccatctctttcttcttaagcatcttgcattaaataatgtggaatatcttcatgtgtayggcacagcaaacactgctgcgcaaggcttactttcatgggcctaaaaatgtggagtttaattcctcaaaggcatttttagtgtttaggtgatgtggggatacataattttgtctggggttgtaaaggttccgggcacagtaagactgacaaaatgtaacgttacttttag

SEQ ID NO: 39525 - DNA, 600 bp, Chicken  19866894273517_2
ggcatttcatgcctggtctttcacccatatctctgtatcttgtgagtgatgctgctgttcagacagcttccttggcagcttatggcctggtctggtgcagtcctggtagtcattgcggataataactgtgtcttgaggtgtgttttgttagggctgtgactacaaggagrgggggggttgcagtatgtatgagtcctgttctgggaactgccagttgtggttgtcaggaggtgcagacacttccatctctttcttcttaagcatcttgcattaaataatgtggaatatcttcatgtgtayggcacagcaaacactgctgcgcaaggcttactttcatgggcctaaaaatgtggagtttaattcctcaaaggcatttttagtgtttaggtgatgtggggatacataattttgtctggggttgtaaaggttccgggcacagtaagactgacaaaatgtaacgttacttttagtagatggattctttgctactttgcacttctgctcatgctttataggacggtagaagatcttaatgaagaacttgaatctcttgctgtgtgtaagcaggaaaaaagttttgaatgtgcaagccaaagtgaa

SEQ ID NO: 39526 - DNA, 600 bp, Chicken  19866894273519_1
actctataatcacttggtgttttggatcattttcatttctctgcttagcacttacatttgccagtttgctcctccatgctgtaatgtcctcttttattcctgaatttttaccattagtacacttaccccttttttttttttttttttttttttttgctcagttatatctctcactggctacatctacggtttgactgtagattaaatccagactctgcttcaatacaaacactcccacatgatacagagtgctgataaacttacacttgagccaacaaattaagtttatagtagtcaaawaatgttgatgagctaacattgtgccagctaactttatgctaagtcaggactgtctgaccatgccagatctcccacagctagtgaacttcctacagataagttgcgagccttctcacagtcctgtagagtcactgtccttggaagyagtcttgcatcccttatatgcaggcacaaggccttgtatttccttttatctttggttttcatctgttgtcacagacctagctgtggacatgccatgtttctacattgaccgctgccacataatttaacattagctacagtaccatggttatggtt

SEQ ID NO: 39527 - DNA, 600 bp, Chicken  19866894273519_2
ttttttttttgctcagttatatctctcactggctacatctacggtttgactgtagattaaatccagactctgcttcaatacaaacactcccacatgatacagagtgctgataaacttacacttgagccaacaaattaagtttatagtagtcaaawaatgttgatgagctaacattgtgccagctaactttatgctaagtcaggactgtctgaccatgccagatctcccacagctagtgaacttcctacagataagttgcgagccttctcacagtcctgtagagtcactgtccttggaagyagtcttgcatcccttatatgcaggcacaaggccttgtatttccttttatctttggttttcatctgttgtcacagacctagctgtggacatgccatgtttctacattgaccgctgccacataatttaacattagctacagtaccatggttatggttactagagaggaacagaatttgagccagatcaaggccatgtggtcctcatttgcattactccagattccattgtatttaactcaagccagaatgaaggtgggtagacctaaaacatctgctaaggctctattgagagactcttgta

SEQ ID NO: 39528 - DNA, 600 bp, Chicken  19866894273519_3
gtcctcatttgcattactccagattccattgtatttaactcaagccagaatgaaggtgggtagacctaaaacatctgctaaggctctattgagagactcttgtacaggtctcctattgccagcatgggcagagattcagtatgctgcattattaggcttattttgtctttgcaggaccatggcacatgaggcctgccttcccatgtcactgtttgtactctcctttgcacagtttttggcctgaatgagctgaacctctcccacaagttcaggaattaccttcatccaggtgcagccackcaggaagactggatgaaggagtcctgtttttcctgtggaggagggaaaattttaaccatgcaccttctgtgctcagagctgtgggagaggacctggttttgttttgttagctggtatataaagggaccagctgtgcttgactaatgtgaaggctctgaagaaatgttaacatagacttgaaataataattgctaagtatatgccgggaaggtgtccttcaagtacttggaagagcttagttgctgcctctctaagatctaggcagatgcagatgtttgagagcttggtcatcttgtttgt

SEQ ID NO: 39529 - DNA, 600 bp, Chicken  19866894273525_1
aagatgcacttaaattccattattttgaaatggatatatgaatatcatttgagatggaaggaaatatatccagagaattttaaaaaagcctggatatgatatggagaaaacatacaggtagacaaaagagatatggagtgaaacagctgtgtgacttcttcatgggtatagttttaaattaaaagacgactgatttatattaaacataaggaagaaattgtttactcatagggcaggtgaagcactgtcacagctgccctgagaagccgtggatgcctcatccctggaagcattcaaggscaggytggatggggccctgcgcagcctgagctggtggaaggcagccctgcccacagcwcagggttggaactggaaggtctttaaggtcccttccaacccaagccattctatgattacttatatttcaaagaacattcagtactcagttctgatcttaatgtctccatattttacaaataacatgcatctaacatgagacgaatgaaagttagaatattttcctttggtttgctagaggccacatttgaaagaaaccacctctcaatgcaaaacagtgcctggaaacagtctggggtcaca

SEQ ID NO: 39530 - DNA, 600 bp, Chicken  19866894273525_2
gcacttaaattccattattttgaaatggatatatgaatatcatttgagatggaaggaaatatatccagagaattttaaaaaagcctggatatgatatggagaaaacatacaggtagacaaaagagatatggagtgaaacagctgtgtgacttcttcatgggtatagttttaaattaaaagacgactgatttatattaaacataaggaagaaattgtttactcatagggcaggtgaagcactgtcacagctgccctgagaagccgtggatgcctcatccctggaagcattcaaggscaggytggatggggccctgcgcagcctgagctggtggaaggcagccctgcccacagcwcagggttggaactggaaggtctttaaggtcccttccaacccaagccattctatgattacttatatttcaaagaacattcagtactcagttctgatcttaatgtctccatattttacaaataacatgcatctaacatgagacgaatgaaagttagaatattttcctttggtttgctagaggccacatttgaaagaaaccacctctcaatgcaaaacagtgcctggaaacagtctggggtcacaagtcc

SEQ ID NO: 39531 - DNA, 600 bp, Chicken  19866894273525_3
aggaaatatatccagagaattttaaaaaagcctggatatgatatggagaaaacatacaggtagacaaaagagatatggagtgaaacagctgtgtgacttcttcatgggtatagttttaaattaaaagacgactgatttatattaaacataaggaagaaattgtttactcatagggcaggtgaagcactgtcacagctgccctgagaagccgtggatgcctcatccctggaagcattcaaggscaggytggatggggccctgcgcagcctgagctggtggaaggcagccctgcccacagcwcagggttggaactggaaggtctttaaggtcccttccaacccaagccattctatgattacttatatttcaaagaacattcagtactcagttctgatcttaatgtctccatattttacaaataacatgcatctaacatgagacgaatgaaagttagaatattttcctttggtttgctagaggccacatttgaaagaaaccacctctcaatgcaaaacagtgcctggaaacagtctggggtcacaagtccaagcagatttactagaaagagtgccttacactgaattaacagtagcacttcct

SEQ ID NO: 39532 - DNA, 599 bp, Chicken  19866894273534_1
  misc_feature (1)..(83): n is any nucleotide
nnnnnnnnnnnnnnnnnnnnnnnnnnnnnnnnnnnnnnnnnnnnnnnnnnnnnnnnnnnnnnnnnnnnnnnnnnnnnnnnnnnatgaggcttgcagtcagcccataacatcccccttctgctactctttcctctacacacatttccctgaaccagcatgggtcctccccaggctgcagtccttcaggataaacctgctccagcaagggtcctccacaggctgcaagggtatctctgcttcagtgcctggagcacctccttccctttccctgaccctggtgtccgtgctgttgtttcttaytgcttctccccactctgcttatctagcagtttttgccctttcttaagcaagttttcccagaggcgccgccatattggctgctgggcccagccatcccagaaaagagataaaaaagaataggcaaagagaatcaaacagaagaaaaaatttaaaaagggggaggaaaaagtagagggccaagaaaaagaaaaggaaaaactggcaaaactgctaactgtctctagctgctgttcctgaatatgcttcagtagcacagagagtgcctggaagcagctrgggaggctgaggcacagtgctca

SEQ ID NO: 39533 - DNA, 540 bp, Chicken  19866894273534_2
ggtgtccgtgctgttgtttcttaytgcttctccccactctgcttatctagcagtttttgccctttcttaagcaagttttcccagaggcgccgccatattggctgctgggcccagccatcccagaaaagagataaaaaagaataggcaaagagaatcaaacagaagaaaaaatttaaaaagggggaggaaaaagtagagggccaagaaaaagaaaaggaaaaactggcaaaactgctaactgtctctagctgctgttcctgaatatgcttcagtagcacagagagtgcctggaagcagctrgggaggctgaggcacagtgctcacttggaggtctacttctcagatacaaggagacatttaattcactcttaaaattgtcatgattgtggtttgtcatgatacatggaatagattgcccagagaagtggtagagtcaccattcctrgaagttttcaagaaccgtgtagatgtggcactgagggatgtgatgagtgggcatggtggggatgagttgatggatggactagatgatcctcgagt

SEQ ID NO: 39534 - DNA, 395 bp, Chicken  19866894273534_3
caaagagaatcaaacagaagaaaaaatttaaaaagggggaggaaaaagtagagggccaagaaaaagaaaaggaaaaactggcaaaactgctaactgtctctagctgctgttcctgaatatgcttcagtagcacagagagtgcctggaagcagctrgggaggctgaggcacagtgctcacttggaggtctacttctcagatacaaggagacatttaattcactcttaaaattgtcatgattgtggtttgtcatgatacatggaatagattgcccagagaagtggtagagtcaccattcctrgaagttttcaagaaccgtgtagatgtggcactgagggatgtgatgagtgggcatggtggggatgagttgatggatggactagatgatcctcgagt

SEQ ID NO: 39535 - DNA, 600 bp, Chicken  19866894273543_1
ggtgcaccgcggatgcagctagatgttgttgctgttgtgatcttcagggaatagatgaaaggaaggaggcaccccgaattaccgagggtgaggctgtgggaacattttagcagctccaaaatcggttaagttctttagaatgtgaaaacagccagaggggccccgggaaggaaggagatcaccgcgggagagaagtacaaaagctgcctaatccccataactccatcgctgcctcacaggaacctctgctaaaagcaagaatcacttctcttatccgcagatgacatctctggagccagycaggccagcagcttgggtgtgcgattttccactgcatactgcaacacctggcgccgcatcactgaagggattgtttttttccaagcaaagaatacaacgggcgcagtgtctcccttcctgctcctctgctgcctttcaggctaatacctgtccggccacattgctacaaacacagcgcccaatccctctgtattggtgcaggtgtggccccatcctgcacgactccgggcgggtgctgttcagcccccactgcggcggctgtggggctctgctctgctccccgcatgccccccacacccc

SEQ ID NO: 39536 - DNA, 599 bp, Chicken  19866894273547_1
  misc_feature (1)..(123): n is any nucleotide
nnnnnnnnnnnnnnnnnnnnnnnnnnnnnnnnnnnnnnnnnnnnnnnnnnnnnnnnnnnnnnnnnnnnnnnnnnnnnnnnnnnnnnnnnnnnnnnnnnnnnnnnnnnnnnnnnnnnnnnnnnnatatgttttagtactaccacacagtgaaataaaaatcaagcacacaaaaaggtcttactccaattccatcagaaataacattttactagagagaggaagtgaaggaactgcatggcttatagcatcacatatgatgcatctcaagtctttccagtatgaaacaagctccacagttaytgctcattcaggtgtggatagcatcttaataaaatgtatccacttattctctttttaatggtcttgatttccctcatttctaagaaaaaataatgttagtgttattcatctaaggaaagaatcatctgtctgagctcttccagtaggctatttgtctaagtcatagacattccaacagatttaagatcaaaaaacacgcacacaaaagctgtggacctagaaggaaacatacatgagatttgctcactggcatccacatgaattttgaatgtgcacagaggatgaaggaagagaggggt

SEQ ID NO: 39537 - DNA, 599 bp, Chicken  19866894273551_1
  misc_feature (1)..(94): n is any nucleotide
nnnnnnnnnnnnnnnnnnnnnnnnnnnnnnnnnnnnnnnnnnnnnnnnnnnnnnnnnnnnnnnnnnnnnnnnnnnnnnnnnnnnnnnnnnnnnnattatatactgccgctgagactgtagaatcatagaatggcctgggttggaagggacctgaaggatcatgaatctccaacccctctgccacgggcagggctgccaactttcaaatcttacactagaccacgctgcccagggacccatccaacctggccttgaacacctccagggatggaacaaccacaacctctctgggcagcctgygtcagcacctcaccactctcacagtaaataacttccacctgatatccaacctaaatcttccctccttcaacttaaaaccatttccccttgtcctgctattagctccctttcaaagagttgactgccctcctttttataggctccctttaggtactgaaaggctgcaatgaggtcacccygcagccttctattctccaggctgaacaacccctaccaagatgccctttggtcatccaaagcatcagcacagggctggtaaatatgacagaggacaacagcacctgcagaagcaactataa

SEQ ID NO: 39538 - DNA, 600 bp, Chicken  19866894273551_2
gccacgggcagggctgccaactttcaaatcttacactagaccacgctgcccagggacccatccaacctggccttgaacacctccagggatggaacaaccacaacctctctgggcagcctgygtcagcacctcaccactctcacagtaaataacttccacctgatatccaacctaaatcttccctccttcaacttaaaaccatttccccttgtcctgctattagctccctttcaaagagttgactgccctcctttttataggctccctttaggtactgaaaggctgcaatgaggtcacccygcagccttctattctccaggctgaacaacccctaccaagatgccctttggtcatccaaagcatcagcacagggctggtaaatatgacagaggacaacagcacctgcagaagcaactataaaggagtctggtgggcacacaaatgtcctggcaaccaaactatggcaccaaacatcactaactaatgcatacgaacagcagaaatycctacatcccaagttcttattaattatccactcagagtacttcaagatccaaagagttaaattatacactgatggtcacatgaatgatcagtgct

SEQ ID NO: 39539 - DNA, 600 bp, Chicken  19866894273551_3
cccttgtcctgctattagctccctttcaaagagttgactgccctcctttttataggctccctttaggtactgaaaggctgcaatgaggtcacccygcagccttctattctccaggctgaacaacccctaccaagatgccctttggtcatccaaagcatcagcacagggctggtaaatatgacagaggacaacagcacctgcagaagcaactataaaggagtctggtgggcacacaaatgtcctggcaaccaaactatggcaccaaacatcactaactaatgcatacgaacagcagaaatycctacatcccaagttcttattaattatccactcagagtacttcaagatccaaagagttaaattatacactgatggtcacatgaatgatcagtgctataaaaataaagttggaaggtatgtatatgtaaatattgcacgatgaattaatctatatattctctttacatgtttctagcaacaaacttcaagaaagaatatgattcgtgaaagaagacaaaatgcattatatgctaaaatatagggaagattgggtggcagagagacagagaagccatgatgtgttctcattacttattgggt

SEQ ID NO: 39540 - DNA, 600 bp, Chicken  19866894273555_1
atctggagcaaataccacaggttttaaatcaagttgctggccagatcctgccagcttttatccttttatttaatggattaaaaagagcttatgcctgccatgcggagcatgaaaatgacagtgatgatgatgatgaagctgaagaagatgaggaaacaggtatggaaagtgaagatccattgttatgttctgtctttcatgtttcctggtgggtatgcggagttgtgttttgtggaattcttcagagttccctaattccaaaactcaaagctgagatagagcattagacatcttttaacrcttttcaarcatatctgcttactttcctgttactcttagaagctgacttcctcaactgggtctattcaaagttgttgtcaagctagcttttatgtatggatgctgtcagtgctgaaaagaattagtgctgggtcctgttttctctttgaggaagaggttagagtcagttgaagaagtttgctamtgtgcttccttgtacagtttggactaacatatattacaaattgtcctatgaaatgctggagttgtagatgtatattgaaaaaggatcgtagtcagaatggtttgattaggaaggga

SEQ ID NO: 39541 - DNA, 600 bp, Chicken  19866894273555_2
aaataccacaggttttaaatcaagttgctggccagatcctgccagcttttatccttttatttaatggattaaaaagagcttatgcctgccatgcggagcatgaaaatgacagtgatgatgatgatgaagctgaagaagatgaggaaacaggtatggaaagtgaagatccattgttatgttctgtctttcatgtttcctggtgggtatgcggagttgtgttttgtggaattcttcagagttccctaattccaaaactcaaagctgagatagagcattagacatcttttaacrcttttcaarcatatctgcttactttcctgttactcttagaagctgacttcctcaactgggtctattcaaagttgttgtcaagctagcttttatgtatggatgctgtcagtgctgaaaagaattagtgctgggtcctgttttctctttgaggaagaggttagagtcagttgaagaagtttgctamtgtgcttccttgtacagtttggactaacatatattacaaattgtcctatgaaatgctggagttgtagatgtatattgaaaaaggatcgtagtcagaatggtttgattaggaagggacctttaaag

SEQ ID NO: 39542 - DNA, 600 bp, Chicken  19866894273555_3
atgttctgtctttcatgtttcctggtgggtatgcggagttgtgttttgtggaattcttcagagttccctaattccaaaactcaaagctgagatagagcattagacatcttttaacrcttttcaarcatatctgcttactttcctgttactcttagaagctgacttcctcaactgggtctattcaaagttgttgtcaagctagcttttatgtatggatgctgtcagtgctgaaaagaattagtgctgggtcctgttttctctttgaggaagaggttagagtcagttgaagaagtttgctamtgtgcttccttgtacagtttggactaacatatattacaaattgtcctatgaaatgctggagttgtagatgtatattgaaaaaggatcgtagtcagaatggtttgattaggaagggacctttaaaggtttggttcttactgccctgcgaagaggcactgcccactaggtcagtttgcagctaagccccattaaagataaaagttcttaggtttttttcttaggcagggatttctcatttctcgtaacctgaacttcatcagctcttatagacttttctctatacagtcttgtcacagactt

SEQ ID NO: 39543 - DNA, 600 bp, Chicken  19866894273563_1
ctgtgaaagtgcctgaccactctttaggagaagaaatgtttcctaatatccagcctgaccctcgtctggcataacttgaggctattacctctcatcctatcactacttgtctgaaagtgttgttgctttagaaaccatgagacaactgcgatctctacccagaggagctgtccaacgtgaggcaactaagacacttgggatcccaaggtttccaatgagaaaagccaatgaggttctaaaaactaagctttgaaattttcttacctgcacactgcaaatgctaactccctaggtttgccwctgctacaccctatggtaaatctgagcaggaatatatgagtggcactgctgaaaaggtagcctgtgacaagcaaacacaaccaaagaaaacaatgcccaaggaagactggagatacatctacaggattcctttcrgtattcttgcagtartcttccaccataaaatccaaaacagaatgctttgtaatctgaatcaaggtgctgtgtggtgaaacactaaaaaataacccataaaatggtgctataacactgccaggtggcaatggctatttcacagccccaggatgaaaagccactgag

SEQ ID NO: 39544 - DNA, 600 bp, Chicken  19866894273563_2
catgagacaactgcgatctctacccagaggagctgtccaacgtgaggcaactaagacacttgggatcccaaggtttccaatgagaaaagccaatgaggttctaaaaactaagctttgaaattttcttacctgcacactgcaaatgctaactccctaggtttgccwctgctacaccctatggtaaatctgagcaggaatatatgagtggcactgctgaaaaggtagcctgtgacaagcaaacacaaccaaagaaaacaatgcccaaggaagactggagatacatctacaggattcctttcrgtattcttgcagtartcttccaccataaaatccaaaacagaatgctttgtaatctgaatcaaggtgctgtgtggtgaaacactaaaaaataacccataaaatggtgctataacactgccaggtggcaatggctatttcacagccccaggatgaaaagccactgagcccaatgcttctctccagtagcccatgagagtcaaaaagcccacagcatctgtatgacacagtaacagcatccactgctgtgcttggtctaacagctcacagtatctgcaacagcagaacgagcccagtgggagc

SEQ ID NO: 39545 - DNA, 600 bp, Chicken  19866894273563_3
atctctacccagaggagctgtccaacgtgaggcaactaagacacttgggatcccaaggtttccaatgagaaaagccaatgaggttctaaaaactaagctttgaaattttcttacctgcacactgcaaatgctaactccctaggtttgccwctgctacaccctatggtaaatctgagcaggaatatatgagtggcactgctgaaaaggtagcctgtgacaagcaaacacaaccaaagaaaacaatgcccaaggaagactggagatacatctacaggattcctttcrgtattcttgcagtartcttccaccataaaatccaaaacagaatgctttgtaatctgaatcaaggtgctgtgtggtgaaacactaaaaaataacccataaaatggtgctataacactgccaggtggcaatggctatttcacagccccaggatgaaaagccactgagcccaatgcttctctccagtagcccatgagagtcaaaaagcccacagcatctgtatgacacagtaacagcatccactgctgtgcttggtctaacagctcacagtatctgcaacagcagaacgagcccagtgggagccaagcagaacagaaa

SEQ ID NO: 39546 - DNA, 600 bp, Chicken  19866894273571_1
tttatatcacagaatattttccaaacatgggtaagggcgcaactccccttaaagtactatgaattgattgtggagttggatgtttccttgttagctgtgatattctatccttttacatgggaaaataggtatttaattctaaaaatctccaatgggaaatatgcagcagaagcctgttgttgcatctgtactgccagactctaggagcttcttagtaaagcacaagaattatataccaaaacagggggtttaaaaacaaaatctgcaaggaagattttcttgctttttaaacttctgtgkttaaataaaagttacagcatctgctttctagtctggaaatcttactgcatgtctgtcagtgcagcttgtgaggcaagctgacctaaaaatgaaggatctctctaaattgcagaagcagacagacatttttgaacagttcaaagcgcgggagttgctgcagatatggaaaaagcactgcctagcatactcccaatatagaataaagctagcttagctttatttctgatttggaactctatctgactgcaagctctggcacttgaacaacaacaaaaaaagacaaatgtagggctaagaaag

SEQ ID NO: 39547 - DNA, 600 bp, Chicken  19866894273580_1
aattgctaatttctctctggtgaacaggagtgtcacaatggctattaggcagagggagggagaaaaactgctgagcagcactcggaaagagacaaaagtgcgaaacggtgaccaaggaagaaaaagggagaaaggagctaagcccaattttgccagcactgtgatgggtgatatcacttgtacatgcccacagacctgtgcagcatgggcacagaaaaccagcccagagaaatgactgatgggtgtgagggaccatgcagtatgggaggggaacaggccctcagcccaaccattaatgaygagaaacaactcacacactttgggatcagtaaagttgacactaacagcaagaagcagtgaaaaatttatgggtgcgactggtttatgctacagatgatgcccagcatggcatagatgatgctttcttccagaaaactagaacatgagagagacacccgagccttcagctggacaaagcacagaagaaaacgtaaaatctttgtaaggaaggagagcaccttttaaggatggtcattatatcatggtaagatttgagtaacctgtcccaggagcaaaacagatgcaaatgcaacacagaga

SEQ ID NO: 39548 - DNA, 599 bp, Chicken  19866894273583_1
  misc_feature (1)..(31): n is any nucleotide
nnnnnnnnnnnnnnnnnnnnnnnnnnnnnnngtgctcttaggtactgttttgtaacagctcagattagactgacatctgctttacaggtgagctgccttggcacacctgaagagattaatggagcagtgcagggactcggggtgggaagtgtggttgttctgtctggcacaaatctgaacccacccagtaagatttgctttagtatttagtagactcatcccactttcgctccattccttaaagctatcctatcacattccttctgaggttcctgcagagctaactgcatgaaggggaargtgtttggtgtctgctgtggaggtgctctcagtgctgagcagaagggccttcattcagcccagcgctctgcgtgggtttgcttgggatgtaggatttatttatatggtggggtcgggtgtgtttattttatatcaaacaaacaaaaacacacacaggattgtccagtagtcacstctaagtgagtttggtatgtgctcccaggtaggaggtaggtacaggggaacgtggggagtataggagagttatataccacctctggaaaggtgggcagagcgtgcttgtagggcrcgatggtggg

SEQ ID NO: 39549 - DNA, 600 bp, Chicken  19866894273583_2
ctgaacccacccagtaagatttgctttagtatttagtagactcatcccactttcgctccattccttaaagctatcctatcacattccttctgaggttcctgcagagctaactgcatgaaggggaargtgtttggtgtctgctgtggaggtgctctcagtgctgagcagaagggccttcattcagcccagcgctctgcgtgggtttgcttgggatgtaggatttatttatatggtggggtcgggtgtgtttattttatatcaaacaaacaaaaacacacacaggattgtccagtagtcacstctaagtgagtttggtatgtgctcccaggtaggaggtaggtacaggggaacgtggggagtataggagagttatataccacctctggaaaggtgggcagagcgtgcttgtagggcrcgatggtgggtgctgggacgggctggaatgtgctcagttccatcagagactggaaagctgtagcaggaccttctggtttaggctggagagcaggcagagctctgcrgtcagcctggaggccgaggaggtgaccctttggcttttgcactgtcctgagcccaaggccagggcttatgtggggggat

SEQ ID NO: 39550 - DNA, 490 bp, Chicken  19866894273583_3
tgaaggggaargtgtttggtgtctgctgtggaggtgctctcagtgctgagcagaagggccttcattcagcccagcgctctgcgtgggtttgcttgggatgtaggatttatttatatggtggggtcgggtgtgtttattttatatcaaacaaacaaaaacacacacaggattgtccagtagtcacstctaagtgagtttggtatgtgctcccaggtaggaggtaggtacaggggaacgtggggagtataggagagttatataccacctctggaaaggtgggcagagcgtgcttgtagggcrcgatggtgggtgctgggacgggctggaatgtgctcagttccatcagagactggaaagctgtagcaggaccttctggtttaggctggagagcaggcagagctctgcrgtcagcctggaggccgaggaggtgaccctttggcttttgcactgtcctgagcccaaggccagggcttatgtggggggattggga

SEQ ID NO: 39551 - DNA, 384 bp, Chicken  19866894273583_4
ttatttatatggtggggtcgggtgtgtttattttatatcaaacaaacaaaaacacacacaggattgtccagtagtcacstctaagtgagtttggtatgtgctcccaggtaggaggtaggtacaggggaacgtggggagtataggagagttatataccacctctggaaaggtgggcagagcgtgcttgtagggcrcgatggtgggtgctgggacgggctggaatgtgctcagttccatcagagactggaaagctgtagcaggaccttctggtttaggctggagagcaggcagagctctgcrgtcagcctggaggccgaggaggtgaccctttggcttttgcactgtcctgagcccaaggccagggcttatgtggggggattggga

SEQ ID NO: 39552 - DNA, 600 bp, Chicken  19866894273584_1
gaggagaacacagcctgttatatctctttaacctgattttgtttgctaacagaaaacttttgcctccttttccaagaaaccagctaaaactaatttccatactgaacagggttagcatgttggaaaggactcaagccataccatcagcacagtccctgaaacacagatttaagaagagattacatgaatttcctgcgtggccaatgcaatatctgtgctctacaagctgacaagaagaataattttcactgtcttaatgtagcatgattgctttgtgcttaaacaaattgagtttattakcagttacccaacaccttcactaaaaacagcacagaaataaggctggcatagatgcccactgtttgctraggctgstgtcagtgcatcctggttgcttcactgtgtcctgtgaggtggtgcaatggctgagcacatcttgaaatactcggataaaaatgcaaaaacgtgaagctttgtggggtttttcatcactcactcagtctgcacaactggaatgcacaacacctccacaggagtagtgtcacttattatctgacctcggtaatacctctgattttccttctactacaatatcctggg

SEQ ID NO: 39553 - DNA, 600 bp, Chicken  19866894273584_2
tttccaagaaaccagctaaaactaatttccatactgaacagggttagcatgttggaaaggactcaagccataccatcagcacagtccctgaaacacagatttaagaagagattacatgaatttcctgcgtggccaatgcaatatctgtgctctacaagctgacaagaagaataattttcactgtcttaatgtagcatgattgctttgtgcttaaacaaattgagtttattakcagttacccaacaccttcactaaaaacagcacagaaataaggctggcatagatgcccactgtttgctraggctgstgtcagtgcatcctggttgcttcactgtgtcctgtgaggtggtgcaatggctgagcacatcttgaaatactcggataaaaatgcaaaaacgtgaagctttgtggggtttttcatcactcactcagtctgcacaactggaatgcacaacacctccacaggagtagtgtcacttattatctgacctcggtaatacctctgattttccttctactacaatatcctgggtttygttttattggtatttaccctgagatcatctttgtcaccttgaaaggcagcagataatctcctta

SEQ ID NO: 39554 - DNA, 600 bp, Chicken  19866894273584_3
gaaaccagctaaaactaatttccatactgaacagggttagcatgttggaaaggactcaagccataccatcagcacagtccctgaaacacagatttaagaagagattacatgaatttcctgcgtggccaatgcaatatctgtgctctacaagctgacaagaagaataattttcactgtcttaatgtagcatgattgctttgtgcttaaacaaattgagtttattakcagttacccaacaccttcactaaaaacagcacagaaataaggctggcatagatgcccactgtttgctraggctgstgtcagtgcatcctggttgcttcactgtgtcctgtgaggtggtgcaatggctgagcacatcttgaaatactcggataaaaatgcaaaaacgtgaagctttgtggggtttttcatcactcactcagtctgcacaactggaatgcacaacacctccacaggagtagtgtcacttattatctgacctcggtaatacctctgattttccttctactacaatatcctgggtttygttttattggtatttaccctgagatcatctttgtcaccttgaaaggcagcagataatctccttattcttaa

SEQ ID NO: 39555 - DNA, 600 bp, Chicken  19866894273584_4
tacccaacaccttcactaaaaacagcacagaaataaggctggcatagatgcccactgtttgctraggctgstgtcagtgcatcctggttgcttcactgtgtcctgtgaggtggtgcaatggctgagcacatcttgaaatactcggataaaaatgcaaaaacgtgaagctttgtggggtttttcatcactcactcagtctgcacaactggaatgcacaacacctccacaggagtagtgtcacttattatctgacctcggtaatacctctgattttccttctactacaatatcctgggtttygttttattggtatttaccctgagatcatctttgtcaccttgaaaggcagcagataatctccttattcttaattatccttttaatccttctggtatttgtactgctaaaaccacgctgttctaaaatgtaccaaatacagaggcaggattgtgttacagaccagaagagtttggccaaaaaaaggttgaatggtgtgctgcagtggctgtggtggtgctgcctttaagctgcctttaactactgctcataaagtggccttaaacatggacacctctcatttcagtggcagtggtgatgtga

SEQ ID NO: 39556 - DNA, 407 bp, Chicken  19866894273584_5
ctgagatcatctttgtcaccttgaaaggcagcagataatctccttattcttaattatccttttaatccttctggtatttgtactgctaaaaccacgctgttctaaaatgtaccaaatacagaggcaggattgtgttacagaccagaagagtttggccaaaaaaaggttgaatggtgtgctgcagtggctgtggtggtgctgcctttaagctgcctttaactactgctcataaagtggccttaaacatggacacctctcatttcagtggcagtggtgatgtgagcagcccaggcagcctayraactgtaatgtgaagtagcatcctttgttgaagcactcatagattcagtgggtaatgccactcaaaccatctatctgagcaaccctgccatagcactaacactgat

SEQ ID NO: 39557 - DNA, 406 bp, Chicken  19866894273584_6
tgagatcatctttgtcaccttgaaaggcagcagataatctccttattcttaattatccttttaatccttctggtatttgtactgctaaaaccacgctgttctaaaatgtaccaaatacagaggcaggattgtgttacagaccagaagagtttggccaaaaaaaggttgaatggtgtgctgcagtggctgtggtggtgctgcctttaagctgcctttaactactgctcataaagtggccttaaacatggacacctctcatttcagtggcagtggtgatgtgagcagcccaggcagcctayraactgtaatgtgaagtagcatcctttgttgaagcactcatagattcagtgggtaatgccactcaaaccatctatctgagcaaccctgccatagcactaacactgat

SEQ ID NO: 39558 - DNA, 600 bp, Chicken  19866894273598_1
tttgaatataagtgttttttaagaatgttcatgattaccatactgaacagtgagaggactatcagcataatgtcttctcttacaggaaatagatcttgtctgctaaaccaaagtactgtgggcaatactggttggaatattttcatgttgaatgcactgggaaagattattttaatttttgccatatggaaatcaatggcttgttttaccaacttcaatatgaattaaatcatcttttatgtggaatgaatttccaaatccatctccatagcacaactaaaatgtaggtgcaatgcaagyaatctgattctgatcacttatgccagtctcctatccccaatctatttctctcatacaactctttcaaaggaaaattcattgttcatgtggaacagatgtcagccatgctaaacaaccttcatttccaaaacttacaacacacctgtgtaatattccaaagataaacagaagtgctaaactaacataatcaattctgtggcagtaatagctgctttcttcctggcaattttacaaacacttgagatgactttttttttttaatattagaatactttcaagaagtctgtcacacgttaagct

SEQ ID NO: 39559 - DNA, 599 bp, Chicken  19866894273600_1
  misc_feature (1)..(38): n is any nucleotide
nnnnnnnnnnnnnnnnnnnnnnnnnnnnnnnnnnnnnnttgttccataacttaaaacctagtagatgtcattttcagatgttgagcacagttttcgttttcaggtggctgacaagttaaatcgtgccttcaagggaagacagaaataactattcttgcaatgctgagtccagagatttatgactattttcagaatcccccttctttaggcttctctatgtgtgctcaataaaaatagctgtggatctcttaggctcttgtacattaactcactgagcacagctgaaaggcataattaaawgtccttgtccattggaaagaagaaaaataaaaggttttccaaatgcttatatagcaagaagcagtytttaaagtactctgttactataattgaattcaactagatttgtcattccccaaatatacagaaagcagcatccagaaatagtcrgtgctggctgaaatgtaatgatctcatcaacgttcttatcactacgtacgtagcacaagtgatgaaattcccattgctgtgctgaaatagcttgtactaaagtgacttaagctcatgagattcccgaggtgttaytgcattagccatca

SEQ ID NO: 39560 - DNA, 600 bp, Chicken  19866894273600_2
gtcattttcagatgttgagcacagttttcgttttcaggtggctgacaagttaaatcgtgccttcaagggaagacagaaataactattcttgcaatgctgagtccagagatttatgactattttcagaatcccccttctttaggcttctctatgtgtgctcaataaaaatagctgtggatctcttaggctcttgtacattaactcactgagcacagctgaaaggcataattaaawgtccttgtccattggaaagaagaaaaataaaaggttttccaaatgcttatatagcaagaagcagtytttaaagtactctgttactataattgaattcaactagatttgtcattccccaaatatacagaaagcagcatccagaaatagtcrgtgctggctgaaatgtaatgatctcatcaacgttcttatcactacgtacgtagcacaagtgatgaaattcccattgctgtgctgaaatagcttgtactaaagtgacttaagctcatgagattcccgaggtgttaytgcattagccatcattttctaacccaccacaaactacggagggctgaccttgcagcccatcgtttcacagctgaggacctc

SEQ ID NO: 39561 - DNA, 600 bp, Chicken  19866894273600_3
attcttgcaatgctgagtccagagatttatgactattttcagaatcccccttctttaggcttctctatgtgtgctcaataaaaatagctgtggatctcttaggctcttgtacattaactcactgagcacagctgaaaggcataattaaawgtccttgtccattggaaagaagaaaaataaaaggttttccaaatgcttatatagcaagaagcagtytttaaagtactctgttactataattgaattcaactagatttgtcattccccaaatatacagaaagcagcatccagaaatagtcrgtgctggctgaaatgtaatgatctcatcaacgttcttatcactacgtacgtagcacaagtgatgaaattcccattgctgtgctgaaatagcttgtactaaagtgacttaagctcatgagattcccgaggtgttaytgcattagccatcattttctaacccaccacaaactacggagggctgaccttgcagcccatcgtttcacagctgaggacctccaagggactgtatgttcattcttctccttttaaagattttgcaaagcaatgagttcctttggccatgctgagtttctttggcac

SEQ ID NO: 39562 - DNA, 600 bp, Chicken  19866894273600_4
aaggcataattaaawgtccttgtccattggaaagaagaaaaataaaaggttttccaaatgcttatatagcaagaagcagtytttaaagtactctgttactataattgaattcaactagatttgtcattccccaaatatacagaaagcagcatccagaaatagtcrgtgctggctgaaatgtaatgatctcatcaacgttcttatcactacgtacgtagcacaagtgatgaaattcccattgctgtgctgaaatagcttgtactaaagtgacttaagctcatgagattcccgaggtgttaytgcattagccatcattttctaacccaccacaaactacggagggctgaccttgcagcccatcgtttcacagctgaggacctccaagggactgtatgttcattcttctccttttaaagattttgcaaagcaatgagttcctttggccatgctgagtttctttggcactggtcaggctttagtgattggcttgcttgtttgtttgctttgctttgcttttcctccagaataactctcgtgcatttgttgtgctaagatgcttctctttcacagcaagaagctactacagaagatgctcgaatc

SEQ ID NO: 39563 - DNA, 600 bp, Chicken  19866894273601_1
ggagaggttatatgctttttggctacagttcattttgcaatatattcattttagatgttttagaagaacattacagaaggatattttaagttaatagatatatcagataacaaaaataaaactgctgttagctcatcctaacatatatatagtgcaaagcaagccaaatacatttaaaaggagattaaagctttatctttagaagagaaatgtacagatagttcctcatcttgatgaaagtgaggaattctcagttcagaaagatctttaattagcgaaattgtaccttgcctctcctcktgcattaaaaatccagactccatctataaatctttaamtctattaaaaaaattccaataagcatatatttgctagtcttaaattctacagcagtttttgatatgaggttacagctacaacaaggtatctcctttcagactacctgggaaatatggtaagccaaaaggtcacatttccaacacaccagactttgtaaaaagccagaatttgtaaaagccagtacaattctttgtaaagctagaattgctgtttgaagtgctagtcttaatgtttcttctagttaagaagagatttctacct

SEQ ID NO: 39564 - DNA, 600 bp, Chicken  19866894273601_2
aatatattcattttagatgttttagaagaacattacagaaggatattttaagttaatagatatatcagataacaaaaataaaactgctgttagctcatcctaacatatatatagtgcaaagcaagccaaatacatttaaaaggagattaaagctttatctttagaagagaaatgtacagatagttcctcatcttgatgaaagtgaggaattctcagttcagaaagatctttaattagcgaaattgtaccttgcctctcctcktgcattaaaaatccagactccatctataaatctttaamtctattaaaaaaattccaataagcatatatttgctagtcttaaattctacagcagtttttgatatgaggttacagctacaacaaggtatctcctttcagactacctgggaaatatggtaagccaaaaggtcacatttccaacacaccagactttgtaaaaagccagaatttgtaaaagccagtacaattctttgtaaagctagaattgctgtttgaagtgctagtcttaatgtttcttctagttaagaagagatttctacctcagcttaaggtgcatcttatggtaacatttgttcttct

SEQ ID NO: 39565 - DNA, 599 bp, Chicken  19866894273609_1
  misc_feature (1)..(74): n is any nucleotide
nnnnnnnnnnnnnnnnnnnnnnnnnnnnnnnnnnnnnnnnnnnnnnnnnnnnnnnnnnnnnnnnnnnnnnnnnncttaaaatactgaaagtgttctgcaagggaaacccttcaactagtcctgactcactaactgataagcactctgtttacgttggtgtatctgaatctcaatgcttctgttgtgtttattgaacagagaggtatgctggatatccagatcagttcagcattaactgcatcagatccagaactccattgttctatgagagcttcattatttaaaaatgtctgtgtgggktttttttgttttgttttgtttttttccatgtggatcagacttcttggccgcagtgtgtctcctgcaatgtattatcagcattatcaaagggagaccttaaacatytcattttaaatctgaatgtcttgtgtcaagccaacaaactagcagtgccaaaacccaagaaagtctgkgttggatggatctgaagcaaaattctgagctttggttttccmaatggaatttttttttcctttcagtaacattgaaatttactgttgaaaaagtgaacagtacactgacaaaaatggcttgtgagc

SEQ ID NO: 39566 - DNA, 600 bp, Chicken  19866894273609_2
acccttcaactagtcctgactcactaactgataagcactctgtttacgttggtgtatctgaatctcaatgcttctgttgtgtttattgaacagagaggtatgctggatatccagatcagttcagcattaactgcatcagatccagaactccattgttctatgagagcttcattatttaaaaatgtctgtgtgggktttttttgttttgttttgtttttttccatgtggatcagacttcttggccgcagtgtgtctcctgcaatgtattatcagcattatcaaagggagaccttaaacatytcattttaaatctgaatgtcttgtgtcaagccaacaaactagcagtgccaaaacccaagaaagtctgkgttggatggatctgaagcaaaattctgagctttggttttccmaatggaatttttttttcctttcagtaacattgaaatttactgttgaaaaagtgaacagtacactgacaaaaatggcttgtgagctctcatgtaagtcatgtgtgaactacccaggctctagatttaggctattagacttatttttctctggatattgggtatatatatttatttatatgctcacatataa

SEQ ID NO: 39567 - DNA, 600 bp, Chicken  19866894273609_3
tgcttctgttgtgtttattgaacagagaggtatgctggatatccagatcagttcagcattaactgcatcagatccagaactccattgttctatgagagcttcattatttaaaaatgtctgtgtgggktttttttgttttgttttgtttttttccatgtggatcagacttcttggccgcagtgtgtctcctgcaatgtattatcagcattatcaaagggagaccttaaacatytcattttaaatctgaatgtcttgtgtcaagccaacaaactagcagtgccaaaacccaagaaagtctgkgttggatggatctgaagcaaaattctgagctttggttttccmaatggaatttttttttcctttcagtaacattgaaatttactgttgaaaaagtgaacagtacactgacaaaaatggcttgtgagctctcatgtaagtcatgtgtgaactacccaggctctagatttaggctattagacttatttttctctggatattgggtatatatatttatttatatgctcacatataacatggatatagcagttcttgtcatattttttctacttatctaaggttaaatcacatcagatataaaaa

SEQ ID NO: 39568 - DNA, 600 bp, Chicken  19866894273609_4
ccagatcagttcagcattaactgcatcagatccagaactccattgttctatgagagcttcattatttaaaaatgtctgtgtgggktttttttgttttgttttgtttttttccatgtggatcagacttcttggccgcagtgtgtctcctgcaatgtattatcagcattatcaaagggagaccttaaacatytcattttaaatctgaatgtcttgtgtcaagccaacaaactagcagtgccaaaacccaagaaagtctgkgttggatggatctgaagcaaaattctgagctttggttttccmaatggaatttttttttcctttcagtaacattgaaatttactgttgaaaaagtgaacagtacactgacaaaaatggcttgtgagctctcatgtaagtcatgtgtgaactacccaggctctagatttaggctattagacttatttttctctggatattgggtatatatatttatttatatgctcacatataacatggatatagcagttcttgtcatattttttctacttatctaaggttaaatcacatcagatataaaaattccatgtgtgttcttataagaatatgggagaatagaaccaa

SEQ ID NO: 39569 - DNA, 600 bp, Chicken  19866894273618_1
gcttatatgcccaaagcatacacagctggaaagccctttataagagaaatattttccttattctcacgagagctttgtctcccacaaaaactccttttgtctccatgatcaccattcctttatggagtctgttcagaacacttaaaaataatgatttcccaagaatgttctcagctatgtttactctcaaactggcctgataaccacagtctcattaaaatttgctggtggtttgatcttcttcaataaaagaaggtgcgcttttgacagtctgagcatttcttttcataattagaaaascaattgaaaagtacacaacttcttggttcaaagtatttcaaaactgctgwgagtgggaatacatttgtttcactcttgaagatttgaaagccacagaaaagaaaacattaactgwaagttcaagaaaaaaaatatagataaaatagataaaaacctattcagaacctatttcatctcattataccatatagctctgcaacagatagcagagtcccttttactgcctttcctstgcaaggactctttttgggatttagaaggcaggctggtatattttgaattgctttgagattttttttt

SEQ ID NO: 39570 - DNA, 600 bp, Chicken  19866894273618_2
attttccttattctcacgagagctttgtctcccacaaaaactccttttgtctccatgatcaccattcctttatggagtctgttcagaacacttaaaaataatgatttcccaagaatgttctcagctatgtttactctcaaactggcctgataaccacagtctcattaaaatttgctggtggtttgatcttcttcaataaaagaaggtgcgcttttgacagtctgagcatttcttttcataattagaaaascaattgaaaagtacacaacttcttggttcaaagtatttcaaaactgctgwgagtgggaatacatttgtttcactcttgaagatttgaaagccacagaaaagaaaacattaactgwaagttcaagaaaaaaaatatagataaaatagataaaaacctattcagaacctatttcatctcattataccatatagctctgcaacagatagcagagtcccttttactgcctttcctstgcaaggactctttttgggatttagaaggcaggctggtatattttgaattgctttgagattttttttttgcctgtctctgactctgcaaactccttgtgaagattattaggtcatttt

SEQ ID NO: 39571 - DNA, 600 bp, Chicken  19866894273618_3
tcctttatggagtctgttcagaacacttaaaaataatgatttcccaagaatgttctcagctatgtttactctcaaactggcctgataaccacagtctcattaaaatttgctggtggtttgatcttcttcaataaaagaaggtgcgcttttgacagtctgagcatttcttttcataattagaaaascaattgaaaagtacacaacttcttggttcaaagtatttcaaaactgctgwgagtgggaatacatttgtttcactcttgaagatttgaaagccacagaaaagaaaacattaactgwaagttcaagaaaaaaaatatagataaaatagataaaaacctattcagaacctatttcatctcattataccatatagctctgcaacagatagcagagtcccttttactgcctttcctstgcaaggactctttttgggatttagaaggcaggctggtatattttgaattgctttgagattttttttttgcctgtctctgactctgcaaactccttgtgaagattattaggtcattttcctgtaagaaaactgaaattacacaactcattcaaacactgcaatccacttgcccaagctacctg

SEQ ID NO: 39572 - DNA, 600 bp, Chicken  19866894273618_4
ttgatcttcttcaataaaagaaggtgcgcttttgacagtctgagcatttcttttcataattagaaaascaattgaaaagtacacaacttcttggttcaaagtatttcaaaactgctgwgagtgggaatacatttgtttcactcttgaagatttgaaagccacagaaaagaaaacattaactgwaagttcaagaaaaaaaatatagataaaatagataaaaacctattcagaacctatttcatctcattataccatatagctctgcaacagatagcagagtcccttttactgcctttcctstgcaaggactctttttgggatttagaaggcaggctggtatattttgaattgctttgagattttttttttgcctgtctctgactctgcaaactccttgtgaagattattaggtcattttcctgtaagaaaactgaaattacacaactcattcaaacactgcaatccacttgcccaagctacctgccttgctgtcagggattcatgctgcagcaaggatggctggactggaatcagctgtgagcttacactgaacaacaacggcagtccagagagtattcaagctgatgcccatgttgactt

SEQ ID NO: 39573 - DNA, 599 bp, Chicken  19866894273629_1
  misc_feature (1)..(125): n is any nucleotide
nnnnnnnnnnnnnnnnnnnnnnnnnnnnnnnnnnnnnnnnnnnnnnnnnnnnnnnnnnnnnnnnnnnnnnnnnnnnnnnnnnnnnnnnnnnnnnnnnnnnnnnnnnnnnnnnnnnnnnnnnnnnnagatagtatagcatctcagcaaagagttctccaagaagagacacaaaaattcaatttattttcatcaaaaatgctgaattttcctctgaggaggcaccgaaatctgactcattaggagtcgcctatgcaactgtttcaatattttttctcctgctggagcacatgcacacagcayaactcttctaagagaagtcaatatatggagtaaacttcaaacgcccgcttctccctcttcagtgttgaatagtactttgctcattaaaaagtgcttttgaaacccaagggaaatgtctgcctgatggaagctactctatattgcagcctccaatcgctgttaagaggaggcagcaccatttccaggtagcaccattaatgtaactacaactgcaaaagccatatttgctaagaaatcagtttcaaaatactggctctgtgcttctacttatcagctgaagagacacatgttctaaacta

SEQ ID NO: 39574 - DNA, 503 bp, Chicken  19866894273635_1
tacaacaggtgatttgctttgctggggcattaacaagttcaggcaagcctgggctgtgctctctctccaggatatattaattagtgtacaaagagtgttagtgcactacagataccaggtagcacaaggctaacccttgccattgcagacgatcagctttgaagacagtgagattttggctgtaagtgttgatggtcagcaaggtgtgcagggagcggggccatctgttctgcatctatcttgatacactctatttatgtgtgagatatccaggtgatcctatcagacaacttttagcaygtttcacatgttaacaatattgtctgcataaaatacacaacctgatacctacctctgcgggatcgttgtgtgcagttcagttcagctttcacaggcattattgccctcgcttccttcttggtgctttgccagagttttcccttccctcccctgtactttctgccattcaagatgacacgttacgactcagtgaggcagcagct

SEQ ID NO: 39575 - DNA, 600 bp, Chicken  19866894273639_1
gggctcaactgtaaatctagaaacatctagcttatttgtgcaaaatgaaaactcctaagggaatccatgtctgagtaatgcagcgctagtttcgatctgctggagaagctttttcagttcaccaacctgtcataagaaggttgatatgctaaggtctccttcatgacaatatttataagccattaaaggttttatctgagattgttagtgctctcttaaaacacctgcttttctctccctctctcatttctacctgttcacagatatctccctctgcaccacttctgaaaatgaaaggtrcycaaaacctaataatgaaattaaggcagttataatctcttacttacatcaaagattctgtaatttttcaggtaaacagaaaaatggagactagtactcttcctttttgaaagatgaacattctggtaatttaaggttattttccttaaagcaaatgccaatgtataggacataaaaatggtttacaaggatcaggcaccactctgtctttgataaggaggaggagaatcagtaggatcaggtcatagatttagggaaatgctggataccagcttctcagagagatagtcacaataaaat

SEQ ID NO: 39576 - DNA, 600 bp, Chicken  19866894273639_2
gctcaactgtaaatctagaaacatctagcttatttgtgcaaaatgaaaactcctaagggaatccatgtctgagtaatgcagcgctagtttcgatctgctggagaagctttttcagttcaccaacctgtcataagaaggttgatatgctaaggtctccttcatgacaatatttataagccattaaaggttttatctgagattgttagtgctctcttaaaacacctgcttttctctccctctctcatttctacctgttcacagatatctccctctgcaccacttctgaaaatgaaaggtrcycaaaacctaataatgaaattaaggcagttataatctcttacttacatcaaagattctgtaatttttcaggtaaacagaaaaatggagactagtactcttcctttttgaaagatgaacattctggtaatttaaggttattttccttaaagcaaatgccaatgtataggacataaaaatggtttacaaggatcaggcaccactctgtctttgataaggaggaggagaatcagtaggatcaggtcatagatttagggaaatgctggataccagcttctcagagagatagtcacaataaaatag

SEQ ID NO: 39577 - DNA, 600 bp, Chicken  19866894273640_1
acctgctgaagtgcatgtggaaatggagaagttttttattacctttcaaaattgttgtgtgtcttctagcatacaaagaagggctgccttagcccaaatatctttgtacatgcagactgttttttgtttttatggttcatttgttttaagaacaatgtagagcatagaatttcagaactcatgaacgtcagttacctttttaatagtactgatttctaaatggaagaaaaacttggatatcttcctttagcagtattcttggactgattttttcaaagacaaggtttaagcttttctttraatggaattctcttcccatcacctttccttaaacacctggaggtgtctaagaggcatgtggatgtggtgctcagggacatggtttagtgataggacttaataggtgaggttgatagctgggstagatgaacttaatggtcttttccaacctagattatcctattatcgtatgaatattattctgttccttattgatatatagtggctaggcaacctaagcaaacaggtggcttttgtgactccawataagagtgttggatcaaatagtaagtgctgcatcaaggtaaaggtccatctttt

SEQ ID NO: 39578 - DNA, 600 bp, Chicken  19866894273640_2
tttgtttttatggttcatttgttttaagaacaatgtagagcatagaatttcagaactcatgaacgtcagttacctttttaatagtactgatttctaaatggaagaaaaacttggatatcttcctttagcagtattcttggactgattttttcaaagacaaggtttaagcttttctttraatggaattctcttcccatcacctttccttaaacacctggaggtgtctaagaggcatgtggatgtggtgctcagggacatggtttagtgataggacttaataggtgaggttgatagctgggstagatgaacttaatggtcttttccaacctagattatcctattatcgtatgaatattattctgttccttattgatatatagtggctaggcaacctaagcaaacaggtggcttttgtgactccawataagagtgttggatcaaatagtaagtgctgcatcaaggtaaaggtccatcttttttagcatcatgtgccttggagcagtacacagcagtgattcaaatgagtgtaacaaggcaaacagctggtgacacatttctgaacactcctttagtatccagtgatctgtgaaccagcatttc

SEQ ID NO: 39579 - DNA, 509 bp, Chicken  19866894273640_3
tttagcagtattcttggactgattttttcaaagacaaggtttaagcttttctttraatggaattctcttcccatcacctttccttaaacacctggaggtgtctaagaggcatgtggatgtggtgctcagggacatggtttagtgataggacttaataggtgaggttgatagctgggstagatgaacttaatggtcttttccaacctagattatcctattatcgtatgaatattattctgttccttattgatatatagtggctaggcaacctaagcaaacaggtggcttttgtgactccawataagagtgttggatcaaatagtaagtgctgcatcaaggtaaaggtccatcttttttagcatcatgtgccttggagcagtacacagcagtgattcaaatgagtgtaacaaggcaaacagctggtgacacatttctgaacactcctttagtatccagtgatctgtgaaccagcatttccttcagcaaatttattatgttgtagttgtttg

SEQ ID NO: 39580 - DNA, 599 bp, Chicken  19866894273643_1
  misc_feature (1)..(48): n is any nucleotide
nnnnnnnnnnnnnnnnnnnnnnnnnnnnnnnnnnnnnnnnnnnnnnnngcaataaaatgtaatggatattggtggtaaggttcaatatctactgccataccaccaccatctgcctcagatgccgtggatcaacataataaaataggaggcattacttttggatcagcccttgcagataaaccaatccacagcacaggaaaaaagcaaagaaatttataacttctattaaaattgttggccaaggaactgaaaaatccatatgtctatatttcccttcctacttttactgtccttttcatrtatctttttaattatttttatgatccgaattaggacgtctgagttcaatttgggatgctgaaatgtatttcaatacagggttaatgagtattatgactttatttcagatcactgaatcttccttgtgataacctggactagatgcaattacaggatttgtrgagtcacacaactgtgaaggtatctgtgcttctttctattctcctgagcaagacatgaagttcatagagatgctagatatgcatgaaacagcatctgacaaattcagctgaaaagtgacctgcagttttccatttctg

SEQ ID NO: 39581 - DNA, 600 bp, Chicken  19866894273643_2
atcagcccttgcagataaaccaatccacagcacaggaaaaaagcaaagaaatttataacttctattaaaattgttggccaaggaactgaaaaatccatatgtctatatttcccttcctacttttactgtccttttcatrtatctttttaattatttttatgatccgaattaggacgtctgagttcaatttgggatgctgaaatgtatttcaatacagggttaatgagtattatgactttatttcagatcactgaatcttccttgtgataacctggactagatgcaattacaggatttgtrgagtcacacaactgtgaaggtatctgtgcttctttctattctcctgagcaagacatgaagttcatagagatgctagatatgcatgaaacagcatctgacaaattcagctgaaaagtgacctgcagttttccatttctgtaaaatcttttcwagttttgtgacactgcaagagaaataactagacaatcactcaactttcagagagttagccatatgtggtagttgaatatactacaaggtaaatgctataggttttttgtgagacgcgttcccaaaatacacttactgagaactttttat

SEQ ID NO: 39582 - DNA, 460 bp, Chicken  19866894273643_3
tatttttatgatccgaattaggacgtctgagttcaatttgggatgctgaaatgtatttcaatacagggttaatgagtattatgactttatttcagatcactgaatcttccttgtgataacctggactagatgcaattacaggatttgtrgagtcacacaactgtgaaggtatctgtgcttctttctattctcctgagcaagacatgaagttcatagagatgctagatatgcatgaaacagcatctgacaaattcagctgaaaagtgacctgcagttttccatttctgtaaaatcttttcwagttttgtgacactgcaagagaaataactagacaatcactcaactttcagagagttagccatatgtggtagttgaatatactacaaggtaaatgctataggttttttgtgagacgcgttcccaaaatacacttactgagaactttttatcttttggagcg

SEQ ID NO: 39583 - DNA, 600 bp, Chicken  19866894273644_1
aatgaagacaaaccataaatagagcaatgtttttagagaagcaaggctgcttagaataaatcatttatagatataatacgcatttttaaaaagagtggactttgcattttaactcctcgcaattgtagtaccacttttactacgtatcttcttgtgttaatatatgggctagctcagtagattttagacccagagtagcatttaatgattaaaatcgacaattttagatgcttttgtctatgcccaaagtccctgtgcacctaaggaggagctgtgcatctacaggcaaactgcacagtratggcacataaggccaggcacagcctcacacataaggcccaggctgcttctatcagtggtttccctgttgacattcatgtggttacagtatgtatatataagaactttcccagtaccatgcaggatgtgatctttctaggaactggcctgttggagagttgyttccttcaacagagccttaaggtatggcctttgacttatcgccacatgcagctcttgagcctatgttgtgttttgctacatgaaagaataaagtctctttggttattgcttagttccttgtactccagagaaggaagt

SEQ ID NO: 39584 - DNA, 600 bp, Chicken  19866894273644_2
tatgggctagctcagtagattttagacccagagtagcatttaatgattaaaatcgacaattttagatgcttttgtctatgcccaaagtccctgtgcacctaaggaggagctgtgcatctacaggcaaactgcacagtratggcacataaggccaggcacagcctcacacataaggcccaggctgcttctatcagtggtttccctgttgacattcatgtggttacagtatgtatatataagaactttcccagtaccatgcaggatgtgatctttctaggaactggcctgttggagagttgyttccttcaacagagccttaaggtatggcctttgacttatcgccacatgcagctcttgagcctatgttgtgttttgctacatgaaagaataaagtctctttggttattgcttagttccttgtactccagagaaggaagtgagagaggcaagtacaggaaccagagttaaaatgagagagacaagggaagcagatctagaagccatggagaaataccatggtatatgtatatgaggaatgagcagagagcagaacgtgtgcgagttaatgtccatttcctatcatgcacaggacagcttcct

SEQ ID NO: 39585 - DNA, 599 bp, Chicken  19866894273654_1
  misc_feature (1)..(10): n is any nucleotide
nnnnnnnnnnccacaagaaatggaaagctatgttttagaagctctggagcatcagttgatatacctgagagggacaaggtgtacaggtatgattatagctgccaggaacagccagagacagccacataatttagaagagtgtcagggctgctctaaaacatgcaggtgttcatgacccccaccgatctctccattagccaaggatcattgcagcgattagcctctgctgccgtattccctcttcggaatgaaccaggatgaatttcaattactgctccactcccttcttttccctctttrtggcttctttcaagaaatatctcctatcatggttcaaaatattccagtcaagtttcattaggaaaactttcatttgcttatctcctttcttcttgtgtcaggaatgtttgtgttgccacctcttgagcattttctttctaatgatagatggtgtcactggatcctaaatactcctcagcttcaacttaattgatcagacttggcacttttcctagaatgaggatctgaatagcctcagactatacatgcttggctgttcagcaagccacgtgagatggcaatcttgcattacttctgga

SEQ ID NO: 39586 - DNA, 600 bp, Chicken  19866894273654_2
cttatctcctttcttcttgtgtcaggaatgtttgtgttgccacctcttgagcattttctttctaatgatagatggtgtcactggatcctaaatactcctcagcttcaacttaattgatcagacttggcacttttcctagaatgaggatctgaatagcctcagactatacatgcttggctgttcagcaagccacgtgagatggcaatcttgcattacttctggaaacccattcctctgcttcacttctgcattgtggctgtcccaatcaatagctgagtaattaaaatccctcatgatcartgttccagctgttttacagatttctcttatctgttaaaagatttgccaacctactttctcagcctgccctgggggtctgtagcaacaytcaggaacaacatgatggcactcattggccttcctcagctttggcccagacggcctctgctctaaaaggcaaaacattcatagtgtttcctgcttgagatayggatatatactgccgtctctgtaccagctgaagaacacagcctgtttcctttaataaactttgcatctccataccccattttcaatcccttttagctcacacattccagg

SEQ ID NO: 39587 - DNA, 600 bp, Chicken  19866894273654_3
taaatactcctcagcttcaacttaattgatcagacttggcacttttcctagaatgaggatctgaatagcctcagactatacatgcttggctgttcagcaagccacgtgagatggcaatcttgcattacttctggaaacccattcctctgcttcacttctgcattgtggctgtcccaatcaatagctgagtaattaaaatccctcatgatcartgttccagctgttttacagatttctcttatctgttaaaagatttgccaacctactttctcagcctgccctgggggtctgtagcaacaytcaggaacaacatgatggcactcattggccttcctcagctttggcccagacggcctctgctctaaaaggcaaaacattcatagtgtttcctgcttgagatayggatatatactgccgtctctgtaccagctgaagaacacagcctgtttcctttaataaactttgcatctccataccccattttcaatcccttttagctcacacattccaggaatatcacacttagccttgaaaatgcatatttccaattggtgaccttattaatatgctcacagcatttgtatagtagatattttctcc

SEQ ID NO: 39588 - DNA, 600 bp, Chicken  19866894273654_4
cacgtgagatggcaatcttgcattacttctggaaacccattcctctgcttcacttctgcattgtggctgtcccaatcaatagctgagtaattaaaatccctcatgatcartgttccagctgttttacagatttctcttatctgttaaaagatttgccaacctactttctcagcctgccctgggggtctgtagcaacaytcaggaacaacatgatggcactcattggccttcctcagctttggcccagacggcctctgctctaaaaggcaaaacattcatagtgtttcctgcttgagatayggatatatactgccgtctctgtaccagctgaagaacacagcctgtttcctttaataaactttgcatctccataccccattttcaatcccttttagctcacacattccaggaatatcacacttagccttgaaaatgcatatttccaattggtgaccttattaatatgctcacagcatttgtatagtagatattttctcctcccacctttgctttacattctcattatctcctgcaatgacaaccagtggatacattgctgtgagatccrtgcattccctcctttaaattcttctcctccca

SEQ ID NO: 39589 - DNA, 600 bp, Chicken  19866894273654_5
aaaacattcatagtgtttcctgcttgagatayggatatatactgccgtctctgtaccagctgaagaacacagcctgtttcctttaataaactttgcatctccataccccattttcaatcccttttagctcacacattccaggaatatcacacttagccttgaaaatgcatatttccaattggtgaccttattaatatgctcacagcatttgtatagtagatattttctcctcccacctttgctttacattctcattatctcctgcaatgacaaccagtggatacattgctgtgagatccrtgcattccctcctttaaattcttctcctcccacaccactaatctaaaaaaattgctagatcatttccttattagtggacaatctgtttgctcccatagggctgggaataaatatggcccatctctcctttgctattttgctttttctgtgttattgtttataattccccaaacctctcgcatctccccccacctcagaactattaatttatctgcagtaaaatgaatcacttacatactagaaaacaccattatgctgcttttttgttccactggctagctgaggagcgtaaggctttct

SEQ ID NO: 39590 - DNA, 600 bp, Chicken  19866894273656_1
atgtcttatgtaggatctctaatctggctgcttcctcttcaagttcctgcagttaagtattacatcacagtaatacactgcaagtcaaaagggctggaaattataaattgcaagtttggatgattcatactctctgtcagaatctaatattttgaggttgaaaatatcctgttgcaactggacatataaaaacctctgggctaaatgctgatcacaccaatatcagtgctgaaacctgtagatttaactggaaacaaggtggcacagctgtgtgaaaaataatgcatgtggctacatggmaaggttttggtgtgagcggcaatgaatgttaggtaggctaaacagatgactttcaaggacacagttgtgtacaaatgttccccttacaaaatgtgagtcttcctatcttttcagagtagcttgcattcgtaagatatagagcataatgaataagcttgatatctgatagtgtttggcatctttcctactgttcaactcaatgtacagatgttctgaccaaattagttttgaattaaccagaccatttactcagtgcttactttctcctggaagattaatgggagtgattctaattttaat

SEQ ID NO: 39591 - DNA, 523 bp, Chicken  19866894273656_2
tcgtaagatatagagcataatgaataagcttgatatctgatagtgtttggcatctttcctactgttcaactcaatgtacagatgttctgaccaaattagttttgaattaaccagaccatttactcagtgcttactttctcctggaagattaatgggagtgattctaattttaattataataaaacacagaaaataaaaaataattaatattttatgttttttccttcatttatcctagtgatgtaaaggttccagagaaacttagacttaaaactgcaaaacagcataaaaggcaggaamacagttgggttttaacaactggattttttcaggtactattgaaaaatatggcagtgtatggtttgtttgtttgtttgtttgctttttaagacataattattctaaacaattaattaagcaaagataggacgcagtagattgctttgcacaataaataaaatctgttgataaaacatctccaagacaaaaattaaaaaagatcagctgacacttatacatagaa

SEQ ID NO: 39592 - DNA, 600 bp, Chicken  19866894273660_1
ttcatcacaggcaaaaatgcatagctgatagtgctgactatgttgaaaaatagcatttttgtacctgagaattttctctaccaaatagtattattgtgctctttgtactgtgtaaataagtaggaggcattacttttggagtgacctacatagaaatgacacctcggcccagataaaggctgcattgttcccacggtgtgctttgggatcaggaaaggtgctgctttgctgcccagaatggctcgtgggtacacgttatgaaaccagatcgtgggtctgagctgcatcatttccagtttrccgatctctctgctgctctcaagatattccctatggtttattgggagctatgactaatagaggaattgacagattgttgaaatattaatttgacttggggagaaaagcgaagcggctttcctgtttatgctcgttattggtgttccctgtgcagttgcatagtttctgtagtttgtcagaagactgtgctgaagagcagcttaaaaaaaaaaaaacaacactggggagaagttgtcatttttactatctgtttcccttataacagaacttaacagtttgtagcaatgccataatgtttat

SEQ ID NO: 39593 - DNA, 599 bp, Chicken  19866894273666_1
  misc_feature (1)..(123): n is any nucleotide
nnnnnnnnnnnnnnnnnnnnnnnnnnnnnnnnnnnnnnnnnnnnnnnnnnnnnnnnnnnnnnnnnnnnnnnnnnnnnnnnnnnnnnnnnnnnnnnnnnnnnnnnnnnnnnnnnnnnnnnnnnnatggaaaagcgctttgaatgatgcttagatgcttccatgctgttgcccacgtgtttgatggcaccctgtacagcctatggagcactgatataattcattgggaagtccataatttcagttcagaaaaccatagatgttgccataaaacacgacagcagcgcatgtgttttgtttacrgcttttctgtctagccattacacatcgttcagacagacaatgctgctgaagtgtgaagtaattgagagctgtgcagggtgagttatatcagctaagctcgaggccagcagcatctgtcacaagatctggcaacaagtcagtcacatcccatggctgtgcratggatcccagcatggtgatcactgatcctttcccartcatcaggcttcttgcctttctctagaggagagcgtgtggctctcaggatgctacctgctgtggccasataggtttccaagggacaccagccagatgggtaa

SEQ ID NO: 39594 - DNA, 600 bp, Chicken  19866894273666_2
tgctgttgcccacgtgtttgatggcaccctgtacagcctatggagcactgatataattcattgggaagtccataatttcagttcagaaaaccatagatgttgccataaaacacgacagcagcgcatgtgttttgtttacrgcttttctgtctagccattacacatcgttcagacagacaatgctgctgaagtgtgaagtaattgagagctgtgcagggtgagttatatcagctaagctcgaggccagcagcatctgtcacaagatctggcaacaagtcagtcacatcccatggctgtgcratggatcccagcatggtgatcactgatcctttcccartcatcaggcttcttgcctttctctagaggagagcgtgtggctctcaggatgctacctgctgtggccasataggtttccaagggacaccagccagatgggtaagtcaaactcgtcctgtcatactttaaaaaatagcctgatgaaatgcctgcccacccagctaggagcggtgagagtccctcccaggtcaggatgctgatctggttgaaacctaagaactatcctcccatctcctccagttaataaagatgtggacaatggtg

SEQ ID NO: 39595 - DNA, 600 bp, Chicken  19866894273666_3
ctatggagcactgatataattcattgggaagtccataatttcagttcagaaaaccatagatgttgccataaaacacgacagcagcgcatgtgttttgtttacrgcttttctgtctagccattacacatcgttcagacagacaatgctgctgaagtgtgaagtaattgagagctgtgcagggtgagttatatcagctaagctcgaggccagcagcatctgtcacaagatctggcaacaagtcagtcacatcccatggctgtgcratggatcccagcatggtgatcactgatcctttcccartcatcaggcttcttgcctttctctagaggagagcgtgtggctctcaggatgctacctgctgtggccasataggtttccaagggacaccagccagatgggtaagtcaaactcgtcctgtcatactttaaaaaatagcctgatgaaatgcctgcccacccagctaggagcggtgagagtccctcccaggtcaggatgctgatctggttgaaacctaagaactatcctcccatctcctccagttaataaagatgtggacaatggtgcaactgcactttctctgggagtcagaaggacataaat

SEQ ID NO: 39596 - DNA, 600 bp, Chicken  19866894273666_4
taaaacacgacagcagcgcatgtgttttgtttacrgcttttctgtctagccattacacatcgttcagacagacaatgctgctgaagtgtgaagtaattgagagctgtgcagggtgagttatatcagctaagctcgaggccagcagcatctgtcacaagatctggcaacaagtcagtcacatcccatggctgtgcratggatcccagcatggtgatcactgatcctttcccartcatcaggcttcttgcctttctctagaggagagcgtgtggctctcaggatgctacctgctgtggccasataggtttccaagggacaccagccagatgggtaagtcaaactcgtcctgtcatactttaaaaaatagcctgatgaaatgcctgcccacccagctaggagcggtgagagtccctcccaggtcaggatgctgatctggttgaaacctaagaactatcctcccatctcctccagttaataaagatgtggacaatggtgcaactgcactttctctgggagtcagaaggacataaattctttgtggcaaaggacactgactgtgcagatgcaggagtcacctcccacatcccacacacagggttt

SEQ ID NO: 39597 - DNA, 599 bp, Chicken  19866894273668_1
  misc_feature (1)..(23): n is any nucleotide
nnnnnnnnnnnnnnnnnnnnnnntttccaatgttgtatccaatagttaatgcactgcaaataaaatactaattctaaagcagcttgcaggtacttttaaggagacagtttgtagcataacagctggatgctttacattcaaggctctgttaaactcataaggatctaaatcaaacaattcagcatccaaaactcctgagccctctgaaccaattgtaatctgccttgcacatggttccatgacacggtaagaacctcaatatctctcccactgctttacgagaaggctagccatcctctygtctctactacagcaacacttaytgtttaagtggtttcccaaagactagaaactatcattcagttccacccaatccaatacaaaacactagtaagtcatccttattgccagactacttctcaaatacatgtcccttacaaagaaaacttctggtaaagtttctgatatctgtcaacaccaatagcacgaaaggcttccaatgcctagttctgtgacaaatcatcacataattcaaatatagaatagctgtacaaagttgatatcaacaccagaagtccatgaagtagcctagagaatct

SEQ ID NO: 39598 - DNA, 600 bp, Chicken  19866894273668_2
tttccaatgttgtatccaatagttaatgcactgcaaataaaatactaattctaaagcagcttgcaggtacttttaaggagacagtttgtagcataacagctggatgctttacattcaaggctctgttaaactcataaggatctaaatcaaacaattcagcatccaaaactcctgagccctctgaaccaattgtaatctgccttgcacatggttccatgacacggtaagaacctcaatatctctcccactgctttacgagaaggctagccatcctctygtctctactacagcaacacttaytgtttaagtggtttcccaaagactagaaactatcattcagttccacccaatccaatacaaaacactagtaagtcatccttattgccagactacttctcaaatacatgtcccttacaaagaaaacttctggtaaagtttctgatatctgtcaacaccaatagcacgaaaggcttccaatgcctagttctgtgacaaatcatcacataattcaaatatagaatagctgtacaaagttgatatcaacaccagaagtccatgaagtagcctagagaatctttttatgtgcagaagcattgagca

SEQ ID NO: 39599 - DNA, 600 bp, Chicken  19866894273672_1
ctgcattgctctgcgagacgctgaaaagcaaaatgtgctcctcatttcttcctcggtagaagcacactccaaagatttgccttgactttgcagaactactgcaattagttataaatgattaagtgaaagactcaggctcagtccaagtcccagaggaggcagacactgacttcactcgtcgctccattaattgaggtccttctcagcccagagccaactccgtgtgcagctagtaaaacgtctgattcctttcctttttccagccatgctttaaaaacacgcaataaaagttagcatcaygctgcagaaatacgcctcgaaagcctggctgatgctttcatccttaggctgaaacacgtacctcgggcagcccttcacgtacacttatttacacgaaatagaaactttccacgtccaccttgtaaagcaggctgggttctcatcttgcttctagggaggaaagaaaaggagcagtaggagatggttcatttaatcttcaggagagtgagraaaggcgaaggaaaggattcatgccattctgtaggaggcttcaaatgcttactcatgttgcagggctcaaaaaccaagcgctcattcgca

SEQ ID NO: 39600 - DNA, 600 bp, Chicken  19866894273672_2
gagccaactccgtgtgcagctagtaaaacgtctgattcctttcctttttccagccatgctttaaaaacacgcaataaaagttagcatcaygctgcagaaatacgcctcgaaagcctggctgatgctttcatccttaggctgaaacacgtacctcgggcagcccttcacgtacacttatttacacgaaatagaaactttccacgtccaccttgtaaagcaggctgggttctcatcttgcttctagggaggaaagaaaaggagcagtaggagatggttcatttaatcttcaggagagtgagraaaggcgaaggaaaggattcatgccattctgtaggaggcttcaaatgcttactcatgttgcagggctcaaaaaccaagcgctcattcgcaagacccaggctggaaatggtagttttgatcttcctcagctcagattcaaaccattcctacttgtgagtgttccttgccagcaaagtgaggaattcaccattcagggtaaaacagtataatcacagagtcattacagtcgaaaaagacctccaagatcatccagtccaaccatcaacccatccccaccactgccaactaaaccatgtccct

SEQ ID NO: 39601 - DNA, 600 bp, Chicken  19866894273673_1
tctaattacatcttaaccattaatagcctgagcgactggaggatcacacacactaatgtcacagttcacttggagcaatttgttttgtaagataatgaactgtgtcagcaaaagttgaaaactcgttctaggtggagctgatagtactgcttcatgttaactgtgctcagtgcttcccttggaaatgccttcagcctttggcctgatttctctgctagatgtggtaacctgggatgagactgtccatgcaaggggacctcattgtctatgcatggggctgctggggagggcaaaggaggyaaaaggaagcaaagctgggtctgtgtgcaaggagaacgggaggaggcagagcagtcctggagggggaatggagtgggaagaggggagagaagaggaggaggctggtggtgccgggtttgtggatgagcagtgcctcccagatcccagactgtcatgtcattctggagcaaactgtccatacagacaggtgatgaccaacaagaaaaagggatcatccttttaattgaggacacattcacaaggaactctgtaaatgtgaataaataggtaaacwgatgatgaatgcagtgtgttcagcag

SEQ ID NO: 39602 - DNA, 600 bp, Chicken  19866894273673_2
gggctgctggggagggcaaaggaggyaaaaggaagcaaagctgggtctgtgtgcaaggagaacgggaggaggcagagcagtcctggagggggaatggagtgggaagaggggagagaagaggaggaggctggtggtgccgggtttgtggatgagcagtgcctcccagatcccagactgtcatgtcattctggagcaaactgtccatacagacaggtgatgaccaacaagaaaaagggatcatccttttaattgaggacacattcacaaggaactctgtaaatgtgaataaataggtaaacwgatgatgaatgcagtgtgttcagcaggtcaagacattgcttttacctgcacraagggccttccctgctgtggccgctcagcatttagggttttctttcatctttgtgatcagttgggattcttgggactggagaaccatctgtgaccaggtctgcttcaggagtccggagttgtttaccctaaggaagaggtcacgcgagtccagcacagacacaacagctttgttctgcagggcgctttgcttctatgccctctttcataccgagctatcccatggcattccacaacaacaacaggatg

SEQ ID NO: 39603 - DNA, 600 bp, Chicken  19866894273673_3
gcaaggagaacgggaggaggcagagcagtcctggagggggaatggagtgggaagaggggagagaagaggaggaggctggtggtgccgggtttgtggatgagcagtgcctcccagatcccagactgtcatgtcattctggagcaaactgtccatacagacaggtgatgaccaacaagaaaaagggatcatccttttaattgaggacacattcacaaggaactctgtaaatgtgaataaataggtaaacwgatgatgaatgcagtgtgttcagcaggtcaagacattgcttttacctgcacraagggccttccctgctgtggccgctcagcatttagggttttctttcatctttgtgatcagttgggattcttgggactggagaaccatctgtgaccaggtctgcttcaggagtccggagttgtttaccctaaggaagaggtcacgcgagtccagcacagacacaacagctttgttctgcagggcgctttgcttctatgccctctttcataccgagctatcccatggcattccacaacaacaacaggatgcagcagagctggaaaagttagctgtcttttgatttgtgttatatttttagga

SEQ ID NO: 39604 - DNA, 600 bp, Chicken  19866894273673_4
tgcttcaggagtccggagttgtttaccctaaggaagaggtcacgcgagtccagcacagacacaacagctttgttctgcagggcgctttgcttctatgccctctttcataccgagctatcccatggcattccacaacaacaacaggatgcagcagagctggaaaagttagctgtcttttgatttgtgttatatttttaggagttaaggttgatgacacttcacacagagcagggtagcacgttggtagccgtgtgcccatctcctgccatcgacgtgcacaggtcagccacggagccaagygttcagactgtagtgcttgtaaagcccgtatgtgggagtcgggcagttctcgcagacctgtgtttatatgaggatgcctgttttatgtctttgtgctgagcttctgctaagtcctatcttgggactttctttggcttttgattccgtgcaatgcgcagagatgttccgctttgcacccctctgagtacatctgtagaaacgaattgaagctgttctggtctttccttacctccttcctctccaaacactgctgctcactctgtgctcagcacccatctgcaggcctccacaccctatgag

SEQ ID NO: 39605 - DNA, 599 bp, Chicken  19866894273674_1
  misc_feature (1)..(50): n is any nucleotide
nnnnnnnnnnnnnnnnnnnnnnnnnnnnnnnnnnnnnnnnnnnnnnnnnnctctcaccctgacatccattgaaattcttgaatcagcattagatttggagaaacaaaggctgctggcagtataaattccctatctttttacatccacccatctatctgtcagcctgcttatctaagcagcaccacatcacccccacactatctatgctgtgtaaaaatcccctagttgtatctagaaaaaaaagcatattactttcaggcagtttagaatcaaggctcccaaaagagtaattacatttcytgtctctcagtgacgcctggtgatatgggtctacctccagcagtccgatctagcttgactaggtttaygagtagagatagaagtatagatacagttatagtgagacatcgcttttgaagagctcccattagggtgaatatatccttctctcctttttttttttttttctttttttttctttttttttctttttcttgacaaaagggttgtacagaaattaagtctgaaacagtcttgatgaaagcagtgctttctgtttgtaagtaatttaataactaactacacagarctcttgacag

SEQ ID NO: 39606 - DNA, 600 bp, Chicken  19866894273674_2
ttgaaattcttgaatcagcattagatttggagaaacaaaggctgctggcagtataaattccctatctttttacatccacccatctatctgtcagcctgcttatctaagcagcaccacatcacccccacactatctatgctgtgtaaaaatcccctagttgtatctagaaaaaaaagcatattactttcaggcagtttagaatcaaggctcccaaaagagtaattacatttcytgtctctcagtgacgcctggtgatatgggtctacctccagcagtccgatctagcttgactaggtttaygagtagagatagaagtatagatacagttatagtgagacatcgcttttgaagagctcccattagggtgaatatatccttctctcctttttttttttttttctttttttttctttttttttctttttcttgacaaaagggttgtacagaaattaagtctgaaacagtcttgatgaaagcagtgctttctgtttgtaagtaatttaataactaactacacagarctcttgacagttctcagtgggaaataattctaatacaaaaagggtggtgagaatggactgacacatctttatttcaaga

SEQ ID NO: 39607 - DNA, 600 bp, Chicken  19866894273674_3
atctaagcagcaccacatcacccccacactatctatgctgtgtaaaaatcccctagttgtatctagaaaaaaaagcatattactttcaggcagtttagaatcaaggctcccaaaagagtaattacatttcytgtctctcagtgacgcctggtgatatgggtctacctccagcagtccgatctagcttgactaggtttaygagtagagatagaagtatagatacagttatagtgagacatcgcttttgaagagctcccattagggtgaatatatccttctctcctttttttttttttttcyttttttttctttttttttctttttcttgacaaaagggttgtacagaaattaagtctgaaacagtcttgatgaaagcagtgctttctgtttgtaagtaatttaataactaactacacagarctcttgacagttctcagtgggaaataattctaatacaaaaagggtggtgagaatggactgacacatctttatttcaagatgtgtattcaatttcaccaagtaaaaacattattgttctctgccacctaatggtgttagtgacatattacaaatcagtaagacaattctcaggttctgctc

SEQ ID NO: 39608 - DNA, 600 bp, Chicken  19866894273674_4
attacatttcytgtctctcagtgacgcctggtgatatgggtctacctccagcagtccgatctagcttgactaggtttaygagtagagatagaagtatagatacagttatagtgagacatcgcttttgaagagctcccattagggtgaatatatccttctctcctttttttttttttttctttttttttctttttttttctttttcttgacaaaagggttgtacagaaattaagtctgaaacagtcttgatgaaagcagtgctttctgtttgtaagtaatttaataactaactacacagarctcttgacagttctcagtgggaaataattctaatacaaaaagggtggtgagaatggactgacacatctttatttcaagatgtgtattcaatttcaccaagtaaaaacattattgttctctgccacctaatggtgttagtgacatattacaaatcagtaagacaattctcaggttctgctctttctaatagactttggtgaatttatttatatatgaattaaaaacaagggtatggataaaagtctgagctactacaatctttcagtgaggtccgggttgcctaatatactctgaactctg

SEQ ID NO: 39609 - DNA, 600 bp, Chicken  19866894273674_5
cacatctttatttcaagatgtgtattcaatttcaccaagtaaaaacattattgttctctgccacctaatggtgttagtgacatattacaaatcagtaagacaattctcaggttctgctctttctaatagactttggtgaatttatttatatatgaattaaaaacaagggtatggataaaagtctgagctactacaatctttcagtgaggtccgggttgcctaatatactctgaactctgtgtgttagtgaagaggtaagcctaaattaaatgcctgtgctgcctaaggactcatagaccraggccatggtgccttctatgagattccattcataaggtacaaacttaagcagaattttgtcatatgtcataaaaaaaaatcttataaagaggttaggaagcattactgtacagtaacagctgactcaaaaatgctgaaccaaactttgatttactcagaaccacataaattgcgcaagtcaaaagagcacttagggagacacattctttttatgttaaaaatcaattmatctacagttttttatttttatttttattttgttttatttttgatgggataaaggaaatggattgagtgcaa

SEQ ID NO: 39610 - DNA, 600 bp, Chicken  19866894273674_6
tctgaactctgtgtgttagtgaagaggtaagcctaaattaaatgcctgtgctgcctaaggactcatagaccraggccatggtgccttctatgagattccattcataaggtacaaacttaagcagaattttgtcatatgtcataaaaaaaaatcttataaagaggttaggaagcattactgtacagtaacagctgactcaaaaatgctgaaccaaactttgatttactcagaaccacataaattgcgcaagtcaaaagagcacttagggagacacattctttttatgttaaaaatcaattmatctacagttttttatttttatttttattttgttttatttttgatgggataaaggaaatggattgagtgcaaaggggaagaattaatgataagtgccacagcgaactttgtggctgcatgcaggtgactgcattgtgcagacacctacacracaacgactacaacagtggaatccgtatgtgatccaaaacctcaaccttctgtaaaccaacctaggaagaaaatgcctaggtcgttgtgtaatggcaaagctcatcaaaccaggaatgactggtacacagaaaggtaaaaacaacaaca

SEQ ID NO: 39611 - DNA, 600 bp, Chicken  19866894273674_7
tcttataaagaggttaggaagcattactgtacagtaacagctgactcaaaaatgctgaaccaaactttgatttactcagaaccacataaattgcgcaagtcaaaagagcacttagggagacacattctttttatgttaaaaatcaattmatctacagttttttatttttatttttattttgttttatttttgatgggataaaggaaatggattgagtgcaaaggggaagaattaatgataagtgccacagcgaactttgtggctgcatgcaggtgactgcattgtgcagacacctacacracaacgactacaacagtggaatccgtatgtgatccaaaacctcaaccttctgtaaaccaacctaggaagaaaatgcctaggtcgttgtgtaatggcaaagctcatcaaaccaggaatgactggtacacagaaaggtaaaaacaacaacaaaaaaggcatttagactagatgttggagaattgtctgaatgagattttgtcttcataaagccagtagcccaggtgtccctagagtaagacctattcttgggtagctttgattactcacactgagtacagttcttttctggcttttcatgga

SEQ ID NO: 39612 - DNA, 600 bp, Chicken  19866894273680_1
tgtattgcaccaactttctttttgttttttttagctttgctgacagtgtctgaggaagttcgaagtcgctgcagcctaaaacataggaagtctctcttgctgacagatgttgcaatggaaaatgttcctatggatacatatcccatacatcacagtgacactacctataggttggttgtctatcttttcaataataaaagttacccaaatattaatgtctgttttctttactaagttatctaaaggtaagctgtgatatatagaaaactaaaccccatgttcgttaaagctaagataatwctgaactgcacaytagtggttactgaccaatatgctactgtgatcaacaatcataggaaaatttgtttattgaattcctggagatatgattttgagatctctgaagcaatttaagactttagttaactgctttggtgattcttaatcttttttgataacccttttctatgagacctaatctcacctcattctttgtttgcattttagagtaaaattgtttgtctttttaagaagtgaggacatgctaaataattgcttgattcctgtcattggaaaactttgacatcttattgaccatcc

SEQ ID NO: 39613 - DNA, 600 bp, Chicken  19866894273680_2
ctttctttttgttttttttagctttgctgacagtgtctgaggaagttcgaagtcgctgcagcctaaaacataggaagtctctcttgctgacagatgttgcaatggaaaatgttcctatggatacatatcccatacatcacagtgacactacctataggttggttgtctatcttttcaataataaaagttacccaaatattaatgtctgttttctttactaagttatctaaaggtaagctgtgatatatagaaaactaaaccccatgttcgttaaagctaagataatwctgaactgcacaytagtggttactgaccaatatgctactgtgatcaacaatcataggaaaatttgtttattgaattcctggagatatgattttgagatctctgaagcaatttaagactttagttaactgctttggtgattcttaatcttttttgataacccttttctatgagacctaatctcacctcattctttgtttgcattttagagtaaaattgtttgtctttttaagaagtgaggacatgctaaataattgcttgattcctgtcattggaaaactttgacatcttattgaccatccatatgcagccaca

SEQ ID NO: 39614 - DNA, 599 bp, Chicken  19866894273683_1
  misc_feature (1)..(68): n is any nucleotide
nnnnnnnnnnnnnnnnnnnnnnnnnnnnnnnnnnnnnnnnnnnnnnnnnnnnnnnnnnnnnnnnnnnncccccaacatgagctggcagctgagtaatttgtgcaggtgagatggcaatccggtggatttataaggttttttgtcagctgatggtctctatttactctcttgctgttctggagcagtgacttccctctccttcgtgcaaagaaatcctgggtcaaattcagggatgaaattgtttagacagaccaaaggaataaatcccattgtgtcttttgtccccttctgggtaggaamtgttcacccctttagctttgtttgcaaacacttgctggattatgagaagatggaagaagcccttacacacattaaccttgaatctggcctcatgaatctccacagggctaagggaggccaaatggttataacttataagctgccagatgaacaggaaaatctactggtgcaagttgttagttaaagtcagcttctcactatatatcaagtagtacttgatgtacaaagtgttaaatttgctggaggagctgggtgggtagtttttatagggcgaaagtctgaaaatgtcaaatatcttt

SEQ ID NO: 39615 - DNA, 600 bp, Chicken  19866894273685_1
agtttttctgcatacccagtacacagacatgaggcacaaaccaagtattatgctaccagatggtttaggtttgttcattaaaaaaattactccacatataagtacaacacagtactgaaaagaataattctgcagaaaatctcaattctgctctctctacttattttttgattgcatttatctcaagttctgaaaggactcaatttaaaagatctagagcatacttaattctttagaaaagttttaacaacttttttgcagaattgaatttgagagcctagaaagcagatttttcttctyccttcagcaagaaggaatgctggcatatttttactaaagagctctcaaaatgccacaaatcatcatcttcacattccatggtatgagaaagatgttaaaagaaattagtttaaaaaagacaatcttaacttttattcttcaagagaacattaagtaatgacatcagccaaacagtactgaaccctttaactccaaaacagcagtagctcctgcagcctatactccacaagggtgttgaactgactatgacaaggatgaactaaggacaactgtcagaaacaagatttacctttctgtttt

SEQ ID NO: 39616 - DNA, 600 bp, Chicken  19866894273686_1
atgatgatggagaaggggaagaaagggacaaggtagcagaccttggtaatggttggtaatgattgaggtggagctgattctgcctgggcacagcgtaaatgacccctcaattttttttccagacctagattctatggtctgttaaggatactcctccatttctggacacagcaagctacaatcagtgctgtcaacctacaatttttactcagagaaagtccttctgcattatcattaactcttatttgccatctatcattctgtggttctgtgatctaacctacctctctgggcagtctyagagacaaactgatttttgtaccaaccattccttagcccagagaaagtgcttagccttccttttttacatgagtttgtgattgcactgggtctatacatgtgtataacataatgatgctgtttgctgaagtagaattcagaccgaaatactgtgtaatatctgtcttggacactggaaatgcaatacttgccattatctaaccaagaaaaagaaggttttcctccctagacaccaaagatgaaactttccacacttttagaatctcacagaggaaatgtctatacccaagctggctgtct

SEQ ID NO: 39617 - DNA, 600 bp, Chicken  19866894273688_1
tgcctcctcctggggagcacatagagcaggagctaacatcatttccatggcttacattaagaaaaggcaaagcaaacaacttgcaaccattaatagagaggcagtttgagaagcaccaagccttttcaaagcagattgtaagttgttcttggttcttgccagggtaacaaatgtcacagccaaacaaccagaaatttctctgctacggttgagtccacaaacagaaggacaatgtgtaatcagccatctgagcaaagaattattcattttcgagcaagcaacaatgccttccaattagtytgatatgaagtgggggaagaagccctctacaagcactcatcactattgatctttctgagccaccgttgatctttctaagccatacacacagctctccacacagcacactgcatataaccatcttccttcctcctcctatctttatctatcctttccaccacggcacatctttttatatcgagcagctggaaatctgtcccagtatccccagtaggttgtgtccatcacaatgaaacaaacctgggctctggagatccacatgctaatgtaagcgtttatacaaagagagaggttgctcta

SEQ ID NO: 39618 - DNA, 599 bp, Chicken  19866894273690_1
  misc_feature (1)..(165): n is any nucleotide
nnnnnnnnnnnnnnnnnnnnnnnnnnnnnnnnnnnnnnnnnnnnnnnnnnnnnnnnnnnnnnnnnnnnnnnnnnnnnnnnnnnnnnnnnnnnnnnnnnnnnnnnnnnnnnnnnnnnnnnnnnnnnnnnnnnnnnnnnnnnnnnnnnnnnnnnnnnnnnnnnnnnntggaattctaatgacttttaaaagggtaggctttaaaaacaaaaagttagattgtcttttgtcagtttgtttttgtaccattcaatctacacctggctggctctgcccctcttctcccagtgtgtctcctctgcryttttcccataaagaaataatcctgaatctagcagtttctcatgcttttctccacccatcctgctgacttctggttaaggtaaaaggctgaggatggaggtgaatggaaaaggtgttttcaaataaagctgggaaggaaggagagtttaaacattgttaacaaattctgtgatgtaagctgtaaatattaatctctgtaatcacgtggggaaggggaatgctgaagaacaacaagttttaacctttgcrctcagtatcttcttgctattgcaagaattgtgattgtgtcttctgcaaag

SEQ ID NO: 39619 - DNA, 599 bp, Chicken  19866894273690_2
  misc_feature (1)..(164): n is any nucleotide
nnnnnnnnnnnnnnnnnnnnnnnnnnnnnnnnnnnnnnnnnnnnnnnnnnnnnnnnnnnnnnnnnnnnnnnnnnnnnnnnnnnnnnnnnnnnnnnnnnnnnnnnnnnnnnnnnnnnnnnnnnnnnnnnnnnnnnnnnnnnnnnnnnnnnnnnnnnnnnnnnnnntggaattctaatgacttttaaaagggtaggctttaaaaacaaaaagttagattgtcttttgtcagtttgtttttgtaccattcaatctacacctggctggctctgcccctcttctcccagtgtgtctcctctgcryttttcccataaagaaataatcctgaatctagcagtttctcatgcttttctccacccatcctgctgacttctggttaaggtaaaaggctgaggatggaggtgaatggaaaaggtgttttcaaataaagctgggaaggaaggagagtttaaacattgttaacaaattctgtgatgtaagctgtaaatattaatctctgtaatcacgtggggaaggggaatgctgaagaacaacaagttttaacctttgcrctcagtatcttcttgctattgcaagaattgtgattgtgtcttctgcaaagc

SEQ ID NO: 39620 - DNA, 600 bp, Chicken  19866894273690_3
atctacacctggctggctctgcccctcttctcccagtgtgtctcctctgcryttttcccataaagaaataatcctgaatctagcagtttctcatgcttttctccacccatcctgctgacttctggttaaggtaaaaggctgaggatggaggtgaatggaaaaggtgttttcaaataaagctgggaaggaaggagagtttaaacattgttaacaaattctgtgatgtaagctgtaaatattaatctctgtaatcacgtggggaaggggaatgctgaagaacaacaagttttaacctttgcrctcagtatcttcttgctattgcaagaattgtgattgtgtcttctgcaaagcataatttacacctccatccaaaatggagtaatgaagatttgccttttgagaggtgaaggagtcctcgaggcggttgtgttgctgtttgtgaggagctgtgagtaatggcactgccacrtactgcccagattcctaacaggtgatgccactgcaggaagccgatgtgttgcagtgggacacaactgccacagctgagctgctcgtaccacagttttcatctcactttgaaaaatgcagccttgtccattt

SEQ ID NO: 39621 - DNA, 600 bp, Chicken  19866894273690_4
tcaaataaagctgggaaggaaggagagtttaaacattgttaacaaattctgtgatgtaagctgtaaatattaatctctgtaatcacgtggggaaggggaatgctgaagaacaacaagttttaacctttgcrctcagtatcttcttgctattgcaagaattgtgattgtgtcttctgcaaagcataatttacacctccatccaaaatggagtaatgaagatttgccttttgagaggtgaaggagtcctcgaggcggttgtgttgctgtttgtgaggagctgtgagtaatggcactgccacrtactgcccagattcctaacaggtgatgccactgcaggaagccgatgtgttgcagtgggacacaactgccacagctgagctgctcgtaccacagttttcatctcactttgaaaaatgcagccttgtccatttgctatgtgctaatagcacttgtgcttctgacctatttaaagcattggtatttaattccttttttcctagcatggcttttttttctgacgttgctcagctgaagttcttttaatgaattatttctctgcttttcctctcttgccattctccttggcaaaataacttttat

SEQ ID NO: 39622 - DNA, 600 bp, Chicken  19866894273699_1
gaaatcacagttatataaatggggttgctatattcagattaattttaaccccgatgactttttcttgtaatccagcaaagtgagtgggtcaccagaagccatggtcagagagctgagtgggcatttcttctctggcatctccaccactaccatggtgacttaaggcacttccccagggacccccacctgggcagcgtgcacttggtaatgtatttatatggatgttttgcttccaatgagagtcattcctggatttgacatgtcaggtgaattcagtgttgttttctaaggtctatataygggtctgtccctttgtagcagtgactgctttcaagtgagtgatgtcccaccatatgcaaaccggtagcagtcaacrgctcagataaaatgtgatggtagaagtcactttctcactattcagggtcgtagttttctttccttggaagaatacaagaaggtgccttcccagcagctctaagagattgcagttcagataagtcacaatgcgcatgccacgctctgctagctgtgcttacataaggtagagcaagtcccttctgctggagacatgggactctaagaataaatgcccagaggatt

SEQ ID NO: 39623 - DNA, 600 bp, Chicken  19866894273699_2
aaagtgagtgggtcaccagaagccatggtcagagagctgagtgggcatttcttctctggcatctccaccactaccatggtgacttaaggcacttccccagggacccccacctgggcagcgtgcacttggtaatgtatttatatggatgttttgcttccaatgagagtcattcctggatttgacatgtcaggtgaattcagtgttgttttctaaggtctatataygggtctgtccctttgtagcagtgactgctttcaagtgagtgatgtcccaccatatgcaaaccggtagcagtcaacrgctcagataaaatgtgatggtagaagtcactttctcactattcagggtcgtagttttctttccttggaagaatacaagaaggtgccttcccagcagctctaagagattgcagttcagataagtcacaatgcgcatgccacgctctgctagctgtgcttacataaggtagagcaagtcccttctgctggagacatgggactctaagaataaatgcccagaggatttcctagctcggttgcatccagccaacagacatgttttattttcttaaagtgatcctggaggtttctgggatcagca

SEQ ID NO: 39624 - DNA, 600 bp, Chicken  19866894273705_1
cctttcaacaccctgaaggcaatacgtatgtgacgcaatcttatacaccaacgcttttttttttttttttttttttaaaaagcaagattgtgatgatgagaggttgtttgtttgcttgcaaaacatggctgagttgttgcattcatccatgaaatgagctagccctggagagctcagcagagagaagcataagcaatgccttgacatctaacaccatgggctctctgctgcctgagctgagaaaatctgcactccgcacctcctgggaacctgggaaagaaaaccactaaatactcctgygttgcacagccagaccagggtgcaacaagggcagccccagtgaaaatgctgcctgacatgctcagacaaaaaggaaaggctgcaaggctcagtgagctttggtttgggttgggttttataaaaggcaaaatatagatctcttgtcagaaggcagctttgactctggaattgaaaaatgaaattgccagagggaaaaacaagttcacatccacgaggagttaccaccaatacacaaatactctctccctctcttttataagaagcacccagaatagaagcacgtattttctgattatttct

SEQ ID NO: 39625 - DNA, 600 bp, Chicken  19866894273708_1
gtgtctcttaactctgcccttttggttatgcaggtcaaaaacctacactgttgtagcgttttctcaactatttcatattaagtagccataaaaatagcattattaagtactatttgtacatcataaataagtctgtaaagctgttgagtcccacgtttttgttacagaataatagcattttatgttctattaatggctcacataggaatttatttaaaacacactgtaaaaccctgtccaatgggacacagttttgatactcgttaaaagtggcaatatttgctggggtggcccactgtwtttcaagtatagaaacggaacatcagaatggaaatgtcaaaggaaaagtgaaaacagaccaacgctcatgaaacacaatgatagatccagacaaaagctcattgaatggtggcagatygtgtacaaaagagtgtcagtggccccggtagcacaaaaaaaatacacagcttctcttcaaaattatctgctgtgagaagatttggagggaagcaaatccagctctatatttttaataggtgatcccagaattggcagaatttgggaacatgagaaaaataggcagctagtcccactaaataa

SEQ ID NO: 39626 - DNA, 600 bp, Chicken  19866894273708_2
catcataaataagtctgtaaagctgttgagtcccacgtttttgttacagaataatagcattttatgttctattaatggctcacataggaatttatttaaaacacactgtaaaaccctgtccaatgggacacagttttgatactcgttaaaagtggcaatatttgctggggtggcccactgtwtttcaagtatagaaacggaacatcagaatggaaatgtcaaaggaaaagtgaaaacagaccaacgctcatgaaacacaatgatagatccagacaaaagctcattgaatggtggcagatygtgtacaaaagagtgtcagtggccccggtagcacaaaaaaaatacacagcttctcttcaaaattatctgctgtgagaagatttggagggaagcaaatccagctctatatttttaataggtgatcccagaattggcagaatttgggaacatgagaaaaataggcagctagtcccactaaataattatctgaaggaatatctaatttccctacaagtaatgctctgttctctttgacctcattcccaccactgtcttccgtaattttccacagcataagctcttgtcatttttgtttatttc

SEQ ID NO: 39627 - DNA, 600 bp, Chicken  19866894273714_1
tgacttctcactttgatttatgctaaccttagagctgttggtaattgcatgcgtgttattgtattcaggaagtttatgcagtagccaaggagcaacatgcaacactgggaggatgaattattcatattgatgagcatctcagacacataggggcatatgaaaaagcctgcctgtgtgctccttgtgacaatggacaggctggtggaagaagaattgataatgctgcagctctgctctccaagtttgtctgaaataatctgtggatatttcattggccaaaataaaacacgcagaacagtkgttttgtgtagtgtgattctgtggctcattataaaagttggatgactagctggggctacgtgtcttcttggtattcctcacaagtagcataaggggggaagtggtcaacacacgttttcccttggcagtttcatctacctgcctcatgtgaacccaaaggcccacaacaaaaactgtcaaaaattcttcccccattatgaatgtccaaaagatgtcatgtagctgtttttttttacatggaaatatctgttctggtctaggctgtgaacttccaagctaccaggcatttcgtattatgta

SEQ ID NO: 39628 - DNA, 600 bp, Chicken  19866894273714_2
aagtagcataaggggggaagtggtcaacacacgttttcccttggcagtttcatctacctgcctcatgtgaacccaaaggcccacaacaaaaactgtcaaaaattcttcccccattatgaatgtccaaaagatgtcatgtagctgtttttttttacatggaaatatctgttctggtctaggctgtgaacttccaagctaccaggcatttcgtattatgtataacatttcctcagcttagactcttcaatttccttagactcttgttgacttttttattttcatgcattgcaaggaaacgaktgcatacagtgaggtgatgaaagaagatgggtattgctggcttcagtgcaaggtgatgtattacatgtccttgagtaacaatatactcttttctacagctgctcaaatcaaatttataagcctccacttcaaaatgaactgaggcagaagttggtgttgtgttcgcaccttgtcctcacttgcatggactgtcagggcatcttgtacctgctttgctcctactgccctgctgtaaacatcacaaatgccaaaatgggtgcccttctccctcctcatattgaggtgaagctgaggtcctct

SEQ ID NO: 39629 - DNA, 599 bp, Chicken  19866894273720_1
  misc_feature (1)..(128): n is any nucleotide
nnnnnnnnnnnnnnnnnnnnnnnnnnnnnnnnnnnnnnnnnnnnnnnnnnnnnnnnnnnnnnnnnnnnnnnnnnnnnnnnnnnnnnnnnnnnnnnnnnnnnnnnnnnnnnnnnnnnnnnnnnnnnnnntcgctccggatttgagaatccctgcatagaatcggagaagccaggcaattacttataaaataagacctctaactccttacctagaatggtttcatctgttccaaaatgagctcgatagaagaggaccatttcaagccaataaacatgatagatgacaatcagcaccacgacragcaggatggttgctccyagtccacaggccagctccacagtrtactttggtgctgcaactggatgtaaaaaagaacaagggkccaggtttaccaaataggctgcaccttcagctaagcaggatcgagtatgtgctatatgtagtcaaatgatgcagaggaacgctgggaaatagaagccaagagccaagctggcccttcagacaaaggtggccaaaccaaagcttgtctggcaggacatgtgacagcagacccatagatggaaatcacttgcacagcccaaagccagtatatgaacatg

SEQ ID NO: 39630 - DNA, 599 bp, Chicken  19866894273720_2
  misc_feature (1)..(110): n is any nucleotide
nnnnnnnnnnnnnnnnnnnnnnnnnnnnnnnnnnnnnnnnnnnnnnnnnnnnnnnnnnnnnnnnnnnnnnnnnnnnnnnnnnnnnnnnnnnnnnnnnnnnnnnnnnnnnntcgctccggatttgagaatccctgcatagaatcggagaagccaggcaattacttataaaataagacctctaactccttacctagaatggtttcatctgttccaaaatgagctcgatagaagaggaccatttcaagccaataaacatgatagatgacaatcagcaccacgacragcaggatggttgctccyagtccacaggccagctccacagtrtactttggtgctgcaactggatgtaaaaaagaacaagggkccaggtttaccaaataggctgcaccttcagctaagcaggatcgagtatgtgctatatgtagtcaaatgatgcagaggaacgctgggaaatagaagccaagagccaagctggcccttcagacaaaggtggccaaaccaaagcttgtctggcaggacatgtgacagcagacccatagatggaaatcacttgcacagcccaaagccagtatatgaacatgatcctctcatgaggatat

SEQ ID NO: 39631 - DNA, 599 bp, Chicken  19866894273720_3
  misc_feature (1)..(86): n is any nucleotide
nnnnnnnnnnnnnnnnnnnnnnnnnnnnnnnnnnnnnnnnnnnnnnnnnnnnnnnnnnnnnnnnnnnnnnnnnnnnnnnnnnnnnntcgctccggatttgagaatccctgcatagaatcggagaagccaggcaattacttataaaataagacctctaactccttacctagaatggtttcatctgttccaaaatgagctcgatagaagaggaccatttcaagccaataaacatgatagatgacaatcagcaccacgacragcaggatggttgctccyagtccacaggccagctccacagtrtactttggtgctgcaactggatgtaaaaaagaacaagggkccaggtttaccaaataggctgcaccttcagctaagcaggatcgagtatgtgctatatgtagtcaaatgatgcagaggaacgctgggaaatagaagccaagagccaagctggcccttcagacaaaggtggccaaaccaaagcttgtctggcaggacatgtgacagcagacccatagatggaaatcacttgcacagcccaaagccagtatatgaacatgatcctctcatgaggatatgcaacctctttgggcagcacaaca

SEQ ID NO: 39632 - DNA, 599 bp, Chicken  19866894273720_4
  misc_feature (1)..(46): n is any nucleotide
nnnnnnnnnnnnnnnnnnnnnnnnnnnnnnnnnnnnnnnnnnnnnntcgctccggatttgagaatccctgcatagaatcggagaagccaggcaattacttataaaataagacctctaactccttacctagaatggtttcatctgttccaaaatgagctcgatagaagaggaccatttcaagccaataaacatgatagatgacaatcagcaccacgacragcaggatggttgctccyagtccacaggccagctccacagtrtactttggtgctgcaactggatgtaaaaaagaacaagggkccaggtttaccaaataggctgcaccttcagctaagcaggatcgagtatgtgctatatgtagtcaaatgatgcagaggaacgctgggaaatagaagccaagagccaagctggcccttcagacaaaggtggccaaaccaaagcttgtctggcaggacatgtgacagcagacccatagatggaaatcacttgcacagcccaaagccagtatatgaacatgatcctctcatgaggatatgcaacctctttgggcagcacaacagcacatacttctagaagggtcagccaaagctcacctgcaa

SEQ ID NO: 39633 - DNA, 600 bp, Chicken  19866894273724_1
ctttttcttgatgatctgctgctaagttttcagaagcaaaaccagtgttttcccagttcttaaggttgtctttcttcagtgactattaatcaaccattagagagatttaaagcaagttatcattattgtctgtttagtgtgggatttcttccatgggtttaacaggccttttcttttgctacagtctgttaatgcctaattctccataaagattttactgcttgcaggtaaataatagtaatagattgctgcttgcttttaaatgctgcttgtctgaagccttgaaatgcattgctggtrtatgatataaaatgtcaacctcagattatgttgcaaatttttagaagggtatgtattttctatttcgaaatttacagagtaataatgagtagaagttttgctaaagagatttctaatactgaggaacttttacaaaaagtgataaatggtgctgtgttgtactgctgataagatgattggtacattttattttttcctggatgagyggttactggattcattgaattctagttataaatttaatgtacaaaatctccttgtgcaatttttgctaatataaaacacttaacaggaaaacta

SEQ ID NO: 39634 - DNA, 508 bp, Chicken  19866894273724_2
taaagattttactgcttgcaggtaaataatagtaatagattgctgcttgcttttaaatgctgcttgtctgaagccttgaaatgcattgctggtrtatgatataaaatgtcaacctcagattatgttgcaaatttttagaagggtatgtattttctatttcgaaatttacagagtaataatgagtagaagttttgctaaagagatttctaatactgaggaacttttacaaaaagtgataaatggtgctgtgttgtactgctgataagatgattggtacattttattttttcctggatgagyggttactggattcattgaattctagttataaatttaatgtacaaaatctccttgtgcaatttttgctaatataaaacacttaacaggaaaactagtcagctaagaccataaacacagcatatagtacttatttaagctgtttctagcctaacatctttacaaggttattaaaatcttgcatatctgcagagtaagttattgtgattca

SEQ ID NO: 39635 - DNA, 600 bp, Chicken  19866894273732_1
cccagcagatgtatccagttaccatgctgtggtattgtgttcaccctacacatagtcttgtagtgctgaggccgtgacctgcggcattctcaaacgctctgtggaacaagtgaaacctcaaggccaaatgggatcagtcacttacagatgtggccataaacagccacgggatttgttgagtagactgtagtcagtcctgcattaatggattctttgtagtgatgccgtggtatcttaaagtcattcaaactccaaacaagtgccattcagctggaagaattccaggcgtttacttcttcrtggtgggaattgttgaaggccgcagtgctgcgttgcagctgctctgggattgcatggtgagctgccagcagtggggcaggcgctgaagtgctcacttccctttctgtcaaagcactctgctaccagaactgttggatacagacttcctctcaacgtgatgcacttcaacacaaagtaaaatgccttttttaatgctatgacttcaataacagtgaattacaggtgctgtaaaattttttgaatgtggactattacagctgtaaaccctaggaaacgttagctcatcaaaaatatgtatga

SEQ ID NO: 39636 - DNA, 600 bp, Chicken  19866894273740_1
tacttatacagagcactccctcaagccattgcaaaggattcagaaaaagaaaaggaggtaatcatataatatttctgtggtgaatcctccaaaaactgagcaatcagaagctcagggcattcctgagtcgaggtcatatatctgtgggttttgtggtgttttctttttctttttcttttgttttgttttgttttgttttagttttagtttttgttttctgtcaatattcttctttgttctaagacttccatggaatttctaaaaagtgtctcactgctgcaaacttggggaaaaagctcyacagaaccaaatcagatctgtattagaacaagattagtaaagaaatggtgactgatctctggcactgaatccatctggcaaaatgcaatctacagtctattattacatagtattaaaatctcctaccattcaaaaacaggatgcataaaattgcctattagaaatgaattctagcctatgaaaatctgacagtgttttggctcaagccaaattcgtgctaagaaccatgctgctagtttataagacacgaaaacagtttaacagctggtaaagcttcagcacccagaagtcctcactgta

SEQ ID NO: 39637 - DNA, 600 bp, Chicken  19866894273743_1
acctctttatactgcaaggtgtctccttattgtctgcttaacagattagcacaaccaagtctctgcaaaaccaccttttcgatttctttcactgaaatattcaaatctgcatcctctattactttcttccaatgatgcttatcatcagccctttgtgctgaggagctggaactaaggtgatcttatcactgtcatgctctaactctagctagtatctagctgcagcagctcacgtgttattacaaatgctttgtcatataggaagacttttaaaataaaggaaaagtagttggatcaaamtctcaaaaacagtgacacaagaaactgagttgccatgacagtatgaagattactttctataagtttaattccttcactgaattactactgtgctaaagtaaaactcgcttgtgattatacacaaaaacagctaacaaaacacaggagcagatgtccaactttccctaatatttgtgtacttctcttcagtatatgttttacatttcacattttcaatgtccctggtatttctaaattctgtaattactaaatccctttcacttattagcaggatttaaaaaccgtatctttagtctatta

SEQ ID NO: 39638 - DNA, 600 bp, Chicken  19866894273743_2
tctataagtttaattccttcactgaattactactgtgctaaagtaaaactcgcttgtgattatacacaaaaacagctaacaaaacacaggagcagatgtccaactttccctaatatttgtgtacttctcttcagtatatgttttacatttcacattttcaatgtccctggtatttctaaattctgtaattactaaatccctttcacttattagcaggatttaaaaaccgtatctttagtctattaccactgttacagaactgtagtaccagaaatctgtcttcccacgatagctcttagwgcagcatatagttagagggagcctggcccattccctcttctcacggcaggcgttaagcagcagtaccttaagccaaagcctactattagatctaatttcctttgccagctcccacatattccctatgtggtgttcacactgggaatgagaaacctctcacaaggtctttcctgttccagaagttcttttggcagattttccccagggactgcaaatagatgagcatagtacttttgatagcctgaaaccaccgttaagtaataccagaatttccttgaacaaagaacatgaatttacaat

SEQ ID NO: 39639 - DNA, 481 bp, Chicken  19866894273753_1
cagctgagaaattcttgaagcagaaattgttctgaatatgattatcttctgtttcagatttgtagctgattgttcacatgtgtccggggggagatgaagtgcatcggatcccgcgcagtttggccttgcatggcagtcatcctgctcctccctgcttctactgctgtggccgtcagtgaccagacaggtactcccatttttcttgcacatcactgcgcaaaggcataaatcctgatactcagcctgtagacaaataagaacaatacatgggaaataagtacaagcaaacaaaactagagraagatttatttttctaacctctttgtgacaatgtctaaatttgaagcrgttcaaaagcagtctttctatttcacatgcttgaaagattcacatttggaagtagttgtacttcctaagagttttgttttgtaatttctcaacttactatacaaagcaagattctaaatcagggcttgcaaaa

SEQ ID NO: 39640 - DNA, 433 bp, Chicken  19866894273753_2
ctgtttcagatttgtagctgattgttcacatgtgtccggggggagatgaagtgcatcggatcccgcgcagtttggccttgcatggcagtcatcctgctcctccctgcttctactgctgtggccgtcagtgaccagacaggtactcccatttttcttgcacatcactgcgcaaaggcataaatcctgatactcagcctgtagacaaataagaacaatacatgggaaataagtacaagcaaacaaaactagagraagatttatttttctaacctctttgtgacaatgtctaaatttgaagcrgttcaaaagcagtctttctatttcacatgcttgaaagattcacatttggaagtagttgtacttcctaagagttttgttttgtaatttctcaacttactatacaaagcaagattctaaatcagggcttgcaaaa

SEQ ID NO: 39641 - DNA, 600 bp, Chicken  19866894273767_1
gggcagacatcactagcatacagctttatcagtgcacatttgttgcaaaccacctcaacactgggataaaggtgatagacaactaagactgtggctttgcatgcatttccgaatgccagctaaaatagaccatattcctctcttcatctagctgttctactattttagcatctcctcaaaatttcctgcagtaatagcaaatgagtaatcatttttcatttagcttgtacgcaatcctggtgccactgatcatctgaacactattttaatatacatatatatataagatatgccaccaayatatgttctgaacttttgaatggcaaacttcaggagtaaagggtgacaggtggtgttcagtgcattatcattgttattgatgtgggtcaaaaactttaaaaatcatctttattagcaggaaataatgacgtagaaataaacaggtcctgttggtaagcaggtgttcaggagcaaataggaatggggaaaaaatcataatcctcttgtaggaatcaaagaaatgcctgagttgtgttgttctgcagggtctaggctgttctaaatgttaagtatctcaaaggccttccaaataaaaaaaac

SEQ ID NO: 39642 - DNA, 600 bp, Chicken  19866894273773_1
tctggctccttcagctacctgcacacgttgcaggggttaaaggctgcctcgtagaatggagcctggcatcacatcagcccttgctcagatctcagtagcagtggagagttccaccctctcctcatccccacttaggagctttatgctagtgaggctgtattctagtgcagactggagagatgcgaaccaaatagtgtgaaaagatgaaacctatgccgacagaaccattgttcccacgttcattttatacctgtatcattgcactgactgctgacgtgatggcagtcgggcacacatgcrtttatcagctctgtgttttctgaatgtgggggtgaatcagaaaggtgagtttatcaggtggaagcagctttctggtgcggtatatgtggagggtgggggtggatggcatccttaaacaaacatcccaacctgctgcttgagctgcaataggaaaaccagcttgacaagaacaaactgctccgccgagcaacattcaggggaggatggtgggacttgaaacaaatctccttaagcgagcatgaaaacaagctatttagcgctcattaatgtctcaggttaaactcctgaataatttgtcat

SEQ ID NO: 39643 - DNA, 591 bp, Chicken  19866894273783_1
ttggtgccccacagagaccccttcagtgctgcaaaaagctccaccccaccactacttttatttctgctttctcccaacctcttgtctaaaccacctttgtacatgaatttacttttacgtgagcgaaaccgtggctgcgtggaaggtctgctaagggctgaaattccagaacacagtaacagcaggcacttgaaacccttcagctgtagcagcctcacagctgctgttgtacccacatcctaggaggacctgtgtgttgttcccacccgtgatgggcacagaaaccccctctgccccctycagcatggctgggccgtttggatccccacagactcytttccccaggaagaaaagcccctgctttcacttcacctttccagcaaaggctggaaagtacccaacagtcccacagctattcatgattgcaccacgacctccccaggctgttcctgggatgtgcccagcaccccgcaggctgcccaggtgagaaaaggcccgtgagcctgagagagatgagatgcagctggggcctgcctccctgcagggctgccctgtgtataaagggaggtaaaagaaagcagctgttggtgg

SEQ ID NO: 39644 - DNA, 555 bp, Chicken  19866894273783_2
agctccaccccaccactacttttatttctgctttctcccaacctcttgtctaaaccacctttgtacatgaatttacttttacgtgagcgaaaccgtggctgcgtggaaggtctgctaagggctgaaattccagaacacagtaacagcaggcacttgaaacccttcagctgtagcagcctcacagctgctgttgtacccacatcctaggaggacctgtgtgttgttcccacccgtgatgggcacagaaaccccctctgccccctycagcatggctgggccgtttggatccccacagactcytttccccaggaagaaaagcccctgctttcacttcacctttccagcaaaggctggaaagtacccaacagtcccacagctattcatgattgcaccacgacctccccaggctgttcctgggatgtgcccagcaccccgcaggctgcccaggtgagaaaaggcccgtgagcctgagagagatgagatgcagctggggcctgcctccctgcagggctgccctgtgtataaagggaggtaaaagaaagcagctgttggtgg

SEQ ID NO: 39645 - DNA, 600 bp, Chicken  19866894273786_1
ttcactggaaaagtcatcagttcccctgcttctagatttctatttaaacctaaaattctctgaagtagtgttacagcattaaagggtgtgatatttggcatctgcttttcctcaggaatattttaatgatcaagtcttgttattcatctcctaaaatgcctgagaatagaaatgcattttatactaagaatatttctataaatacacagtcggaaagcagctggggcacatttcacctttattgaggactttggtaaatgaattgaatagtgccgtaaaaatcttttctgactcttttcrgaatagagggttcaccgtggaaaccatagctgtgaccttaagtgctytgtgcccaaaaggggaatgtacaacaagtgtgtgtcaaaggtagtctctcacaggagggctctgctagtttctctagtagcagtcctactccttatattagaatttagttgttgttagaatgagatcttctagagacaaagcaaaggtcattgtatctacctataggtatttgtttgatcaaatttcgtgatgaccaaaatctctgcttccagaatcccaggacatatgccttaaaaatagctcagtaagcgt

SEQ ID NO: 39646 - DNA, 600 bp, Chicken  19866894273786_2
acctaaaattctctgaagtagtgttacagcattaaagggtgtgatatttggcatctgcttttcctcaggaatattttaatgatcaagtcttgttattcatctcctaaaatgcctgagaatagaaatgcattttatactaagaatatttctataaatacacagtcggaaagcagctggggcacatttcacctttattgaggactttggtaaatgaattgaatagtgccgtaaaaatcttttctgactcttttcrgaatagagggttcaccgtggaaaccatagctgtgaccttaagtgctytgtgcccaaaaggggaatgtacaacaagtgtgtgtcaaaggtagtctctcacaggagggctctgctagtttctctagtagcagtcctactccttatattagaatttagttgttgttagaatgagatcttctagagacaaagcaaaggtcattgtatctacctataggtatttgtttgatcaaatttcgtgatgaccaaaatctctgcttccagaatcccaggacatatgccttaaaaatagctcagtaagcgtttattgtatttattaaaattaaatttggtatagaatctgttggagta

SEQ ID NO: 39647 - DNA, 600 bp, Chicken  19866894273786_3
atgtagattgaattttctcttttttttttctttaatttttgtatgctcaaaaatctagaagctagaaacttcctttcatcctttccagtgattatcatacaagttcttctcttacctatgtctgttatagtgatgttaatacctctttttctttatagaaagctgactgaactgacatgtttaggatcagatttattattttcacaggcatattgttttatggcttcatattaaggttgaaattgatgaatacattcaaatcatttcttcctgctgttatttccagtggtgtgagcacaytcttaacagaaaaaaatkcatttctttatgcaagatcttgtatttcccatcaattttaatattcttcctagttgctgcagtcttctctgacatctctctttcagaataaactcccatcactgctgaagatgtttaatrcatttgtttatagtcaaaattcattagcataatttcactttactgtaaatgaaaatagagataaaatataatctcttactagccctttacgttcttttcagacactgatattttgcttctctcttaactagtttctaatcagtcacagaattctcatttcta

SEQ ID NO: 39648 - DNA, 600 bp, Chicken  19866894273786_4
cttttttttttctttaatttttgtatgctcaaaaatctagaagctagaaacttcctttcatcctttccagtgattatcatacaagttcttctcttacctatgtctgttatagtgatgttaatacctctttttctttatagaaagctgactgaactgacatgtttaggatcagatttattattttcacaggcatattgttttatggcttcatattaaggttgaaattgatgaatacattcaaatcatttcttcctgctgttatttccagtggtgtgagcacaytcttaacagaaaaaaatkcatttctttatgcaagatcttgtatttcccatcaattttaatattcttcctagttgctgcagtcttctctgacatctctctttcagaataaactcccatcactgctgaagatgtttaatrcatttgtttatagtcaaaattcattagcataatttcactttactgtaaatgaaaatagagataaaatataatctcttactagccctttacgttcttttcagacactgatattttgcttctctcttaactagtttctaatcagtcacagaattctcatttctaatctttctgtcttgatca

SEQ ID NO: 39649 - DNA, 600 bp, Chicken  19866894273786_5
atacctctttttctttatagaaagctgactgaactgacatgtttaggatcagatttattattttcacaggcatattgttttatggcttcatattaaggttgaaattgatgaatacattcaaatcatttcttcctgctgttatttccagtggtgtgagcacaytcttaacagaaaaaaatkcatttctttatgcaagatcttgtatttcccatcaattttaatattcttcctagttgctgcagtcttctctgacatctctctttcagaataaactcccatcactgctgaagatgtttaatrcatttgtttatagtcaaaattcattagcataatttcactttactgtaaatgaaaatagagataaaatataatctcttactagccctttacgttcttttcagacactgatattttgcttctctcttaactagtttctaatcagtcacagaattctcatttctaatctttctgtcttgatcaaaactaatgttgctatgaccagtatagtagatgctttgtctaagtccgaattagaactttggctcagaatagtagtatctttcaagggaagaagttagagagatgaaatatagaattagt

SEQ ID NO: 39650 - DNA, 600 bp, Chicken  19866894273790_1
gtaaatggtaatgcagaagatagattggggtaatttctgctttctttgtcttcaagtataaaagcaagtttaagacatttaaagacatttaaagaaatcaatagatgacagattccagaactggtaaaaggaaattcttgttcagatctgtgattaaattataaaagtcactatggcggtaagttgttaggctgaagaatttaacaaggtttaaaagggttatttcacatatcagaaatatttatagatgctataatccatgctgagaaattttgaaggagatactaagcctcatacttstgatttcaagatgttctctagctactggggttatgttttctagctactaggtttccttgctggttgttgctcttccttcttaaggtaaagygttaggtaggattttagtgctgtgatctgtataatatttgtataaaatctgcgaaattagctttgattcccaatagtacaaaccttggtgacaatcctgcagktgtcctatgtgggtaacatttgagtttagtggtgcaggcagctcttgagaagttggctgaacaaagtggtttgtgtcatcacagtcatgtttcctttgggtgacca

SEQ ID NO: 39651 - DNA, 600 bp, Chicken  19866894273790_2
aagaaatcaatagatgacagattccagaactggtaaaaggaaattcttgttcagatctgtgattaaattataaaagtcactatggcggtaagttgttaggctgaagaatttaacaaggtttaaaagggttatttcacatatcagaaatatttatagatgctataatccatgctgagaaattttgaaggagatactaagcctcatacttstgatttcaagatgttctctagctactggggttatgttttctagctactaggtttccttgctggttgttgctcttccttcttaaggtaaagygttaggtaggattttagtgctgtgatctgtataatatttgtataaaatctgcgaaattagctttgattcccaatagtacaaaccttggtgacaatcctgcagktgtcctatgtgggtaacatttgagtttagtggtgcaggcagctcttgagaagttggctgaacaaagtggtttgtgtcatcacagtcatgtttcctttgggtgaccaaatagaaatgtgcagtactgccaggaactgatgtgactatcaatttatacatgagtaaaaactacgcagctcttcaaaaygcccttaaagc

SEQ ID NO: 39652 - DNA, 600 bp, Chicken  19866894273790_3
aagaatttaacaaggtttaaaagggttatttcacatatcagaaatatttatagatgctataatccatgctgagaaattttgaaggagatactaagcctcatacttstgatttcaagatgttctctagctactggggttatgttttctagctactaggtttccttgctggttgttgctcttccttcttaaggtaaagygttaggtaggattttagtgctgtgatctgtataatatttgtataaaatctgcgaaattagctttgattcccaatagtacaaaccttggtgacaatcctgcagktgtcctatgtgggtaacatttgagtttagtggtgcaggcagctcttgagaagttggctgaacaaagtggtttgtgtcatcacagtcatgtttcctttgggtgaccaaatagaaatgtgcagtactgccaggaactgatgtgactatcaatttatacatgagtaaaaactacgcagctcttcaaaaygcccttaaagcaagagcgttttctgtgtttgccttctggaattgtttcacttccagcaattcgaaggcttgacataagcaactgttgtccttacctaaagtccccagttaaatt

SEQ ID NO: 39653 - DNA, 600 bp, Chicken  19866894273790_4
taaggtaaagygttaggtaggattttagtgctgtgatctgtataatatttgtataaaatctgcgaaattagctttgattcccaatagtacaaaccttggtgacaatcctgcagktgtcctatgtgggtaacatttgagtttagtggtgcaggcagctcttgagaagttggctgaacaaagtggtttgtgtcatcacagtcatgtttcctttgggtgaccaaatagaaatgtgcagtactgccaggaactgatgtgactatcaatttatacatgagtaaaaactacgcagctcttcaaaaygcccttaaagcaagagcgttttctgtgtttgccttctggaattgtttcacttccagcaattcgaaggcttgacataagcaactgttgtccttacctaaagtccccagttaaattgttggaaagaatatatataggcaaccctaaacaaagacgatttattttggcagaatgtctccttggcgcagttacagtgtgcgtgattttcatggctaggcattcgtgcctaaatgtatatgtaagcatgtggtactgattgtttttgtcaggatttcggttttgttgaatgtcatgtgtccctaa

SEQ ID NO: 39654 - DNA, 600 bp, Chicken  19866894273792_1
atcaacatcccacagctcagtgcaaattaggagcgaatcccaaaagaagagagaacaattcagtactttctccgatatctacatctttcctggtagctgaaactaaatcctttccagctccccatgttacatgaaccatcaaaattcctgtgtttaaacatcttcacttattaacttttcatccaacattcactgacaaagacataatgcagttctacttcaccacaactcccgacttcagagttcactttctcaagagaacagcaaaataatccagagtcagcaaacataaaagctctyacaatatctaatgacagaaaacaaaacactattctctaacctcacaagccaacatgactacctgactcttatgactcaattaagttttggtttcaaaaacattctcctccttccacatcagccccaaactggtgatatcaagcacttcctttcctagcaaataaggatttgacggaatttcattttgctgcaactgaggcatcttacaagcatgaagatatttacacaagacaaggtttaaaactaaacaaacctatccttacccatgcacagaatccgtacaattgtttcttctggcct

SEQ ID NO: 39655 - DNA, 600 bp, Chicken  19866894273807_1
ttaccggagagccatcacggaggggacgtggggcaaggcacaaatcggcaaggaaagctctacttgtgtcgtcacctggatttgctgggagatgtcacgtaggcagtgaaagatctctaaaaattacctacaccttgagaatataaaaggagacgtgtggttacagcatttggcaacaatcaagtgatatttgtccgctgcttttgtccatatgacgtctaaagggagaccgacttttgacatggtgtgatagcgataggacgagggggaatggttttaactaaaagagggcagttttasgttgggcgttaggaagaaattctctacccagagggcagcgaggccctggcactgctgcccagagctgtgtgccccatccctggatgtgcccaaggccatggatgggccctgagcagcctgagctggtggggacaaccagcccacggcaggrgwtgggactggatggacttcaatgtctcttccaaacccaaaccattctgtgattctgtgatatgkttttttaacacaggggagctaggcttcctcatttctaaaaggcaaacatagcccggctctactgagagcmcatgcgactccggc

SEQ ID NO: 39656 - DNA, 600 bp, Chicken  19866894273807_2
gacgtgtggttacagcatttggcaacaatcaagtgatatttgtccgctgcttttgtccatatgacgtctaaagggagaccgacttttgacatggtgtgatagcgataggacgagggggaatggttttaactaaaagagggcagttttasgttgggcgttaggaagaaattctctacccagagggcagcgaggccctggcactgctgcccagagctgtgtgccccatccctggatgtgcccaaggccatggatgggccctgagcagcctgagctggtggggacaaccagcccacggcaggrgwtgggactggatggacttcaatgtctcttccaaacccaaaccattctgtgattctgtgatatgkttttttaacacaggggagctaggcttcctcatttctaaaaggcaaacatagcccggctctactgagagcmcatgcgactccggcagctgctaaacaygagcggaggttttccagagttaactttagatttgctaaaaattttgctagyacatagccagaccctaaagagagaaaaatataattgccttgtcgaagtagtagacatagaatttgatacgcttttcataatctccat

SEQ ID NO: 39657 - DNA, 600 bp, Chicken  19866894273807_3
cgtgtggttacagcatttggcaacaatcaagtgatatttgtccgctgcttttgtccatatgacgtctaaagggagaccgacttttgacatggtgtgatagcgataggacgagggggaatggttttaactaaaagagggcagttttasgttgggcgttaggaagaaattctctacccagagggcagcgaggccctggcactgctgcccagagctgtgtgccccatccctggatgtgcccaaggccatggatgggccctgagcagcctgagctggtggggacaaccagcccacggcaggrgwtgggactggatggacttcaatgtctcttccaaacccaaaccattctgtgattctgtgatatgkttttttaacacaggggagctaggcttcctcatttctaaaaggcaaacatagcccggctctactgagagcmcatgcgactccggcagctgctaaacaygagcggaggttttccagagttaactttagatttgctaaaaattttgctagyacatagccagaccctaaagagagaaaaatataattgccttgtcgaagtagtagacatagaatttgatacgcttttcataatctccattt

SEQ ID NO: 39658 - DNA, 600 bp, Chicken  19866894273807_4
gtctaaagggagaccgacttttgacatggtgtgatagcgataggacgagggggaatggttttaactaaaagagggcagttttasgttgggcgttaggaagaaattctctacccagagggcagcgaggccctggcactgctgcccagagctgtgtgccccatccctggatgtgcccaaggccatggatgggccctgagcagcctgagctggtggggacaaccagcccacggcaggrgwtgggactggatggacttcaatgtctcttccaaacccaaaccattctgtgattctgtgatatgkttttttaacacaggggagctaggcttcctcatttctaaaaggcaaacatagcccggctctactgagagcmcatgcgactccggcagctgctaaacaygagcggaggttttccagagttaactttagatttgctaaaaattttgctagyacatagccagaccctaaagagagaaaaatataattgccttgtcgaagtagtagacatagaatttgatacgcttttcataatctccatttttaaaacaagttccaaaaaggagaaataaaaacgggcggtgttcaaacatgctcaaattaatg

SEQ ID NO: 39659 - DNA, 600 bp, Chicken  19866894273807_5
gagggcagttttasgttgggcgttaggaagaaattctctacccagagggcagcgaggccctggcactgctgcccagagctgtgtgccccatccctggatgtgcccaaggccatggatgggccctgagcagcctgagctggtggggacaaccagcccacggcaggrgwtgggactggatggacttcaatgtctcttccaaacccaaaccattctgtgattctgtgatatgkttttttaacacaggggagctaggcttcctcatttctaaaaggcaaacatagcccggctctactgagagcmcatgcgactccggcagctgctaaacaygagcggaggttttccagagttaactttagatttgctaaaaattttgctagyacatagccagaccctaaagagagaaaaatataattgccttgtcgaagtagtagacatagaatttgatacgcttttcataatctccatttttaaaacaagttccaaaaaggagaaataaaaacgggcggtgttcaaacatgctcaaattaatgaccctcacatcatgtgtgaatagaaataaaaaaagtcttcattgaagtggcataaaacgtggctgtgctg

SEQ ID NO: 39660 - DNA, 600 bp, Chicken  19866894273807_6
aagaaattctctacccagagggcagcgaggccctggcactgctgcccagagctgtgtgccccatccctggatgtgcccaaggccatggatgggccctgagcagcctgagctggtggggacaaccagcccacggcaggrgwtgggactggatggacttcaatgtctcttccaaacccaaaccattctgtgattctgtgatatgkttttttaacacaggggagctaggcttcctcatttctaaaaggcaaacatagcccggctctactgagagcmcatgcgactccggcagctgctaaacaygagcggaggttttccagagttaactttagatttgctaaaaattttgctagyacatagccagaccctaaagagagaaaaatataattgccttgtcgaagtagtagacatagaatttgatacgcttttcataatctccatttttaaaacaagttccaaaaaggagaaataaaaacgggcggtgttcaaacatgctcaaattaatgaccctcacatcatgtgtgaatagaaataaaaaaagtcttcattgaagtggcataaaacgtggctgtgctggaatattttgggaatgcgtgtcagtgg

SEQ ID NO: 39661 - DNA, 600 bp, Chicken  19866894273807_7
ctgtgtgccccatccctggatgtgcccaaggccatggatgggccctgagcagcctgagctggtggggacaaccagcccacggcaggrgwtgggactggatggacttcaatgtctcttccaaacccaaaccattctgtgattctgtgatatgkttttttaacacaggggagctaggcttcctcatttctaaaaggcaaacatagcccggctctactgagagcmcatgcgactccggcagctgctaaacaygagcggaggttttccagagttaactttagatttgctaaaaattttgctagyacatagccagaccctaaagagagaaaaatataattgccttgtcgaagtagtagacatagaatttgatacgcttttcataatctccatttttaaaacaagttccaaaaaggagaaataaaaacgggcggtgttcaaacatgctcaaattaatgaccctcacatcatgtgtgaatagaaataaaaaaagtcttcattgaagtggcataaaacgtggctgtgctggaatattttgggaatgcgtgtcagtgggacaaggacagtgctgcctttgggactgcagtgatgccgtgaagactggga

SEQ ID NO: 39662 - DNA, 600 bp, Chicken  19866894273813_1
tagttggaattttctttggcaggaggcctcaagtccaccatgataaaggcttttatgcaaaaatgcataagtcatgtcacagtctgcttttctgcataagataaattcccaacacagcaggtaaaacagatcccctttagcggagactttactgtgaagccaagctactcttgctgtgatttgccaggtagaaggaatattctaatttatgtgaagagaagcaaagaaattcctttctctttaggtacaatttcctgcctgaatctccagaaacggaatgtgaatattcttatcatataraaatgttggaacttctaataatgggagctgttatttagtttgattgttcttactcaaactcatttgaaagttgaattattttaaggragagtaatactagtgattcagagggagctggcaaaaaaagaaaaagctaacttctacataagtataccatattctgtctgtagaggctaaggaagattatttcttgaraagcattcagctatgaggaattttcactatccaaacacacagggcttttacccagaagcttctggtctgttttagctgtgcacaagaagtgagtggaatatatat

SEQ ID NO: 39663 - DNA, 600 bp, Chicken  19866894273813_2
ttttctgcataagataaattcccaacacagcaggtaaaacagatcccctttagcggagactttactgtgaagccaagctactcttgctgtgatttgccaggtagaaggaatattctaatttatgtgaagagaagcaaagaaattcctttctctttaggtacaatttcctgcctgaatctccagaaacggaatgtgaatattcttatcatataraaatgttggaacttctaataatgggagctgttatttagtttgattgttcttactcaaactcatttgaaagttgaattattttaaggragagtaatactagtgattcagagggagctggcaaaaaaagaaaaagctaacttctacataagtataccatattctgtctgtagaggctaaggaagattatttcttgaraagcattcagctatgaggaattttcactatccaaacacacagggcttttacccagaagcttctggtctgttttagctgtgcacaagaagtgagtggaatatatataatttttttaacccaaagtattctcctgagtaagttctttactcagaactcaaaacactggattggaccctgtaaaaaagattcttc

SEQ ID NO: 39664 - DNA, 600 bp, Chicken  19866894273813_3
aatattctaatttatgtgaagagaagcaaagaaattcctttctctttaggtacaatttcctgcctgaatctccagaaacggaatgtgaatattcttatcatataraaatgttggaacttctaataatgggagctgttatttagtttgattgttcttactcaaactcatttgaaagttgaattattttaaggragagtaatactagtgattcagagggagctggcaaaaaaagaaaaagctaacttctacataagtataccatattctgtctgtagaggctaaggaagattatttcttgaraagcattcagctatgaggaattttcactatccaaacacacagggcttttacccagaagcttctggtctgttttagctgtgcacaagaagtgagtggaatatatataatttttttaacccaaagtattctcctgagtaagttctttactcagaactcaaaacactggattggaccctgtaaaaaagattcttcctaagtgctcagtgcatggatttcaaagaatgcgagagagttcaggtggtggtggttgttacaacacattgaaggacgctctaggaaactgggcagttcctagttctg

SEQ ID NO: 39665 - DNA, 599 bp, Chicken  19866894273816_1
  misc_feature (1)..(16): n is any nucleotide
nnnnnnnnnnnnnnnnccgacattccatctttcacaagagcagaatgtggtgggaatgacgcaatgaagcagagaaacctcttcaagcaaccccttgagcatggagtccagcacttggacttactgtcctagcattccctgtccatgtgagccaccagcagcaccagcaacccgcccaggtcccgtgctttgatggctctcctgacctgcaggctctgcccccctggccatgacgtgcactcagaggtctgctccatgctatgtttatggaaccatgactgctttacacagccctccacraggaggtatgctctccatacaaatatttacaaagcagcagaaggcatctttctagcacagcacatttctactgacggtgccatcaacatggctaaaaatgaacaagaagarctcacccattagatgggaaccggttgggaagaagtcatgggaagagagaagagatgggagctgtgggatggaggtcagagctgtcctatgaggagagtaaggcaatgaaaggggcaggagctgtgctggtttgtgctgggagggaactgctgctctccaacaagagcacggagatgcccagccatacc

SEQ ID NO: 39666 - DNA, 600 bp, Chicken  19866894273816_2
cacttggacttactgtcctagcattccctgtccatgtgagccaccagcagcaccagcaacccgcccaggtcccgtgctttgatggctctcctgacctgcaggctctgcccccctggccatgacgtgcactcagaggtctgctccatgctatgtttatggaaccatgactgctttacacagccctccacraggaggtatgctctccatacaaatatttacaaagcagcagaaggcatctttctagcacagcacatttctactgacggtgccatcaacatggctaaaaatgaacaagaagarctcacccattagatgggaaccggttgggaagaagtcatgggaagagagaagagatgggagctgtgggatggaggtcagagctgtcctatgaggagagtaaggcaatgaaaggggcaggagctgtgctggtttgtgctgggagggaactgctgctctccaacaagagcacggagatgcccagccataccagtcctcgtgtccaccatcattccaaggccccacagcccctacagggagcagggagcagcaaactggcctcatacacaccctgattcgttgacctttcagaacctgaggatt

SEQ ID NO: 39667 - DNA, 599 bp, Chicken  19866894273818_1
  misc_feature (1)..(14): n is any nucleotide
nnnnnnnnnnnnnnagtacttcagaaacaatgtactatctctgtaaattattttctcgtgattcatttctgcaacaaaattcatgtacacaagctatgtatgtagctttctttcctttttctttcctatcctttttcatcatatcttcaaatttcaccttttcttcatgcagtgttacattctctgtatgtaaccatctttcctttatccttctaatttttccaaattaaatgtgaattctacgtatttgagaaggatcttttgaacattttgccaataacacagtgcaagaatcttaaytaagaaagtaagttgtattctttcatatatctttgtaaaaatgcagagccagaatcctctcagtakcagcatgaggtgtaaatgacaggctataggcacagactggaacacaggaaattccacttaaagaggaaaatagtccttatgggtggtcaatcactggaacagattttccagagaggctgcagggtccatccttagatgtattcaaaacccaaatggacaacaatctgagtaatctgattttgttccctttttgagcagggaagccggaccagatggtctccagaggtctgtcc

SEQ ID NO: 39668 - DNA, 600 bp, Chicken  19866894273818_2
ttctgcaacaaaattcatgtacacaagctatgtatgtagctttctttcctttttctttcctatcctttttcatcatatcttcaaatttcaccttttcttcatgcagtgttacattctctgtatgtaaccatctttcctttatccttctaatttttccaaattaaatgtgaattctacgtatttgagaaggatcttttgaacattttgccaataacacagtgcaagaatcttaaytaagaaagtaagttgtattctttcatatatctttgtaaaaatgcagagccagaatcctctcagtakcagcatgaggtgtaaatgacaggctataggcacagactggaacacaggaaattccacttaaagaggaaaatagtccttatgggtggtcaatcactggaacagattttccagagaggctgcagggtccatccttagatgtattcaaaacccaaatggacaacaatctgagtaatctgattttgttccctttttgagcagggaagccggaccagatggtctccagaggtctgtccaaccacaacaactcagtgattctgcgggttagtgatatgagaagaatatctgacacgccagttctta

SEQ ID NO: 39669 - DNA, 600 bp, Chicken  19866894273819_1
ttatcttaccatgtaaaacaaatgcgtttataagttcacattgtgctatcctaataaaaggctctagttgatctaaacaatttattttcagctgaatcctatgaagttttattgctcatataaaactggttgcacttcacaggcattacatatttgcatgcattacccagtgtcctttgtgtctgttttccttcccaaaatagatctttcaagagccaggaaaaaaaaaaaaaagagctgtaattaaaacaatttttggaaaattcatgctgtgtttggttttgataaaattccattgaratgtacattctacgcttgcatcgtaaacttgatagcttcctttaagtgagcaaagggtctgaagagctgcatccactcacacaagcatttgtatattacatattttcacatcacttctgggatgaaactcattctctcgacagtgcttttacatatcatgtggttcacaagactaaaatgttgcaaaaagctcttttgctttctgtagcaggaaaaaaawtatcttgaatttcaattatttaagtttttttttattattatttaaagtgtgagggaaaagaatctcttgattttattgca

SEQ ID NO: 39670 - DNA, 448 bp, Chicken  19866894273819_2
aaaaaaaaaaaaaagagctgtaattaaaacaatttttggaaaattcatgctgtgtttggttttgataaaattccattgaratgtacattctacgcttgcatcgtaaacttgatagcttcctttaagtgagcaaagggtctgaagagctgcatccactcacacaagcatttgtatattacatattttcacatcacttctgggatgaaactcattctctcgacagtgcttttacatatcatgtggttcacaagactaaaatgttgcaaaaagctcttttgctttctgtagcaggaaaaaaawtatcttgaatttcaattatttaagtttttttttattattatttaaagtgtgagggaaaagaatctcttgattttattgcatctcaccagatccatgctggcagaagagctgcaaaggacttacacaaagaatacaggaccagcttcta

SEQ ID NO: 39671 - DNA, 600 bp, Chicken  19866894273822_1
gttttgctgctgcattaggaagaagggaatccttaaggcaacctcatatcctacaggacttgagatttgcacatttctcaaacagaggaagtcctacaaaagcaacatatccacactgctggaagacgtttttgaaactatcacactgagacaaatacactaaggcacaggaaaactggcacatttttcatcatttcattaaaaaaatacagaaaaaagaaaaccactttctagcaattactgacagcaattcttttaacacaaaggtgtgtactgcaacttttgcctgcagtagttggractcttgcacatgaagaacaatatatctgatttccaccttagagagaggagcaatgcagcaccatctgtaacaggacatcacttcacagctactgcagctaaataatttctggrggagggattctgctgtaaggtgtggtgttgatttctttaattaaataattatttaaaaacccacccctaccaacacatagtggagtctcctatgtgcgtcacttaaagcattggctgctaccggctgaattaacaactgcatgtggtcagggagaaataaacttgggaaagctttcaactatgctt

SEQ ID NO: 39672 - DNA, 511 bp, Chicken  19866894273822_2
actgctggaagacgtttttgaaactatcacactgagacaaatacactaaggcacaggaaaactggcacatttttcatcatttcattaaaaaaatacagaaaaaagaaaaccactttctagcaattactgacagcaattcttttaacacaaaggtgtgtactgcaacttttgcctgcagtagttggractcttgcacatgaagaacaatatatctgatttccaccttagagagaggagcaatgcagcaccatctgtaacaggacatcacttcacagctactgcagctaaataatttctggrggagggattctgctgtaaggtgtggtgttgatttctttaattaaataattatttaaaaacccacccctaccaacacatagtggagtctcctatgtgcgtcacttaaagcattggctgctaccggctgaattaacaactgcatgtggtcagggagaaataaacttgggaaagctttcaactatgcttactgcagatgagaggaagagaaata

SEQ ID NO: 39673 - DNA, 599 bp, Chicken  19866894273824_1
  misc_feature (1)..(31): n is any nucleotide
nnnnnnnnnnnnnnnnnnnnnnnnnnnnnnngtgtagtacttttgttctaaagaacttgctgcagcctgatgagaatgaagaacgcattctctatgtattttcctcttaaaaagcagtggaaatactccgtagtgatttgaatatatatgttctaaattaagccacagagctgcctgggtttaaagaggggaatgcaataatgtttgtaagaggtggataatccagcagaaaacaacgtgaaacctttcttgaaagcactgcagtcaccagacaagacaagtggcacaaaccctagcttwaaaaagtttatctgtatcagcgtcatcttattaaacagaaatttatgaactcgccctgagaccagaaagagttggtacagtccatcgcctcctaccaaactcttctcctaattgtgttataggttaaaggagtggggcacagatactgattgggaattaccatagcatgctatttcattagcctttcatactatttgtctctcagaagcttagtctgaatcccaccagagcctccaaggatgctttcattctctaataaagaagaaaatagcatcggattagttgaacagtatctcatt

SEQ ID NO: 39674 - DNA, 600 bp, Chicken  19866894273824_2
tctcagactgctggaaggcaacctttatttacacagataggagtgcataggcagcctccagctactctctgagagtgtcaagctccccagggttgggagtaatggccatttaactcttatttttaatgttcatgtgattttttgatcttctcaaccacaaaacagttacacaatgacatcatgagaacaagaacagcagtatgttccttgttgcttatggaatgacactattatggaataccattctggttacagacatctttcatgagaggctcaacacaatacactcttatgtattamgaacttacatatccatgaatcgatgacagtactctgaacttttactgtgtagcttctatayactcaagcttgtactagtcatctcaagttccctttatagtcaatggagagaaatggacaatatatgacaatgttcaaggtaagtttcacatccaagacagataaaatcaatcaattcctgaaccttacctcttctgcctggtattctgatttacatgaaatgcattttacatccttaaacttatgttttcaatgcttggccttcaacatgaaatagagtgaagtatgagaccagttagc

SEQ ID NO: 39675 - DNA, 600 bp, Chicken  19866894273824_3
ctactctctgagagtgtcaagctccccagggttgggagtaatggccatttaactcttatttttaatgttcatgtgattttttgatcttctcaaccacaaaacagttacacaatgacatcatgagaacaagaacagcagtatgttccttgttgcttatggaatgacactattatggaataccattctggttacagacatctttcatgagaggctcaacacaatacactcttatgtattamgaacttacatatccatgaatcgatgacagtactctgaacttttactgtgtagcttctatayactcaagcttgtactagtcatctcaagttccctttatagtcaatggagagaaatggacaatatatgacaatgttcaaggtaagtttcacatccaagacagataaaatcaatcaattcctgaaccttacctcttctgcctggtattctgatttacatgaaatgcattttacatccttaaacttatgttttcaatgcttggccttcaacatgaaatagagtgaagtatgagaccagttagcctatttaaagaggaagccagaaagcaaactgtgcaaagaactgctcagcaagaagtaacac

SEQ ID NO: 39676 - DNA, 600 bp, Chicken  19866894273827_1
ccgcagacaaatactaccaaactttgcactctgccagctgtctgcagggaggaattgccctgacacatgggaggcactaagcgagagcctccgggaacagggagaagccgtgtcgctccacaccactcctgccaggctgcaaagtgcctgaactaccccgtgtccctcagccacaggcagaacggactcagcgctccgttccacaatgcagaacctctggtttacgatccacctcaccgctacgcatccctgaagatacctgttgtaagcagaaaggctgagaagaggttaacaccaccrgactcgtcgcggacgcccctggaaaccgatgaaagcccgtttacaagatgagggttaacccatacgtaattactgggagagatcaggatctctccccagcctgtgtttaaacagccctgcccagctccccacgctgagggcacaagaccagggacacgtgtcactgtccccagctcggctgctctgcctgcgtgtggaacccctcgggtccatataaagcktagggatccggcacttaaaacgcaggcggctcctccggttaagcccacacagctctcttgcaatacattaacagccacg

SEQ ID NO: 39677 - DNA, 455 bp, Chicken  19866894273827_2
ttacgatccacctcaccgctacgcatccctgaagatacctgttgtaagcagaaaggctgagaagaggttaacaccaccrgactcgtcgcggacgcccctggaaaccgatgaaagcccgtttacaagatgagggttaacccatacgtaattactgggagagatcaggatctctccccagcctgtgtttaaacagccctgcccagctccccacgctgagggcacaagaccagggacacgtgtcactgtccccagctcggctgctctgcctgcgtgtggaacccctcgggtccatataaagcktagggatccggcacttaaaacgcaggcggctcctccggttaagcccacacagctctcttgcaatacattaacagccacgtgaaggtgtgagagcgatcccagctcggccgcagactgacacagcagtacccggagtcggagctctgctatgcagg

SEQ ID NO: 39678 - DNA, 600 bp, Chicken  19866894273829_1
ctcgcagatcagaaaactgaccttatcctgggctgcaacagaagaagcatagtcagcagggtgagggaggtgatcctacccctctgttcagtgctggtgagacctcacctggagtactgcatccagacatggagtcctcagtacagaagaaacatggacttgttggagcgcattcagaggagggccacacaaatgatccaaaggatggaatacctctcctacaaggagaggctgagggagctggggctgttcagcacagaggaggtggctctggggaaaccttttcaacatatggagggrgtctataagaaggggacagactctttagcaggatttcttgtgacaggacacagggaaatggtttcaaactgagagatttggtttggatataagaaagaagtcttttgccacaaggatggtgaagcactgaaagtggttgcccagagatgtgttggatgccctgcccttggagacattcacaaggtcaggctggacaggactctgatctagctataaacgtccctattcactgcaggggcgcgctggactaaatgacctctagtgatcccttcccactcaaacgattctgataagaatacc

SEQ ID NO: 39679 - DNA, 600 bp, Chicken  19866894273831_1
ttggcactaaacatgcctattgctctggtagtgagccagaccaaagcaaagtgctctctatctgtcagtaaaatccaagcatggccatgaaaaacaatagaacctatgcttccatttttataagcacttgtttgtagggacgaagagggaagaagccacatgaaatgaaatagttaaatctctgcagttactgcataatcgcctcttctaagtgttcagacttttctgattcccaaacacctcagccactctgtctctcacaattctccagatgatccacaaaacacatgcttgtcacartgctgtgaacatactacaaattgggaaatatcaactacctcattctttgctaatctaactcctaaagagaagaaaacatattacagctatctttcattttgatatcttatatatagtaagaaaaaaattctgccttcctggaacattgtgaaagtttgggcttctgttcttgtatctgagaaattttagatagatgtatgaatagatgcatagatgcacatcatacggcagcatatgagtctaacgcacaaagaaggccttctgtgtagaatgtctgcttcacagctctgcatcattcag

SEQ ID NO: 39680 - DNA, 600 bp, Chicken  19866894273835_1
tgttttgggacaaatagttctttacagtattaataattaacctcaagatccaagtatctaacatacacttaaaccataggtgaagttgcataaagttcagtttaagagtgtagaggaaagaatatctgtggtttattgtatggcttaaaaccaacgtttccagtgctgttaatttctacccctcatgatcttcccttgttgtttcctctggtagcttcacacaacgtactcccattcatacaaaccatggttttcctttcagaaatgcctacagcactggtaaattgagagtcctaaaayaagcctccacgttccctgggcagataacagataaagaggcttcccaccaatctactctgtgaaattaaagagagaaataaatgccttagttaggcacatggaatttcaacatgagtttcatacattagtagagaatatattcagcatgtcattgcaatcaggccaaactcacttaaaccactttgaccctcattcttggtacatgtataggaacagatatttgctccactaactgtgaaaaaggtttgcaatacattttttttcctttaaacattcctctggtacgcttatactccatta

SEQ ID NO: 39681 - DNA, 600 bp, Chicken  19866894273837_1
aggaacaaatcttccagcagtgggttggaagcaaaagggtttttgctgcaaatttgggcttcacagtaatcatctgtaggctgaaacctgacaacatagcaggcattatcttaatctatgtaacttgccttccacgctggcacttatgcctccatattaagcaatcacagaaaactgtagcctattgcattcacatctggatttacaatgtagctaaagcacaattatttcatgcagtacctgactacttgaaatatatattttttaaacagactgcttcaaaatctccatgtagaaccygacacaactacatcggtattctgttactctgcaactgaaaaaatcatttccttgacagataaaacatagttggacattcgtggcagctggatgtataaaatatcacagacaaaaaggaggagatactgacaaggtgcacttacagagcagtaatcttaggaacacacyactcctacttgtctcagtgggagacaagtgggagaagcatgtctcaactttggtattttggaaaaaatgagaggcagcatgtagtccttttcaaacattattttctccaggctgttggcaacctcaaatcac

SEQ ID NO: 39682 - DNA, 600 bp, Chicken  19866894273837_2
agaaaactgtagcctattgcattcacatctggatttacaatgtagctaaagcacaattatttcatgcagtacctgactacttgaaatatatattttttaaacagactgcttcaaaatctccatgtagaaccygacacaactacatcggtattctgttactctgcaactgaaaaaatcatttccttgacagataaaacatagttggacattcgtggcagctggatgtataaaatatcacagacaaaaaggaggagatactgacaaggtgcacttacagagcagtaatcttaggaacacacyactcctacttgtctcagtgggagacaagtgggagaagcatgtctcaactttggtattttggaaaaaatgagaggcagcatgtagtccttttcaaacattattttctccaggctgttggcaacctcaaatcaccacagaaaagtttaagattcctcttaattacagtctgcctgtccacatcagtgggagttttgttggcacctttcagaagattgctcatgagttacactgtgagacacagaggcaaactacagcagagagcrttcatcccaatacaccagtcttgctgcatggarcaac

SEQ ID NO: 39683 - DNA, 600 bp, Chicken  19866894273837_3
aggtgcacttacagagcagtaatcttaggaacacacyactcctacttgtctcagtgggagacaagtgggagaagcatgtctcaactttggtattttggaaaaaatgagaggcagcatgtagtccttttcaaacattattttctccaggctgttggcaacctcaaatcaccacagaaaagtttaagattcctcttaattacagtctgcctgtccacatcagtgggagttttgttggcacctttcagaagattgctcatgagttacactgtgagacacagaggcaaactacagcagagagcrttcatcccaatacaccagtcttgctgcatggarcaacccacctccacaaaatccttgcaaccatctcttccacttttgtgcttyactacctagagattaactgygcatgaggatccttcaaagaacagatmtgtgatttacctatcaagtattaacgtcatttttacattccaaaccccacacggaaaatattacatctgattctcaagtgctacttggtggaaagaaaggttaaatgacttgcttgtgactctttcacgcaccaagaatgagaagcagaattgaaactttgattctctg

SEQ ID NO: 39684 - DNA, 600 bp, Chicken  19866894273837_4
cacyactcctacttgtctcagtgggagacaagtgggagaagcatgtctcaactttggtattttggaaaaaatgagaggcagcatgtagtccttttcaaacattattttctccaggctgttggcaacctcaaatcaccacagaaaagtttaagattcctcttaattacagtctgcctgtccacatcagtgggagttttgttggcacctttcagaagattgctcatgagttacactgtgagacacagaggcaaactacagcagagagcrttcatcccaatacaccagtcttgctgcatggarcaacccacctccacaaaatccttgcaaccatctcttccacttttgtgcttyactacctagagattaactgygcatgaggatccttcaaagaacagatmtgtgatttacctatcaagtattaacgtcatttttacattccaaaccccacacggaaaatattacatctgattctcaagtgctacttggtggaaagaaaggttaaatgacttgcttgtgactctttcacgcaccaagaatgagaagcagaattgaaactttgattctctgctccagacattctcaggagaacagcatttacct

SEQ ID NO: 39685 - DNA, 600 bp, Chicken  19866894273837_5
ctttggtattttggaaaaaatgagaggcagcatgtagtccttttcaaacattattttctccaggctgttggcaacctcaaatcaccacagaaaagtttaagattcctcttaattacagtctgcctgtccacatcagtgggagttttgttggcacctttcagaagattgctcatgagttacactgtgagacacagaggcaaactacagcagagagcrttcatcccaatacaccagtcttgctgcatggarcaacccacctccacaaaatccttgcaaccatctcttccacttttgtgcttyactacctagagattaactgygcatgaggatccttcaaagaacagatmtgtgatttacctatcaagtattaacgtcatttttacattccaaaccccacacggaaaatattacatctgattctcaagtgctacttggtggaaagaaaggttaaatgacttgcttgtgactctttcacgcaccaagaatgagaagcagaattgaaactttgattctctgctccagacattctcaggagaacagcatttacctcccagctggcaaaaccagagctgtgcatactgtgaatgtcacagaagtcaa

SEQ ID NO: 39686 - DNA, 600 bp, Chicken  19866894273837_6
tgagaggcagcatgtagtccttttcaaacattattttctccaggctgttggcaacctcaaatcaccacagaaaagtttaagattcctcttaattacagtctgcctgtccacatcagtgggagttttgttggcacctttcagaagattgctcatgagttacactgtgagacacagaggcaaactacagcagagagcrttcatcccaatacaccagtcttgctgcatggarcaacccacctccacaaaatccttgcaaccatctcttccacttttgtgcttyactacctagagattaactgygcatgaggatccttcaaagaacagatmtgtgatttacctatcaagtattaacgtcatttttacattccaaaccccacacggaaaatattacatctgattctcaagtgctacttggtggaaagaaaggttaaatgacttgcttgtgactctttcacgcaccaagaatgagaagcagaattgaaactttgattctctgctccagacattctcaggagaacagcatttacctcccagctggcaaaaccagagctgtgcatactgtgaatgtcacagaagtcaaataaggttatggctttttga

SEQ ID NO: 39687 - DNA, 600 bp, Chicken  19866894273837_7
acattattttctccaggctgttggcaacctcaaatcaccacagaaaagtttaagattcctcttaattacagtctgcctgtccacatcagtgggagttttgttggcacctttcagaagattgctcatgagttacactgtgagacacagaggcaaactacagcagagagcrttcatcccaatacaccagtcttgctgcatggarcaacccacctccacaaaatccttgcaaccatctcttccacttttgtgcttyactacctagagattaactgygcatgaggatccttcaaagaacagatmtgtgatttacctatcaagtattaacgtcatttttacattccaaaccccacacggaaaatattacatctgattctcaagtgctacttggtggaaagaaaggttaaatgacttgcttgtgactctttcacgcaccaagaatgagaagcagaattgaaactttgattctctgctccagacattctcaggagaacagcatttacctcccagctggcaaaaccagagctgtgcatactgtgaatgtcacagaagtcaaataaggttatggctttttgatcttcaccacgatactgtcggccaccc

SEQ ID NO: 39688 - DNA, 599 bp, Chicken  19866894273839_1
  misc_feature (1)..(80): n is any nucleotide
nnnnnnnnnnnnnnnnnnnnnnnnnnnnnnnnnnnnnnnnnnnnnnnnnnnnnnnnnnnnnnnnnnnnnnnnnnnnnnnncaaactgcacgctgaagatgttcccatacctcgcagtaagctgaaagagagcccatcactctctgagagcaagaagatggagagtttctaaatgaacatagacaagacctgggatctaactttgagtttatttccacttggagcactgggttgggcttaagaaaaatccaaacccaagtcttccacaggtcccactcaacctaaactatttcacaaaggytggagatggcacaagcaatattagtaagccrtgktgtggcaggcatggtttgcatattggctttcaccaggctgttgtgtcaatttaacttgaatccagggactttatgactgatgggcacctgctccttccctcttcttcacaggaagagtgcagaaggaaaaggatccacctgggtcactgagaccaggctcttgctgctgaaagcaaggcacaacacatacactatttcaccaactttgtaagtagtgagatttcttgctccagctgtcacagttagaaagtagctccaactgctg

SEQ ID NO: 39689 - DNA, 599 bp, Chicken  19866894273839_2
  misc_feature (1)..(49): n is any nucleotide
nnnnnnnnnnnnnnnnnnnnnnnnnnnnnnnnnnnnnnnnnnnnnnnnncaaactgcacgctgaagatgttcccatacctcgcagtaagctgaaagagagcccatcactctctgagagcaagaagatggagagtttctaaatgaacatagacaagacctgggatctaactttgagtttatttccacttggagcactgggttgggcttaagaaaaatccaaacccaagtcttccacaggtcccactcaacctaaactatttcacaaaggytggagatggcacaagcaatattagtaagccrtgktgtggcaggcatggtttgcatattggctttcaccaggctgttgtgtcaatttaacttgaatccagggactttatgactgatgggcacctgctccttccctcttcttcacaggaagagtgcagaaggaaaaggatccacctgggtcactgagaccaggctcttgctgctgaaagcaaggcacaacacatacactatttcaccaactttgtaagtagtgagatttcttgctccagctgtcacagttagaaagtagctccaactgctgatgctcagaaaacttcctctaattttaagcc

SEQ ID NO: 39690 - DNA, 599 bp, Chicken  19866894273839_3
  misc_feature (1)..(46): n is any nucleotide
nnnnnnnnnnnnnnnnnnnnnnnnnnnnnnnnnnnnnnnnnnnnnncaaactgcacgctgaagatgttcccatacctcgcagtaagctgaaagagagcccatcactctctgagagcaagaagatggagagtttctaaatgaacatagacaagacctgggatctaactttgagtttatttccacttggagcactgggttgggcttaagaaaaatccaaacccaagtcttccacaggtcccactcaacctaaactatttcacaaaggytggagatggcacaagcaatattagtaagccrtgktgtggcaggcatggtttgcatattggctttcaccaggctgttgtgtcaatttaacttgaatccagggactttatgactgatgggcacctgctccttccctcttcttcacaggaagagtgcagaaggaaaaggatccacctgggtcactgagaccaggctcttgctgctgaaagcaaggcacaacacatacactatttcaccaactttgtaagtagtgagatttcttgctccagctgtcacagttagaaagtagctccaactgctgatgctcagaaaacttcctctaattttaagcctga

SEQ ID NO: 39691 - DNA, 600 bp, Chicken  19866894273842_1
tcaatgatctctttcaagcttaatgattttatgactatactaaagagtgggtaacaaagggccactgaaatgatcacaccagagaatatcttctacaaggtaaggtttgaagacataagactatttagcctacggacaagaggaatcagaaaaatcttatcaatgtgcacaaataattgaaggaagaacatgaagaaggctgttctgcttgtttgtttgctttatttattatagttaactgtgaggctgatcagacgctgccagatgttattcagagatgctgtggagttttcagtattrgagattccaaacctgactgaacaccatcctggacaatctgtcctacctgactttgtttcattcaggggtgggttgagctagacaatctgtagcagtcttacggaatcactaattctgtgcttctttgttgttctgtgagtgttagatcaggtgtagctaagcaatgttccatatttatttttaaaccttggtcaccaaagtaggacttcttatttgtttgatacctaaaaggcagtgatgacctgtcctttctacatttaaagttaacaagaatttattaggctgttaacatttttgact

SEQ ID NO: 39692 - DNA, 404 bp, Chicken  19866894273842_2
ggtgtagctaagcaatgttccatatttatttttaaaccttggtcaccaaagtaggacttcttatttgtttgatacctaaaaggcagtgatgacctgtcctttctacatttaaagttaacaagaatttattaggctgttaacatttttgacttagcttaattatagcaattaagagattacctacattgaaatactgtagctgatctagcctagaggtgaaaatgaaagtgtgtgaagaaaagatttatttattcttgattaaagttgacactagacttttaggcatatttctctttttaytttattttattttttgaagtgaactctataactccctgaactttttggagcagaaaaatgcaattagtctcatggaactttaagtctatttaatatttattctt

SEQ ID NO: 39693 - DNA, 600 bp, Chicken  19866894273843_1
ttaggtcattaatgtcttactctctgacagataagctgctttttaccctttttcccatgaagggtcagaaagtatatgaagttccatagaatccatactgaatttgactagttcctctagtaaggatggactgttgtaataaaagataataagggaattttgttgctttgtatcattaaggtgtgaggaaaattctttcttggatggccccatccagcctggtctcaaactcctccaggaatagggcctgggcaacctgatctagtgagaagtgtccctgcccatggcagggggttggarccagatgatctttaaggtcccttccaacccaagccatcctgtgattctatggtttataggttttgagcctgcattttattaattcacacaacttaaaaatgaagagaagcaaaggtatggaaaatacatacttgatatggtcaaacagtatctagactagagattaaatttcatagatcatcaagtgggattttgttgaaggcataagtatatatacatagcatgcatacccaaacatggcgatacacaccaaatcttcagtctcagctacaaagtgttttctcagcagatggatagact

SEQ ID NO: 39694 - DNA, 600 bp, Chicken  19866894273848_1
gaggaaaaaacactgaattgttttaatggagctgaattgtattcttaagtgaaaaccaccaagctcttatactcaacatgctttaaatacagatgaagaaatgaaaagaatccattctggcattttaatacctttatgcttctgcaaatacatcctttttttctaatacatatgagtgaatttgaagtaataagttgatataataagtgaagtaataattcactcagtagagactgaaagatgatttggtatagctgagtggtaggacttcatctgctaagagattctgtagactgtaaratgttagaatgagaaataatttaacactgatgctttattagagttatggcatcgcagaaatatcaagatcaccatatcgagtcgtcaacctgccctcccaaggcccaacactaagccatttcccttagtttgatgtttatatatcacttaaatacttccaacgatgatgaatctgctttcctggccagcctctttcactgcttgacagctctcttcatgaagaaatctaaacctctcatggtccactttggactgtttccttgcatcctatcacttgacacctgagtaaagagactgaca

SEQ ID NO: 39695 - DNA, 479 bp, Chicken  19866894273849_1
tccagggcatcaatgtctttcctgtattgaggggcccaaaactgaacacagtactcaaggcgtaaccttggcacttggtcttgttgtacctcgtacaattggcctcagcccagcaatccaaccaatccacatccctctgtagggccttcctacccccaggcagattcctcccacttcgatctgggaatgtactgagagtgcatccaatccccttgtccagattgtcaataaagatattaaacaggacaggccccaatattgatccctgaggaacactgctcatgacctattgccagctgsattgagctccattcaccacctctcactgtgcccgtcatccagccagtctattacccagtgaagagtagaattgttcaagctgtatgttaccgtattctccaggataatgctatgggagacagtgtcaactatacctatacgaagtaagtatagtttctgaggcttcaggacaacaggca

SEQ ID NO: 39696 - DNA, 600 bp, Chicken  19866894273854_1
cacaccattgaacaaataagtaccattgaacaggagtgtattttctttttactactgtatatatacagtaggctccactcaatgttatttacttttttttttaatttacctttaataagattagttgtgcagagcttcatctgtactgtatatttctcagtgctagaggttttcagcaaaataaactgcttctgtctttggagtgagaaaacaaaactcaggaacgcaggctgagctgtgcctgcattttgcattcttttgcatttgtgcactttgaaccctgaactgtaggttttaacwctcttaatgtggatgagggtatctgaacagaactcatttgctgttacttgaacatcatgcagttaatgaaataaattacacgcatyagtcagttttagttattgatatgggttcaaaatcaataacttcatttcagggttagttttaatttctctctactgccatcttgccttagcacatgtccacttcatcgctgaagagcaccaggtctaataacaaacacaygcagatggagtttggttatgacaaaagtacaaaagtagtagctctttgaaagttgaggagaaatccaacagtctt

SEQ ID NO: 39697 - DNA, 600 bp, Chicken  19866894273854_2
atttacttttttttttaatttacctttaataagattagttgtgcagagcttcatctgtactgtatatttctcagtgctagaggttttcagcaaaataaactgcttctgtctttggagtgagaaaacaaaactcaggaacgcaggctgagctgtgcctgcattttgcattcttttgcatttgtgcactttgaaccctgaactgtaggttttaacwctcttaatgtggatgagggtatctgaacagaactcatttgctgttacttgaacatcatgcagttaatgaaataaattacacgcatyagtcagttttagttattgatatgggttcaaaatcaataacttcatttcagggttagttttaatttctctctactgccatcttgccttagcacatgtccacttcatcgctgaagagcaccaggtctaataacaaacacaygcagatggagtttggttatgacaaaagtacaaaagtagtagctctttgaaagttgaggagaaatccaacagtctttccactcaaatgctgtttgcatggcctcatttacaacatgatgtgagagcaggaggtcagaagtgttgcagtggcttgcagaaaac

SEQ ID NO: 39698 - DNA, 580 bp, Chicken  19866894273854_3
gcaggctgagctgtgcctgcattttgcattcttttgcatttgtgcactttgaaccctgaactgtaggttttaacwctcttaatgtggatgagggtatctgaacagaactcatttgctgttacttgaacatcatgcagttaatgaaataaattacacgcatyagtcagttttagttattgatatgggttcaaaatcaataacttcatttcagggttagttttaatttctctctactgccatcttgccttagcacatgtccacttcatcgctgaagagcaccaggtctaataacaaacacaygcagatggagtttggttatgacaaaagtacaaaagtagtagctctttgaaagttgaggagaaatccaacagtctttccactcaaatgctgtttgcatggcctcatttacaacatgatgtgagagcaggaggtcagaagtgttgcagtggcttgcagaaaacagggtggttgaggagggtgatgagagtggctgtgagaggcacaggcaccactgtccaaataagtcagatgaacgtgtttcttgggagtccgtcctgtgtcctgctccaagtgggctcag

SEQ ID NO: 39699 - DNA, 600 bp, Chicken  19866894273855_1
ttccactttcaagtccaaatgtcttcacagggtggctgtgcttcaatgtgatggcatgctttgagaacatagacattttcagggtgcttccattgctgtcttgaagaatctttggtacagaacgttgcagatctcacttcacatatctctgtgtcttgtgagtttatctgttgctcagctctccctgcaaaggtgcttgggtacatctcctcattgctttcaaactgatttccccattaaggagctgcacctcttttaaatatatctgtaaggctgcaaattcagttcagccattgaaartggttctacttataaaatatacatagtttccaagcagatagatcttagggggctgattgtgctctagccaatggagctaagccagtttgcccctrttggcccccctttttaatgaagtgatgaaaatgggtcacacaaatggtaattgcctgatgattttcattgccctgagctcactggttgctcagtgtgttttatgatcaaagtgtggagaggatgggaatggtgcactgtttctcaggtacattcctcttctagttcttgcattggctggttcattacagatgcgtctttgacttt

SEQ ID NO: 39700 - DNA, 600 bp, Chicken  19866894273855_2
ctgtcttgaagaatctttggtacagaacgttgcagatctcacttcacatatctctgtgtcttgtgagtttatctgttgctcagctctccctgcaaaggtgcttgggtacatctcctcattgctttcaaactgatttccccattaaggagctgcacctcttttaaatatatctgtaaggctgcaaattcagttcagccattgaaartggttctacttataaaatatacatagtttccaagcagatagatcttagggggctgattgtgctctagccaatggagctaagccagtttgcccctrttggcccccctttttaatgaagtgatgaaaatgggtcacacaaatggtaattgcctgatgattttcattgccctgagctcactggttgctcagtgtgttttatgatcaaagtgtggagaggatgggaatggtgcactgtttctcaggtacattcctcttctagttcttgcattggctggttcattacagatgcgtctttgacttttcacacctcatttcagatgcaaacgcaactagcagtttttatttgatgtgaaaaagagaagtaatcatagagcctagaagcaaaaggcactgttt

SEQ ID NO: 39701 - DNA, 600 bp, Chicken  19866894273855_3
agaagtaatcatagagcctagaagcaaaaggcactgtttgtttttcaatgcacacagggattcctgttttgcagctatgatgtgcatatttcacagtgttgcagacagcttctgtcaattaacatgaattatggctccagaagcattcgtttaccataaacctgcagtacattaactcctgagtttcaactcctgccagttgcaaattcattgcaacgcaaagagaaattatttttaaacttgtgactggaaaggcttttctcttgcagtactgttctttctaatggtgtgaggattctktgctggtatagctcatgactctactgtgtatatttcgcatatcagattcaggctgcaaacccctgcagcatggggcttcttgtctccctttcygtcctcagcttgagaggtgaaaccttgcccctggcatggggctaacagcatgggatggtaaacctgtgctgtccatttgcatagaatgtgaaaagaatccccttgggaaaaaccaagagtcccttttaggacaacccaggattccctacttgggcagtgcaaaaagaccctcaaaagtcaactgaagagttagttcacctaggacaa

SEQ ID NO: 39702 - DNA, 600 bp, Chicken  19866894273855_4
cagtgttgcagacagcttctgtcaattaacatgaattatggctccagaagcattcgtttaccataaacctgcagtacattaactcctgagtttcaactcctgccagttgcaaattcattgcaacgcaaagagaaattatttttaaacttgtgactggaaaggcttttctcttgcagtactgttctttctaatggtgtgaggattctktgctggtatagctcatgactctactgtgtatatttcgcatatcagattcaggctgcaaacccctgcagcatggggcttcttgtctccctttcygtcctcagcttgagaggtgaaaccttgcccctggcatggggctaacagcatgggatggtaaacctgtgctgtccatttgcatagaatgtgaaaagaatccccttgggaaaaaccaagagtcccttttaggacaacccaggattccctacttgggcagtgcaaaaagaccctcaaaagtcaactgaagagttagttcacctaggacaaatccctggctcattcttctccttcctctcccccaggctgaatggtcccatggccctccatgctccctctggggttgccatctcctggcagtaa

SEQ ID NO: 39703 - DNA, 600 bp, Chicken  19866894273856_1
ttttctttcctatagacccagtttttattactcgtactgtttgtttattgaatggctgcctcctgcccactgacaggatgaacttccttgcactgtttgcacaaataccttggcttgccctgatgagattgcagagcccatctgtgggaggtatctgagggggtgtgctttggctggatttcctctcatctggcctgtgagttggtggatggtttcgtaattcgtcttagatgttttcagattgtgacttgcccaacaggacaaccttcccaaatcacgtcttgcagtgacactgatgtmtcagtccctggtttctgcctctgttcatggccattagtgagcctggcctaactcagtgaaagaatgtacaagcaggtatttatagatttctcccatccccaactcttcaagcttgtgggaattggggatagcaaccatcaatatatttatttattgtttagygtcttctaaatgctttttaacttttggccttgatgagatccacgttttaattatattgtgtgaagaaaggaaacaaagtgatgtgactccattgatatcaaacagggaaaaactgttatacattgatttgggaaatat

SEQ ID NO: 39704 - DNA, 600 bp, Chicken  19866894273856_2
gtgtgctttggctggatttcctctcatctggcctgtgagttggtggatggtttcgtaattcgtcttagatgttttcagattgtgacttgcccaacaggacaaccttcccaaatcacgtcttgcagtgacactgatgtmtcagtccctggtttctgcctctgttcatggccattagtgagcctggcctaactcagtgaaagaatgtacaagcaggtatttatagatttctcccatccccaactcttcaagcttgtgggaattggggatagcaaccatcaatatatttatttattgtttagygtcttctaaatgctttttaacttttggccttgatgagatccacgttttaattatattgtgtgaagaaaggaaacaaagtgatgtgactccattgatatcaaacagggaaaaactgttatacattgatttgggaaatatgttgctggtctacttgaagtgtgtttactatgggttcacagcatgacactctttgatgtggcagcaggaaaagctgagcatatctaaagagtaacaaggctaaaagaaaatgcagaattaagcctactagcaaaaatttgtcttcattttaaagaaatagga

SEQ ID NO: 39705 - DNA, 600 bp, Chicken  19866894273860_1
aaaaacatatcttgatgttaatatgggaagaacagcacacagaattctgaacaagatgagaagctgtattacagagcacagagaatggaaatgttactcagcttctgccaccctgtgagatttcctaggcagtgcataacactattttttcaactaaaggaaaaaaatctatccatagaatgtaattttgtaacacctaaccattaaagtagttattcatggtttagcctttgccaaacttgtttatatttatggacaagttcttattctttctccatggaattgggatggacttgctgytgtttttatttcagtgatgtgcatcagtaactcattaagtatcagtgcttccatgtatttgatgactaaattttgatggattttactgaagccaaaaatactttttttgagttaagacttggggatctctagagattcagcagttgaatataaagtctgtgggtaggggacagaagcattaccttgcctagaattaatgcctgtaatctacttcccaagactgtaatcataaaaacaccataacaatttttaattagcacaagggtgaagaagggggcattatttataccttaaaggtgg

SEQ ID NO: 39706 - DNA, 600 bp, Chicken  19866894273863_1
tgcatgatctcttttgaaatctacacaggatctttttacccgctgggtttaatttcagaatccagtacagtcattaaagaaaataaaattatgtttgttctttcatctggagcacagagcagtatcaatttttcattcccttctcctttgcattcccccttccaaaaaaagatgtatagatggaagaattcaccctatagctcccctaaaatttctcgtcttggacagctgctttgaatttattctgtatacttggttgcctaatgtctgcaacatgtaatgctctttctgtgctcccargattgccaaaactggaacattatgtgtcctgaacttgcagccaatcttaaaagctctatctatatcttcccaatgtctgaattttctgatcagcctctcatgaagtaacagtatcccagactgcagtgtctgagcacttcccatttactaacatcaagcagaatattcttcattttaagatgtgggaaacaaagtcagacagaatgcttgtgtacacagaaggtttttccattaatgctttatcattatagttaaatcgtcactgttctgactgtgcagttccctcrgcagaggcaaata

SEQ ID NO: 39707 - DNA, 600 bp, Chicken  19866894273863_2
tctgtgctcccargattgccaaaactggaacattatgtgtcctgaacttgcagccaatcttaaaagctctatctatatcttcccaatgtctgaattttctgatcagcctctcatgaagtaacagtatcccagactgcagtgtctgagcacttcccatttactaacatcaagcagaatattcttcattttaagatgtgggaaacaaagtcagacagaatgcttgtgtacacagaaggtttttccattaatgctttatcattatagttaaatcgtcactgttctgactgtgcagttccctcrgcagaggcaaatatttcagactgagaggtcctgtcttccatcgtgtttaaatcatttccaaataataataataaaaataaataagaaaaaaagtccaaacatctgagagtgatttaatgtaacacttcctcattgtatttcatgctggtataacctcactcttttggaaatatctgtgtcttgttctacaacctggcctagagattctagctctagagtcaacctgttacagttgtgacccatgcgtgggccagtgccgtgatagcactatagatttgtatgatgtaattggaaagacaa

SEQ ID NO: 39708 - DNA, 600 bp, Chicken  19866894273864_1
actgtaataaattctgtcactttaccactagtgaacatcagtgatgtcccaatggaacagcatgaggagtacaatcttaaatgtgcacatgggaaataggttcagttactgtcagataacaaaaccatgcattgcttttcaaaatatatacactgtgttgaaaaagggtgaattttagggtgtggagcttcttggagtatactgaaactcattcagaccatcaacaacatctgcctgtccaaagactgcctctgaaacaacactttttttctcctttcctattcagagaaagccagcgayggagacagctaggccggtagaaagcccaacagctttctggtggacctaaataatatctatataaaaacaacacagctgttttcacagtcagaatcatggactcatctcttgcatgttttgttttgagagaaagtgaatctaattacatgrctgtttcaaaatgaaaaattcattggccttctcctgtggtgttaaacttcagtctctgtttcacacaataattttctttgtttgacttagtgtgaacaagtacattatttgctatttttaacatttagggaataattgcacttcacattt

SEQ ID NO: 39709 - DNA, 600 bp, Chicken  19866894273864_2
cactgtgttgaaaaagggtgaattttagggtgtggagcttcttggagtatactgaaactcattcagaccatcaacaacatctgcctgtccaaagactgcctctgaaacaacactttttttctcctttcctattcagagaaagccagcgayggagacagctaggccggtagaaagcccaacagctttctggtggacctaaataatatctatataaaaacaacacagctgttttcacagtcagaatcatggactcatctcttgcatgttttgttttgagagaaagtgaatctaattacatgrctgtttcaaaatgaaaaattcattggccttctcctgtggtgttaaacttcagtctctgtttcacacaataattttctttgtttgacttagtgtgaacaagtacattatttgctatttttaacatttagggaataattgcacttcacattttagggaccattataaagtctgcagttctgataattgtaggcagagttctgacagttttgagactgacatttcaaagtaattaaattataagtttacagatattaaaaatacatctaaaaggctataaaattgacctcagtcttgacaacc

SEQ ID NO: 39710 - DNA, 600 bp, Chicken  19866894273865_1
tcatgcaggcctcacacctccccgaagttggtgtgtcccgtctccttggcgtgttctctggcttccacttgtcctgtcagtcccttctggcacaccatgcacctcagcgtgaagcgattcacgtcggtgaactgcctcttccgtctggcttcgtctgccagctccaaggcttgtgccagaacaacatcatcggtggtagagaaaatggtctggggaggaacgtccgagtcggggattttacgctcgagcggatcgtaatgaatcccatcgtagatcaacaggacccgcttggtgtacccrgcatcctccccgaagcgatcgatccggaccgtctgcgtgtccaccacgcagatttcacactgataaaacttggataagatggaaacctcgatggctcccccccacgtttcctctctccggatccattcgcagtactccctgttggttttccccagcaccgcctcgcagtacgcctcgggatcgctggctacgatctgagcgatgaggctgcgcatctccggggcacagccggggtcgtacacaccggcctccaccacgtagtacacgctggtgaacagacacgagttatcagccggcacc

SEQ ID NO: 39711 - DNA, 600 bp, Chicken  19866894273869_1
agcactgtggtccttttcaacccaggccattctatgatgctgtgattctatgattcctaagtgcatccctgctaacgtctgcctctgtggtgttgtagaggaatgcaggcagtagctcagatggaacagaagactctgatttctccacggatccggagcacacggacagctctgaaagcgacgccacatcgcggcggtccgcccgtgtgacccgctcctcagccaggctcagccagagctcccaaggtaaaggatgtgtttccttaagcacgtcagcggcaggaggcccggttcactccrtgctccctttcataggcagtctttctgactgtgtattgcatgcatgtaaggttgcatagcgtaagggttacactggtggtaggaatcaagacgtgagtgtcctcagttctaaaagtaaaactgtttctttattataggagatagaaatcaaacccatgattctgctttgcstgwtttttctgagaactctgtaaacttgttagtgatgttggcaagttagagagggagcgtttggggataaaagttgttttttgtctttggggttttctgtacagcacaggatgatgtgttttcaagact

SEQ ID NO: 39712 - DNA, 600 bp, Chicken  19866894273869_2
ctgaaagcgacgccacatcgcggcggtccgcccgtgtgacccgctcctcagccaggctcagccagagctcccaaggtaaaggatgtgtttccttaagcacgtcagcggcaggaggcccggttcactccrtgctccctttcataggcagtctttctgactgtgtattgcatgcatgtaaggttgcatagcgtaagggttacactggtggtaggaatcaagacgtgagtgtcctcagttctaaaagtaaaactgtttctttattataggagatagaaatcaaacccatgattctgctttgcstgwtttttctgagaactctgtaaacttgttagtgatgttggcaagttagagagggagcgtttggggataaaagttgttttttgtctttggggttttctgtacagcacaggatgatgtgttttcaagacttgctgatgcaataaacggcaacaaattttgcatgcttctacttttacacctaatttagaagaggaagcatgtgtccaccttctcgtttttaagtttaggatagcaagtcctaggttgtcatttgttaagctgccatatggcatcaaggggagaaaatgacagtagataagt

SEQ ID NO: 39713 - DNA, 600 bp, Chicken  19866894273869_3
aaagcgacgccacatcgcggcggtccgcccgtgtgacccgctcctcagccaggctcagccagagctcccaaggtaaaggatgtgtttccttaagcacgtcagcggcaggaggcccggttcactccrtgctccctttcataggcagtctttctgactgtgtattgcatgcatgtaaggttgcatagcgtaagggttacactggtggtaggaatcaagacgtgagtgtcctcagttctaaaagtaaaactgtttctttattataggagatagaaatcaaacccatgattctgctttgcstgwtttttctgagaactctgtaaacttgttagtgatgttggcaagttagagagggagcgtttggggataaaagttgttttttgtctttggggttttctgtacagcacaggatgatgtgttttcaagacttgctgatgcaataaacggcaacaaattttgcatgcttctacttttacacctaatttagaagaggaagcatgtgtccaccttctcgtttttaagtttaggatagcaagtcctaggttgtcatttgttaagctgccatatggcatcaaggggagaaaatgacagtagataagtttg

SEQ ID NO: 39714 - DNA, 600 bp, Chicken  19866894273884_1
tgctctgggcttgacagttaatatccagtgttatctgaatgatagaatgcagttagtgcaggagctaacccaggaagaactggggacttcttgcgttcagaagcaccgcgtggggtttggcactgcttttaaaacaccagcaatcaactaatgtaaccacagatgcttcatcaagtccagaaagcccttcccgcggtgcaggcaggcaggcaagcaaatctgcagcataggaacttctttgtactgtggaaaatgcagactgagagtccagtgcctgcttgcaggattttctcccccccscctccgcaacccttgtgtcaaattggattgtgcagcactgggatccagagtgccctgagataatctaaagcgtattattctaactgaaggaggcagcccgtggaaaaaaaaaaaagaagagagagaaacaaaacaatgtctctgaggcttctgcagtgcttaggagcacacttaggttttgcatgcagagtcctatcaccagggagagctttctgtgcatttggcaccagttagaacaggtggaaaaaatgccacttaattttagaatacattttagtagcttaataagtccttaggaag

SEQ ID NO: 39715 - DNA, 494 bp, Chicken  19866894273885_1
gtttaatatctttattgatgatctggacaagagcactgagtgcaccctcagtaagtctgcagatgacaccaagttggcagaaaatgtctatctgcttgggggtaagcaaggccctacagagggacctggacaggctggatagctgggttgagactagtggaatgaagttcaacaagaccaattgctgggtcctgcactttggccataacaacttcaggcagtgctacaggcttggggcagagtggcctcacaagataaggagataggtcccaaaaagtgctgcctcaccttcacaaggcyccttcctccatcagcactttgctatgtcagtgaggtgacatccttctactctttcactgagtgtttgggacatggacctttttgcttttcagtcttttataggtttatcctgcttttctggtggggacatttgggcagagagcagtttggaggcaatccccagtgaagcaagctgtcacatcagtcttccaaaa

SEQ ID NO: 39716 - DNA, 600 bp, Chicken  19866894273888_1
atagcgctactgctggcctgggcttcatccttcccgtaaaactgaatacacatcttcagcatttcctgttgtccctcttcagacccaggatgcccagtacaggccaagtaaagactgctgtgtacctgttctagcagatgagacgtcaggaagttcttcctcttcctcctcctctttttttttttttttagtgtttcactaacacttttcaaactagctagagctacttgatatcaaccataacacttgggactgcttactgccagagagggttcattaaagagctttaaatctttctcwtactaaagttttcagttgtgtgaattaactaagtactagttacctactcactactctggtcaaggcagggaaaacattttgtactgttctactagactgctgtttgttatataagtttctgaagcttatcattaaaacaggctttggtgtcactgaaactgtaactcagttaacagtgccaagagctgatgggataaacaacatattgaagtgtttttattgtcttattgataaagctgttttgtaatattttcttctgtgttcacacagactgtgtgtcctaatactcagtgacccatt

SEQ ID NO: 39717 - DNA, 600 bp, Chicken  19866894273895_1
agagggaggctcccagcacaggagctttgctatgcagcacgtgagctttctggtttcttctaacgtccccgttctcctttctagagtgagacgagcctcacttgagcttcctgtttcactctgtaacttccgctgtgttcaaactgcgctcaggccgcagcttgctgtttgccgttggggtcatttctcatgggatatcagttctcagctgtactcagggggaatcaaaataacgatgaagctcttcaggtaaaatagtctcttaggaaagcgtggctcagagctggattgggagagagraggtctgtttcagagctttgtaaacagatggacattaagctgttgaaggagcctatagtgacttgttgtgatctgyttgaattagtttgctctaagaaaaaaaatcggttggggaggtgcaggtracttgggaaagccacagtgcaactgtagtatggctgcttacgaggaattacctttcgggaattgtgaggctgaggttatatcaggcatatgagtgaatgattcagaatttcctactgaaattgtggttaggtatgaagctatagctgcagcagtggctgccaaagagttccaatt

SEQ ID NO: 39718 - DNA, 597 bp, Chicken  19866894273895_10
cataaagttcttcctgggtatactgctgattcagatagctaagtcattgtgttttggagcttgacaaaaggaccatgtgctgggaagttgatcccaggagtggtgtggtgatatgctctgcttgaccacagcttcatctacacatctattgtactgtttgcagtagctgaagattctgtggcaaatgtgctgtgtcatgacatgtgaccaggttaagaaggttccttttcagggttgaaatggagttgaatggctacacagttatattccagcaacttaktctctgcagtggaggagaaratgtgcatgcatcaattatattgtaaaatagcaaaggcaagagggggggttctgtggctactgggtttaaaggatgttttctgactacaaaacatggggatagggtgggaaggaactaagaatttgaaacagcagccctttaaaacctgtgtcagtctcagctgtgcatatcctgtttactgttcagcaacaccttttcctctgttcaccagtttttttgcactctcctaaaaactgcaagggtcaatctcttacagtatttcacgtaagccttctctcttgtgcctttgttttgaa

SEQ ID NO: 39719 - DNA, 600 bp, Chicken  19866894273895_2
ctttctagagtgagacgagcctcacttgagcttcctgtttcactctgtaacttccgctgtgttcaaactgcgctcaggccgcagcttgctgtttgccgttggggtcatttctcatgggatatcagttctcagctgtactcagggggaatcaaaataacgatgaagctcttcaggtaaaatagtctcttaggaaagcgtggctcagagctggattgggagagagraggtctgtttcagagctttgtaaacagatggacattaagctgttgaaggagcctatagtgacttgttgtgatctgyttgaattagtttgctctaagaaaaaaaatcggttggggaggtgcaggtracttgggaaagccacagtgcaactgtagtatggctgcttacgaggaattacctttcgggaattgtgaggctgaggttatatcaggcatatgagtgaatgattcagaatttcctactgaaattgtggttaggtatgaagctatagctgcagcagtggctgccaaagagttccaattacaggyaattatggagatgaaacttgttagtttatcatctttttcttgaaatgaggggagcaaaactctcctcatc

SEQ ID NO: 39720 - DNA, 600 bp, Chicken  19866894273895_3
acttccgctgtgttcaaactgcgctcaggccgcagcttgctgtttgccgttggggtcatttctcatgggatatcagttctcagctgtactcagggggaatcaaaataacgatgaagctcttcaggtaaaatagtctcttaggaaagcgtggctcagagctggattgggagagagraggtctgtttcagagctttgtaaacagatggacattaagctgttgaaggagcctatagtgacttgttgtgatctgyttgaattagtttgctctaagaaaaaaaatcggttggggaggtgcaggtracttgggaaagccacagtgcaactgtagtatggctgcttacgaggaattacctttcgggaattgtgaggctgaggttatatcaggcatatgagtgaatgattcagaatttcctactgaaattgtggttaggtatgaagctatagctgcagcagtggctgccaaagagttccaattacaggyaattatggagatgaaacttgttagtttatcatctttttcttgaaatgaggggagcaaaactctcctcatcttaggagacggaaggcagcagttacctgggactgtcacttgtgttgacc

SEQ ID NO: 39721 - DNA, 600 bp, Chicken  19866894273895_4
gtttcagagctttgtaaacagatggacattaagctgttgaaggagcctatagtgacttgttgtgatctgyttgaattagtttgctctaagaaaaaaaatcggttggggaggtgcaggtracttgggaaagccacagtgcaactgtagtatggctgcttacgaggaattacctttcgggaattgtgaggctgaggttatatcaggcatatgagtgaatgattcagaatttcctactgaaattgtggttaggtatgaagctatagctgcagcagtggctgccaaagagttccaattacaggyaattatggagatgaaacttgttagtttatcatctttttcttgaaatgaggggagcaaaactctcctcatcttaggagacggaaggcagcagttacctgggactgtcacttgtgttgacctgtacgggacttctgtttctctgtcaaattgcagctatggagaggtgttaggcttttggtctgtgtgtgatgcatagtacagtagttcttyctgagttttactgaagtaaaagtagtaaagtatcattcagtagtataaacaagtcattgtatgcatgactcagttcaaaaatcagaaggt

SEQ ID NO: 39722 - DNA, 600 bp, Chicken  19866894273895_5
agtgaatgattcagaatttcctactgaaattgtggttaggtatgaagctatagctgcagcagtggctgccaaagagttccaattacaggyaattatggagatgaaacttgttagtttatcatctttttcttgaaatgaggggagcaaaactctcctcatcttaggagacggaaggcagcagttacctgggactgtcacttgtgttgacctgtacgggacttctgtttctctgtcaaattgcagctatggagaggtgttaggcttttggtctgtgtgtgatgcatagtacagtagttcttyctgagttttactgaagtaaaagtagtaaagtatcattcagtagtataaacaagtcattgtatgcatgactcagttcaaaaatcagaaggtaaattagagaagcatctgctgatgtgcagttgacctctttttcttcagtacagcaatggctagcaatggaaagcacaagagcagcaaacttgatcaaaagcaaactaatgaaaaaccaacagcacctcaacctttagcatttagctgcttttctgaagcagacttgagtctttctagaggaaattgttagtgatgcttagtatgcaaaac

SEQ ID NO: 39723 - DNA, 600 bp, Chicken  19866894273895_6
tgcttatctgttaaataatcccttccctgcacttatgcttctctcttccctccaggataggatttctgggacttggtctgatgggaagtggcattgtctccaacttactgaagatgggtcatactgtcactgtctggaaccggactgctgagaaggtaggcatgtatcttagatagagatagtactttcctttttttttaaaacatttttctactacctctggtcaccaatcagcggtgcctgggagaggacgctcaagaaacacagtttgccaccttgttttattattctttcctgagygcttgtgggtggccacttcgtactagaasctgtgaacagttcccaccacrttgctgtattgatattaaaagttgcggctttgtgtccctgttgaggactgtaacataaagttcttcctgggtatactgctgattcagatagctaagtcattgtgttttggagcttgacaaaaggaccatgtgctgggaagttgatcccaggagtggtgtggtgatatgctctgcttgaccacagcttcatctacacatctattgtactgtttgcagtagctgaagattctgtggcaaatgtgctgtgtca

SEQ ID NO: 39724 - DNA, 600 bp, Chicken  19866894273895_7
cacttatgcttctctcttccctccaggataggatttctgggacttggtctgatgggaagtggcattgtctccaacttactgaagatgggtcatactgtcactgtctggaaccggactgctgagaaggtaggcatgtatcttagatagagatagtactttcctttttttttaaaacatttttctactacctctggtcaccaatcagcggtgcctgggagaggacgctcaagaaacacagtttgccaccttgttttattattctttcctgagygcttgtgggtggccacttcgtactagaasctgtgaacagttcccaccacrttgctgtattgatattaaaagttgcggctttgtgtccctgttgaggactgtaacataaagttcttcctgggtatactgctgattcagatagctaagtcattgtgttttggagcttgacaaaaggaccatgtgctgggaagttgatcccaggagtggtgtggtgatatgctctgcttgaccacagcttcatctacacatctattgtactgtttgcagtagctgaagattctgtggcaaatgtgctgtgtcatgacatgtgaccaggttaagaaggttcct

SEQ ID NO: 39725 - DNA, 600 bp, Chicken  19866894273895_8
tccaggataggatttctgggacttggtctgatgggaagtggcattgtctccaacttactgaagatgggtcatactgtcactgtctggaaccggactgctgagaaggtaggcatgtatcttagatagagatagtactttcctttttttttaaaacatttttctactacctctggtcaccaatcagcggtgcctgggagaggacgctcaagaaacacagtttgccaccttgttttattattctttcctgagygcttgtgggtggccacttcgtactagaasctgtgaacagttcccaccacrttgctgtattgatattaaaagttgcggctttgtgtccctgttgaggactgtaacataaagttcttcctgggtatactgctgattcagatagctaagtcattgtgttttggagcttgacaaaaggaccatgtgctgggaagttgatcccaggagtggtgtggtgatatgctctgcttgaccacagcttcatctacacatctattgtactgtttgcagtagctgaagattctgtggcaaatgtgctgtgtcatgacatgtgaccaggttaagaaggttccttttcagggttgaaatggagtt

SEQ ID NO: 39726 - DNA, 600 bp, Chicken  19866894273895_9
gtccctgttgaggactgtaacataaagttcttcctgggtatactgctgattcagatagctaagtcattgtgttttggagcttgacaaaaggaccatgtgctgggaagttgatcccaggagtggtgtggtgatatgctctgcttgaccacagcttcatctacacatctattgtactgtttgcagtagctgaagattctgtggcaaatgtgctgtgtcatgacatgtgaccaggttaagaaggttccttttcagggttgaaatggagttgaatggctacacagttatattccagcaacttaktctctgcagtggaggagaaratgtgcatgcatcaattatattgtaaaatagcaaaggcaagagggggggttctgtggctactgggtttaaaggatgttttctgactacaaaacatggggatagggtgggaaggaactaagaatttgaaacagcagccctttaaaacctgtgtcagtctcagctgtgcatatcctgtttactgttcagcaacaccttttcctctgttcaccagtttttttgcactctcctaaaaactgcaagggtcaatctcttacagtatttcacgtaagccttctctct

SEQ ID NO: 39727 - DNA, 599 bp, Chicken  19866894273896_1
  misc_feature (1)..(152): n is any nucleotide
nnnnnnnnnnnnnnnnnnnnnnnnnnnnnnnnnnnnnnnnnnnnnnnnnnnnnnnnnnnnnnnnnnnnnnnnnnnnnnnnnnnnnnnnnnnnnnnnnnnnnnnnnnnnnnnnnnnnnnnnnnnnnnnnnnnnnnnnnnnnnnnnnnnnnnnnttatcttgccatccccttccctttggatttcccttgcaggatggagggagtgggtaccaacgtatggcaccacagcctcaatacgtccctgccctgcttcttccctggccaacctgatatagtggttggcaaccctgtccgtggcagkgggttggcactggatgatcgttaagatcccctccaacctaagctgtcctatgattctgtgatctttgaggtcccttccgacccaaccattctgtgattctatgattctatgatacaaatattctacgcctttgtcccatgtgctctcacaacccaaaactgtcttttggggattttatttttatttgttttgttytgttttgttttgtttttgagctgcttatctgctttgcctcctttctcagttttccttccacaagctcgggcacggcttcattcctttctgctccacgctcatca

SEQ ID NO: 39728 - DNA, 600 bp, Chicken  19866894273896_2
gagggagtgggtaccaacgtatggcaccacagcctcaatacgtccctgccctgcttcttccctggccaacctgatatagtggttggcaaccctgtccgtggcagkgggttggcactggatgatcgttaagatcccctccaacctaagctgtcctatgattctgtgatctttgaggtcccttccgacccaaccattctgtgattctatgattctatgatacaaatattctacgcctttgtcccatgtgctctcacaacccaaaactgtcttttggggattttatttttatttgttttgttytgttttgttttgtttttgagctgcttatctgctttgcctcctttctcagttttccttccacaagctcgggcacggcttcattcctttctgctccacgctcatcattatgctccatccccacgcaaccggagccgtcgccctcacagacctcaggttacgccgggttcccactcacagcccccggcacctccttgagtcccattgggaatcagccccttttgacatcctggtggctctgtacggctgccttgggggcatcgctcccggccacgtcttccagcggcacaccccggcacagcc

SEQ ID NO: 39729 - DNA, 600 bp, Chicken  19866894273897_1
aactttaggtaaagagaagacaacagatacatttattcaaaatttactttcaatggaaactaaattaatcatagaatcatagaatggcctgggttgaaaaggaccacaatgatcatccagtttcaacccccctgctatgtgcagtgtcaccaaccactagaccacgctgcccagagccacatccagcctggccatgaatacctccagagatagggcatccacaacctccttgggcaaccttttccagtgtgtcaccaccctctgagtgaaaaaacaccattctaatatctaacctaaatstcccctgcctcagtttaaaaccatttccccttgtcctatcactatccaccctcataaattgccattgcccctccgcctactacaacactgcatgttgcatctcagcctgtcactaggcacctctgaagagttgcacacaaatcttaccatacactgacaatatttacttacacgtgcaacaaagattaggcaagcccagcacagaaaggtctatgagcactaatgagagaacaaaccacacatatggatcttcacgaggggcccccagtagtcattacagacagctccaggtaccttagc

SEQ ID NO: 39730 - DNA, 600 bp, Chicken  19866894273902_1
ctctgttcttccaccatttgtctagaagtaaaggcagtccactattaaataactggagatgccagacatggggaaagtaatttccagccaggacttgttcagctgcacagcagaactcccacctgtctaattccagctgtccatacaacaggaagcaatcaaaaaatagttcttgactaatctgagtcactgaaaagatgaaatctgcctaagtatttatacaggttacctttacaattctcctgaaacctacaggcaaactttaacccatcctttagaggctctttgagcttagcaacmtccggtagactctgttgtamacacgatacatttaaatgcaatatagtcttaggcatgaaatctctaagaaaaaaaggaaaagaaaactatgttaarcaaaactttgaaagaatgctaccagtaagacctagcttgatgactgttcgatgaaaaacaaaatcaaaacattgcagcttctttccaggaaacatctggatagcctaccacataaagcaatagaattgcagccacaagacccctcttcattacgtgctgtgttcacgtggaacttgtttctatcctttgtacggggtttataac

SEQ ID NO: 39731 - DNA, 600 bp, Chicken  19866894273902_2
tctagaagtaaaggcagtccactattaaataactggagatgccagacatggggaaagtaatttccagccaggacttgttcagctgcacagcagaactcccacctgtctaattccagctgtccatacaacaggaagcaatcaaaaaatagttcttgactaatctgagtcactgaaaagatgaaatctgcctaagtatttatacaggttacctttacaattctcctgaaacctacaggcaaactttaacccatcctttagaggctctttgagcttagcaacmtccggtagactctgttgtamacacgatacatttaaatgcaatatagtcttaggcatgaaatctctaagaaaaaaaggaaaagaaaactatgttaarcaaaactttgaaagaatgctaccagtaagacctagcttgatgactgttcgatgaaaaacaaaatcaaaacattgcagcttctttccaggaaacatctggatagcctaccacataaagcaatagaattgcagccacaagacccctcttcattacgtgctgtgttcacgtggaacttgtttctatcctttgtacggggtttataactgcttcaagctagggacctg

SEQ ID NO: 39732 - DNA, 600 bp, Chicken  19866894273902_3
gttcagctgcacagcagaactcccacctgtctaattccagctgtccatacaacaggaagcaatcaaaaaatagttcttgactaatctgagtcactgaaaagatgaaatctgcctaagtatttatacaggttacctttacaattctcctgaaacctacaggcaaactttaacccatcctttagaggctctttgagcttagcaacmtccggtagactctgttgtamacacgatacatttaaatgcaatatagtcttaggcatgaaatctctaagaaaaaaaggaaaagaaaactatgttaarcaaaactttgaaagaatgctaccagtaagacctagcttgatgactgttcgatgaaaaacaaaatcaaaacattgcagcttctttccaggaaacatctggatagcctaccacataaagcaatagaattgcagccacaagacccctcttcattacgtgctgtgttcacgtggaacttgtttctatcctttgtacggggtttataactgcttcaagctagggacctgctatctatttgacactagtctattgctctatagcccagtggaaatgtagagtactttattcatttcactctccatt

SEQ ID NO: 39733 - DNA, 600 bp, Chicken  19866894273913_1
acaagactgatcatgtaccaagcaaactggaaaattctagtactagcacacttcaattctttttgctaaactaatacacttaaattaacatgtattgatccctattgctaaaccagcctacatcatgctaagcagtgcctgcacagcatccaggtgccctctcaagctggcccccagcccctaacaaaggccagtctgctggcagcgggtgagaaagtggtggggagggggcttagccaggacagctgacctaaactgaccaaagggatattccgtgctgtatgacattattattattartrttttttagcacagactttgtgtgagtcagctgcatrgcggaaattggcaccaagggagccttcacagaaaggtaaacatggcggaaaaagccgtcgcgaagggacgtccccgacgttcggcagcactgacgcgctgcggcggagccgggggcgacagcggccgaagcccctgcgtgtacaaaacctgccgctagggggcggcgcgaacgggacgggcaaacggcgcggcgggtcagaagggcgcggcgcggcagttggcgcgggcggctcgagcacggagggagagaktgycaccgtc

SEQ ID NO: 39734 - DNA, 600 bp, Chicken  19866894273913_2
aagactgatcatgtaccaagcaaactggaaaattctagtactagcacacttcaattctttttgctaaactaatacacttaaattaacatgtattgatccctattgctaaaccagcctacatcatgctaagcagtgcctgcacagcatccaggtgccctctcaagctggcccccagcccctaacaaaggccagtctgctggcagcgggtgagaaagtggtggggagggggcttagccaggacagctgacctaaactgaccaaagggatattccgtgctgtatgacattattattattattrttttttagcacagactttgtgtgagtcagctgcatrgcggaaattggcaccaagggagccttcacagaaaggtaaacatggcggaaaaagccgtcgcgaagggacgtccccgacgttcggcagcactgacgcgctgcggcggagccgggggcgacagcggccgaagcccctgcgtgtacaaaacctgccgctagggggcggcgcgaacgggacgggcaaacggcgcggcgggtcagaagggcgcggcgcggcagttggcgcgggcggctcgagcacggagggagagaktgycaccgtccg

SEQ ID NO: 39735 - DNA, 600 bp, Chicken  19866894273913_3
agtactagcacacttcaattctttttgctaaactaatacacttaaattaacatgtattgatccctattgctaaaccagcctacatcatgctaagcagtgcctgcacagcatccaggtgccctctcaagctggcccccagcccctaacaaaggccagtctgctggcagcgggtgagaaagtggtggggagggggcttagccaggacagctgacctaaactgaccaaagggatattccgtgctgtatgacattattattattattrttttttagcacagactttgtgtgagtcagctgcatrgcggaaattggcaccaagggagccttcacagaaaggtaaacatggcggaaaaagccgtcgcgaagggacgtccccgacgttcggcagcactgacgcgctgcggcggagccgggggcgacagcggccgaagcccctgcgtgtacaaaacctgccgctagggggcggcgcgaacgggacgggcaaacggcgcggcgggtcagaagggcgcggcgcggcagttggcgcgggcggctcgagcacggagggagagaktgycaccgtccgcgggcacagacttagtcatggtatccacgcgaagga

SEQ ID NO: 39736 - DNA, 600 bp, Chicken  19866894273913_4
ttattattattrttttttagcacagactttgtgtgagtcagctgcatrgcggaaattggcaccaagggagccttcacagaaaggtaaacatggcggaaaaagccgtcgcgaagggacgtccccgacgttcggcagcactgacgcgctgcggcggagccgggggcgacagcggccgaagcccctgcgtgtacaaaacctgccgctagggggcggcgcgaacgggacgggcaaacggcgcggcgggtcagaagggcgcggcgcggcagttggcgcgggcggctcgagcacggagggagagaktgycaccgtccgcgggcacagacttagtcatggtatccacgcgaaggagagcaaggatgtctgcccctgccaggaaggatgytgaaaccccgactgagtgcmgaggcagccgtgcagctgtccgaacctctggctgtgtagagtgcatgagcctttccccggcatcgtggggaaagcagcagtcagaacagctgtgcraggtgtgagcaggtagacgacctgctccgacttgtgatgaggctacaggatgaaatacgtgcgttaaaaactgtcgtgggggacaaacaggaaaaccacagt

SEQ ID NO: 39737 - DNA, 600 bp, Chicken  19866894273913_5
ttattattrttttttagcacagactttgtgtgagtcagctgcatrgcggaaattggcaccaagggagccttcacagaaaggtaaacatggcggaaaaagccgtcgcgaagggacgtccccgacgttcggcagcactgacgcgctgcggcggagccgggggcgacagcggccgaagcccctgcgtgtacaaaacctgccgctagggggcggcgcgaacgggacgggcaaacggcgcggcgggtcagaagggcgcggcgcggcagttggcgcgggcggctcgagcacggagggagagaktgycaccgtccgcgggcacagacttagtcatggtatccacgcgaaggagagcaaggatgtctgcccctgccaggaaggatgytgaaaccccgactgagtgcmgaggcagccgtgcagctgtccgaacctctggctgtgtagagtgcatgagcctttccccggcatcgtggggaaagcagcagtcagaacagctgtgcraggtgtgagcaggtagacgacctgctccgacttgtgatgaggctacaggatgaaatacgtgcgttaaaaactgtcgtgggggacaaacaggaaaaccacagttca

SEQ ID NO: 39738 - DNA, 600 bp, Chicken  19866894273913_6
ggtaaacatggcggaaaaagccgtcgcgaagggacgtccccgacgttcggcagcactgacgcgctgcggcggagccgggggcgacagcggccgaagcccctgcgtgtacaaaacctgccgctagggggcggcgcgaacgggacgggcaaacggcgcggcgggtcagaagggcgcggcgcggcagttggcgcgggcggctcgagcacggagggagagaktgycaccgtccgcgggcacagacttagtcatggtatccacgcgaaggagagcaaggatgtctgcccctgccaggaaggatgytgaaaccccgactgagtgcmgaggcagccgtgcagctgtccgaacctctggctgtgtagagtgcatgagcctttccccggcatcgtggggaaagcagcagtcagaacagctgtgcraggtgtgagcaggtagacgacctgctccgacttgtgatgaggctacaggatgaaatacgtgcgttaaaaactgtcgtgggggacaaacaggaaaaccacagttcacccacgcactggcacgttattccaaaggaaagaacagaaaacccaaggcagtctgtatcacatcaggtcgaggggaaaa

SEQ ID NO: 39739 - DNA, 600 bp, Chicken  19866894273913_7
ccgtcgcgaagggacgtccccgacgttcggcagcactgacgcgctgcggcggagccgggggcgacagcggccgaagcccctgcgtgtacaaaacctgccgctagggggcggcgcgaacgggacgggcaaacggcgcggcgggtcagaagggcgcggcgcggcagttggcgcgggcggctcgagcacggagggagagaktgycaccgtccgcgggcacagacttagtcatggtatccacgcgaaggagagcaaggatgtctgcccctgccaggaaggatgytgaaaccccgactgagtgcmgaggcagccgtgcagctgtccgaacctctggctgtgtagagtgcatgagcctttccccggcatcgtggggaaagcagcagtcagaacagctgtgcraggtgtgagcaggtagacgacctgctccgacttgtgatgaggctacaggatgaaatacgtgcgttaaaaactgtcgtgggggacaaacaggaaaaccacagttcacccacgcactggcacgttattccaaaggaaagaacagaaaacccaaggcagtctgtatcacatcaggtcgaggggaaaaaaatttgcaaggctggaggc

SEQ ID NO: 39740 - DNA, 600 bp, Chicken  19866894273913_8
gccgctagggggcggcgcgaacgggacgggcaaacggcgcggcgggtcagaagggcgcggcgcggcagttggcgcgggcggctcgagcacggagggagagaktgycaccgtccgcgggcacagacttagtcatggtatccacgcgaaggagagcaaggatgtctgcccctgccaggaaggatgytgaaaccccgactgagtgcmgaggcagccgtgcagctgtccgaacctctggctgtgtagagtgcatgagcctttccccggcatcgtggggaaagcagcagtcagaacagctgtgcraggtgtgagcaggtagacgacctgctccgacttgtgatgaggctacaggatgaaatacgtgcgttaaaaactgtcgtgggggacaaacaggaaaaccacagttcacccacgcactggcacgttattccaaaggaaagaacagaaaacccaaggcagtctgtatcacatcaggtcgaggggaaaaaaatttgcaaggctggaggcaagaacacaaaggaaaagagcagatggagacaagtttgtgcttgaagccgaatacaaaaaccctccttgctttctccagcgacccccccaccgtcc

SEQ ID NO: 39741 - DNA, 466 bp, Chicken  19866894273915_1
gggaagattcttttacaaaaatggacctttgatgtttaaaaataatttgttttgttttgttttttccccctcaggactgaaaagggacaaaaagcagatgccatgtggccagccccgctctgctgttgccgctgagagcagaggatggcaggaatggaggaggaacaaaatgtaatcaatcagctgcaaaagcaccagagatcaaagggcttgaaaacagcagtcaaaaatcacatgctgtttaacacaagggcagagccccccccgacagaatctgcagctgctcccaggcctgctctsaaactggaggggaagccggttcccgaagtgcctccgagtggattggactggactgcacttctgaacaagatgctggattgcacacaagagtccccaggccaccgcagctcagctctgtgcccatcagcacagcttcccattaagctgtagccagtaaaattataaa

SEQ ID NO: 39742 - DNA, 600 bp, Chicken  19866894273917_1
actgctgaaatggctttaaatcacccaggtaatacatctcaaaagtaattacaaacattgaaatgataccaaacagttctgcccttacaagggttgctcttggacccctctagtgcacatctgcattcattccaaaaagaaaatgaaacatttccactaattgcaaagcaatgcaaagaagggaaaatagcagtgaaccttaaggactgatcacagagaaagtctgctgagaagctctgcctgctttccagagagcggatacccaaagcaccagagacacgagctgtaatccaagcacaytgggcagcatcttgcactccccagaaagctgatggagaaacacaaacctgggcagcatcacagctcagcggctacaggactaacaaggtccccattcacgtgaaggaggaaatattgacctggggagcaccttaccactgctcttatcgctggtgctgctgatrctgggaaagtgctgtttgcaaaaaacaaggtgatggcacacttcaaaaggcacataaataataaaaattaggcaatattctctggcgtaagaacataatgaatgctatatagatagctgtgaagaaggctaaaggg

SEQ ID NO: 39743 - DNA, 600 bp, Chicken  19866894273917_2
aaagcaatgcaaagaagggaaaatagcagtgaaccttaaggactgatcacagagaaagtctgctgagaagctctgcctgctttccagagagcggatacccaaagcaccagagacacgagctgtaatccaagcacaytgggcagcatcttgcactccccagaaagctgatggagaaacacaaacctgggcagcatcacagctcagcggctacaggactaacaaggtccccattcacgtgaaggaggaaatattgacctggggagcaccttaccactgctcttatcgctggtgctgctgatrctgggaaagtgctgtttgcaaaaaacaaggtgatggcacacttcaaaaggcacataaataataaaaattaggcaatattctctggcgtaagaacataatgaatgctatatagatagctgtgaagaaggctaaagggttattaagtcacagccaacaaaacccacggcagggggcagaaattcaataaaaactggtttttcagtcagacgagcaaacctgtaataaaagaatgcagttgctgggaatgcaggaccggtgagatggaaaacctggaacrtctgtcacagtggtgagcataag

SEQ ID NO: 39744 - DNA, 508 bp, Chicken  19866894273917_3
tcttatcgctggtgctgctgatrctgggaaagtgctgtttgcaaaaaacaaggtgatggcacacttcaaaaggcacataaataataaaaattaggcaatattctctggcgtaagaacataatgaatgctatatagatagctgtgaagaaggctaaagggttattaagtcacagccaacaaaacccacggcagggggcagaaattcaataaaaactggtttttcagtcagacgagcaaacctgtaataaaagaatgcagttgctgggaatgcaggaccggtgagatggaaaacctggaacrtctgtcacagtggtgagcataagtaaccaccacacagcctgtaaaatgtgctggcatctccaccgtgccagtaatgcttgcagtaagattgagtgtttgtaaggcaggagctccattttgactatggtaactggagctgaattaggactaagtacaggtctgactcacaccttaagcttctgcagggcatcagcatgtctcacagcag

SEQ ID NO: 39745 - DNA, 600 bp, Chicken  19866894273918_1
ggtgcctccagtccggtgatatctttgatgtcctgcttttgcagatccattaaggcagcactgttgatgataacaaaagtgtctttgctctcctttcccgaaagctccaccctgcttctctgaggattaagctttccagaatagagatagtcaatgtagttttcaggcttgctggaaacaatgttgctgagcatcatgacaaacagaagaaagccaaaaaacccaacaatgatgaggatatagaaagatgccattatctcctcctgcatctccaaggctgggttgctgtggttgttgaawcgaagggtcttcttttgctccacatacatatggaataatttcggcatgatcgaactgccatttgtgtggttgctgaaagccattttccctttccactccggctgcaaatctaaacaaaacagaacaaaggaaccaaatcagctggctaaagcactcctgacctttgtgtcttcaagcacaggtcttgcrcgttgttcccctcttctgttgtgtaactatgtgcactcagacactggctgcacagcttgcacgcataaagctactgtgaaggtcagtgggaagttaacacaggaatcaaga

SEQ ID NO: 39746 - DNA, 600 bp, Chicken  19866894273918_2
agcatcatgacaaacagaagaaagccaaaaaacccaacaatgatgaggatatagaaagatgccattatctcctcctgcatctccaaggctgggttgctgtggttgttgaawcgaagggtcttcttttgctccacatacatatggaataatttcggcatgatcgaactgccatttgtgtggttgctgaaagccattttccctttccactccggctgcaaatctaaacaaaacagaacaaaggaaccaaatcagctggctaaagcactcctgacctttgtgtcttcaagcacaggtcttgcrcgttgttcccctcttctgttgtgtaactatgtgcactcagacactggctgcacagcttgcacgcataaagctactgtgaaggtcagtgggaagttaacacaggaatcaagagaaytgagcactgttgttccctgcatgaaagacgtgcatgcacatacatgggcacgtgctactcctgtatgctgactttgtgttgctagtgatgtagcatcaaaatcaggactcaggaataaccctgtcaattccagtgattatctcaggggaaaagggatgactcactcttaggtaccaccataatgc

SEQ ID NO: 39747 - DNA, 600 bp, Chicken  19866894273918_3
gggtcttcttttgctccacatacatatggaataatttcggcatgatcgaactgccatttgtgtggttgctgaaagccattttccctttccactccggctgcaaatctaaacaaaacagaacaaaggaaccaaatcagctggctaaagcactcctgacctttgtgtcttcaagcacaggtcttgcrcgttgttcccctcttctgttgtgtaactatgtgcactcagacactggctgcacagcttgcacgcataaagctactgtgaaggtcagtgggaagttaacacaggaatcaagagaaytgagcactgttgttccctgcatgaaagacgtgcatgcacatacatgggcacgtgctactcctgtatgctgactttgtgttgctagtgatgtagcatcaaaatcaggactcaggaataaccctgtcaattccagtgattatctcaggggaaaagggatgactcactcttaggtaccaccataatgcaaacaagattgccaccaaggtggcacacaagtagagagacattaaatcatcctcagtaaaagaagctgaactgaaaaagagctattgcaaggaactaaataaaaccaagcggata

SEQ ID NO: 39748 - DNA, 600 bp, Chicken  19866894273921_1
cagcatttcacttttaaaattattactgaactgtaagagcatcttctgggttagaaggaaaaaaaagggcagttaatttggaacatcatatatagttaagtcttgctttaaaactgcttcttcaaatgtatatatcataatgtgacagcataatgaaatgtcagaactgaagaacacacaacactgtcatttttcctacaccacctagtctgactttggcacaagcaaagggtaattttcaggtcaggtattcacagaagtgggcaatttaaattatctatgaatactttcaagtcaccrataatttattatctccatatctccaataataaggaaaaatgacatttactgcagaatttaaatatttagaggagtgtctgaataatgacttagggtcatcaaatttagtttgtaattgaattagagagtaaagaagttcctagaaaggatcctggggaataggaaaggaattcactttctaaacctaaaattgactgaaattacattcatgtgtgtttcaaacatttagttctgctagctgatcttttgttgatcttaatgctttgggcatgacattttgttatcatttcttgaataaag

SEQ ID NO: 39749 - DNA, 571 bp, Chicken  19866894273930_1
ggcgttatgcataggctgcagtaaggcagggcaagatttgggtctggtttgggtggttttgcagtacctcccagcgtgcacagcttggctgcaaagtcagtagcagtgcacttggtcctttggggaggtggagggaactgctttgagctgagaggtgtgtgcgtgacaggagctgcagcttcctgcactgtgacttgcttttgcattttgcctttggctgcccagcagattttgcttcagaaatgatggtccccattgcgtgctgccagtgctaccaaagccaatacaaatgggatgggrgaagctgagcagcgtcccatcacccagtgcaggttgagctcagagtgtaaagctggaacgaggctgctctgggacataaaagcaccagctgataaggcttcagaaggggagaggccctgcaggagtttcccactgtcagcttcacccgtggggacagcggtgctgagatcagagcccggagcatcccatgtctgtgctgcactgctgctctcatggctcaggggaggtctgggggcagacaggcaggagagcacccagcattcaacccagt

SEQ ID NO: 39750 - DNA, 600 bp, Chicken  19866894273933_1
tgggtttaggtagttctgggcagcattctgaagtgttggtttcagacatgccgccccatgagcagtggttctggatgacgccactcagctgtgcctcaagactgtgtgttgctctgggattcttccttacgtatgagaaagataaagtgtcataatattgacaggagctttttttcccaacaaaagggatgtgtttcatgatttttgtgatattttcttgcagtttttctgctttttctgcctgctctggtcatgatagagctagaagaaaattaattaaaagcttttcgctgttagccycataaaaataaaaagaaagaaacacgttggcggagagctagtgatacctggcagcatttctcagctgtgcctttctaaataaaaggtctgacagattcagctcttccagcaaggaatgtgtgaatgaaggtgaagcgaatgtgaagctgtttttgtcttttctagtgtgtaaagtccatgcacactgtgctcttaaactctgctcctgtgcagctattagataaatgttacccacttggagtagtgactcaaaactgcccttactcgttctgttctttttccatacggaaagtttgcatt

SEQ ID NO: 39751 - DNA, 600 bp, Chicken  19866894273944_1
tgtggcgcagatgatccctgacacatagctgaagagcaataaccctgcacatctccccctataaacgccctttccagtggatttactagtgtgggtacagcctcgtattaacacagccacttggcttcagggctgaattgaagggtacagaaaacgcctgtctgttcgcatcagagtatgcagatctgcccactgtgtctctcaaaaccacagactactttctttcttacacctgcttaatcttagctgtgctggtggtgccaggcagtgagcgctagaaataacttctttaggcagggyaggtctaacacacagcacgtgccctcactcccacgtactttccctcttgctcagttcaccacagcctcgttgagttccgcttgcagaagataagaaatgtaatcaccagcattgaaatcactttcttcagcaacagcaccaaggacacgacaaagatcaccatgtgagttacagtgcatgcttctggcttgttttttcccaattccatgtgtaaggatgtttttcccagtccaggaaaggcacaaggatggaacatctcccctgagtgcagccactgtgtgatgaaccacagtctttctt

SEQ ID NO: 39752 - DNA, 600 bp, Chicken  19866894273947_1
ctgcgggacgtgcaggtgctcactctgcaccggggccgctacaccacggcccggcgaacagctgcggtccctcagcttcagtgcattggaggcagtgctgggtgctctgatatccctgaggtcgttcagtgctacaacagaggctgggatggctacgatgtgcaggtaacagcggttaaagtcagttaaaccgatatggaaccctcctcatacagaactggtaacttggggaagagaaagagaaagcaactggccagagtgtcactttcctttctacaagagaacagctaaaggttaccstaggaactgaaaccagtcaaaccttctttggtgttagttgaaacgttgattgaatttattcaaccaaacttaggcaaacccttgagaatgcccttgcttcagcattgcccaatgtaatcacaatttctagaacgtaaaggatttcaggtatttaaatatgtcacttctgccctttaaaaaaaaaagtcaaaacttgtatggcttccaagttaattaaatttcgggatgatgaggcactgcaacaatttgcctggagatatggtggatgctccatccctggagacattcaagctcagcctg

SEQ ID NO: 39753 - DNA, 600 bp, Chicken  19866894273953_1
tctctagtggctcatgggaaaaaaaacttgttcatccaacaaattttccatataatagaccttacaaaacacagctaacaacatattcacacaaggtcattctgactaaaccttttgacctgtcctgaaataaagttgtttcagatcaaaacaagtttacccaagttagaaatgtacaggttacgtcccagtgagcacgcttacattcttgccatcttttcctgattactggagcttctataacaacctaaaaaatacaaataattattacaaattataaattagaataatataaaatgytctaagataatacatatataatacacayattttataataattattacaaataacayccagttatgttaggtattttgcatgtaaaatcttatgtatttcattaaatacttaactttgcattggtttgattggtaacattaaacacaacaagtgtaaaaccctgagtagatattcaaataaaacataaaatagctggattatgaaacgatatatcaataaaatttataaccaggttatgcgtcctatacttcaaagttccttaaacgcaatgatgaactcgttatggatgcaattcaactg

SEQ ID NO: 39754 - DNA, 600 bp, Chicken  19866894273953_2
tgttcatccaacaaattttccatataatagaccttacaaaacacagctaacaacatattcacacaaggtcattctgactaaaccttttgacctgtcctgaaataaagttgtttcagatcaaaacaagtttacccaagttagaaatgtacaggttacgtcccagtgagcacgcttacattcttgccatcttttcctgattactggagcttctataacaacctaaaaaatacaaataattattacaaattataaattagaataatataaaatgytctaagataatacatatataatacacayattttataataattattacaaataacayccagttatgttaggtattttgcatgtaaaatcttatgtatttcattaaatacttaactttgcattggtttgattggtaacattaaacacaacaagtgtaaaaccctgagtagatattcaaataaaacataaaatagctggattatgaaacgatatatcaataaaatttataaccaggttatgcgtcctatacttcaaagttccttaaacgcaatgatgaactcgttatggatgcaattcaactgttctgtttttgttggttttttttttttc

SEQ ID NO: 39755 - DNA, 600 bp, Chicken  19866894273953_3
agaccttacaaaacacagctaacaacatattcacacaaggtcattctgactaaaccttttgacctgtcctgaaataaagttgtttcagatcaaaacaagtttacccaagttagaaatgtacaggttacgtcccagtgagcacgcttacattcttgccatcttttcctgattactggagcttctataacaacctaaaaaatacaaataattattacaaattataaattagaataatataaaatgytctaagataatacatatataatacacayattttataataattattacaaataacayccagttatgttaggtattttgcatgtaaaatcttatgtatttcattaaatacttaactttgcattggtttgattggtaacattaaacacaacaagtgtaaaaccctgagtagatattcaaataaaacataaaatagctggattatgaaacgatatatcaataaaatttataaccaggttatgcgtcctatacttcaaagttccttaaacgcaatgatgaactcgttatggatgcaattcaactgttctgtttttgttggttttttttttttcagagacaatctactaaatgtctgtatta

SEQ ID NO: 39756 - DNA, 600 bp, Chicken  19866894273956_1
agtagaacctctgccctattggatcaaactagaatctgcacacatgaatatgcttttgttcagctagcagactctcaaggtgaggtttatcctgctttttggccagcatgtaatgcagtgtgcttcttaccccctgccatgttatcctacaaaaatgtttttggtaagtgagaactagcaaatgagtatatttttattggatcagtggtcattgcaaggcgtgggtgatgtttgagaagccatatgaggatctcaaacataaaccttttcatctcttcaaatcatagcttgggctgtacmmaagcagtcccagtgagtttaacctgagaagtggaggtaaataaactctatcattttattcrtttggtagcttctttttctttttaaacacataacatgttcctctatacagtgcacgttttttgttggaaatatgagcagctacaaaactaaagtatgtaaaaatatcagcaggagattgacctttgtgaaacttctaaataagcagtctgactttaaacctttttttttcccctgaaaatataggtctgagtttaaacgctggctccaggcaaactgtttgaattgttcagctatcta

SEQ ID NO: 39757 - DNA, 600 bp, Chicken  19866894273956_2
gtagaacctctgccctattggatcaaactagaatctgcacacatgaatatgcttttgttcagctagcagactctcaaggtgaggtttatcctgctttttggccagcatgtaatgcagtgtgcttcttaccccctgccatgttatcctacaaaaatgtttttggtaagtgagaactagcaaatgagtatatttttattggatcagtggtcattgcaaggcgtgggtgatgtttgagaagccatatgaggatctcaaacataaaccttttcatctcttcaaatcatagcttgggctgtacmmaagcagtcccagtgagtttaacctgagaagtggaggtaaataaactctatcattttattcrtttggtagcttctttttctttttaaacacataacatgttcctctatacagtgcacgttttttgttggaaatatgagcagctacaaaactaaagtatgtaaaaatatcagcaggagattgacctttgtgaaacttctaaataagcagtctgactttaaacctttttttttcccctgaaaatataggtctgagtttaaacgctggctccaggcaaactgtttgaattgttcagctatctaa

SEQ ID NO: 39758 - DNA, 600 bp, Chicken  19866894273956_3
gctagcagactctcaaggtgaggtttatcctgctttttggccagcatgtaatgcagtgtgcttcttaccccctgccatgttatcctacaaaaatgtttttggtaagtgagaactagcaaatgagtatatttttattggatcagtggtcattgcaaggcgtgggtgatgtttgagaagccatatgaggatctcaaacataaaccttttcatctcttcaaatcatagcttgggctgtacmmaagcagtcccagtgagtttaacctgagaagtggaggtaaataaactctatcattttattcrtttggtagcttctttttctttttaaacacataacatgttcctctatacagtgcacgttttttgttggaaatatgagcagctacaaaactaaagtatgtaaaaatatcagcaggagattgacctttgtgaaacttctaaataagcagtctgactttaaacctttttttttcccctgaaaatataggtctgagtttaaacgctggctccaggcaaactgtttgaattgttcagctatctaaaaatacagttaaaaagctgcatgtaaagagacaagaagctgaagtagaagcaaaggaagag

SEQ ID NO: 39759 - DNA, 540 bp, Chicken  19866894273957_1
tttttgcagtagagttagcatgtgatttttcattattttgaactgctttgttgggtggacagggtatagagaaaaacacagtgtgttctttacgctttacactacatgtgggatccagtgaattaaatcctatctgggtgaaagttaataacttaccaccttggcaagcttttgaccactgtgaggaagagtttcccagctgtgtataatttgtgttatatggtgggtgtgtgcataatacaagtaagtactgttaatgtcaaatgcttgaatccgttataaatttaataggtttgggakgtagatgattctcattggacttaaggaatgttatggaaaacttggtatatctagatcccatttagtatatactgtcttgtttgaaagatcttctctcttccttgtgtttttctttcaaattctgatttccaaaagatggtgatataccttggtgattctgtgattggtatgtggagcaaggttgttggggtaccgtggatttctttcatctaagcagctgttccttttgttagattctgt

SEQ ID NO: 39760 - DNA, 600 bp, Chicken  19866894273958_1
agatttagggaacaaagagataaaggctgtttattgtttattattaacaggtgatggttttagttaatttttttcagtagtgtacttgattagtcttcttgtagttacttgactgatgaaaatgagcagtgaattgggatcatggtcacctctatttctgctgttaaggaacagtaagcagtagaggccaagggacaaatgtattggggaatgtgtggatgagctgttgctaaacagtgagctttaaaagaatactcagtctatgtttctgatgaaaatcttccctgctggggtcactcycagcttccttagaaatatttgtgtcttggtttctgccagtcagaatggaaacagaaaggtggctttgagacttgacatgcattttggcttccatttcaatgtttctggcagaagttgttggcaattacgttaatacgcttggcttaaaaggatccaaatgtcattttgagacaaagagttggctgaaggcattgtgaggactctcaactgttttttaatggtcttgggaatctggaggggtcccagttgactaggagctggcaaatgttatcctggtattgaggaaggccaagaatgaag

SEQ ID NO: 39761 - DNA, 600 bp, Chicken  19866894273977_1
aagcagtaaaaaagataggattcacacctttaaaaatagcagggtgtttaaagaaaatagatcaaccagaaatgtgatctgttttactcaggaaagtttgacattttaattaaacatggataaattacttccttgagtaattaagtactttcaagtatctctagagtgtttgaagcatatgtccatcactgaaatgtagtggagttatttattctgtagtggagtagcctaaaaagataatgactctgacctaattaaatatatgggtgaaatccattaaaaagtaaaattcagctcaakcaagacgaagtatacaagaaaccatgctgtcactctgataaatcattcctaatttgaagtgtaacttacaaatgatctttccttatacacttacctagaggtactatagacaaggaggctgccttacatctccatcattacttcatcagtctgactctattacatgatgcttccgtactttctacaaatgtcttaattctaaatacactctcatagcctgtcctcagtatgtctcttccaaatactggaaaaattactgctaaaaatcaggaatgtcatccagttgccacagttcatacc

SEQ ID NO: 39762 - DNA, 600 bp, Chicken  19866894273978_1
ggttgcaatcacagcattcagacacctccaacccaaagacactgctcttttcttcagtttagttccctctaacataaataaagtaataagtagaagtaagggagaagaggcctttatgatgtgaaagaatatttggtgagaaaaagtgatacagaaacaagggaagggcagaagttgtcttatgtgagaatacagatgcagttttagtgaagctgaagtgacgctctgctaatgacgagaaggtaattgctggtttattcccagataccaaactcttccaactgtgtttctgcacgtagyatgagatatttctttgccagagagcttttctgggaatatcaaaaccactgtggctgggtggaacaagaggtatcatcagctcagcctaagatttatgtcttggtttgtttttatgtgggttgctgactcttgtccatgctctctgtgtaatgcagaattgtattttatggatactgttgtatctttatgatcatttttgttgtcccttttaacacttgataagaaaacagtattaatgtgccaatttttcctttcaggcacaacccgccctccgagagaaggagaagtgcctggtgtgga

SEQ ID NO: 39763 - DNA, 600 bp, Chicken  19866894273978_2
ttcactttttcttccctcctgctgtctttttccccttcatctcttcatctttttccctgtgtacacatccttcattgcccaattgtgtctcaggatgcagccacacggtgcactgcttttggcctttttttcttctttcttcttggataattactgagaagctgagtcattgtgttgattctttctacagcacagctttgcaaacaacagcgttgagccagccaaggggcactgaaatgtcactggggtgagagcagggaaaagatggctttgccttcaagaacatgcgagacaaattgrccaaattcagtcatgcaataggatttgttgatctaaagatgcaatcaatatttgatgtgaaactacttttggaggtgtgggttgttgttgttgttgttttgtggtttgcatgaagatgctgcaaatattatttggtttcagtcttccatctctctgagctgattggccccatcagcaccaacactaatgttccagcagcagcacttctccaaaatgagctttttcctctccacatttctaattataacattaaattagttttctttgtcacagtgctcaaaatagatcagctgaactgct

SEQ ID NO: 39764 - DNA, 600 bp, Chicken  19866894273980_1
cacaactgagacagtgtttactagaaagcacacaatctgaatatatccataggtctatgcatccaaacaaaatataaaactcaatcctaccacatttctgctatgctccagccagtaaaattatttggactctgactgaattcattcagaatatccaggtccccttgttctctggctcatggcttctcaactgagatatagagtacctcaacctctcttctgaaactaccttccttcagtactggttgctttattttactctcattaaaaataacttcattcttctgtcctgccttagawtttttttttttctgtttctctgcattttcatgtggagataccatttctttaccatctcaaagaggaattaagtcctctgcaaaaatgatgcaaaaggttcaactattctcttgattttattgactggtatgtgtttggaataattaacccataatatttgacctgattttatatttaacagatatatttcccagatttgtacatggatctatcataagacataaggagtgcatttcagaaaagactgcagaggtaatataaatcaaagytgagaccagaaataggcyaaggtccctcatg

SEQ ID NO: 39765 - DNA, 600 bp, Chicken  19866894273980_2
cttcagtactggttgctttattttactctcattaaaaataacttcattcttctgtcctgccttagawtttttttttttctgtttctctgcattttcatgtggagataccatttctttaccatctcaaagaggaattaagtcctctgcaaaaatgatgcaaaaggttcaactattctcttgattttattgactggtatgtgtttggaataattaacccataatatttgacctgattttatatttaacagatatatttcccagatttgtacatggatctatcataagacataaggagtgcawttcagaaaagactgcagaggtaatataaatcaaagytgagaccagaaataggcyaaggtccctcatgtaaaatttgagttaaataatacagggactttgaggctataattgatttaagcactggaacaagtatctggggtctcgtggagcaactttcactgcagaytgttgaagtcagacaaccatcccttgttctctagrrggagagkttcagcaagagcatctttttgaccccaattttctacaattactatatacatttaagcaggaattttgtgtttgctacataatgatggattc

SEQ ID NO: 39766 - DNA, 600 bp, Chicken  19866894273980_3
aataacttcattcttctgtcctgccttagawtttttttttttctgtttctctgcattttcatgtggagataccatttctttaccatctcaaagaggaattaagtcctctgcaaaaatgatgcaaaaggttcaactattctcttgattttattgactggtatgtgtttggaataattaacccataatatttgacctgattttatatttaacagatatatttcccagatttgtacatggatctatcataagacataaggagtgcatttcagaaaagactgcagaggtaatataaatcaaagytgagaccagaaataggcyaaggtccctcatgtaaaatttgagttaaataatacagggactttgaggctataattgatttaagcactggaacaagtatctggggtctcgtggagcaactttcactgcagaytgttgaagtcagacaaccatcccttgttctctagrrggagagkttcagcaagagcatctttttgaccccaattttctacaattactatatacatttaagcaggaattttgtgtttgctacataatgatggattctacaaatcatatttatatttgcgaccaaaacacaca

SEQ ID NO: 39767 - DNA, 600 bp, Chicken  19866894273980_4
tcctgccttagawtttttttttttctgtttctctgcattttcatgtggagataccatttctttaccatctcaaagaggaattaagtcctctgcaaaaatgatgcaaaaggttcaactattctcttgattttattgactggtatgtgtttggaataattaacccataatatttgacctgattttatatttaacagatatatttcccagatttgtacatggatctatcataagacataaggagtgcatttcagaaaagactgcagaggtaatataaatcaaagytgagaccagaaataggcyaaggtccctcatgtaaaatttgagttaaataatacagggactttgaggctataattgatttaagcactggaacaagtatctggggtctcgtggagcaactttcactgcagaytgttgaagtcagacaaccatcccttgttctctagrrggagagkttcagcaagagcatctttttgaccccaattttctacaattactatatacatttaagcaggaattttgtgtttgctacataatgatggattctacaaatcatatttatatttgcgaccaaaacacacatcttagaagttcaattaa

SEQ ID NO: 39768 - DNA, 600 bp, Chicken  19866894273980_5
caactattctcttgattttattgactggtatgtgtttggaataattaacccataatatttgacctgattttatatttaacagatatatttcccagatttgtacatggatctatcataagacataaggagtgcatttcagaaaagactgcagaggtaatataaatcaaagytgagaccagaaataggcyaaggtccctcatgtaaaatttgagttaaataatacagggactttgaggctataattgatttaagcactggaacaagtatctggggtctcgtggagcaactttcactgcagaytgttgaagtcagacaaccatcccttgttctctagrrggagagkttcagcaagagcatctttttgaccccaattttctacaattactatatacatttaagcaggaattttgtgtttgctacataatgatggattctacaaatcatatttatatttgcgaccaaaacacacatcttagaagttcaattaatggagttgatggtattctacaatccagcatgtaaagcatttcatgctgtactgaagttactcagttatgatgcaacacattaaatctaccagttccaagatactttaaaaat

SEQ ID NO: 39769 - DNA, 600 bp, Chicken  19866894273980_6
ttggaataattaacccataatatttgacctgattttatatttaacagatatatttcccagatttgtacatggatctatcataagacataaggagtgcatttcagaaaagactgcagaggtaatataaatcaaagytgagaccagaaataggcyaaggtccctcatgtaaaatttgagttaaataatacagggactttgaggctataattgatttaagcactggaacaagtatctggggtctcgtggagcaactttcactgcagaytgttgaagtcagacaaccatcccttgttctctagrrggagagkttcagcaagagcatctttttgaccccaattttctacaattactatatacatttaagcaggaattttgtgtttgctacataatgatggattctacaaatcatatttatatttgcgaccaaaacacacatcttagaagttcaattaatggagttgatggtattctacaatccagcatgtaaagcatttcatgctgtactgaagttactcagttatgatgcaacacattaaatctaccagttccaagatactttaaaaatgccatttagtctagacaaataaaacctcagcacta

SEQ ID NO: 39770 - DNA, 600 bp, Chicken  19866894273980_7
tggaataattaacccataatatttgacctgattttatatttaacagatatatttcccagatttgtacatggatctatcataagacataaggagtgcatttcagaaaagactgcagaggtaatataaatcaaagytgagaccagaaataggcyaaggtccctcatgtaaaatttgagttaaataatacagggactttgaggctataattgatttaagcactggaacaagtatctggggtctcgtggagcaactttcactgcagaytgttgaagtcagacaaccatcccttgttctctagrrggagagkttcagcaagagcatctttttgaccccaattttctacaattactatatacatttaagcaggaattttgtgtttgctacataatgatggattctacaaatcatatttatatttgcgaccaaaacacacatcttagaagttcaattaatggagttgatggtattctacaatccagcatgtaaagcatttcatgctgtactgaagttactcagttatgatgcaacacattaaatctaccagttccaagatactttaaaaatgccatttagtctagacaaataaaacctcagcactac

SEQ ID NO: 39771 - DNA, 600 bp, Chicken  19866894273980_8
attaacccataatatttgacctgattttatatttaacagatatatttcccagatttgtacatggatctatcataagacataaggagtgcatttcagaaaagactgcagaggtaatataaatcaaagytgagaccagaaataggcyaaggtccctcatgtaaaatttgagttaaataatacagggactttgaggctataattgatttaagcactggaacaagtatctggggtctcgtggagcaactttcactgcagaytgttgaagtcagacaaccatcccttgttctctagrrggagagkttcagcaagagcatctttttgaccccaattttctacaattactatatacatttaagcaggaattttgtgtttgctacataatgatggattctacaaatcatatttatatttgcgaccaaaacacacatcttagaagttcaattaatggagttgatggtattctacaatccagcatgtaaagcatttcatgctgtactgaagttactcagttatgatgcaacacattaaatctaccagttccaagatactttaaaaatgccatttagtctagacaaataaaacctcagcactacaagagtc

SEQ ID NO: 39772 - DNA, 600 bp, Chicken  19866894273980_9
attaaatctaccagttccaagatactttaaaaatgccatttagtctagacaaataaaacctcagcactacaagagtcatactaaaggtttataactaaatggttatgacagaatatgcactgggtgtacttcattctgattacttggacttactggtgacaaaaagtccactgactgcagaaatacctttcgttttaagttaatgctacaagattaaagaataggaaaaaatgccaattcttcctctttcagactttgaaatttcagtgtgaaaaactgctttcaaaaatagtttctgtrgagaatgaatcctgctctttgtgaaaacaaagcatatatagattcatgatctggcatgagtgggaaggtgttaatttagaaactgctcataattcacagttactatcttgataactaagatctgaagaaaaatgtattcggtgtatttgttatatctgagtaccaatttgacagattggaagggtgggttttttggctttcagttttataaaaacgtcaactaaataaaaacaaataataaagtctgacctatctataaaagctatgctcttttgtccgtctgctgggaaggtaactaag

SEQ ID NO: 39773 - DNA, 600 bp, Chicken  19866894273981_1
ctctgcttcttcttaaacactgccttaagagctgtgacattgccaaagccatgccaaagccatacttaggttaacacacttcaatgcatgtggcctcagcactcagtcacgtgcaatatcaatttctacactaatacagctgcagctgtaaggaatcttttgctgttatagcttgatgaaatgaaactgcttataaaacaacgtaagacaaaatgaccttgtgttaggatgacatcgttttcctgcaaaaagaagttatcttgataaggcttttagtcttagctatgtgtccatataaaraaggcagtgaaagttaacacttggggggcatagcatcaaacatgaaattcagtgtactataaatgacagagatacagaatcatacattcagctttcctctgtcccagtaggagaacactacttgcacagcaacttgatttaacagtcattcactgatgtgaggttccaaactgcttactacttttattttgctatagttgcatacgatatatgcatgttagcaaagattttgagtgtccttgcctccatcttctgtgatctgcttgatcctattaaatgcaatgcttgttccaacatccc

SEQ ID NO: 39774 - DNA, 599 bp, Chicken  19866894273986_1
  misc_feature (1)..(55): n is any nucleotide
nnnnnnnnnnnnnnnnnnnnnnnnnnnnnnnnnnnnnnnnnnnnnnnnnnnnnnncaatatcagaatgttagagactgaaaaggctcaatattaaaaaaaaatatatatatatatacacatactccatatgtgatgggaacataagaggtatgccagggtacatttggaggaatgcaaactaaggatttcattactgagatgcaatgaacacagtagttaatgctcccactaaagtttgggttagcctctgatcacttactccaaggatcttccgctggcacttggaacactcaggtgcraagaacttctcatagcagacctcacaatacagagcccctttctcttccacaaatccaatgtaagccatggaagttttgcagtgagcacagttaaattcctctgggtgccatgacttccccarggccaccaagaaaggtcccctggttaggaagaaaagattagttagcaaatgccattgaagtggctcctgctgaagcttttaatttacctctgtaactccatggcacggttcacaatatggtattgcttcrcacctcttcccttggatgggattgtaagaaagtgacaagtgtcaact

SEQ ID NO: 39775 - DNA, 600 bp, Chicken  19866894273986_2
ctccatatgtgatgggaacataagaggtatgccagggtacatttggaggaatgcaaactaaggatttcattactgagatgcaatgaacacagtagttaatgctcccactaaagtttgggttagcctctgatcacttactccaaggatcttccgctggcacttggaacactcaggtgcraagaacttctcatagcagacctcacaatacagagcccctttctcttccacaaatccaatgtaagccatggaagttttgcagtgagcacagttaaattcctctgggtgccatgacttccccarggccaccaagaaaggtcccctggttaggaagaaaagattagttagcaaatgccattgaagtggctcctgctgaagcttttaatttacctctgtaactccatggcacggttcacaatatggtattgcttcrcacctcttcccttggatgggattgtaagaaagtgacaagtgtcaactagtgctattctcatggaactatctctgagacccatgaccccagtaataactaattcttttcactttgtggcatttcaaaaatcctgttttagtataacatagaatacaatgctgaagtggcta

SEQ ID NO: 39776 - DNA, 600 bp, Chicken  19866894273986_3
tcacttactccaaggatcttccgctggcacttggaacactcaggtgcraagaacttctcatagcagacctcacaatacagagcccctttctcttccacaaatccaatgtaagccatggaagttttgcagtgagcacagttaaattcctctgggtgccatgacttccccarggccaccaagaaaggtcccctggttaggaagaaaagattagttagcaaatgccattgaagtggctcctgctgaagcttttaatttacctctgtaactccatggcacggttcacaatatggtattgcttcrcacctcttcccttggatgggattgtaagaaagtgacaagtgtcaactagtgctattctcatggaactatctctgagacccatgaccccagtaataactaattcttttcactttgtggcatttcaaaaatcctgttttagtataacatagaatacaatgctgaagtggctactaaggaaagggaaaaaagaaaagaaaaaataaaaatgttccatgttcccaactgtttctatctactgcaaagagattcagtgataccattagctctcttccagcatgtaattgtatcaaagccacaaat

SEQ ID NO: 39777 - DNA, 599 bp, Chicken  19866894273987_1
  misc_feature (1)..(44): n is any nucleotide
nnnnnnnnnnnnnnnnnnnnnnnnnnnnnnnnnnnnnnnnnnnnaaaacaaaacatatattttgttgtaccagatatgttgcttccataaattatctacttaggtagaaaaattattgtgaattcacagcatacaaaatatggcattggtaggcagtttatgctgcctttcagttagacacagctgttatttcatcccttggaccttgtcacaaggtcagggacatcaccaaacacaaagagctcaggacatggcacctttcttgatttcctgcccagaagaaagctctaaggcacctaragyctctgctcctgctcagctcttgctgctgttcacacggagaccagaaaaatccttgtagccttgcattattatcatcaggaataaagcactgcctaaagctgcaaaattattgcratgggtactggtgatgtacacaattgttttccacgtgcttcaacgaacacattaaagatcacctgctcttttgggcaaagtatgaagagcgcttcatatttgtarctggaacatctatcaatattttttttccaaccatcatgaaagagatacaaagaagtygtcaaaacacattgggaaac

SEQ ID NO: 39778 - DNA, 599 bp, Chicken  19866894273987_2
  misc_feature (1)..(41): n is any nucleotide
nnnnnnnnnnnnnnnnnnnnnnnnnnnnnnnnnnnnnnnnnaaaacaaaacatatattttgttgtaccagatatgttgcttccataaattatctacttaggtagaaaaattattgtgaattcacagcatacaaaatatggcattggtaggcagtttatgctgcctttcagttagacacagctgttatttcatcccttggaccttgtcacaaggtcagggacatcaccaaacacaaagagctcaggacatggcacctttcttgatttcctgcccagaagaaagctctaaggcacctaragyctctgctcctgctcagctcttgctgctgttcacacggagaccagaaaaatccttgtagccttgcattattatcatcaggaataaagcactgcctaaagctgcaaaattattgcratgggtactggtgatgtacacaattgttttccacgtgcttcaacgaacacattaaagatcacctgctcttttgggcaaagtatgaagagcgcttcatatttgtarctggaacatctatcaatattttttttccaaccatcatgaaagagatacaaagaagtygtcaaaacacattgggaaacttc

SEQ ID NO: 39779 - DNA, 600 bp, Chicken  19866894273987_3
gtgaattcacagcatacaaaatatggcattggtaggcagtttatgctgcctttcagttagacacagctgttatttcatcccttggaccttgtcacaaggtcagggacatcaccaaacacaaagagctcaggacatggcacctttcttgatttcctgcccagaagaaagctctaaggcacctaragyctctgctcctgctcagctcttgctgctgttcacacggagaccagaaaaatccttgtagccttgcattattatcatcaggaataaagcactgcctaaagctgcaaaattattgcratgggtactggtgatgtacacaattgttttccacgtgcttcaacgaacacattaaagatcacctgctcttttgggcaaagtatgaagagcgcttcatatttgtarctggaacatctatcaatattttttttccaaccatcatgaaagagatacaaagaagtygtcaaaacacattgggaaacttcaatgcttttggtggcacagccaatcatatattctgttacttcccctatgccatggaaacattagggagcctgacaacagcttcagtcactgacttaaaactgagactctcaaaaa

SEQ ID NO: 39780 - DNA, 600 bp, Chicken  19866894273987_4
acatcaccaaacacaaagagctcaggacatggcacctttcttgatttcctgcccagaagaaagctctaaggcacctaragyctctgctcctgctcagctcttgctgctgttcacacggagaccagaaaaatccttgtagccttgcattattatcatcaggaataaagcactgcctaaagctgcaaaattattgcratgggtactggtgatgtacacaattgttttccacgtgcttcaacgaacacattaaagatcacctgctcttttgggcaaagtatgaagagcgcttcatatttgtarctggaacatctatcaatattttttttccaaccatcatgaaagagatacaaagaagtygtcaaaacacattgggaaacttcaatgcttttggtggcacagccaatcatatattctgttacttcccctatgccatggaaacattagggagcctgacaacagcttcagtcactgacttaaaactgagactctcaaaaaccttatcatgccaagaaaattccagtaatgcaagtactgcttggcatacatccaagatcatatttaccactagaagtgctttcaaactacatgctgttttcaaca

SEQ ID NO: 39781 - DNA, 574 bp, Chicken  19866894273987_5
agaaagctctaaggcacctaragyctctgctcctgctcagctcttgctgctgttcacacggagaccagaaaaatccttgtagccttgcattattatcatcaggaataaagcactgcctaaagctgcaaaattattgcratgggtactggtgatgtacacaattgttttccacgtgcttcaacgaacacattaaagatcacctgctcttttgggcaaagtatgaagagcgcttcatatttgtarctggaacatctatcaatattttttttccaaccatcatgaaagagatacaaagaagtygtcaaaacacattgggaaacttcaatgcttttggtggcacagccaatcatatattctgttacttcccctatgccatggaaacattagggagcctgacaacagcttcagtcactgacttaaaactgagactctcaaaaaccttatcatgccaagaaaattccagtaatgcaagtactgcttggcatacatccaagatcatatttaccactagaagtgctttcaaactacatgctgttttcaacatcagccgtctgtcatacacaacagaaagaca

SEQ ID NO: 39782 - DNA, 600 bp, Chicken  19866894273991_1
atgctggcagcagcaaaccaaacctgtttgtgactgtaatccagcataaatccatgctgctgtccagcactgggcaggctgcactgtggcctctcatcacaaccagtctcccttttaattgcacctacagtgtcttacgtgccataggaaatcatccaggggaaggagtaaaaagccgttaggatccttgctggcagagctgaaagaggtattttctgttcctctgctccaaaaagcccacaagaaacactgcctgacatgaagatttacttgtgtgtgggctatcacctagaggatccrttctaaccatagctaccctggacagacagcccatcacagaggaagaaatcaacactgagatactgcttcttgcactgggaactgcattgctacctcctctcatgcctctgtgctaacaaaaggggactgcagctgccgctcggtccaccctccttatttgcagaagcacattacaatatgtgaattgcatgacttgcatctccctacacttaacatataaaacaaagagaaaccactgaacaaatacaaacacaagtactataaaagcaatgaagcctaattcacacaaatttaaattga

SEQ ID NO: 39783 - DNA, 599 bp, Chicken  19866894273997_1
  misc_feature (1)..(45): n is any nucleotide
nnnnnnnnnnnnnnnnnnnnnnnnnnnnnnnnnnnnnnnnnnnnnaaacaattatctctcactgggagagttttcaaacaaacacggtcatgtccatgaattagtctcccagggagtctctatgtagctgaaaaggagatttagaaaaagcaaaaattctgctactcttctctggctccttcctagcagtttcccaaagcttcaaccttcctgcctagtctctgccccccataaacagtgctttggaaggcaatggaaacagcaaaaaaaagtggagaacacacagagtactcctctacrtatatccctrtgcaaatacaagttcagattgaactcatcccagtgtggatgagcacactcattacaggtgctctgacacattcagaaatgctgtgccctggcacagcacctgtgtatgattgatttgtgtttagattttcatatgcaaaaatgyatagatgtagccagttgtctcattagttcccataggaggcagtagctgaacagtgaggggtgaaggggaagcatggcatgcttcattagagtgagtggaaacattttagcaggagtttatggagggtggaaatgtcacrctggtt

SEQ ID NO: 39784 - DNA, 599 bp, Chicken  19866894273997_2
  misc_feature (1)..(35): n is any nucleotide
nnnnnnnnnnnnnnnnnnnnnnnnnnnnnnnnnnnaaacaattatctctcactgggagagttttcaaacaaacacggtcatgtccatgaattagtctcccagggagtctctatgtagctgaaaaggagatttagaaaaagcaaaaattctgctactcttctctggctccttcctagcagtttcccaaagcttcaaccttcctgcctagtctctgccccccataaacagtgctttggaaggcaatggaaacagcaaaaaaaagtggagaacacacagagtactcctctacrtatatccctrtgcaaatacaagttcagattgaactcatcccagtgtggatgagcacactcattacaggtgctctgacacattcagaaatgctgtgccctggcacagcacctgtgtatgattgatttgtgtttagattttcatatgcaaaaatgyatagatgtagccagttgtctcattagttcccataggaggcagtagctgaacagtgaggggtgaaggggaagcatggcatgcttcattagagtgagtggaaacattttagcaggagtttatggagggtggaaatgtcacrctggttctgcaatcag

SEQ ID NO: 39785 - DNA, 600 bp, Chicken  19866894273997_3
aattctgctactcttctctggctccttcctagcagtttcccaaagcttcaaccttcctgcctagtctctgccccccataaacagtgctttggaaggcaatggaaacagcaaaaaaaagtggagaacacacagagtactcctctacrtatatccctrtgcaaatacaagttcagattgaactcatcccagtgtggatgagcacactcattacaggtgctctgacacattcagaaatgctgtgccctggcacagcacctgtgtatgattgatttgtgtttagattttcatatgcaaaaatgyatagatgtagccagttgtctcattagttcccataggaggcagtagctgaacagtgaggggtgaaggggaagcatggcatgcttcattagagtgagtggaaacattttagcaggagtttatggagggtggaaatgtcacrctggttctgcaatcagcagaagatttaaaaactgcaaatgtctgttcatagggaaaaagttcccccrttccatctcaggccacattgggaatttctttgtttctttttctcatgatmgtaaccttatttaatagatgctatgtaattttttttatacagac

SEQ ID NO: 39786 - DNA, 600 bp, Chicken  19866894273997_4
ctctacrtatatccctrtgcaaatacaagttcagattgaactcatcccagtgtggatgagcacactcattacaggtgctctgacacattcagaaatgctgtgccctggcacagcacctgtgtatgattgatttgtgtttagattttcatatgcaaaaatgyatagatgtagccagttgtctcattagttcccataggaggcagtagctgaacagtgaggggtgaaggggaagcatggcatgcttcattagagtgagtggaaacattttagcaggagtttatggagggtggaaatgtcacrctggttctgcaatcagcagaagatttaaaaactgcaaatgtctgttcatagggaaaaagttcccccrttccatctcaggccacattgggaatttctttgtttctttttctcatgatmgtaaccttatttaatagatgctatgtaattttttttatacagacaagctttttcaggcttgtttttagtatttcctatgtctatccrttcatattggtttgcctgccttttgaggcagcaaggtgcttgagatctcaggaactgacccaggaaagtgtaatttctcttgggcaagagcctgct

SEQ ID NO: 39787 - DNA, 600 bp, Chicken  19866894273997_5
attacaggtgctctgacacattcagaaatgctgtgccctggcacagcacctgtgtatgattgatttgtgtttagattttcatatgcaaaaatgyatagatgtagccagttgtctcattagttcccataggaggcagtagctgaacagtgaggggtgaaggggaagcatggcatgcttcattagagtgagtggaaacattttagcaggagtttatggagggtggaaatgtcacrctggttctgcaatcagcagaagatttaaaaactgcaaatgtctgttcatagggaaaaagttcccccrttccatctcaggccacattgggaatttctttgtttctttttctcatgatmgtaaccttatttaatagatgctatgtaattttttttatacagacaagctttttcaggcttgtttttagtatttcctatgtctatccrttcatattggtttgcctgccttttgaggcagcaaggtgcttgagatctcaggaactgacccaggaaagtgtaatttctcttgggcaagagcctgctggagagccagggatgaggagagcttcactggctgctgtggccagaagaaagcagcccaggttgccag

SEQ ID NO: 39788 - DNA, 600 bp, Chicken  19866894273997_6
tgtgtatgattgatttgtgtttagattttcatatgcaaaaatgyatagatgtagccagttgtctcattagttcccataggaggcagtagctgaacagtgaggggtgaaggggaagcatggcatgcttcattagagtgagtggaaacattttagcaggagtttatggagggtggaaatgtcacrctggttctgcaatcagcagaagatttaaaaactgcaaatgtctgttcatagggaaaaagttcccccrttccatctcaggccacattgggaatttctttgtttctttttctcatgatmgtaaccttatttaatagatgctatgtaattttttttatacagacaagctttttcaggcttgtttttagtatttcctatgtctatccrttcatattggtttgcctgccttttgaggcagcaaggtgcttgagatctcaggaactgacccaggaaagtgtaatttctcttgggcaagagcctgctggagagccagggatgaggagagcttcactggctgctgtggccagaagaaagcagcccaggttgccagtggttgctgtctgtcatgtaggacttgaacaagagtgtgaatagttgaac

SEQ ID NO: 39789 - DNA, 600 bp, Chicken  19866894273997_7
catatgcaaaaatgyatagatgtagccagttgtctcattagttcccataggaggcagtagctgaacagtgaggggtgaaggggaagcatggcatgcttcattagagtgagtggaaacattttagcaggagtttatggagggtggaaatgtcacrctggttctgcaatcagcagaagatttaaaaactgcaaatgtctgttcatagggaaaaagttcccccrttccatctcaggccacattgggaatttctttgtttctttttctcatgatmgtaaccttatttaatagatgctatgtaamtttttttatacagacaagctttttcaggcttgtttttagtatttcctatgtctatccrttcatattggtttgcctgccttttgaggcagcaaggtgcttgagatctcaggaactgacccaggaaagtgtaatttctcttgggcaagagcctgctggagagccagggatgaggagagcttcactggctgctgtggccagaagaaagcagcccaggttgccagtggttgctgtctgtcatgtaggacttgaacaagagtgtgaatagttgaactccacatcttcttcttccaatgagtaatc

SEQ ID NO: 39790 - DNA, 600 bp, Chicken  19866894273997_8
agctgaacagtgaggggtgaaggggaagcatggcatgcttcattagagtgagtggaaacattttagcaggagtttatggagggtggaaatgtcacrctggttctgcaatcagcagaagatttaaaaactgcaaatgtctgttcatagggaaaaagttcccccrttccatctcaggccacattgggaatttctttgtttctttttctcatgatmgtaaccttatttaatagatgctatgtaattttttttatacagacaagctttttcaggcttgtttttagtatttcctatgtctatccrttcatattggtttgcctgccttttgaggcagcaaggtgcttgagatctcaggaactgacccaggaaagtgtaatttctcttgggcaagagcctgctggagagccagggatgaggagagcttcactggctgctgtggccagaagaaagcagcccaggttgccagtggttgctgtctgtcatgtaggacttgaacaagagtgtgaatagttgaactccacatcttcttcttccaatgagtaatcacttcattgtttcagaaaataagttttctaaagtatgttcttgggcaataattgtcag

SEQ ID NO: 39791 - DNA, 573 bp, Chicken  19866894274002_1
aaaaaaagctggaggtgacaaaaagcttgagctttgcagaaaattagtacaagctttgagtgcaggtttgtgtgcacatgcttgctgccgacacacacaggcaactccaagggccacctcctggagtggcaggccttcccatcagcagcagcgcaacgacttgtccaggctgaggatctcttcctcttgtatttcaggaactgaaagatatcatcgtctgtatttccctaaaacaaaaaccagaacactgaaactattgggaggtgaaggggaagtatgcttatgtcttggcatgccaayaaagagcagtagggttctcccagtcagtgtttgatattttatcaaaattacactatactctgagcaacatggtctagatttatagctagattcaaagccggccctgctttgaggtaggtgttgagccagaaacttcctaagtgcttacaatatccaggcttccctcaggcagtctgagctctgcaaccatttcatgggttgctttgctgtttcgaacacctaaagaaaaattactttttaatagagatgagcagtcttcctaaagtacatcta

SEQ ID NO: 39792 - DNA, 600 bp, Chicken  19866894274003_1
ttggagcacaagtcttatggggagtgtctgagggaactgggatgcttcagtggagaagaggaggctcaggggagaccttattattccctacaatcacctgaaaggaggttgtggagtggtagaggtcatcctcttctcccaggtaacaatgagaggatgagaggaaatggcttaaagttgtgtcaggggaggttcaggttggatatttggaaaaattccttctcagaaagagcagtgaggcagtggcacagctgctgagggaggtggtgcagtcaccgtccctggaggtgttcaggaacygtgtggatgtggcactgagggatgtggtcagtgggcatggtgggggtgggctgatgatcggactggatgatctgagaggtcttttccaaccttaatgactatgattctatgagttgacttaacatatatcttctcaatgagatggctgcaggcctcacagcagacattcacagcagacatccctacacatgggcagatgatgacttcccagacttctcacccattcttaacagctgtggatgggattaatactccagtgctcatcacctcctgccctgtggtacaaaggcaactgccaca

SEQ ID NO: 39793 - DNA, 600 bp, Chicken  19866894274003_2
catatctgtgtggacagagagaaagcaaatacatgtccataaatgcggaaatgtttactatctcccattatttgctttcatttttaatcagcaatgaatataaaatattaagtattgctctttagtatttattgtataagaatggccttcgccacacttagctaaggccatgaacaagacttccaagacacctaagaacttttctaaagcctcagtacaacctgcaagacacaaacttgcaaaaattaacttactaaagaagatgctgaaatttgtgctgactgtttaagcctcactttyaagtcctgtttgcactctccagtacagagytttttttttttttttgtagatgtgacatggagaatttctgcagaaaccacagagracttttgaaacaaaacagtaaatcaaaccagtagggttttgaaatgactggtggtatgtgtttcctgtaacagaactcctttgggaccccattctctgtctcaacatctttctgattgcttaaatgttgcactgtaaaattgagttttgctacaccaatgtctgaagttcatttcttaaatacttaaggttatcacagaaagaaaaagaaattac

SEQ ID NO: 39794 - DNA, 600 bp, Chicken  19866894274003_3
acatgtccataaatgcggaaatgtttactatctcccattatttgctttcatttttaatcagcaatgaatataaaatattaagtattgctctttagtatttattgtataagaatggccttcgccacacttagctaaggccatgaacaagacttccaagacacctaagaacttttctaaagcctcagtacaacctgcaagacacaaacttgcaaaaattaacttactaaagaagatgctgaaatttgtgctgactgtttaagcctcactttyaagtcctgtttgcactctccagtacagagytttttttttttttttgtagatgtgacatggagaatttctgcagaaaccacagagracttttgaaacaaaacagtaaatcaaaccagtagggttttgaaatgactggtggtatgtgtttcctgtaacagaactcctttgggaccccattctctgtctcaacatctttctgattgcttaaatgttgcactgtaaaattgagttttgctacaccaatgtctgaagttcatttcttaaatacttaaggttatcacagaaagaaaaagaaattactaaagcagtagctgagaatcatgcatcatg

SEQ ID NO: 39795 - DNA, 600 bp, Chicken  19866894274003_4
catgtccataaatgcggaaatgtttactatctcccattatttgctttcatttttaatcagcaatgaatataaaatattaagtattgctctttagtatttattgtataagaatggccttcgccacacttagctaaggccatgaacaagacttccaagacacctaagaacttttctaaagcctcagtacaacctgcaagacacaaacttgcaaaaattaacttactaaagaagatgctgaaatttgtgctgactgtttaagcctcactttyaagtcctgtttgcactctccagtacagagyyttttttttttttttgtagatgtgacatggagaatttctgcagaaaccacagagracttttgaaacaaaacagtaaatcaaaccagtagggttttgaaatgactggtggtatgtgtttcctgtaacagaactcctttgggaccccattctctgtctcaacatctttctgattgcttaaatgttgcactgtaaaattgagttttgctacaccaatgtctgaagttcatttcttaaatacttaaggttatcacagaaagaaaaagaaattactaaagcagtagctgagaatcatgcatcatga

SEQ ID NO: 39796 - DNA, 600 bp, Chicken  19866894274003_5
aatcagcaatgaatataaaatattaagtattgctctttagtatttattgtataagaatggccttcgccacacttagctaaggccatgaacaagacttccaagacacctaagaacttttctaaagcctcagtacaacctgcaagacacaaacttgcaaaaattaacttactaaagaagatgctgaaatttgtgctgactgtttaagcctcactttyaagtcctgtttgcactctccagtacagagytttttttttttttttgtagatgtgacatggagaatttctgcagaaaccacagagracttttgaaacaaaacagtaaatcaaaccagtagggttttgaaatgactggtggtatgtgtttcctgtaacagaactcctttgggaccccattctctgtctcaacatctttctgattgcttaaatgttgcactgtaaaattgagttttgctacaccaatgtctgaagttcatttcttaaatacttaaggttatcacagaaagaaaaagaaattactaaagcagtagctgagaatcatgcatcatgaatggcatgaggggaatggcacgcatcatgaatggttaaccgaggggactacatt

SEQ ID NO: 39797 - DNA, 600 bp, Chicken  19866894274003_6
aaagaaaaagaaattactaaagcagtagctgagaatcatgcatcatgaatggcatgaggggaatggcacgcatcatgaatggttaaccgaggggactacattatctagaaattacattgcaaaaagtaaacaagttccactagatccaaaccaacctatgcccacattcgatactgagaagcatagccttctgccatgcacacatttaaaacaataaaaaggacaaaaagccaatagaattgtctgcagcaataaaacattttaaggacaacctactcagaaattttattccaaaaaagycatmgcaattttgtgattcttgtakgattcttgatgaaatgcagaaaaggcccagaagcatgttcttaatttgcyttgtgctgcttaatcattagtctgtattggaagggccctgtttgacctccttaggtccctccttcacaagaagcatttctattaagtgtattctaaatctcctaactactcaggaaaagagacttgtccattttcaatggatgcgttccttcctgctgaagatgaataagagctacaagtgatataaatgacagctgccttcactcgtggctgaaacctgcccag

SEQ ID NO: 39798 - DNA, 600 bp, Chicken  19866894274003_7
aaaaagaaattactaaagcagtagctgagaatcatgcatcatgaatggcatgaggggaatggcacgcatcatgaatggttaaccgaggggactacattatctagaaattacattgcaaaaagtaaacaagttccactagatccaaaccaacctatgcccacattcgatactgagaagcatagccttctgccatgcacacatttaaaacaataaaaaggacaaaaagccaatagaattgtctgcagcaataaaacattttaaggacaacctactcagaaattttattccaaaaaagycatmgcaattttgtgattcttgtakgattcttgatgaaatgcagaaaaggcccagaagcatgttcttaatttgcyttgtgctgcttaatcattagtctgtattggaagggccctgtttgacctccttaggtccctccttcacaagaagcatttctattaagtgtattctaaatctcctaactactcaggaaaagagacttgtccattttcaatggatgcgttccttcctgctgaagatgaataagagctacaagtgatataaatgacagctgccttcactcgtggctgaaacctgcccagggtt

SEQ ID NO: 39799 - DNA, 600 bp, Chicken  19866894274003_8
tagctgagaatcatgcatcatgaatggcatgaggggaatggcacgcatcatgaatggttaaccgaggggactacattatctagaaattacattgcaaaaagtaaacaagttccactagatccaaaccaacctatgcccacattcgatactgagaagcatagccttctgccatgcacacatttaaaacaataaaaaggacaaaaagccaatagaattgtctgcagcaataaaacattttaaggacaacctactcagaaattttattccaaaaaagycatmgcaattttgtgattcttgtakgattcttgatgaaatgcagaaaaggcccagaagcatgttcttaatttgcyttgtgctgcttaatcattagtctgtattggaagggccctgtttgacctccttaggtccctccttcacaagaagcatttctattaagtgtattctaaatctcctaactactcaggaaaagagacttgtccattttcaatggatgcgttccttcctgctgaagatgaataagagctacaagtgatataaatgacagctgccttcactcgtggctgaaacctgcccagggttacccaaccgtcgctgtctgac

SEQ ID NO: 39800 - DNA, 600 bp, Chicken  19866894274003_9
tgaatggttaaccgaggggactacattatctagaaattacattgcaaaaagtaaacaagttccactagatccaaaccaacctatgcccacattcgatactgagaagcatagccttctgccatgcacacatttaaaacaataaaaaggacaaaaagccaatagaattgtctgcagcaataaaacattttaaggacaacctactcagaaattttattccaaaaaagycatmgcaattttgtgattcttgtakgattcttgatgaaatgcagaaaaggcccagaagcatgttcttaatttgcyttgtgctgcttaatcattagtctgtattggaagggccctgtttgacctccttaggtccctccttcacaagaagcatttctattaagtgtattctaaatctcctaactactcaggaaaagagacttgtccattttcaatggatgcgttccttcctgctgaagatgaataagagctacaagtgatataaatgacagctgccttcactcgtggctgaaacctgcccagggttacccaaccgtcgctgtctgactcgggatgggttactctgcctgcagctgtcaaaactgtgcaaaggtgggc

SEQ ID NO: 39801 - DNA, 600 bp, Chicken  19866894274006_1
ctgggacgtagcagaatgttacgcagagtttgccgcagcacaacacctgctaaggatctgcagggcagcagaggtccagcttccccagctgctgccctgcgggttaaggatggagtgcttctcagaatgttgtttaattaatcaataatgagaatagcctgaacttgtgcagttttttttaatcagtaaaaaaaacccaaacaaaccagactgcaggaaaatgataacgaggactgaacatgataaaacttgaaaatttgtttgatttaatgttagtagaactttccattcaagaacacrtataataacactatttcaacatttggagttaaaaaatgtttttgtttgtttgtttcccgaggccataccctgttctttttagcatggaaggttagttcataagagtactgtgctattattgtactattgagctattataatacaagaataactcgaaagtaggaaagagtctgtgaattgagcaaaagtgtaatctaaaaatgaaagttgcagtaatttgtatcgtgttttccaggagtcagctttgtcaaagtggggtcggtggctttgaagatgcagygcgtttgtaaccaatgcatt

SEQ ID NO: 39802 - DNA, 600 bp, Chicken  19866894274006_2
actttccattcaagaacacrtataataacactatttcaacatttggagttaaaaaatgtttttgtttgtttgtttcccgaggccataccctgttctttttagcatggaaggttagttcataagagtactgtgctattattgtactattgagctattataatacaagaataactcgaaagtaggaaagagtctgtgaattgagcaaaagtgtaatctaaaaatgaaagttgcagtaatttgtatcgtgttttccaggagtcagctttgtcaaagtggggtcggtggctttgaagatgcagygcgtttgtaaccaatgcatttgtcttaggctatggatgcttttaggaaacagtgcttttttttctgccgaaaggcacaacaagcaggaaaaactatgtgacctacttctatgcaaagttgaacataacagcagaagtttctagattgggtatttcagtggtcagtgccctttaaaagtggtactaaaatagcacaaaacaaaagtataggttttgcagcactcaagccatgatgattacattttggtgtgtgcacaagctgttcaaaacctttgatttggttctgatagaaatgtgcaga

SEQ ID NO: 39803 - DNA, 600 bp, Chicken  19866894274009_1
actctacaatttgtgacaacacccagtcccaagtatagccaatatgaacagaaaagctgcgtcacatagcagaaattatataggaagggcaagcagtgggaaattatgctaataattcagctaatttgcattttaaataactaaaacaattgcatatcacaactttctttacagcttcctacagatatttcttgttctttagttgtcttctataaaagatgaaaagaaactgacgctaacagtagagttgtacatactaaatacaggccacctcaatgggtttatctgacctgttcataygaataaggtaagtcacttttggctttaaaggctctacttaagctcctacaaggtaggaaaattagacacataaggatgtcattttcttcctcgaccatgtacgacaacgggcaaaaaagaaagcagaatgccccttctcacaaatgagctttctctccttcattctgacagaagaaaagacattgcccaacaatgaagcagccataggagggaaagatgaaagaaacatatgaaagaatctatactaccgcttgttatttcgaaactcccagtgtcttgcaagttgatgtcacagaagaa

SEQ ID NO: 39804 - DNA, 600 bp, Chicken  19866894274012_1
ttccatgttggtggatcgggctgcaagctggaaaccttagaccttagtcatgacatagctgtgagtggtcctgcacaaatcagtggggctattcatggactgaaagttggacttgtgtaccgtgtacaggagtggggcctttgctagtaagctgtaagctacatgaaatctattagcacagtccttaactaagagctattgacaaagacaccaatgctcagaggccgtaagtctttaggacacaatgcaggctcctggcgtatcgtgcaggttaataaagagcaaagcagaggtctgcastgtgttttggggagttataattcccatcctgaccataaaacrgcctgtgagagctgtcacacagctgataggctgctccccactgcatgctgcagcccaaagcctgctggtactgcttggccaggcccaccctgggcamcagaactgaggacactgtgccattttacaagtttcccattctggtttattgcattacttagcaggtggargtcttagaaggaagtgagaatcccctgccttggtttcctcttccccctctaaaactctaagtatctatcaaaggagataaaaaggactgaa

SEQ ID NO: 39805 - DNA, 600 bp, Chicken  19866894274012_2
cttagtcatgacatagctgtgagtggtcctgcacaaatcagtggggctattcatggactgaaagttggacttgtgtaccgtgtacaggagtggggcctttgctagtaagctgtaagctacatgaaatctattagcacagtccttaactaagagctattgacaaagacaccaatgctcagaggccgtaagtctttaggacacaatgcaggctcctggcgtatcgtgcaggttaataaagagcaaagcagaggtctgcastgtgttttggggagttataattcccatcctgaccataaaacrgcctgtgagagctgtcacacagctgataggctgctccccactgcatgctgcagcccaaagcctgctggtactgcttggccaggcccaccctgggcamcagaactgaggacactgtgccattttacaagtttcccattctggtttattgcattacttagcaggtggargtcttagaaggaagtgagaatcccctgccttggtttcctcttccccctctaaaactctaagtatctatcaaaggagataaaaaggactgaaaaaatgttgattagcttaagaaaacaattgaaatacagcaga

SEQ ID NO: 39806 - DNA, 600 bp, Chicken  19866894274012_3
tttgctagtaagctgtaagctacatgaaatctattagcacagtccttaactaagagctattgacaaagacaccaatgctcagaggccgtaagtctttaggacacaatgcaggctcctggcgtatcgtgcaggttaataaagagcaaagcagaggtctgcastgtgttttggggagttataattcccatcctgaccataaaacrgcctgtgagagctgtcacacagctgataggctgctccccactgcatgctgcagcccaaagcctgctggtactgcttggccaggcccaccctgggcamcagaactgaggacactgtgccattttacaagtttcccattctggtttattgcattacttagcaggtggargtcttagaaggaagtgagaatcccctgccttggtttcctcttccccctctaaaactctaagtatctatcaaaggagataaaaaggactgaaaaaatgttgattagcttaagaaaacaattgaaatacagcagagaacccttccagtatacttcacatgccctgcataatactgcacaactctcacaccatcacaacttgactcgaatgcttgggcacagtagcaatgagg

SEQ ID NO: 39807 - DNA, 600 bp, Chicken  19866894274012_4
accaatgctcagaggccgtaagtctttaggacacaatgcaggctcctggcgtatcgtgcaggttaataaagagcaaagcagaggtctgcastgtgttttggggagttataattcccatcctgaccataaaacrgcctgtgagagctgtcacacagctgataggctgctccccactgcatgctgcagcccaaagcctgctggtactgcttggccaggcccaccctgggcamcagaactgaggacactgtgccattttacaagtttcccattctggtttattgcattacttagcaggtggargtcttagaaggaagtgagaatcccctgccttggtttcctcttccccctctaaaactctaagtatctatcaaaggagataaaaaggactgaaaaaatgttgattagcttaagaaaacaattgaaatacagcagagaacccttccagtatacttcacatgccctgcataatactgcacaactctcacaccatcacaacttgactcgaatgcttgggcacagtagcaatgaggccagtggcacctgtagygatactactgacagcacccatagcaagacaagtcccccagatcagcatgggtt

SEQ ID NO: 39808 - DNA, 530 bp, Chicken  19866894274012_5
tgccattttacaagtttcccattctggtttattgcattacttagcaggtggargtcttagaaggaagtgagaatcccctgccttggtttcctcttccccctctaaaactctaagtatctatcaaaggagataaaaaggactgaaaaaatgttgattagcttaagaaaacaattgaaatacagcagagaacccttccagtatacttcacatgccctgcataatactgcacaactctcacaccatcacaacttgactcgaatgcttgggcacagtagcaatgaggccagtggcacctgtagygatactactgacagcacccatagcaagacaagtcccccagatcagcatgggttacagtccttcattgcttcaggcccccggggaattgcttgtcactgcttcgttatcctggtttcagccaagacaatgttatcagcacaccactgttgttgagtgatgggaacacacctgggactgggctgggctgctctgcaggaaagagccatcgccatgatggtgtggggacaggg

SEQ ID NO: 39809 - DNA, 600 bp, Chicken  19866894274015_1
tgctgtcccctgtgccacaccaacgggatacgggcagcgagtgggggctgcgtacccaggtaagggggcactggtgtgggactgcactgtggggtgggagggtttgaggggtcagaaggcattggggagcccatctccttggcctcggggtgtctcttgttggtggctgagccatcaccatctctttggtgatccctggggctgcaagggcacagggtgccgctggtggcacagtgctggctcagcagggcgggggcaatcatgctgtgacagtgctgtgataagcgtgggataggtgaygcctcggtgccagcattccagagcccctcctgcgccttcagggccacccgaagactatcaggcagaattggggtggaaaagggcagggacaagagggctaaggatagctcagccccagaacaccaattgttgctggaggagtcttaggataaccgcattgtgaccatgctggagagttcccagtccccatggtgtcctctctctggccatgacctgctccaatcgagggacctctggccatgtccaacccatggggacccccagcgccaggctggagtcaccttggcacacagcaaagcc

SEQ ID NO: 39810 - DNA, 600 bp, Chicken  19866894274015_2
tgctggagagttcccagtccccatggtgtcctctctctggccatgacctgctccaatcgagggacctctggccatgtccaacccatggggacccccagcgccaggctggagtcaccttggcacacagcaaagccatgaagtgaaacagaaagtgggtggctacaggtaggatccgccccatgccggcagccccatgctcgggtggggcacatgggacaattgcccctttctatggggttggagccattgggggtggctccaacgtggccccatagggtttggctgctttggatcccccayggttgggactgggagcatctctgcagcctgctcggtccctatctcccatgaggacatggtcaccgggacctgctctgtcccctccccatgcgtgggttgggatcgcggtggctcagtgccatgggaagtgggtgccacccaggtgtcattaccccgagagtaacggggctccgtgggctcctttgagggatgtggggaccttgactcgaggttcttcctgcccttatatggtgaacatgggctgggacaactggggacaaaggtctcctctctgctggcaccccagcacttcccctaggt

SEQ ID NO: 39811 - DNA, 600 bp, Chicken  19866894274017_1
ccaaaagttgagataacgctgtaagcaagggaaagatagttgaagacggtaaggagtaaataaaagagcaaatgcgttacacacatttaatgacacctcttaacatgatgagccattaagtccaaagcatctgcaacttctctttaaaacaaattcagaaggaaccgccaccaccaaaaaaccatcacatctacaccaacaggcagccctaagaacgcaccaagggccagagctcacccacgtgtccttcattcagcccagcacaggatggggccacacaaacagcggcgagcagagaasgtcagcacggccatcctacagccaccacatctgctcctgtcaagggctgatgatccgcagccactgagcttcaggagagtttagcatgccctacagttaacttggggattgcaccctccttctctgaccaagggggagaatttaggtcaatatcattgcttagattagccaggaactgcaggagcaagaaaaagagctttggagaacttatccaattaaaggtaagaattaattatatgcttcttacatttcaatcaaggcagtgctgttataagcaattactatgctagcctcattccc

SEQ ID NO: 39812 - DNA, 600 bp, Chicken  19866894274018_1
gaacctccaaacttccgctctgtctgccagggaattgtgaaggaatgagatttctttaaatgcatatgctgctgccctcaatcccagtccctgacttctgtacagcagttctgctctctttatccttatcatgcacctgttttgcagcatacagagtaggagccctttgttccctagggatggaaataacaccaataagttatcctgggataaagggataagttgtaatcttgctgattttttttaagatgaaaacgaatggatataatagtaagagcattgttctctctctctctctcsctttttttttttaattccctttttgcagttttaaggcacatcagtataagtgtgtatatttacgaaggtgaaaatgtgctataggattttgcagtgataaatacctggcaaggacacagtcatcttagaggaggcactttgagtgtcaggggaaacattaggtgtttctgatatcacacctctgtgtgggtaatttgcaggtttgtatatatatcacgttttgttgctttgcttgacttaaatatttctccccttacctttttctttctccctgtggggaaagttttaaatgctgaaggg

SEQ ID NO: 39813 - DNA, 600 bp, Chicken  19866894274018_2
aacctccaaacttccgctctgtctgccagggaattgtgaaggaatgagatttctttaaatgcatatgctgctgccctcaatcccagtccctgacttctgtacagcagttctgctctctttatccttatcatgcacctgttttgcagcatacagagtaggagccctttgttccctagggatggaaataacaccaataagttatcctgggataaagggataagttgtaatcttgctgattttttttaagatgaaaacgaatggatataatagtaagagcattgttctctctctctctctctstttttttttttaattccctttttgcagttttaaggcacatcagtataagtgtgtatatttacgaaggtgaaaatgtgctataggattttgcagtgataaatacctggcaaggacacagtcatcttagaggaggcactttgagtgtcaggggaaacattaggtgtttctgatatcacacctctgtgtgggtaatttgcaggtttgtatatatatcacgttttgttgctttgcttgacttaaatatttctccccttacctttttctttctccctgtggggaaagttttaaatgctgaaggga

SEQ ID NO: 39814 - DNA, 600 bp, Chicken  19866894274026_1
cataattaccagtgtattttaataacagctcttaagatacatcatttggctatcaccatgcaggctcataaacacactgtgagtatcagcctcttatgactgacagaatattacaatttgttgtttctgtgaagccagactttggtggcacagctgatttcagataatcagtcagttccattaatatgtctccagagaagtccataaatgtagttgcagcctgggatcaccaggtgagctgcttcagctgctggtaacactccagcgacagcagcacatagctcagcactgggtacatgyccaggtgttagctaagaacactgaggcaatgtacagcccrggctgggccctgtaccggtgaacactgccctgatgctgatcagcacactgatgtgataaaacgttttgtgttgtagaccaaatccctttcttgagttcttaagacagtaacttgtgctgaaaggggtgcatttactctctatgaatgggaattttactactgaatgtaattgcttgggatttaaacctaaatattggttttcatcttcatacttgtctctgctgtaagaggtcatgtaggaaaaaaagtgcatttttttc

SEQ ID NO: 39815 - DNA, 600 bp, Chicken  19866894274026_2
atcatttggctatcaccatgcaggctcataaacacactgtgagtatcagcctcttatgactgacagaatattacaatttgttgtttctgtgaagccagactttggtggcacagctgatttcagataatcagtcagttccattaatatgtctccagagaagtccataaatgtagttgcagcctgggatcaccaggtgagctgcttcagctgctggtaacactccagcgacagcagcacatagctcagcactgggtacatgyccaggtgttagctaagaacactgaggcaatgtacagcccrggctgggccctgtaccggtgaacactgccctgatgctgatcagcacactgatgtgataaaacgttttgtgttgtagaccaaatccctttcttgagttcttaagacagtaacttgtgctgaaaggggtgcatttactctctatgaatgggaattttactactgaatgtaattgcttgggatttaaacctaaatattggttttcatcttcatacttgtctctgctgtaagaggtcatgtaggaaaaaaagtgcatttttttcatgccaggaaacaaagattccagattttcacttccatcct

SEQ ID NO: 39816 - DNA, 600 bp, Chicken  19866894274028_1
tgccctttgcactagtaacagacttaccggagcttacataaacttcagatgatctctgtgctctggattattgctctgaatcattcactctgtgtagatttggtatatttttctctgcagtattaaatctttattgaagcatctgaggtagtctctagttagagcttcccttggctttactgccgggtatgccatggtctcagtgttgtatagccctgaagaataataatttgcagcttccattgacataggcaacgttgtttgtctatctgtagaatctggatgttaatcagtgttatkaatctattcttmtaacatgaaaaatkttaattttgcttcctgctttaaaggaaataagacttttgtgtgttgcctttttgactcccattccttctgtagttggaaagacctcaaaccacgccattgttctggctcagctctacactcagggccaatgcaagggactgcatgccttcattgttcctatacggcagctgggcacccatgaacctttgccaggtaaaaagttaccttaaggatttagtacttatgggacgacttcatttgtgtttctctttggctccatacagctgcatgtgt

SEQ ID NO: 39817 - DNA, 600 bp, Chicken  19866894274028_2
tagtaacagacttaccggagcttacataaacttcagatgatctctgtgctctggattattgctctgaatcattcactctgtgtagatttggtatatttttctctgcagtattaaatctttattgaagcatctgaggtagtctctagttagagcttcccttggctttactgccgggtatgccatggtctcagtgttgtatagccctgaagaataataatttgcagcttccattgacataggcaacgttgtttgtctatctgtagaatctggatgttaatcagtgttatkaatctattcttmtaacatgaaaaatkttaattttgcttcctgctttaaaggaaataagacttttgtgtgttgcctttttgactcccattccttctgtagttggaaagacctcaaaccacgccattgttctggctcagctctacactcagggccaatgcaagggactgcatgccttcattgttcctatacggcagctgggcacccatgaacctttgccaggtaaaaagttaccttaaggatttagtacttatgggacgacttcatttgtgtttctctttggctccatacagctgcatgtgtgttgttaatgaa

SEQ ID NO: 39818 - DNA, 600 bp, Chicken  19866894274028_3
ccggagcttacataaacttcagatgatctctgtgctctggattattgctctgaatcattcactctgtgtagatttggtatatttttctctgcagtattaaatctttattgaagcatctgaggtagtctctagttagagcttcccttggctttactgccgggtatgccatggtctcagtgttgtatagccctgaagaataataatttgcagcttccattgacataggcaacgttgtttgtctatctgtagaatctggatgttaatcagtgttatkaatctattcttmtaacatgaaaaatkttaattttgcttcctgctttaaaggaaataagacttttgtgtgttgcctttttgactcccattccttctgtagttggaaagacctcaaaccacgccattgttctggctcagctctacactcagggccaatgcaagggactgcatgccttcattgttcctatacggcagctgggcacccatgaacctttgccaggtaaaaagttaccttaaggatttagtacttatgggacgacttcatttgtgtttctctttggctccatacagctgcatgtgtgttgttaatgaacacaacgtatttca

SEQ ID NO: 39819 - DNA, 600 bp, Chicken  19866894274028_4
tgcttcctgctttaaaggaaataagacttttgtgtgttgcctttttgactcccattccttctgtagttggaaagacctcaaaccacgccattgttctggctcagctctacactcagggccaatgcaagggactgcatgccttcattgttcctatacggcagctgggcacccatgaacctttgccaggtaaaaagttaccttaaggatttagtacttatgggacgacttcatttgtgtttctctttggctccatacagctgcatgtgtgttgttaatgaacacaacgtatttcactagctrgttttagtgagtggtagattgtagaccacaggacttgaaacttcaggagtcttacttgtgactgagctgccactaacttccatgtcatgttttcaatgtgagggttattctggaatttgattccatcccaatgtttgccaggtaggcattctgtgaggcagcatgtgcttcttctccctgaaaagggaaaaatattaagtagaactgagatggattatctttagagataactacccccagtcattctggagtaggaatgcataaaaatgatgaatgccctttgttttgatgctcttcttc

SEQ ID NO: 39820 - DNA, 600 bp, Chicken  19866894274028_5
taggcattctgtgaggcagcatgtgcttcttctccctgaaaagggaaaaatattaagtagaactgagatggattatctttagagataactacccccagtcattctggagtaggaatgcataaaaatgatgaatgccctttgttttgatgctcttcttctttcccccattgaagaaaagattcaggtcctacttagctgttaatccttgcagcatcagggctttctagaaactgcctctcttggaggtgtcttaaacctcctgtgtggtgttcctcttttctaatgcaaatagctttgtcygtggcaggtattacagtgggtgayattgggccgaaatttggttatgatgaaatggataatggctacttgaaaatggacaacttcagaattcctcgggagaacatgctgatgaaatatgctcaggtaaagcagtgaatttcagcaaacgccattaagaagtggtacttccaatgctgttcttaaacagtgtgtgtagtgccttaaacactgcgtgttattaactctttgtttaggtgggttgcttgtgagtactatttgagtttagagcttgagatatgagtgtgtaaacagaaggaagct

SEQ ID NO: 39821 - DNA, 600 bp, Chicken  19866894274028_6
gcttcttctccctgaaaagggaaaaatattaagtagaactgagatggattatctttagagataactacccccagtcattctggagtaggaatgcataaaaatgatgaatgccctttgttttgatgctcttcttctttcccccattgaagaaaagattcaggtcctacttagctgttaatccttgcagcatcagggctttctagaaactgcctctcttggaggtgtcttaaacctcctgtgtggtgttcctcttttctaatgcaaatagctttgtcygtggcaggtattacagtgggtgayattgggccgaaatttggttatgatgaaatggataatggctacttgaaaatggacaacttcagaattcctcgggagaacatgctgatgaaatatgctcaggtaaagcagtgaatttcagcaaacgccattaagaagtggtacttccaatgctgttcttaaacagtgtgtgtagtgccttaaacactgcgtgttattaactctttgtttaggtgggttgcttgtgagtactatttgagtttagagcttgagatatgagtgtgtaaacagaaggaagctttaaaaatcaacaggctgtatttt

SEQ ID NO: 39822 - DNA, 600 bp, Chicken  19866894274034_1
tgaaaacaatcacatgcaaggagagacattttcagtttttcctcaagcactcattttcctcaagagtgcatttaagctagaggaaaaaattggttttagtgaaactaaatctgagtcttctatagattaagctgtatggaactgtacctctgaaggcaatctgcacatttcttcttagaggaatactgaagttctcccactgtctactagatcagttatctacatatccatttttataactgatggacttggacataaagaagaggaaagaaactcagctatcctagaaaggaagctagyttgcaaaactgggtaaatacagctcaatgatttttaaagttgatataaaacttatttataatttcaaaggaagttagaccaagatttattctttgaagcatgggaaattgaaactgtaagcagtaagttttacttcctataaccttcagaggtgtcattttttttatatatcttttattacaccagtagtttagctttaaaacaataaatcctacaatatattttttctctagaagttgtatactgagtaactgtaagttgccctgatcacccaagtcccttgcagtttaatataattga

SEQ ID NO: 39823 - DNA, 599 bp, Chicken  19866894274036_1
  misc_feature (1)..(26): n is any nucleotide
nnnnnnnnnnnnnnnnnnnnnnnnnntgtgagtgaaagcagaatctggcaccaggatttctcctgaaaataagcattcctgttcagtggtcataaagacagtgtcttgcagtgggactcagccataacatcttctgtctgagtgcaaagtgtgctcagtatgctttctcctgtgacttccataaaatcactttatgactttgtaatcttaatgcctgcctaacagaaaagctcttttcagagaacaaccaattttacgtttgtgcaagtgctacattttacctatttggcagctgtaacwtgacagactctgtagtggcttttgtctgttaaaagaaggtattcttgtttccaggctaataaattaatagagatcggaggtgaatttcccactgactgcgtttacactgctctgttgcattactgatagtgcagtcaacagaatactgcgaatgtgagtcagggcagatattggttttatcttgctttaatacttttgtggcctgcaatcaaaattgttatatgaaagccttagcttcattattcagtagggtttatgaagtgatttttattaaaagacaataacaccagatttgtgtg

SEQ ID NO: 39824 - DNA, 600 bp, Chicken  19866894274041_1
tgcaagctcctgaggtctctgcagaattcccaataatgctaaacaaaatctatttcatctctcattcattctgagaaatcatttgggaaagaggaagtctgtggtctgacaaataactggtctaattggataccctgcagtttgggaggataaaagcaagagcagcagaaaactttcccagtgtttacctaagaattgcctgtttaaatgtagaactgaggggacgttaactttgcagagaagctctgttatgtcttgtaaaaggacccatgtgttaatgctctttattatgtaacttayggagatttgttctgttcatgtaaatacacgccattcattcaagaatgcttagtacataccttatagygcatataagayrctccacagggaattatagagacccgatcacatgggggttttaatacataattagtctgccacaccgattattatggacacaatatcaaaaggtaataatcagatatgtctggtgaagtaactagaaaataatctctgttaacaaaagtatgttaccaacatatacgaacaggtgataactttttgagttgagtacaaaacttttaagaacagcagcaggtg

SEQ ID NO: 39825 - DNA, 600 bp, Chicken  19866894274041_2
attctgagaaatcatttgggaaagaggaagtctgtggtctgacaaataactggtctaattggataccctgcagtttgggaggataaaagcaagagcagcagaaaactttcccagtgtttacctaagaattgcctgtttaaatgtagaactgaggggacgttaactttgcagagaagctctgttatgtcttgtaaaaggacccatgtgttaatgctctttattatgtaacttayggagatttgttctgttcatgtaaatacacgccattcattcaagaatgcttagtacataccttatagygcatataagayrctccacagggaattatagagacccgatcacatgggggttttaatacataattagtctgccacaccgattattatggacacaatatcaaaaggtaataatcagatatgtctggtgaagtaactagaaaataatctctgttaacaaaagtatgttaccaacatatacgaacaggtgataactttttgagttgagtacaaaacttttaagaacagcagcaggtgactttttaatatgtaataaaactggatttgggcagaaaaagtgtgtaacaaatttgaatctagtgag

SEQ ID NO: 39826 - DNA, 600 bp, Chicken  19866894274041_3
tcatttgggaaagaggaagtctgtggtctgacaaataactggtctaattggataccctgcagtttgggaggataaaagcaagagcagcagaaaactttcccagtgtttacctaagaattgcctgtttaaatgtagaactgaggggacgttaactttgcagagaagctctgttatgtcttgtaaaaggacccatgtgttaatgctctttattatgtaacttayggagatttgttctgttcatgtaaatacacgccattcattcaagaatgcttagtacataccttatagygcatataagayrctccacagggaattatagagacccgatcacatgggggttttaatacataattagtctgccacaccgattattatggacacaatatcaaaaggtaataatcagatatgtctggtgaagtaactagaaaataatctctgttaacaaaagtatgttaccaacatatacgaacaggtgataactttttgagttgagtacaaaacttttaagaacagcagcaggtgactttttaatatgtaataaaactggatttgggcagaaaaagtgtgtaacaaatttgaatctagtgaggaagaagaatg

SEQ ID NO: 39827 - DNA, 600 bp, Chicken  19866894274041_4
catttgggaaagaggaagtctgtggtctgacaaataactggtctaattggataccctgcagtttgggaggataaaagcaagagcagcagaaaactttcccagtgtttacctaagaattgcctgtttaaatgtagaactgaggggacgttaactttgcagagaagctctgttatgtcttgtaaaaggacccatgtgttaatgctctttattatgtaacttayggagatttgttctgttcatgtaaatacacgccattcattcaagaatgcttagtacataccttatagygcatataagayrctccacagggaattatagagacccgatcacatgggggttttaatacataattagtctgccacaccgattattatggacacaatatcaaaaggtaataatcagatatgtctggtgaagtaactagaaaataatctctgttaacaaaagtatgttaccaacatatacgaacaggtgataactttttgagttgagtacaaaacttttaagaacagcagcaggtgactttttaatatgtaataaaactggatttgggcagaaaaagtgtgtaacaaatttgaatctagtgaggaagaagaatgc

SEQ ID NO: 39828 - DNA, 600 bp, Chicken  19866894274041_5
taatacataattagtctgccacaccgattattatggacacaatatcaaaaggtaataatcagatatgtctggtgaagtaactagaaaataatctctgttaacaaaagtatgttaccaacatatacgaacaggtgataactttttgagttgagtacaaaacttttaagaacagcagcaggtgactttttaatatgtaataaaactggatttgggcagaaaaagtgtgtaacaaatttgaatctagtgaggaagaagaatgccaagtggaggcttgaactgtgagttatgcacattgatccwatctagacacaattcacataggaattaatgtataagactctaagttcctttctaccgtgtttcactcattccagaggatgtgttttgtacatagctaacttaggtttgtatagatcccyagcagcactcttaaacggtcaagcctgttttaattggtgctactgcttcagtctgtctagacatatatgaggtgtaatagcctgtgttctgatttaaatgtgaagaactctttcacaataatgctgagtaaacacatttatggaaaatacagcaaaagctgcaggagaacgtaccattaag

SEQ ID NO: 39829 - DNA, 600 bp, Chicken  19866894274041_6
atatacgaacaggtgataactttttgagttgagtacaaaacttttaagaacagcagcaggtgactttttaatatgtaataaaactggatttgggcagaaaaagtgtgtaacaaatttgaatctagtgaggaagaagaatgccaagtggaggcttgaactgtgagttatgcacattgatccwatctagacacaattcacataggaattaatgtataagactctaagttcctttctaccgtgtttcactcattccagaggatgtgttttgtacatagctaacttaggtttgtatagatcccyagcagcactcttaaacggtcaagcctgttttaattggtgctactgcttcagtctgtctagacatatatgaggtgtaatagcctgtgttctgatttaaatgtgaagaactctttcacaataatgctgagtaaacacatttatggaaaatacagcaaaagctgcaggagaacgtaccattaaggatggccaccactagtcactaagttttatgagtgttttcactcattgcagtctcctgttactcagttcacatgaaggtgcatcagaagttggacttttttcttcgcttcttgaaaatgt

SEQ ID NO: 39830 - DNA, 600 bp, Chicken  19866894274047_1
ttggaagaattctactcaagatgcataaaacctttgccatcatagtcattgtgtaggccagggtcgctctgcctggaagaatccataatgacttggtcctcatccaaaagggaaataaagactttcctaaaatggcatctcacagagtgagaagcatagtgcattgatgaaactgtggttttgcagtacaaagctgctgcattttcttgtgcaaatttgaccatctatatgaaaactaattgggtgacatgctcaactgggatctgtgagatcctgttcaagacccgactagaattgctrcttttgtcttctttgccctaggtgcacataactactttttattcttatgaagggaagaaaaagagataagtgaaatgatttcttcctttttcttatttcggaaaagtcttcttttttctctcccttaaatagttgcaaatgttcagaatttaatggggtataactttgtatttaacttaatcttttcaccagtattcaatgtgtatattatcagacactattgctctccaaaactattctgtaygttcttccagtatccttccattgcttccttaatagtgtttataaccactgtacgtg

SEQ ID NO: 39831 - DNA, 421 bp, Chicken  19866894274047_2
tgacatgctcaactgggatctgtgagatcctgttcaagacccgactagaattgctrcttttgtcttctttgccctaggtgcacataactactttttattcttatgaagggaagaaaaagagataagtgaaatgatttcttcctttttcttatttcggaaaagtcttcttttttctctcccttaaatagttgcaaatgttcagaatttaatggggtataactttgtatttaacttaatcttttcaccagtattcaatgtgtatattatcagacactattgctctccaaaactattctgtaygttcttccagtatccttccattgcttccttaatagtgtttataaccactgtacgtgtaattggtagtaatgatgtgggcagactgtagctcatccaacagaccttccttttttatttattt

SEQ ID NO: 39832 - DNA, 600 bp, Chicken  19866894274050_1
ctggaggagagtatgggactttgccagaaaagaccaaaggaagcaatgggagaggagttagtgaaaattccatgactcaagggccttgtcagggtgtaaaatagtgttgacctttcacaggcactaataaaacatgttcagattgctacttggagcaatagccagcaatgtgtctttcttctcttgactttttgttgttgccgttactggtaaaattgatgggagaggtgtctgactaagccatgctgtgctggattttatagctaattacacaccacaaaattcaatagggccataaarcacattttactgagggacacctcacaacctgcaagccctacctgtgggagagacaaataggccttggaggcaactatgaagaaaccgtaatcttaaatcttttcatcataaaattgcacttccttgcatcagcatgattgagttctgttcatccatcttcaaactcctttagaattagtctgacttcagctgaagagcaagcacaaaatgttaagtcttcccatacstgtaaaccttgtctttttgactgtccttccaggaaaggtcagaggaaatttgatgacacttcagtagttgaac

SEQ ID NO: 39833 - DNA, 600 bp, Chicken  19866894274050_2
gtgtctgactaagccatgctgtgctggattttatagctaattacacaccacaaaattcaatagggccataaarcacattttactgagggacacctcacaacctgcaagccctacctgtgggagagacaaataggccttggaggcaactatgaagaaaccgtaatcttaaatcttttcatcataaaattgcacttccttgcatcagcatgattgagttctgttcatccatcttcaaactcctttagaattagtctgacttcagctgaagagcaagcacaaaatgttaagtcttcccatacstgtaaaccttgtctttttgactgtccttccaggaaaggtcagaggaaatttgatgacacttcagtagttgaactgggcaaacatctatgctatttctttttcactcctgtttccaccacactgataccattgataacaagagcctgagctcttacgcagtagctgaatgcaaacagaggttgggtctctgaaggagacagtttttgtaagcgactgaaaaggaaggctcttgcttcctgaggtggtatgaaagggacaccgctgttacgttgaagcctgtagtttttgcacagtggctat

SEQ ID NO: 39834 - DNA, 600 bp, Chicken  19866894274054_1
ttctttagcatttctagtctgcttttccactgcttgcaaatacaaaattccatttccctaagagtcaatttttgtctgaaatagaataattattagccgtttcaatgctttccaatgtgtctttgttttttagaattacttcataaaactctttgcatgtgtaattgaaattgactttaatttgaaactcagagtcaatatttctgcagtctttctaagtttgtttcccgaggaaaatattcttcctgtgtgtgtgaaaggaaggaaggaaggtgatgcgtgctacgagtcagaaggatsgagactcagaattcaaacaactttggccagttttgactgtaggactgctgaattctgcactcaacctccacgtcattgagtgtgtcattctatgccgtagtcagggtgcagctccacaaggctttctgacaaattgtagcctttgagtaattgtcagggtttgctgaaaagtcaacggtgttggcttttytcagtggctggattggattaaggcagtttagttaattgcaatgcaaagggagacatttgagagctaatgcgtactgctgaatgcagttccttttcattattttttttttc

SEQ ID NO: 39835 - DNA, 600 bp, Chicken  19866894274054_2
agagtcaatatttctgcagtctttctaagtttgtttcccgaggaaaatattcttcctgtgtgtgtgaaaggaaggaaggaaggtgatgcgtgctacgagtcagaaggatsgagactcagaattcaaacaactttggccagttttgactgtaggactgctgaattctgcactcaacctccacgtcattgagtgtgtcattctatgccgtagtcagggtgcagctccacaaggctttctgacaaattgtagcctttgagtaattgtcagggtttgctgaaaagtcaacggtgttggcttttytcagtggctggattggattaaggcagtttagttaattgcaatgcaaagggagacatttgagagctaatgcgtactgctgaatgcagttccttttcattattttttttttctggacacaatgttttcttagcttaaagttgcatttatggccaaataatttgtcttcagctcccctttgtaacttacctttcaattaatgtcttttgccattgttttaattttaaagctctgccattaaaaagcttttagcacgctgtggcaggcctataagtggcacggagttctgaaagtgcctcccgg

SEQ ID NO: 39836 - DNA, 600 bp, Chicken  19866894274058_1
ttgtaagggaagtgttccatcccttgcatcattttgttgccccctctggacatgctctaacagatccatgcctctcctgtactgagggctccgcatctggacacagaactccaggtgtggtctcaccagcacagagtagaagggcagcatcacatccctctctctgctggccacactcctcttgatgactcccaggatacagttggttttctgggctgcgagaacacacttctggctcgtgtcctgcttgcttaccatatgccaacatgtttgcagctatcaaggaagttctttagatargcctgtaggtagctaacaacatatcactatggtgtcttttgaagmggaaataatttgaccatccccttacatatcttatgtgattatccccagtccaggtgttgagataagaagccgaatgctctgattctgtgcattgtctccactgaaggcagtaagaattaggataacatagctagggaaacatggacccattgatttttgtaagtggcagtcagactaactgaagttcagaatctctcagaaagtactgtcacactttgctggataaatgtactgcaaatgagagcttttccaaga

SEQ ID NO: 39837 - DNA, 557 bp, Chicken  19866894274058_2
ctggacatgctctaacagatccatgcctctcctgtactgagggctccgcatctggacacagaactccaggtgtggtctcaccagcacagagtagaagggcagcatcacatccctctctctgctggccacactcctcttgatgactcccaggatacagttggttttctgggctgcgagaacacacttctggctcgtgtcctgcttgcttaccatatgccaacatgtttgcagctatcaaggaagttctttagatargcctgtaggtagctaacaacatatcactatggtgtcttttgaagmggaaataatttgaccatccccttacatatcttatgtgattatccccagtccaggtgttgagataagaagccgaatgctctgattctgtgcattgtctccactgaaggcagtaagaattaggataacatagctagggaaacatggacccattgatttttgtaagtggcagtcagactaactgaagttcagaatctctcagaaagtactgtcacactttgctggataaatgtactgcaaatgagagcttttccaagaaa

SEQ ID NO: 39838 - DNA, 599 bp, Chicken  19866894274061_1
  misc_feature (1)..(4): n is any nucleotide
nnnnttactcagcccacagcatcaaaccatctgctcacgagtggcagctgctccacaggatggtaaaactgtgtctgcaaggagttggtttgctcgggaggggacaaggaggagaagacccacatttgggaccttcactgagttgggtacagagaactgccctgaaggaatgagagcttggtctggtgacagctggcacccagactttttagatctaagggttctgcaggtggggcaaagccatctgaattgggcaaagccatctgaattaagcaaagccatctaatttagtcaaagctscctaaagcaygcaacggcccttcccagagctgctgtttggagaagcctttgttcaaatcactgctctcraaacccayacgaactcctgaagaaactgcaaattgaatcccataatggctcatatctggtgggttcggctctccaaactctgcctgtaggtatcacacatcaaaccggggtgtctgttgtgctgactcragtagaaactgggaattccccctccagcaacgcatcaacccaaatgggagtgggaaacacaggacccctacagaccccttcctatgcccaattaactcatg

SEQ ID NO: 39839 - DNA, 600 bp, Chicken  19866894274061_2
agcccacagcatcaaaccatctgctcacgagtggcagctgctccacaggatggtaaaactgtgtctgcaaggagttggtttgctcgggaggggacaaggaggagaagacccacatttgggaccttcactgagttgggtacagagaactgccctgaaggaatgagagcttggtctggtgacagctggcacccagactttttagatctaagggttctgcaggtggggcaaagccatctgaattgggcaaagccatctgaattaagcaaagccatctaatttagtcaaagctscctaaagcaygcaacggcccttcccagagctgctgtttggagaagcctttgttcaaatcactgctctcraaacccayacgaactcctgaagaaactgcaaattgaatcccataatggctcatatctggtgggttcggctctccaaactctgcctgtaggtatcacacatcaaaccggggtgtctgttgtgctgactcragtagaaactgggaattccccctccagcaacgcatcaacccaaatgggagtgggaaacacaggacccctacagaccccttcctatgcccaattaactcatgcgtcccctccc

SEQ ID NO: 39840 - DNA, 600 bp, Chicken  19866894274061_3
tgtgtctgcaaggagttggtttgctcgggaggggacaaggaggagaagacccacatttgggaccttcactgagttgggtacagagaactgccctgaaggaatgagagcttggtctggtgacagctggcacccagactttttagatctaagggttctgcaggtggggcaaagccatctgaattgggcaaagccatctgaattaagcaaagccatctaatttagtcaaagctscctaaagcaygcaacggcccttcccagagctgctgtttggagaagcctttgttcaaatcactgctctcraaacccayacgaactcctgaagaaactgcaaattgaatcccataatggctcatatctggtgggttcggctctccaaactctgcctgtaggtatcacacatcaaaccggggtgtctgttgtgctgactcragtagaaactgggaattccccctccagcaacgcatcaacccaaatgggagtgggaaacacaggacccctacagaccccttcctatgcccaattaactcatgcgtcccctccctgcctgcccagcagccgccacagtgcatctcttgtgcacagacggccatcctcaccgcg

SEQ ID NO: 39841 - DNA, 600 bp, Chicken  19866894274061_4
caaggagttggtttgctcgggaggggacaaggaggagaagacccacatttgggaccttcactgagttgggtacagagaactgccctgaaggaatgagagcttggtctggtgacagctggcacccagactttttagatctaagggttctgcaggtggggcaaagccatctgaattgggcaaagccatctgaattaagcaaagccatctaatttagtcaaagctscctaaagcaygcaacggcccttcccagagctgctgtttggagaagcctttgttcaaatcactgctctcraaacccayacgaactcctgaagaaactgcaaattgaatcccataatggctcatatctggtgggttcggctctccaaactctgcctgtaggtatcacacatcaaaccggggtgtctgttgtgctgactcragtagaaactgggaattccccctccagcaacgcatcaacccaaatgggagtgggaaacacaggacccctacagaccccttcctatgcccaattaactcatgcgtcccctccctgcctgcccagcagccgccacagtgcatctcttgtgcacagacggccatcctcaccgcggcgcggtg

SEQ ID NO: 39842 - DNA, 600 bp, Chicken  19866894274061_5
cccagactttttagatctaagggttctgcaggtggggcaaagccatctgaattgggcaaagccatctgaattaagcaaagccatctaatttagtcaaagctscctaaagcaygcaacggcccttcccagagctgctgtttggagaagcctttgttcaaatcactgctctcraaacccayacgaactcctgaagaaactgcaaattgaatcccataatggctcatatctggtgggttcggctctccaaactctgcctgtaggtatcacacatcaaaccggggtgtctgttgtgctgactcragtagaaactgggaattccccctccagcaacgcatcaacccaaatgggagtgggaaacacaggacccctacagaccccttcctatgcccaattaactcatgcgtcccctccctgcctgcccagcagccgccacagtgcatctcttgtgcacagacggccatcctcaccgcggcgcggtgctcctcgcggggcrgacaatggcgtgggcatgaatggagaatgctctcctctgtggggctgacaacaacactctgttcccaggcaagctgtcctcgggctcctgggcacgtactgctccca

SEQ ID NO: 39843 - DNA, 600 bp, Chicken  19866894274061_6
aaactgcaaattgaatcccataatggctcatatctggtgggttcggctctccaaactctgcctgtaggtatcacacatcaaaccggggtgtctgttgtgctgactcragtagaaactgggaattccccctccagcaacgcatcaacccaaatgggagtgggaaacacaggacccctacagaccccttcctatgcccaattaactcatgcgtcccctccctgcctgcccagcagccgccacagtgcatctcttgtgcacagacggccatcctcaccgcggcgcggtgctcctcgcggggcrgacaatggcgtgggcatgaatggagaatgctctcctctgtggggctgacaacaacactctgttcccaggcaagctgtcctcgggctcctgggcacgtactgctcccaccccacacagcccccgctttgatcccactgctggctgcttgggtttgctcctccagaatgtggtgtgctgaaaagattggaggaggtgaaaccatctcagccaacttggcagagcaaagagcccgaattggccacaagccctcagggcacagggggtttcagcatcttctcatggaagttctgggtgctgttg

SEQ ID NO: 39844 - DNA, 433 bp, Chicken  19866894274065_1
ctggacaacagaacaactgagtaaagaaagaacgctccctgaatggaaaagatgctaggaaattaaacaaataacatggtcttgatcaataaaagaaagcagacaaataaaccagaaaccagagagtctagttcagactattatgccagttagaaagggggaataatctagaaaaagcacatttcatttgcacaaggacagatgctgcaaacctgtcccactcctgctgctgaacggcacaacaaaaagtttcacccaaagactgaaacccaaccagaattcagtaagtgctaatcagayaggattaccgaaccctacctgggagaagtcaaacacaagtacagtaaaacaacctctgattcctctcagtatgacacaaaactgtcaagagcaaagccagtttcaggcaaagcatgaaccattctcagtacag

SEQ ID NO: 39845 - DNA, 600 bp, Chicken  19866894274068_1
gcaaattcagcgtgcatgggctgtgtttgtaatgagttcttaccgtacagtcacctcagtgtccagaacactgatgtttgtcagttcacaccagagtgagacattagtagtcttttttattattatttttttaatctttccacctcgtttttgattaagttgtcttcagcaccttttgagagaatatttagtgagttattgaggatattcatgttgccttcattagcccagtatcccatcatttcaacatctgcatgcagcacttcacaatgtacatagaatgctattaccctggtgtayagaagagaaactccaggacagaatgacagaagccactggcacagggttttaggaggcctagaaggactctgtcgctgacccaccctttcaggggctcagcctgtggtgacgcatgcaggcctcccagcccgctggtagcaggatgcccacgtgtcccatctaccagcatggcctatgtttgcagagcttcttggcccactgtgtgaagccaggccgatggtggctgtgaggagcagtgacagccaggcctcgcacgcgctgacctgtagagctgctccacagagcgaggtacagcattcc

SEQ ID NO: 39846 - DNA, 600 bp, Chicken  19866894274068_2
acgcgctgacctgtagagctgctccacagagcgaggtacagcattcctcctgtaaggagggctgtcccacacccctgactggagccgtcttgcacctgccaaaacatgatgcaggcttttcagagctgcatcgtcagacctttggaaaacctgactatcttagagcctttctagcagagtaacagatgggttgtgcttgtaattgggtagctgcatatggtaggcctgtcagacagtgaaaggacctaaagcattactgctcccataaaatgctactttctgatactgtttttctcccarttctggcagtaaacttttgaaacttcgcttggagtattcctgagagccccaaagcacacacgttatcatgtttttaggacggaattcaattaccagtaaagacaaggcaacgtttccacttccctcactgcagttgcttcagaccctcaaagcgaatgttgtctgctgaaagtagaatggatactaatttggtcacataaaacctcagattgtttcggctttccatgaatttctcaatgaaaagaatgatcaaacccagtgattctgctctcagacgcgctggggatatgaaagagctgc

SEQ ID NO: 39847 - DNA, 600 bp, Chicken  19866894274073_1
aacagtgattgagcacctggggggaaggcagggtcaacccaggggagctcaggtgcatacaatacacctgagtgactggaagggctggagccaggatctgccccttcccagacctcatttaagggttggcagtggagatgagagtattttgctggagatcgctgcatacctgaggccttctgaaggtaagcagcttcttccctttatttctgtgcccatagctgttgcatttgagcaaattttcacttactgcagcctagggacttgctactctcgtgtcattgctgcacattccattgygttacaccgaatgcatcctttttcttcctatttctaaggaaaaagaggaagaagggcagcatctagcagcaatctgcaggaacacttgacattgacacatatcagaagtatttttagcatctgagtgcactttttcttggccacatcatgacacccgagactactcctacagcatcagtctgagggtaatcgttttacaatggcagagcgaaggcagagaggttaaatgatttcttcccgtctgtagcatgacagtagcagtcctgggaataaatcttaggatctgcccacacctccctt

SEQ ID NO: 39848 - DNA, 599 bp, Chicken  19866894274076_1
  misc_feature (1)..(105): n is any nucleotide
nnnnnnnnnnnnnnnnnnnnnnnnnnnnnnnnnnnnnnnnnnnnnnnnnnnnnnnnnnnnnnnnnnnnnnnnnnnnnnnnnnnnnnnnnnnnnnnnnnnnnnnnntaccttagctgcaagttgctaaggggttaagtgctggaacactaaaaaatattattttccctgtttaatgaggggaaaaagaaaaacattcaaatgaaaacaaccactactgcaaatggaatctaataaccttctcccaagagacaggctcctcctaggctatgaaacctcaacatggatgaaattacattttayagaatatatacaaaaaaagagatcagaactccccctgctgtttgagcacaaaatttgtttgctgttgttcagtaaatccaggctgaaaaaacattgacaaagaatggaagtgaaaagatgcagaagatggcagggtagagaaaagacctgcaaagcatgaagcaaacagaactgaaataacaacaacactggtctggaagagaagcaattgacgtaaagtcaggatagaatgcaaaagaaaaaatcccaagtataagtgatgaactttagattctatcaccttcaatgcttgtcaagcc

SEQ ID NO: 39849 - DNA, 599 bp, Chicken  19866894274076_2
  misc_feature (1)..(19): n is any nucleotide
nnnnnnnnnnnnnnnnnnntaccttagctgcaagttgctaaggggttaagtgctggaacactaaaaaatattattttccctgtttaatgaggggaaaaagaaaaacattcaaatgaaaacaaccactactgcaaatggaatctaataaccttctcccaagagacaggctcctcctaggctatgaaacctcaacatggatgaaattacattttayagaatatatacaaaaaaagagatcagaactccccctgctgtttgagcacaaaatttgtttgctgttgttcagtaaatccaggctgyaaaaacattgacaaagaatggaagtgaaaagatgcagaagatggcagggtagagaaaagacctgcaaagcatgaagcaaacagaactgaaataacaacaacactggtctggaagagaagcaattgacgtaaagtcaggatagaatgcaaaagaaaaaatcccaagtataagtgatgaactttagattctatcaccttcaatgcttgtcaagccaggcttgtcaaactcaactattttgactataatgaagtgcgctcwtttaagaagaaattatatgtagaattaagattttgctaaac

SEQ ID NO: 39850 - DNA, 600 bp, Chicken  19866894274076_3
agcacaaaatttgtttgctgttgttcagtaaatccaggctgaaaaaacattgacaaagaatggaagtgaaaagatgcagaagatggcagggtagagaaaagacctgcaaagcatgaagcaaacagaactgaaataacaacaacactggtctggaagagaagcaattgacgtaaagtcaggatagaatgcaaaagaaaaaatcccaagtataagtgatgaactttagattctatcaccttcaatgcttgtcaagccaggcttgtcaaactcaactattttgactataatgaagtgcgctcwtttaagaagaaattatatgtagaattaagattttgctaaactttttggttctagctgtcaagctgccagcctgaatcatttacaacatccactacatttactcatctgccactaacaatgtaaattagtgactatggcactaagtctcaacaagtcttccttcataaatcatgattttagattatattaatgggccttaacgtgcctgtcattggaggagttgcagttctagccaaactcagctcctgcctgctcaacacagacactctagttttcactgaagacctttctgctaaagct

SEQ ID NO: 39851 - DNA, 409 bp, Chicken  19866894274084_1
aaggttgggcacccatggtttagtcttttaaaacggtctgtaaatgtatgtcaaagaaatcaccttaaattgttgacttcggcaggaactgatgcatgcctggatagtaagtttattggaggtctcactggtgccagtcaatgttggtggctctccatgatccttgtaacagcccagattccctggcactggcaagaataacagacaacagtcatagaaacattaaggctggaaaacacctctaagatcaccgtgtccaactccaacccatccccaccgtgcccattagccacgtcactyagtgccacacctccacactcactgaacgcctgcagggatggtgaccccaccacctccctgggcagccgtgccactgccagacctctcttcaagacactgaccactcgat

SEQ ID NO: 39852 - DNA, 600 bp, Chicken  19866894274090_1
agataatgtatcttttaaataaatcacttaggtccccttctcatgatatcccctctgttcattactgaataaaagagagctgtagcagcactggtatttctcccataaatcactcttcagggaggttcataactcaccgttagtttgtttcacatgcagggtctgctctgagagtgcatttatttttattcccctttcaaattgtcttgattttttttaaattatattaaaaaaaatcatcagtatgcagatatatttgcctgttataaccaatctcgatctgctttgaataggaattawgtttaggacatgaatgcgtaacgtgaagtaagcaagtttcatatgctcgaaataaatatttatgttaaaacacatttctgaaccctaattcagtcattttgccacatttttttttacctcctcagctgtgtatttgcatggaattgtggcgcttagagcctaagctttatcacatttctgcatcgtttttaggtccttcacctaacgtagcaggaggactcagtgctgcactgcagcttggtgggactttcagagagtctaatatttggtattaaattaattccgtccacttacagccta

SEQ ID NO: 39853 - DNA, 600 bp, Chicken  19866894274090_2
gcaagtttcatatgctcgaaataaatatttatgttaaaacacatttctgaaccctaattcagtcattttgccacatttttttttacctcctcagctgtgtatttgcatggaattgtggcgcttagagcctaagctttatcacatttctgcatcgtttttaggtccttcacctaacgtagcaggaggactcagtgctgcactgcagcttggtgggactttcagagagtctaatatttggtattaaattaattccgtccacttacagcctaagaaatgggactggttattgtagaataaaaygtcctgcgttagcccagtgccaggaagaactcagaaacctaatgtcccatcgtgtcagtatatagagcccttggttcatccagggaatgtagctcagaagctggaagtgtgttagtaatgatgctgatactggtgtctgctcacacccccaaatgctcttgtacttcagaaagttgagctcctctgcacrctttcagttaatctcaatgcaaagtatttgctgtttgtgctgactgttctggacagtgaagcaatacctgaacgcccccgctggaagcacggattgccttgtgctggctg

SEQ ID NO: 39854 - DNA, 600 bp, Chicken  19866894274090_3
agtgctgcactgcagcttggtgggactttcagagagtctaatatttggtattaaattaattccgtccacttacagcctaagaaatgggactggttattgtagaataaaaygtcctgcgttagcccagtgccaggaagaactcagaaacctaatgtcccatcgtgtcagtatatagagcccttggttcatccagggaatgtagctcagaagctggaagtgtgttagtaatgatgctgatactggtgtctgctcacacccccaaatgctcttgtacttcagaaagttgagctcctctgcacrctttcagttaatctcaatgcaaagtatttgctgtttgtgctgactgttctggacagtgaagcaatacctgaacgcccccgctggaagcacggattgccttgtgctggctgtttgacccctgaagcccaagaggagtctcctgcctcagctcatgagtgtggggagaagagctgaacctactcagagcaccaggctggcttcacaaagaaacagatgcaggattgtggtcatcctttgttgcaatctcatttaatcagtgaggcattttaatggctatcaatagcacgagcaactaaaccc

SEQ ID NO: 39855 - DNA, 600 bp, Chicken  19866894274090_4
cgttggtccttagcagacttgcctttgtgtcaatgtgggactagattcttggcatgccaaggaattacgcatcataatgacctaatcaagggctttcatagtttattctagagcagagaaaccttataaaacccaaacgcagatggaagcttggacccagcagcgactgctttgctcatgaaatcagaggagctctgtgcagactgacccccttgtgcctcagcaaagctctattgatttcagtaacttcatctgtgcagggatgtgaatctacctacggggagctaaatgaagcctaargttattgattttcaagggaaaggaactttatttaaaagaactcttcctttttttttttaattattcctgattttgacacacgacatcacagcagatgttaatctctcaatgagcaatgcgtatccagtggccagtgctcaagccatggaaatggtagcagcatccttgcttatcctttgcccttaatctccttctggaggcttggcaataaacagccagtcccgatctattttgcaacctcaaacccagatccaaaaagcccccatcaaaagtaatcagtttgctttacattcatccttt

SEQ ID NO: 39856 - DNA, 600 bp, Chicken  19866894274091_1
ggtgttaaaatggaagcatttccctgctcagttccacatgcctgtctcactgcagtctgtgtaattgctctgtaacagtacttgttgcagtagttttgagaaatagagcactgaaatccgtatggagggcaatggcaaataaaagtgcatcactatatgccagtacgtagggcaatttaaatggacccacaaaagaattggaaccatcaaaaatcagacttctgacattttgattagttaacgtgagggaaacttcttgcatgggaggaaccttggggacttatttttctgttaaaaagyatttaaatccaggaactgatgtccatcttgcactggggaaattggcaattaactgttccagagaagtctgtgaccttgtctaattagactacaatcatttcaaagaaactgaatgacagggtagaaaaaggacaagatcaccagcatgcatttgctggattgtttacccccagcttccattacttttattttgttagagtcactaaaagtagcctaaagaatgtagaacaggagagaaatctggaaatgttgtctctgcagatgtccactggtttcagctctgtgcctcgtatgttcact

SEQ ID NO: 39857 - DNA, 599 bp, Chicken  19866894274092_1
  misc_feature (1)..(19): n is any nucleotide
nnnnnnnnnnnnnnnnnnnttctgtacttaagatgcatttctagcactaataaatctaaaatcctaggaaaaagccaacaaagggtattatctcaagtgtataggggcagcgtagcttatactgctgaaaactctttcttgtggagtgcattcttgactgtatccccatactctattcatattcaaacgtcaggaattagttttatcacagataggagggattgatctcactagtgcctgagcatatagaattgtcagaggaaatagctgttggatgacaggatgccattctagccaccrttctgtggtcctttcattaaaatagcataattgattatatttggtattattcattaccattatcaaacgattgtcatctttgcaccaaattaatcttygtgagtgaagcttatcaactgaatgaaatgcatgaayactgttattttagactaaggtcagtgtgtttgtagaccaaaaccaatgtactttttgtagaatcatagcaacacaaagatgtcagcatayggtttacattggtttccatgtttagagtccatcacaaggctaattccctaaaggcaatttgaaataaatatttt

SEQ ID NO: 39858 - DNA, 600 bp, Chicken  19866894274092_2
gtataggggcagcgtagcttatactgctgaaaactctttcttgtggagtgcattcttgactgtatccccatactctattcatattcaaacgtcaggaattagttttatcacagataggagggattgatctcactagtgcctgagcatatagaattgtcagaggaaatagctgttggatgacaggatgccattctagccaccrttctgtggtcctttcattaaaatagcataattgattatatttggtattattcattaccattatcaaacgattgtcatctttgcaccaaattaatcttygtgagtgaagcttatcaactgaatgaaatgcatgaayactgttattttagactaaggtcagtgtgtttgtagaccaaaaccaatgtactttttgtagaatcatagcaacacaaagatgtcagcatayggtttacattggtttccatgtttagagtccatcacaaggctaattccctaaaggcaatttgaaataaatatttttcatatgctaggtgtcaacctcagagtttctaaatgaaaatgaagccagttcaataccctgccactatcacttgaaataattatttcactaccattttt

SEQ ID NO: 39859 - DNA, 600 bp, Chicken  19866894274092_3
ttcttgtggagtgcattcttgactgtatccccatactctattcatattcaaacgtcaggaattagttttatcacagataggagggattgatctcactagtgcctgagcatatagaattgtcagaggaaatagctgttggatgacaggatgccattctagccaccrttctgtggtcctttcattaaaatagcataattgattatatttggtattattcattaccattatcaaacgattgtcatctttgcaccaaattaatcttygtgagtgaagcttatcaactgaatgaaatgcatgaayactgttattttagactaaggtcagtgtgtttgtagaccaaaaccaatgtactttttgtagaatcatagcaacacaaagatgtcagcatayggtttacattggtttccatgtttagagtccatcacaaggctaattccctaaaggcaatttgaaataaatatttttcatatgctaggtgtcaacctcagagtttctaaatgaaaatgaagccagttcaataccctgccactatcacttgaaataattatttcactaccatttttttcccccctgattatgtgagatctttctgatcagagg

SEQ ID NO: 39860 - DNA, 600 bp, Chicken  19866894274092_4
tctcactagtgcctgagcatatagaattgtcagaggaaatagctgttggatgacaggatgccattctagccaccrttctgtggtcctttcattaaaatagcataattgattatatttggtattattcattaccattatcaaacgattgtcatctttgcaccaaattaatcttygtgagtgaagcttatcaactgaatgaaatgcatgaayactgttattttagactaaggtcagtgtgtttgtagaccaaaaccaatgtactttttgtagaatcatagcaacacaaagatgtcagcatayggtttacattggtttccatgtttagagtccatcacaaggctaattccctaaaggcaatttgaaataaatatttttcatatgctaggtgtcaacctcagagtttctaaatgaaaatgaagccagttcaataccctgccactatcacttgaaataattatttcactaccatttttttcccccctgattatgtgagatctttctgatcagaggaggttttacttcagtcagtaatgctaccagagaaattaatcattactgcagtacactgtggaaatttctgaatgaggaggcggttagcaa

SEQ ID NO: 39861 - DNA, 600 bp, Chicken  19866894274111_1
ctgaaacaaatatgcacctcaaaactacatttacagatatttgatggaaaactgcaaacacctgtacctgaaactgaacttgctctgggtatgaagtcatgggattttctagctgcgtaatagtgactttcttcaattttacaaagacacagcagtgctgtgcaaagattaactgaggaaaaggaaaggagcaagaggacacaaacatagtagaaggccatccttagggctgggctaaaaaaatcatagaatcatggaattgtactttttttcttttggaatcagtattgagtgcaattyttttcttttttctttttttttccctagatagacataatttgtatcaaggagagggagtaattagtgtgcacacagctcccgctcaaggatcagacctcctggggactataaagtggattacaaatagatgtgtacaagaagtgctgaaatactcaggcctggcagcacatgcagtaatgggtatttatgttcagtggttcagtggtttatttcacaataaagagatactttgagagactggacagtatgctgaggtgtctgatacaggagcataatgcctatctcacttcatatgcctac

SEQ ID NO: 39862 - DNA, 600 bp, Chicken  19866894274113_1
gggctgtgcagctgccctgtgcccaggtgagagctctggccctcctgcctggagccctcagaggtggattcacacagaaacagcccgctctcctgacgcgattggaaagacaatagcattacaaggctatgttgccatgcagctgagatccacatttacactgtttataatatctcctgcaaaacaacagccaccctgttcccaaaatccaggctggacactgatattattgaaaggagcctgacccagccccactgagtgccttccggacactgttctgcgcagccaggggctatttcrggcatgaggactgccctgcagcccctgcatggggcccggtcccacggcagcaggacgggtctgtatggggcagtgcagggagggcaycacatctccccacctgcagttcagctctctttggctgcgttacaaaatgcatctcctggttttgcccagtttgggatctttggtcatctggggctacgaatggaaatggctgagcgtggctgggctgccccagccctgctcccccccactgctggccccagtttctgtggggctgggaggtgtaagggccctcaccccattcctgctggctgc

SEQ ID NO: 39863 - DNA, 600 bp, Chicken  19866894274113_2
ctctcctgacgcgattggaaagacaatagcattacaaggctatgttgccatgcagctgagatccacatttacactgtttataatatctcctgcaaaacaacagccaccctgttcccaaaatccaggctggacactgatattattgaaaggagcctgacccagccccactgagtgccttccggacactgttctgcgcagccaggggctatttcrggcatgaggactgccctgcagcccctgcatggggcccggtcccacggcagcaggacgggtctgtatggggcagtgcagggagggcaycacatctccccacctgcagttcagctctctttggctgcgttacaaaatgcatctcctggttttgcccagtttgggatctttggtcatctggggctacgaatggaaatggctgagcgtggctgggctgccccagccctgctcccccccactgctggccccagtttctgtggggctgggaggtgtaagggccctcaccccattcctgctggctgccgtcgggcacccgcctgacagcatcgattttcctcccaaagacgaaggagtgaattgtttcaaccgtaattcctcaacgttacattt

SEQ ID NO: 39864 - DNA, 600 bp, Chicken  19866894274115_1
ataggcacagtcctgggatgctctcatcacttgtatgcttatcagggagagctgtgcacaagctggaactaaactaaaccctcgatgcaaatccccactgtgccctgagaggaggataataagaaaaggagagcatgacatggccttgtatctcccttgccttaacaagagcagtaaggatttgatggggaataacaatgctcgcatctttagttatcctatggaaatcaatgcaaagtgtgctcccgctcagggacatagcggctcaagggctaaattagttgagcaattcctgcacarttttaccttgtcctttagaattcttttcatttactaacagtctcaaggtactccttggtttctctgtgctgttttcaccattttatcatgacaccagggatctaaactttgtgcaccactttstttcataaagagctgatcactgtgtccagtctgttacaggcttgatyggatagaaatggatgagatcagagaagctggcaatattgctcctaacccttcctggtgctatattgggtacttgaaaataccaaaggtcttatttaaaggtctgttaagtcattatcttctttccaagag

SEQ ID NO: 39865 - DNA, 600 bp, Chicken  19866894274115_2
aaaaggagagcatgacatggccttgtatctcccttgccttaacaagagcagtaaggatttgatggggaataacaatgctcgcatctttagttatcctatggaaatcaatgcaaagtgtgctcccgctcagggacatagcggctcaagggctaaattagttgagcaattcctgcacarttttaccttgtcctttagaattcttttcatttactaacagtctcaaggtactccttggtttctctgtgctgttttcaccattttatcatgacaccagggatctaaactttgtgcaccactttstttcataaagagctgatcactgtgtccagtctgttacaggcttgatyggatagaaatggatgagatcagagaagctggcaatattgctcctaacccttcctggtgctatattgggtacttgaaaataccaaaggtcttatttaaaggtctgttaagtcattatcttctttccaagagaaaaaggggcggtcccttataatatatacctcctccctctaaaagtctcagtttgaaatcactttgtgctactctttggtttttattcttatttaacatctaggatatgttatatttcaccaa

SEQ ID NO: 39866 - DNA, 600 bp, Chicken  19866894274115_3
gcagtaaggatttgatggggaataacaatgctcgcatctttagttatcctatggaaatcaatgcaaagtgtgctcccgctcagggacatagcggctcaagggctaaattagttgagcaattcctgcacarttttaccttgtcctttagaattcttttcatttactaacagtctcaaggtactccttggtttctctgtgctgttttcaccattttatcatgacaccagggatctaaactttgtgcaccactttstttcataaagagctgatcactgtgtccagtctgttacaggcttgatyggatagaaatggatgagatcagagaagctggcaatattgctcctaacccttcctggtgctatattgggtacttgaaaataccaaaggtcttatttaaaggtctgttaagtcattatcttctttccaagagaaaaaggggcggtcccttataatatatacctcctccctctaaaagtctcagtttgaaatcactttgtgctactctttggtttttattcttatttaacatctaggatatgttatatttcaccaaaacacattcctagctttcaactttttctcattattttatggggtttt

SEQ ID NO: 39867 - DNA, 599 bp, Chicken  19866894274117_1
  misc_feature (1)..(65): n is any nucleotide
nnnnnnnnnnnnnnnnnnnnnnnnnnnnnnnnnnnnnnnnnnnnnnnnnnnnnnnnnnnnnnnnnggctgcaaagcttttttgcaaaagaagtattcaaggtaataagctgctcaagtgaatcgccttaactttttactcctgaggaagctacttgagattacagcctgagcccaggacaataaccatttactgagattttgttagcagtaactgttttctcctacatatgcttagctctgtatttggtgaacgctttctcacaggtatgtaatatattgctatttagatcaagattagwgagggaaaagaaaagtttctatacattcttcttgatttctgtatgtctgattatggaggcagtaagaaatctaattcaaaaatcaatattggatcaggatgaccactttttcaggttatgcatgtctctcttctatgattaagttcctatccaaaatttctttttgagaattcactgtcagaagaagattaatccatrtttattaatttcttaatgttaattcagtgctcatttagcagaatggttcaatccaaatctcagctacttgaagatgtgagatatcttttgagagccagtgt

SEQ ID NO: 39868 - DNA, 600 bp, Chicken  19866894274117_2
tttgttagcagtaactgttttctcctacatatgcttagctctgtatttggtgaacgctttctcacaggtatgtaatatattgctatttagatcaagattagwgagggaaaagaaaagtttctatacattcttcttgatttctgtatgtctgattatggaggcagtaagaaatctaattcaaaaatcaatattggatcaggatgaccactttttcaggttatgcatgtctctcttctatgattaagttcctatccaaaatttctttttgagaattcactgtcagaagaagattaatccatrtttattaatttcttaatgttaattcagtgctcatttagcagaatggttcaatccaaatctcagctacttgaagatgtgagatatcttttgagagccagtgtttgaatggaatgtgtccttgatgaaataatatttatatttgtctgcaaagcagggctttgaactatacacaatggtatattttccagctgtctcatgactaaaagtgtactgtgcaaaatgttcactggattagagggcatctaacagaaacaatgtaattactacgaccaagataattctttattaaaatgcctgtca

SEQ ID NO: 39869 - DNA, 600 bp, Chicken  19866894274119_1
ataaacaacttactgtaaggaaatgcattaatttttattatctcttaaaaaaaaaaaagacaaggatcacactctagtaatgactattaatgtgttttttattttaatttttttgttgttgttctgaattttttaaggagttcatatctgatttgttttaaatcatatgctgtaatatgtttagttaagaacacagcactctttaaaaatatactttatttttaacttaagtataaatgatacagtagataagtccaacttattctaattaacagtgtaaacagttgccctcatcatatyttgttgtaatttaaactatgaaggaagttgaaaacttaaaaataattgtgtarcaaaaacagagttttttgacaatagcttaagctttcagtttttactggtgatacttgtggcactcatgtctgtatgtgcttcggtatgttgcaactgccacaatcccctgcttccttagggtaagagataaagtacaagacaactgttctgtgcattagaaattgtggattttgaaacagaacaagtgaaaaagtcaacctttgattttttttcaatcttttttaaaaatgttgtttaaactagaat

SEQ ID NO: 39870 - DNA, 600 bp, Chicken  19866894274119_2
aaaaagacaaggatcacactctagtaatgactattaatgtgttttttattttaatttttttgttgttgttctgaattttttaaggagttcatatctgatttgttttaaatcatatgctgtaatatgtttagttaagaacacagcactctttaaaaatatactttatttttaacttaagtataaatgatacagtagataagtccaacttattctaattaacagtgtaaacagttgccctcatcatatyttgttgtaatttaaactatgaaggaagttgaaaacttaaaaataattgtgtarcaaaaacagagttttttgacaatagcttaagctttcagtttttactggtgatacttgtggcactcatgtctgtatgtgcttcggtatgttgcaactgccacaatcccctgcttccttagggtaagagataaagtacaagacaactgttctgtgcattagaaattgtggattttgaaacagaacaagtgaaaaagtcaacctttgattttttttcaatcttttttaaaaatgttgtttaaactagaatgtctgccaggttctagagcagttctggataacagtattacagttaaccttcac

SEQ ID NO: 39871 - DNA, 513 bp, Chicken  19866894274119_3
ttttgacaatagcttaagctttcagtttttactggtgatacttgtggcactcatgtctgtatgtgcttcggtatgttgcaactgccacaatcccctgcttccttagggtaagagataaagtacaagacaactgttctgtgcattagaaattgtggattttgaaacagaacaagtgaaaaagtcaacctttgattttttttcaatcttttttaaaaatgttgtttaaactagaatgtctgccaggttctagagcagttctggataacagtattacagttaaccttcaccaaaatgaagttygttttctctcgttatcactaaaatcatgcacatgtggtacatgagcagtttgagaactcaaatttatgaataacatcagggtctgtttgaataaaactaaatgcacaagttgctcaaaactgaacaaactcttctttttcttgtgtaggtacttgaagaatccaaagctctagtacgtaatattatgaaggtggacttggaacaagcaaatga

SEQ ID NO: 39872 - DNA, 600 bp, Chicken  19866894274120_1
agtctttccctacatcatgacaacaaagcaggacaagtcctttgaatattttatgaagcttcatagatgttctctgtttcaattttagtaaatgcaaaaatgctaataatattgcctctcattcttacgttcaaaagctagatttagcccttgataaaagtgccttgtggaggcaatgggactaatgctccgataactagacacccttatgcaaacaaatagccatttctaccaccaagaccaacagttcctttgaatcttgggggcagtcatgcaaaatgtgcatcgtgaagactgggrcaggctggggagctttgaagtgtacttgaatggcacaagggttccagaatacctgccataagctctgagagggtgttaacatttttttttaccaaaacaagttttscyrtgggacgcctgtttaaggcagtaattcattaaggttgcggtggctgttcagaagcctggtatccttttcttggcattcattgccatctaccactaacaaagtatagctgaactgtcagaactgtgcatctactttccaatgtttttctgggtgagaattttttcaagtctttcttaagtgtttcacccttc

SEQ ID NO: 39873 - DNA, 600 bp, Chicken  19866894274120_2
taatattgcctctcattcttacgttcaaaagctagatttagcccttgataaaagtgccttgtggaggcaatgggactaatgctccgataactagacacccttatgcaaacaaatagccatttctaccaccaagaccaacagttcctttgaatcttgggggcagtcatgcaaaatgtgcatcgtgaagactgggrcaggctggggagctttgaagtgtacttgaatggcacaagggttccagaatacctgccataagctctgagagggtgttaacatttttttttaccaaaacaagttttscyrtgggacgcctgtttaaggcagtaattcattaaggttgcggtggctgttcagaagcctggtatccttttcttggcattcattgccatctaccactaacaaagtatagctgaactgtcagaactgtgcatctactttccaatgtttttctgggtgagaattttttcaagtctttcttaagtgtttcacccttcctgttttgttcygtctgaaaacagcaatagagaaacagaggaaggagctttctttgcacgtgagctgtttatttaggaaatgagaaggcaggtgatgaaactgaca

SEQ ID NO: 39874 - DNA, 600 bp, Chicken  19866894274120_3
atattgcctctcattcttacgttcaaaagctagatttagcccttgataaaagtgccttgtggaggcaatgggactaatgctccgataactagacacccttatgcaaacaaatagccatttctaccaccaagaccaacagttcctttgaatcttgggggcagtcatgcaaaatgtgcatcgtgaagactgggrcaggctggggagctttgaagtgtacttgaatggcacaagggttccagaatacctgccataagctctgagagggtgttaacatttttttttaccaaaacaagttttscyrtgggacgcctgtttaaggcagtaattcattaaggttgcggtggctgttcagaagcctggtatccttttcttggcattcattgccatctaccactaacaaagtatagctgaactgtcagaactgtgcatctactttccaatgtttttctgggtgagaattttttcaagtctttcttaagtgtttcacccttcctgttttgttcygtctgaaaacagcaatagagaaacagaggaaggagctttctttgcacgtgagctgtttatttaggaaatgagaaggcaggtgatgaaactgacagt

SEQ ID NO: 39875 - DNA, 600 bp, Chicken  19866894274120_4
tattgcctctcattcttacgttcaaaagctagatttagcccttgataaaagtgccttgtggaggcaatgggactaatgctccgataactagacacccttatgcaaacaaatagccatttctaccaccaagaccaacagttcctttgaatcttgggggcagtcatgcaaaatgtgcatcgtgaagactgggrcaggctggggagctttgaagtgtacttgaatggcacaagggttccagaatacctgccataagctctgagagggtgttaacatttttttttaccaaaacaagttttscyrtgggacgcctgtttaaggcagtaattcattaaggttgcggtggctgttcagaagcctggtatccttttcttggcattcattgccatctaccactaacaaagtatagctgaactgtcagaactgtgcatctactttccaatgtttttctgggtgagaattttttcaagtctttcttaagtgtttcacccttcctgttttgttcygtctgaaaacagcaatagagaaacagaggaaggagctttctttgcacgtgagctgtttatttaggaaatgagaaggcaggtgatgaaactgacagtg

SEQ ID NO: 39876 - DNA, 537 bp, Chicken  19866894274120_5
ctttgaagtgtacttgaatggcacaagggttccagaatacctgccataagctctgagagggtgttaacatttttttttaccaaaacaagttttscyrtgggacgcctgtttaaggcagtaattcattaaggttgcggtggctgttcagaagcctggtatccttttcttggcattcattgccatctaccactaacaaagtatagctgaactgtcagaactgtgcatctactttccaatgtttttctgggtgagaattttttcaagtctttcttaagtgtttcacccttcctgttttgttcygtctgaaaacagcaatagagaaacagaggaaggagctttctttgcacgtgagctgtttatttaggaaatgagaaggcaggtgatgaaactgacagtggaaggaagcatttcaaaagagtgtgtttgttgacttaaaacattaaatggccacaatatgtgggtgggggggggggaaagggggcgggcacgtgtgaggcatttgttgaatttggtgtttaagctttgaggatttaaatg

SEQ ID NO: 39877 - DNA, 600 bp, Chicken  19866894274123_1
cctggctgggcccaggatgggtctcaacgccaagaagcaggatctggtttgacctcatggagcaagcgagcaccactaatgctactcaagtgcatttacagcatgtatctgcatctcaaatgacaaccaaaaccccttggaaccagccactacctccaaataaattgctccccaagggaactggtgatcccaggggaaacatggaaggacagtgattaaccagtgattttacctctctgtggatttctcacttgagcttgagagcctggagagtctccaagcccagatccaatctttttycacagtaagaaagctcttggccttttcctgcatcaatcaacatcttatacacagggttatttatggaaaaaaataaataaaaatccccatgtcacgattrtcacagagagctcaaaggaaacaaagtactttaggaagaaccctatgatcagaactaccaaagtaggtcagccctaaaagcccatctgatccaatgtcctaatttctacagtagccaatagtggacacttaaaaaagaaaaaaaaaaaaaaagaaaaaagacaaagaaaaaggcatcaatcagagagtgacatttcctca

SEQ ID NO: 39878 - DNA, 600 bp, Chicken  19866894274123_2
gcatgtatctgcatctcaaatgacaaccaaaaccccttggaaccagccactacctccaaataaattgctccccaagggaactggtgatcccaggggaaacatggaaggacagtgattaaccagtgattttacctctctgtggatttctcacttgagcttgagagcctggagagtctccaagcccagatccaatctttttycacagtaagaaagctcttggccttttcctgcatcaatcaacatcttatacacagggttatttatggaaaaaaataaataaaaatccccatgtcacgattrtcacagagagctcaaaggaaacaaagtactttaggaagaaccctatgatcagaactaccaaagtaggtcagccctaaaagcccatctgatccaatgtcctaatttctacagtagccaatagtggacacttaaaaaagaaaaaaaaaaaaaaagaaaaaagacaaagaaaaaggcatcaatcagagagtgacatttcctcagaaaactctctgccctccaacaatttatggcttaagtcaccataatattggctgtcaacccaaagtcttcagcctcaagggcatttcaaacattgcagag

SEQ ID NO: 39879 - DNA, 600 bp, Chicken  19866894274124_1
cacttccacgtcactcgatcccatgtagacattgtaaacttgcactgcatgcctcttctacagcttctcttttgcaaacacaaatcacaggtagcactctgcggtgactcgaagcacaaagatgagatgtctgcttgaggttcttaaatcccaggctatattcctgtttgcagattttctgcacagcatatctgtggtgtagcttttcctgctcaagagcacagctcaggtttgtcactgcaactttctcttccttctgagaaaaaaagaaaaagaaaaaaaacaaaaagaggaataatrgtagtatctgcctaacttactatgcatctcagttcacaagtgatctttaagaatctatttttaaattgtggttttgtcagatggtcagrttgactggatccattcagtaatacttatacagctataaaagatacattagaaatttcgtatgaactgcaaacctagcagttctctcagcaacttgaactagagaatcctggcatttcctctgcagatgactttggttttggcacctccaactctgtctcattcagctcacaagttgctaaacagcagtaaaagtacctgaccacattctca

SEQ ID NO: 39880 - DNA, 600 bp, Chicken  19866894274124_2
ggtagcactctgcggtgactcgaagcacaaagatgagatgtctgcttgaggttcttaaatcccaggctatattcctgtttgcagattttctgcacagcatatctgtggtgtagcttttcctgctcaagagcacagctcaggtttgtcactgcaactttctcttccttctgagaaaaaaagaaaaagaaaaaaaacaaaaagaggaataatrgtagtatctgcctaacttactatgcatctcagttcacaagtgatctttaagaatctatttttaaattgtggttttgtcagatggtcagrttgactggatccattcagtaatacttatacagctataaaagatacattagaaatttcgtatgaactgcaaacctagcagttctctcagcaacttgaactagagaatcctggcatttcctctgcagatgactttggttttggcacctccaactctgtctcattcagctcacaagttgctaaacagcagtaaaagtacctgaccacattctcataccaacgggtttaattttcagcttttttttttcttttctaaggttagcttatcttaactgggaatgcaacgcataaattgcagcaagt

SEQ ID NO: 39881 - DNA, 599 bp, Chicken  19866894274132_1
  misc_feature (1)..(261): n is any nucleotide
nnnnnnnnnnnnnnnnnnnnnnnnnnnnnnnnnnnnnnnnnnnnnnnnnnnnnnnnnnnnnnnnnnnnnnnnnnnnnnnnnnnnnnnnnnnnnnnnnnnnnnnnnnnnnnnnnnnnnnnnnnnnnnnnnnnnnnnnnnnnnnnnnnnnnnnnnnnnnnnnnnnnnnnnnnnnnnnnnnnnnnnnnnnnnnnnnnnnnnnnnnnnnnnnnnnnnnnnnnnnnnnnnnnnnnnnnnnnnnnnnnnnnnnnnnnnnnnnnnnnnggtaggtctggcaggcctagctgggctccctgcgcctcrcatccttccatggggtctgcagttgacaactctcataagagataatttcccctcatcagctctcccaagcagcctctgctcctctgtactgtgcatttgtctgcccccagcccctgaggacctgctggggctggataagccctttttggaaaggagtgggcatggcagcagaaggaagggggcctcttctgaccggacatggaaaccactgaatgggtggagaggagcgttaaatcagcagagggacttagaaagcagaaatctggataattgttttcagcagttttcttatttgacat

SEQ ID NO: 39882 - DNA, 600 bp, Chicken  19866894274132_2
gtctgcagttgacaactctcataagagataatttcccctcatcagctctcccaagcagcctctgctcctctgtactgtgcatttgtctgcccccagcccctgaggacctgctggggctggataagccctttttggaaaggagtgggcatggcagcagaaggaagggggcctcttctgaccggacatggaaaccactgaatgggtggagaggagcgttaaatcagcagagggacttagaaagcagaaatctggataattgttttcagcagttttcttatttgacataagcctcagccagaraggtattacaagttattgatctcatgtttgcaaattcagtttatccctctctctccaaccctggcctctcattttcttgcttctcttagcagcccagtaagttctccagctgacagmtgagaccccaggctttccccaccatcaagttttgttccartacaatccagcaccagggtcaccttttttaccctagcatgcgctgtgctaaaaggctggttgggaaaccttcctgcgtcctctatgccaggtgaacttttggactgtctccttgatgcttccatttggctctctgtcatgcat

SEQ ID NO: 39883 - DNA, 600 bp, Chicken  19866894274132_3
tggataagccctttttggaaaggagtgggcatggcagcagaaggaagggggcctcttctgaccggacatggaaaccactgaatgggtggagaggagcgttaaatcagcagagggacttagaaagcagaaatctggataattgttttcagcagttttcttatttgacataagcctcagccagaraggtattacaagttattgatctcatgtttgcaaattcagtttatccctctctctccaaccctggcctctcattttcttgcttctcttagcagcccagtaagttctccagctgacagmtgagaccccaggctttccccaccatcaagttttgttccartacaatccagcaccagggtcaccttttttaccctagcatgcgctgtgctaaaaggctggttgggaaaccttcctgcgtcctctatgccaggtgaacttttggactgtctccttgatgcttccatttggctctctgtcatgcatgaagcttctggcctaaaccccacttctgcgtgcatttgcattcaacctgaggtgtctctctattctgttctgtctggtgggatttttgtaccctcggctcacacgttttcttgaaca

SEQ ID NO: 39884 - DNA, 600 bp, Chicken  19866894274132_4
aaggaagggggcctcttctgaccggacatggaaaccactgaatgggtggagaggagcgttaaatcagcagagggacttagaaagcagaaatctggataattgttttcagcagttttcttatttgacataagcctcagccagaraggtattacaagttattgatctcatgtttgcaaattcagtttatccctctctctccaaccctggcctctcattttcttgcttctcttagcagcccagtaagttctccagctgacagmtgagaccccaggctttccccaccatcaagttttgttccartacaatccagcaccagggtcaccttttttaccctagcatgcgctgtgctaaaaggctggttgggaaaccttcctgcgtcctctatgccaggtgaacttttggactgtctccttgatgcttccatttggctctctgtcatgcatgaagcttctggcctaaaccccacttctgcgtgcatttgcattcaacctgaggtgtctctctattctgttctgtctggtgggatttttgtaccctcggctcacacgttttcttgaacagtggaacaaggaactccaggcagctgcacagttagggtaa

SEQ ID NO: 39885 - DNA, 600 bp, Chicken  19866894274144_1
tggttttatttttagatgtaagaattatttaggcaaatgctctatctgtttttagcacacttacaagtgtcttctatgaatctaatttgtgtcaggcacagtgctgtttcttcctgaaagacatcaaaaattaatccccaaaagatgagtatgtggtagaggtgcatgaataatgtgaagagacttgtgacagtttgggattgtgctaaattgtctcatgactgattcatccttgccaacagttgcacaggtgttgacccagtgtaggtagaatttctccctgaatccctttacctaccratgcttaaagggagcctgaaaactgggaaaggcacatgaacttctgtgaatcctaatcttatgccatgtttctgacgcttaatgatttatgagctcataataccttatttgtgctttttttttctttaatggagaaacacaatactcttcaacttataaagcatcatttaaagtttgcatttaagagagagaattaactgaattaagagctaacaagctaacatgcttgtgaaggcatgaaaaattaagtagtgcccatattcttacattccaagcatgagaaaatttcacgtgcttaca

SEQ ID NO: 39886 - DNA, 600 bp, Chicken  19866894274145_1
cacgtatcagataaaagaaaaaagaaaaaaaaagcagcagtaattctttacactgctgaaaatgtcaacttatactaggttacgtcacaatagtagtaaattttactgttgcccaaaaacctagtatgtattaacttaaataagtaagtaaaaatttatcacttataggagttagtcccctgcaagccaaagtcttgcaggttgcctcaggaggattttttgcagtttgctgctccagatcagtcaaattgtacagttcaggcacaatgggaggcaaccccagagcagagatacagtacrcactcggcccagactgactggtcttcagagacagcacttaaattacacacaattaaacaatgctacacatgttactcattgtcctgtacttctgtggatagctgctaagggaaaattgccagtgatttgttttattctaggagagggacacagaccctcacaagaatctaggcacacaaaacctcaaaaatccagcttttcaaattcgtggtaatgaatgaaaacgtagcgtctggtatctgagcccaacggcttaagacaaagtatgtacaactcttagggcacagggtcacagaaagt

SEQ ID NO: 39887 - DNA, 600 bp, Chicken  19866894274157_1
gtatctgtttcagctgtaatacagggagcatatgtgcatttaccaatcagttgcaactgttgtagtctctttgatgtttttcaggatataaccccattatttttgtcttccagccacgttggtttgttttttgtttgtttttggcttctccactagattttatgtaattagattttattagtatatttgattttactttaaggtagttgataattcgacctccagattcgtgaatgaaagttcaggaatcttacatctttccatgctttctgtgctggtaaaaacaagcaagcaacaaawggaatcaatgtttccaaccttactgttatttttctgcaagttacagttaagattgaacttagagatatggaggatattctgcaattyctttcaggacccttgatgaatcagtcttaagacagaatcacagaactgkaggggttagaagggacctcgggggatcatgagaaatggccagctttcctattagttgcagtttcctttttggcagagtattaagctagcaatggtagtacaagggcacctttcactgtgtggatgatgactgtccacttcatcatactactcaaagtcactctg

SEQ ID NO: 39888 - DNA, 586 bp, Chicken  19866894274157_2
ataaccccattatttttgtcttccagccacgttggtttgttttttgtttgtttttggcttctccactagattttatgtaattagattttattagtatatttgattttactttaaggtagttgataattcgacctccagattcgtgaatgaaagttcaggaatcttacatctttccatgctttctgtgctggtaaaaacaagcaagcaacaaawggaatcaatgtttccaaccttactgttatttttctgcaagttacagttaagattgaacttagagatatggaggatattctgcaattyctttcaggacccttgatgaatcagtcttaagacagaatcacagaactgkaggggttagaagggacctcgggggatcatgagaaatggccagctttcctattagttgcagtttcctttttggcagagtattaagctagcaatggtagtacaagggcacctttcactgtgtggatgatgactgtccacttcatcatactactcaaagtcactctggaaatgtatcagtttggagaagggcattccttcttgggggaatcagagggattcttcagtatacatataaaag

SEQ ID NO: 39889 - DNA, 537 bp, Chicken  19866894274157_3
gtttttggcttctccactagattttatgtaattagattttattagtatatttgattttactttaaggtagttgataattcgacctccagattcgtgaatgaaagttcaggaatcttacatctttccatgctttctgtgctggtaaaaacaagcaagcaacaaawggaatcaatgtttccaaccttactgttatttttctgcaagttacagttaagattgaacttagagatatggaggatattctgcaattyctttcaggacccttgatgaatcagtcttaagacagaatcacagaactgkaggggttagaagggacctcgggggatcatgagaaatggccagctttcctattagttgcagtttcctttttggcagagtattaagctagcaatggtagtacaagggcacctttcactgtgtggatgatgactgtccacttcatcatactactcaaagtcactctggaaatgtatcagtttggagaagggcattccttcttgggggaatcagagggattcttcagtatacatataaaag

SEQ ID NO: 39890 - DNA, 600 bp, Chicken  19866894274158_1
cctaaaatagttcacgttgtttgtctttaagcatacacagaagcctcgggtctttctgatcctgcctgtttatgtatttagaagcctgagctatttgtcaaggctattttacttcaagctctcactgaaccctggtgactagtcaggtcagaacacagcttgtaaaaaatcttgttcccactgttgtttaatatatagtgcttattaagcttcatggtgactcatatatacatctatgtttgatttgatgttttactgtgtttttttaacatacccatcaaagtcttgcttgcatttagygtaagtccatgaaatattctgaacgcaagaagtgctcctgcagtctgaactaatgcgtttttctgtaacctgatacaaaaatacaatttgtaaataatgtcttgaaacagagatttgattgaagaaatgcagaaggtcctactgaatatagactgaagaagattttattctgcactctctgcactgtggaggaggaaaacctatgaagaaatgggtttgaatgaatttgggaggctttttctttgtgtaaagtgtgtgcaggtattgcagttgttgttctgtagactcccagacaagcag

SEQ ID NO: 39891 - DNA, 600 bp, Chicken  19866894274164_1
ggccaactcacatgagcttcaaatgactgaatgtgtaattatgttttgttatatatgactgttgtggccaatattcacagtcagacccagttccctattgtgtgatataacaaacacagaataaagaatagccccattcctaaattgcctgcaatgtaattaagagctgccataaaaagcagttgcaacaaacattaggaaggtacagaggagagatgatggaaatcataatcagaaagttaatgtatacagcatataaataagataattcacagcaatatcgtaagacctacttatatrttttgtaaactagcactttaaagccaaacaaatcactgcactcaaaacctatcttctgtgtggataaaaacagaagagtagaatttgagaagggtcttggacagtgctgctactgtgcggctctaaattacttgtgtgtcttgtttgtttaaagcagcactttataaaatgtactgtccacaactaaattaaattctatctaaatctacatttcttggatgaaatgtcacacttgcagtccagttatttaggcctgttcagagcaagctacttccatgaataactgctcgtctacttcca

SEQ ID NO: 39892 - DNA, 600 bp, Chicken  19866894274166_1
ctagttacagggatcaagaatcctgtaagatgaagatgaattaagatggattacttcactttgctgttataatcagctggtttttgaatctgtgataaatacacatgaggctatactttaagtcacgataattattctgggataaatttgcaaattgttatatattttttgaaattaaatgtttcaataaaatgatctgacctacactttttatttagtttttcttattggttttctgagtggctgaagatatctatcagaatgtctttgaatttcagaaccattaaaagttctatactkttagtattatgcaagtctaatattacgttcctctctgtagcccaaaaaacacaaggccagagttaagcaggagaaaacctaaatggaaagctatgggrtaagaaaggtgattaaaattcatgtctctttctatcattgtggtataggcttttctgttttccaaatgcagttctataacatcaaattatgtcatcatggacaaacaagtaattgagcatctgagagaaagccaaaacaaagctgcatggtctccaaagactttcatattaattcttgaccaacatactgttgaggtaaagg

SEQ ID NO: 39893 - DNA, 600 bp, Chicken  19866894274166_2
atacacatgaggctatactttaagtcacgataattattctgggataaatttgcaaattgttatatattttttgaaattaaatgtttcaataaaatgatctgacctacactttttatttagtttttcttattggttttctgagtggctgaagatatctatcagaatgtctttgaatttcagaaccattaaaagttctatactkttagtattatgcaagtctaatattacgttcctctctgtagcccaaaaaacacaaggccagagttaagcaggagaaaacctaaatggaaagctatgggrtaagaaaggtgattaaaattcatgtctctttctatcattgtggtataggcttttctgttttccaaatgcagttctataacatcaaattatgtcatcatggacaaacaagtaattgagcatctgagagaaagccaaaacaaagctgcatggtctccaaagactttcatattaattcttgaccaacatactgttgaggtaaaggtgaatgaaagtattctcacagacttttaaaagtatatacattagaatttaagaaacactcagtaactaaatactggatttaaaataagtcaractgag

SEQ ID NO: 39894 - DNA, 600 bp, Chicken  19866894274166_3
atgggrtaagaaaggtgattaaaattcatgtctctttctatcattgtggtataggcttttctgttttccaaatgcagttctataacatcaaattatgtcatcatggacaaacaagtaattgagcatctgagagaaagccaaaacaaagctgcatggtctccaaagactttcatattaattcttgaccaacatactgttgaggtaaaggtgaatgaaagtattctcacagacttttaaaagtatatacattagaatttaagaaacactcagtaactaaatactggatttaaaataagtcaractgagataatatattttaaaaaatcattatctcagtaaatgtggagaaaatgaatggatatgtcaagaactgtaataagttaccgtaggtctagtagattctaaattgctttcagacactaagctaagttctgaatgatgtcacagaatcattggatcatagaatcataaactcttttagttccaaaccatttcctcttgttctataaatgcaggccctgctaaacgtgtctgtccccttacttcttattgagcccctttagatactgaaggccaccatcaggtctccctaaagtctct

SEQ ID NO: 39895 - DNA, 600 bp, Chicken  19866894274169_1
ctatttccatctgccaggcgaggagtggggcagtgcccatgtgtcccctgcccacgtgtgccgcacggagggatgtatcccctgccaggggacgtggcagcacatggtgagacccccactggctgtgggtcctgatgagccgtggggcagcaccctgagccaaactgccccaatagggtccggatgtttttcccaaagccccaatgaatgaagatctgtgattgacgaaggagatgcgatcgaagagccgtgattgaagggacgtgattgaagggatgtgatttttggtttccctttccyataaatactcagatgagcccacaagttggaaaagaagagatcaggaagaaggtttggcggccccatcgcctcgtgattcaatctgtgtgcaggagacagagctccccttgaacggtgatggggacacggggccgcctggcagctcatcagccctggctccgcgtgcaggcagcgccgggcccttatctcccagatacacatctgctgggtgcacagccttgtccacccgtacgtggagcacggctgataccctcagctttctgcttgcctacagggaagaacacgcatcccgaagggtca

SEQ ID NO: 39896 - DNA, 600 bp, Chicken  19866894274170_1
tcttactaagccacactgagctgttctcaacattttccttgattttaagcaatgttgcaaaatggaaattcatgggatcttggcccatacctgagaggttattaggtgacttctgcttttagcagagcacgcagaacatttttggccatgtagatgaaatgggagtgctgctccccacccgggcaggtcatcgtgcagtgctggggcactgtggcttaatgatgtctctgcttaggttttaattaccaggtcactattcctcccctgtatggagaggagcttattcctttgcctgttctycttttgtggagttgttacagagtctagacagggctgggacctgcacctaccacttctctctttcaggtatcctgatgaaagcacaggtgtgatgtgactcaccccacttacttgcacaagaggaaaactcatttattgctctcctctccaacaccttcttcacataaaatgaagaatgctgaaccacacttccaaatcctccagcttgttttgaggacagctgcccttgggaggaccctgggtagatggggccaaggaacaaccttcctttgtccatgtttctttctcgctgtgtccatg

SEQ ID NO: 39897 - DNA, 600 bp, Chicken  19866894274170_2
ggagttgttacagagtctagacagggctgggacctgcacctaccacttctctctttcaggtatcctgatgaaagcacaggtgtgatgtgactcaccccacttacttgcacaagaggaaaactcatttattgctctcctctccaacaccttcttcacataaaatgaagaatgctgaaccacacttccaaatcctccagcttgttttgaggacagctgcccttgggaggaccctgggtagatggggccaaggaacaaccttcctttgtccatgtttctttctcgctgtgtccatgaagacayygggaggctgaagctggtagggtttcacatgtaataactctaatgggtgctgccttaattgggactgggtcctgcattccmctgagacctcagagtgtcaggatgagctcacagctctcccacctctcaagtttggccacagaaaagggggactgagaaggaaaaaacactttttggtttccggcaaaccactaacarctgagaacaaacacacatggcatcagctcccactgatctcaaaataaaatgcaggatttggaaaagaaaaattgctgtttgcttcaagcacagcttcaagga

SEQ ID NO: 39898 - DNA, 600 bp, Chicken  19866894274170_3
gagttgttacagagtctagacagggctgggacctgcacctaccacttctctctttcaggtatcctgatgaaagcacaggtgtgatgtgactcaccccacttacttgcacaagaggaaaactcatttattgctctcctctccaacaccttcttcacataaaatgaagaatgctgaaccacacttccaaatcctccagcttgttttgaggacagctgcccttgggaggaccctgggtagatggggccaaggaacaaccttcctttgtccatgtttctttctcgctgtgtccatgaagacayygggaggctgaagctggtagggtttcacatgtaataactctaatgggtgctgccttaattgggactgggtcctgcattccmctgagacctcagagtgtcaggatgagctcacagctctcccacctctcaagtttggccacagaaaagggggactgagaaggaaaaaacactttttggtttccggcaaaccactaacarctgagaacaaacacacatggcatcagctcccactgatctcaaaataaaatgcaggatttggaaaagaaaaattgctgtttgcttcaagcacagcttcaaggaa

SEQ ID NO: 39899 - DNA, 600 bp, Chicken  19866894274170_4
gtgatgtgactcaccccacttacttgcacaagaggaaaactcatttattgctctcctctccaacaccttcttcacataaaatgaagaatgctgaaccacacttccaaatcctccagcttgttttgaggacagctgcccttgggaggaccctgggtagatggggccaaggaacaaccttcctttgtccatgtttctttctcgctgtgtccatgaagacayygggaggctgaagctggtagggtttcacatgtaataactctaatgggtgctgccttaattgggactgggtcctgcattccmctgagacctcagagtgtcaggatgagctcacagctctcccacctctcaagtttggccacagaaaagggggactgagaaggaaaaaacactttttggtttccggcaaaccactaacarctgagaacaaacacacatggcatcagctcccactgatctcaaaataaaatgcaggatttggaaaagaaaaattgctgtttgcttcaagcacagcttcaaggaatgcagaaaacctttgatctcccgaggctttgtgcagcacagctttcagttccaggagcgctccgcttgcatcttgttggg

SEQ ID NO: 39900 - DNA, 600 bp, Chicken  19866894274170_5
ttgttttgaggacagctgcccttgggaggaccctgggtagatggggccaaggaacaaccttcctttgtccatgtttctttctcgctgtgtccatgaagacayygggaggctgaagctggtagggtttcacatgtaataactctaatgggtgctgccttaattgggactgggtcctgcattccmctgagacctcagagtgtcaggatgagctcacagctctcccacctctcaagtttggccacagaaaagggggactgagaaggaaaaaacactttttggtttccggcaaaccactaacarctgagaacaaacacacatggcatcagctcccactgatctcaaaataaaatgcaggatttggaaaagaaaaattgctgtttgcttcaagcacagcttcaaggaatgcagaaaacctttgatctcccgaggctttgtgcagcacagctttcagttccaggagcgctccgcttgcatcttgttgggtgtagatcttaatatagttaatttcttcaaggcagggaaaaaaaaaaagcttgcctgcctcatctgtaatagcaggcgagatttgacgtgatacatttaattacggcggatggcaca

SEQ ID NO: 39901 - DNA, 599 bp, Chicken  19866894274173_1
  misc_feature (1)..(71): n is any nucleotide
nnnnnnnnnnnnnnnnnnnnnnnnnnnnnnnnnnnnnnnnnnnnnnnnnnnnnnnnnnnnnnnnnnnnnnnttctgaaagaatctgacagtttgcacatgaggtttcagtttgctcagggtttgggttgttttaatgctggtaatgaaaattcttgcattgtttcaaaccgagggactcggtctgggttttcaagaatgtttcctacacacgtacacactttcagatgtcctttctttctccttaagtcatgggaagaacatgggaaaggaaaaggaagaaatactgcttgagagaaacrcattggaaacaatgattttctgccttttaatcaaataaacttattttaaacccaggtatgtgtgtgtttccaaggaagatccagctatccttttcatttccattttctaattaccagtcgaccactggtatcacggtctggcccttcccttaaagacaaccctgaattctggatgaaataggaatagggaaatrcaggcatctcagcgagactacagctgcccccaaacctgtttttcccccatgcagagaagctgaagaacaccaaattagtcctatgtgtcacataacttttcagag

SEQ ID NO: 39902 - DNA, 600 bp, Chicken  19866894274173_2
gaatgtttcctacacacgtacacactttcagatgtcctttctttctccttaagtcatgggaagaacatgggaaaggaaaaggaagaaatactgcttgagagaaacrcattggaaacaatgattttctgccttttaatcaaataaacttattttaaacccaggtatgtgtgtgtttccaaggaagatccagctatccttttcatttccattttctaattaccagtcgaccactggtatcacggtctggcccttcccttaaagacaaccctgaattctggatgaaataggaatagggaaatrcaggcatctcagcgagactacagctgcccccaaacctgtttttcccccatgcagagaagctgaagaacaccaaattagtcctatgtgtcacataacttttcagaggacagcatgaacaactcccattcggtctcagcggaggctttaaccaagttttgtgctcgagctctaagcacagggcactgtagcgaggctgcatgatttatatttataataatttttaaaaagctcataaaaatgaggaccctgagaatgacttcagcctcatcccagccacgcagctgcgcggctaattgctat

SEQ ID NO: 39903 - DNA, 599 bp, Chicken  19866894274176_1
  misc_feature (1)..(180): n is any nucleotide
nnnnnnnnnnnnnnnnnnnnnnnnnnnnnnnnnnnnnnnnnnnnnnnnnnnnnnnnnnnnnnnnnnnnnnnnnnnnnnnnnnnnnnnnnnnnnnnnnnnnnnnnnnnnnnnnnnnnnnnnnnnnnnnnnnnnnnnnnnnnnnnnnnnnnnnnnnnnnnnnnnnnnnnnnnnnnnnnnnnntgctggcagttctactctgtgggatacatcgcattactttacataaatttgcttacactatctgatttttaaaagtaacttggaaattggctgtgtcctggacttttgatttaggcgtgrgatctcctaagcacaaagttcctctatccccgcattgctggaactttatgtacagtatttcccagattgagtatacacaggagcaaggagtggtggagaaagggcagtctgagccctgttgtgatttagcacaagtatgaaaaatgcagtctgaatccagttggatgtagtaggagagggagcactcttgtcgcagtacccgagattgcatagagttgggcttgagtttctcagccgtactgcaaagcactgcaatcatcagacaaccacattcccttccactggtagctcccatggga

SEQ ID NO: 39904 - DNA, 600 bp, Chicken  19866894274176_2
cgcattgctggaactttatgtacagtatttcccagattgagtatacacaggagcaaggagtggtggagaaagggcagtctgagccctgttgtgatttagcacaagtatgaaaaatgcagtctgaatccagttggatgtagtaggagagggagcactcttgtcgcagtacccgagattgcatagagttgggcttgagtttctcagccgtactgcaaagcactgcaatcatcagacaaccacattcccttccactggtagctcccatgggagataggtacctgaaaactttgaaggtctgcrtctactgtgtcatcatcttggtttctcaaaatcttccctggattctctgtgcaaatacagagtgcttcctcttaatagttaattttgtttgaatctttaagactgtagctccttatagttactgtgttgtgcaagcagctatataaacatttgctgttattatttaatgtttttctttttccttttccatttgatcttctcccagattagactgcaagtctcttagggcagggacagcatctagttgaatttctgcagggcctgctaaaagcagcttcataggtttctatgggtccatat

SEQ ID NO: 39905 - DNA, 599 bp, Chicken  19866894274180_1
  misc_feature (1)..(48): n is any nucleotide
nnnnnnnnnnnnnnnnnnnnnnnnnnnnnnnnnnnnnnnnnnnnnnnntgaaactgtgaagctctcttaagtccaatcatttggaactgctgctgaagggtgtgtgtgcatgagcatacatgcacagcttttatgtatttcctggggcaaaagaagtctactgaggatagcaaaccaactttgaaacccttgaggagtgttgacttgttcttctttgttggtctttcaaaatgtaatagcagctgaagtcactcatggcatacagggccacaaaaaagaaatgttggatcaggaaaaaaygaggcttttgaaatccctgaaaacctacatgcatggaaagctgtagcaaaatgatcattggcctttattaaacttgttttcactcaatttctttgtgtaaaaggagtatgttcaatagattcagaattgttcggtgtttcgaaaagttttcatcatgaatatttcttttctttgttttggggtcayctttttgcttagggttaacaactcggttaatggcagttagtgtagacagtgtgaaccaaatgtgcaccatctaaatgcagataatatgtagatagtgatggaattgctgtttt

SEQ ID NO: 39906 - DNA, 600 bp, Chicken  19866894274180_2
cccttgaggagtgttgacttgttcttctttgttggtctttcaaaatgtaatagcagctgaagtcactcatggcatacagggccacaaaaaagaaatgttggatcaggaaaaaaygaggcttttgaaatccctgaaaacctacatgcatggaaagctgtagcaaaatgatcattggcctttattaaacttgttttcactcaatttctttgtgtaaaaggagtatgttcaatagattcagaattgttcggtgtttcgaaaagttttcatcatgaatatttcttttctttgttttggggtcayctttttgcttagggttaacaactcggttaatggcagttagtgtagacagtgtgaaccaaatgtgcaccatctaaatgcagataatatgtagatagtgatggaattgctgttttttcttctttttttttcagtcagctgtgatataactacttgaaaactattttgatcaaaatcagcataagaagcatggaatagtaagaggaaaaacaattttgtagtatatttctgtactatagaaataagttcatttctgaaaatgaaagcttgcccctatattcaaaatatccagtatcaacacat

SEQ ID NO: 39907 - DNA, 600 bp, Chicken  19866894274180_3
ccctcttttgtgccatgaatacaccctaagagttttttgtttttctgttttcagaagaactgaaatgttttgtatgttttgtacaacaggtatagaagacaaggcaactgtctaatggcttgtttatttttaccggaatacatatatcctcttgttgagtgataaatgctatctaacctctagtatgttatattttgaatatgtttaaggtgcatgatatatgtattacagagacagtacattacagaagtttttggtgtaaacctagaatgaacacctgcagaactgcaagatatgctscaaggatgtaaagaaaggcaggcaggatgttaaggaaataagacaacatgttggtgtagcctcatgtattggttatagtgtgaaacatgtatcgatttgataggtcataggtagaagaaagccctatcacgttcctttttatctcccaaatctgatttcatcaacaatcttctctgtctgcagttaccataacaaagtaaaacttcaacatttaggatccttggtattgaggtactacacacactatcgtctttctgctctaaaggcatactatttmtttcaatagattgagtaatttct

SEQ ID NO: 39908 - DNA, 406 bp, Chicken  19866894274180_4
ctgcagaactgcaagatatgctscaaggatgtaaagaaaggcaggcaggatgttaaggaaataagacaacatgttggtgtagcctcatgtattggttatagtgtgaaacatgtatcgatttgataggtcataggtagaagaaagccctatcacgttcctttttatctcccaaatctgatttcatcaacaatcttctctgtctgcagttaccataacaaagtaaaacttcaacatttaggatccttggtattgaggtactacacacactatcgtctttctgctctaaaggcatactatttmtttcaatagattgagtaatttctgaatatattttagacaaacatatcacattattaaagcagatttttgccagatattttggcagtctaccaatccttaagctgca

SEQ ID NO: 39909 - DNA, 599 bp, Chicken  19866894274181_1
  misc_feature (1)..(29): n is any nucleotide
nnnnnnnnnnnnnnnnnnnnnnnnnnnnnatgctggcagtttgtaactattgcagcaggggccttccgactttgaaaacctaccacattctttgctaaggttcatttggaatttcttttaggaattgagaatacaaatcatttgtattgaaacaaaacaacaaaaaaaagtaatttttttttcttgcttatatgattcaggcaagctgaacttcttgcagaaaatagtttagaaaagagccttgctctgccaccaaatgctgagagctcagccacaaatgcagtttgtacagatgtctcmttttaaaaaaaaaagttctataaagcgttcacatttagaaagatgactgaatgtcattgcagatgtaatcccctcttctatctgaaataattcccttctarcccactgtttggtgtttggcaatgacacgttcagtcaggttgcaactttctcaggtgtggtggtgcgtttttgatactgaagtaacatgcagtacagtgaaaatctatacagaatgtctgaaaccacttttgatatatctgtatttgatcctttctggcagtttcctttgcccaatgtagtcttgtatgctacacatc

SEQ ID NO: 39910 - DNA, 599 bp, Chicken  19866894274181_2
  misc_feature (1)..(28): n is any nucleotide
nnnnnnnnnnnnnnnnnnnnnnnnnnnnatgctggcagtttgtaactattgcagcaggggccttccgactttgaaaacctaccacattctttgctaaggttcatttggaatttcttttaggaattgagaatacaaatcatttgtattgaaacaaaacaacaaaaaaaagtaatttttttttcttgcttatatgattcaggcaagctgaacttcttgcagaaaatagtttagaaaagagccttgctctgccaccaaatgctgagagctcagccacaaatgcagtttgtacagatgtctctmtttaaaaaaaaaagttctataaagcgttcacatttagaaagatgactgaatgtcattgcagatgtaatcccctcttctatctgaaataattcccttctarcccactgtttggtgtttggcaatgacacgttcagtcaggttgcaactttctcaggtgtggtggtgcgtttttgatactgaagtaacatgcagtacagtgaaaatctatacagaatgtctgaaaccacttttgatatatctgtatttgatcctttctggcagtttcctttgcccaatgtagtcttgtatgctacacatca

SEQ ID NO: 39911 - DNA, 600 bp, Chicken  19866894274181_3
tcatttggaatttcttttaggaattgagaatacaaatcatttgtattgaaacaaaacaacaaaaaaaagtaatttttttttcttgcttatatgattcaggcaagctgaacttcttgcagaaaatagtttagaaaagagccttgctctgccaccaaatgctgagagctcagccacaaatgcagtttgtacagatgtctctttttaaaaaaaaaagttctataaagcgttcacatttagaaagatgactgaatgtcattgcagatgtaatcccctcttctatctgaaataattcccttctarcccactgtttggtgtttggcaatgacacgttcagtcaggttgcaactttctcaggtgtggtggtgcgtttttgatactgaagtaacatgcagtacagtgaaaatctatacagaatgtctgaaaccacttttgatatatctgtatttgatcctttctggcagtttcctttgcccaatgtagtcttgtatgctacacatcaggagaayaagcgcctctttggatttgtgctcagaacttcaggagggagagctgacagtcgacaaacttccatctgctatatctttgaatcaaacaatgaag

SEQ ID NO: 39912 - DNA, 600 bp, Chicken  19866894274181_4
aaaaaaagttctataaagcgttcacatttagaaagatgactgaatgtcattgcagatgtaatcccctcttctatctgaaataattcccttctarcccactgtttggtgtttggcaatgacacgttcagtcaggttgcaactttctcaggtgtggtggtgcgtttttgatactgaagtaacatgcagtacagtgaaaatctatacagaatgtctgaaaccacttttgatatatctgtatttgatcctttctggcagtttcctttgcccaatgtagtcttgtatgctacacatcaggagaayaagcgcctctttggatttgtgctcagaacttcaggagggagagctgacagtcgacaaacttccatctgctatatctttgaatcaaacaatgaaggggaaaaggtattggtgatggttatattcgtgtccattttcattttctgattccagtcgttttctgacatggattctacagcattagttccattccggctgtctacgggatttgtatgggagagtttacgtactgaaaacaagttaaccaatagtttaagtaactgtaaaatgctttagcatgctgtggtacctgatctggaatgt

SEQ ID NO: 39913 - DNA, 600 bp, Chicken  19866894274184_1
ctctctgtagagctctggtacagctccttgtcccagctgctatggtaccagcaaaccagggatatctcacatgcagacgtgaaggagacatctgtgcacacgctgccatcgagcaggtgggccgcagcatctgccagcttcggcagtccaagaggaataccctgaagtttgattcctgacaactgcattttgctcttcttctgtcccagagaagagaccaaactacaacgattacactgcatgtgacagctccatcagaaaggcccccaacccccatagggtgacaccgtgctttctggkgggctgaggaagtcaccttgckttccctctggtccatagatcctggcaccaacccagccctcaggaagcgcagatccacatctccattctggtagggacgtggcaaaggctatgtgaacgctgcacggctcamtgcctcagtttccaacctgcaaaatgggggtgaaaaatctttcttcctgagtgctgagagcagaactatacctcctgatacggggcatttggctgccacagccgtggggctgcacaagttctggcccattagaagacttctgaaaacgggcattcatagaagcatag

SEQ ID NO: 39914 - DNA, 588 bp, Chicken  19866894274184_2
gctccttgtcccagctgctatggtaccagcaaaccagggatatctcacatgcagacgtgaaggagacatctgtgcacacgctgccatcgagcaggtgggccgcagcatctgccagcttcggcagtccaagaggaataccctgaagtttgattcctgacaactgcattttgctcttcttctgtcccagagaagagaccaaactacaacgattacactgcatgtgacagctccatcagaaaggcccccaacccccatagggtgacaccgtgctttctggkgggctgaggaagtcaccttgckttccctctggtccatagatcctggcaccaacccagccctcaggaagcgcagatccacatctccattctggtagggacgtggcaaaggctatgtgaacgctgcacggctcamtgcctcagtttccaacctgcaaaatgggggtgaaaaatctttcttcctgagtgctgagagcagaactatacctcctgatacggggcatttggctgccacagccgtggggctgcacaagttctggcccattagaagacttctgaaaacgggcattcatagaagcatagaatcatagaa

SEQ ID NO: 39915 - DNA, 477 bp, Chicken  19866894274184_3
ccagcttcggcagtccaagaggaataccctgaagtttgattcctgacaactgcattttgctcttcttctgtcccagagaagagaccaaactacaacgattacactgcatgtgacagctccatcagaaaggcccccaacccccatagggtgacaccgtgctttctggkgggctgaggaagtcaccttgckttccctctggtccatagatcctggcaccaacccagccctcaggaagcgcagatccacatctccattctggtagggacgtggcaaaggctatgtgaacgctgcacggctcamtgcctcagtttccaacctgcaaaatgggggtgaaaaatctttcttcctgagtgctgagagcagaactatacctcctgatacggggcatttggctgccacagccgtggggctgcacaagttctggcccattagaagacttctgaaaacgggcattcatagaagcatagaatcatagaa

SEQ ID NO: 39916 - DNA, 600 bp, Chicken  19866894274190_1
gagcaagtaataacactgcattacagcatttctgctggagaagtgagcagacattgcttgcattattcttgcagaatagttgattattgtactgcttcttgaatctgagcatctcttggtcaagttaatacataaatgatttcttcaattcttcatgccgaaaagttagtcctgttactgacccaggagttccttgtttcatcctgtagaatagaaagataaggtttgaacagagctgtaagaaaaaaagctagtgtgatgtctgaatgctcttggtggccctaagcaggatacaaattmrggcagaacagtatatttcataacggcaggcyactttccttttccacaaggaagaaagaagggagttaagatattcttgaagagtatttctggaagggaaatgtttactttggtctttatatctaaaaagcacttgtaacatgaaaataacacaggctgaatagttaagaggccagttcttgcttgtgctggtcacttgctctctctgcacctcagggaattttatatcctttggcaagcagtcaattagagatttcttttccttctgtcttcagaaaataatgagggaatgtaatgatt

SEQ ID NO: 39917 - DNA, 600 bp, Chicken  19866894274190_2
agcaagtaataacactgcattacagcatttctgctggagaagtgagcagacattgcttgcattattcttgcagaatagttgattattgtactgcttcttgaatctgagcatctcttggtcaagttaatacataaatgatttcttcaattcttcatgccgaaaagttagtcctgttactgacccaggagttccttgtttcatcctgtagaatagaaagataaggtttgaacagagctgtaagaaaaaaagctagtgtgatgtctgaatgctcttggtggccctaagcaggatacaaattmrggcagaacagtatatttcataacggcaggcyactttccttttccacaaggaagaaagaagggagttaagatattcttgaagagtatttctggaagggaaatgtttactttggtctttatatctaaaaagcacttgtaacatgaaaataacacaggctgaatagttaagaggccagttcttgcttgtgctggtcacttgctctctctgcacctcagggaattttatatcctttggcaagcagtcaattagagatttcttttccttctgtcttcagaaaataatgagggaatgtaatgattt

SEQ ID NO: 39918 - DNA, 600 bp, Chicken  19866894274190_3
tgctggagaagtgagcagacattgcttgcattattcttgcagaatagttgattattgtactgcttcttgaatctgagcatctcttggtcaagttaatacataaatgatttcttcaattcttcatgccgaaaagttagtcctgttactgacccaggagttccttgtttcatcctgtagaatagaaagataaggtttgaacagagctgtaagaaaaaaagctagtgtgatgtctgaatgctcttggtggccctaagcaggatacaaattmrggcagaacagtatatttcataacggcaggcyactttccttttccacaaggaagaaagaagggagttaagatattcttgaagagtatttctggaagggaaatgtttactttggtctttatatctaaaaagcacttgtaacatgaaaataacacaggctgaatagttaagaggccagttcttgcttgtgctggtcacttgctctctctgcacctcagggaattttatatcctttggcaagcagtcaattagagatttcttttccttctgtcttcagaaaataatgagggaatgtaatgatttaacagatactccaarcgtacctgtgaagaga

SEQ ID NO: 39919 - DNA, 422 bp, Chicken  19866894274190_4
ttcataacggcaggcyactttccttttccacaaggaagaaagaagggagttaagatattcttgaagagtatttctggaagggaaatgtttactttggtctttatatctaaaaagcacttgtaacatgaaaataacacaggctgaatagttaagaggccagttcttgcttgtgctggtcacttgctctctctgcacctcagggaattttatatcctttggcaagcagtcaattagagatttcttttccttctgtcttcagaaaataatgagggaatgtaatgatttaacagatactccaarcgtacctgtgaagagaacttattcatttcagcatttctccccttgacaccatactttgtgaaggtgctgagtaataaatgcataatgaatctggcttatgggatgtattgcgcaagctgcat

SEQ ID NO: 39920 - DNA, 600 bp, Chicken  19866894274193_1
tccttatagagaaagaccagaaaataaaggactgtgagagaagcggcaaggaaacactagtgacaacctcccctttgtaaagggaagatttgaaaacaaatgtattcctaaggaacacatcaatgctctattctctcttctacaagagcctcaaggctgccataaatgaactgccactttctcccagtaccatatcaggaaggtgtgtgagcatcacctggcttgctctacaaaacggcacgtgtctcagtgctgcctcagagagcatgtcctgcaggtgtttgaagccagggctgcttygaaacggtggctgttcatggtagggatacttcaaaatggctgctggttttggttgagatgctttaaaatggcgtctgtttttctgtagcytaacctcagcgcatgtcacagagctgaacccckcagtgagcatcactaggccttgcaattaatcctccttccccaagctcccaacagcacttattgagccctggtagcgttcagtgatgctttgggaatgtagggagaagcttaccccagtgcaagagtctagaaaacagtgatagccatgaattttgcacccaccagygtgaggaggct

SEQ ID NO: 39921 - DNA, 600 bp, Chicken  19866894274193_2
tgaaaacaaatgtattcctaaggaacacatcaatgctctattctctcttctacaagagcctcaaggctgccataaatgaactgccactttctcccagtaccatatcaggaaggtgtgtgagcatcacctggcttgctctacaaaacggcacgtgtctcagtgctgcctcagagagcatgtcctgcaggtgtttgaagccagggctgcttygaaacggtggctgttcatggtagggatacttcaaaatggctgctggttttggttgagatgctttaaaatggcgtctgtttttctgtagcytaacctcagcgcatgtcacagagctgaacccckcagtgagcatcactaggccttgcaattaatcctccttccccaagctcccaacagcacttattgagccctggtagcgttcagtgatgctttgggaatgtagggagaagcttaccccagtgcaagagtctagaaaacagtgatagccatgaattttgcacccaccagygtgaggaggctgcaaccttcctcctcatgagctctgtccccatgactgcgaggcttcacaggggctgctcccgacaaaacccggcataaatcaggattagt

SEQ ID NO: 39922 - DNA, 600 bp, Chicken  19866894274193_3
tgctctattctctcttctacaagagcctcaaggctgccataaatgaactgccactttctcccagtaccatatcaggaaggtgtgtgagcatcacctggcttgctctacaaaacggcacgtgtctcagtgctgcctcagagagcatgtcctgcaggtgtttgaagccagggctgcttygaaacggtggctgttcatggtagggatacttcaaaatggctgctggttttggttgagatgctttaaaatggcgtctgtttttctgtagcytaacctcagcgcatgtcacagagctgaacccckcagtgagcatcactaggccttgcaattaatcctccttccccaagctcccaacagcacttattgagccctggtagcgttcagtgatgctttgggaatgtagggagaagcttaccccagtgcaagagtctagaaaacagtgatagccatgaattttgcacccaccagygtgaggaggctgcaaccttcctcctcatgagctctgtccccatgactgcgaggcttcacaggggctgctcccgacaaaacccggcataaatcaggattagtgcacggcatctggggagctgcgccagcagcgcg

SEQ ID NO: 39923 - DNA, 600 bp, Chicken  19866894274193_4
agggctgcttygaaacggtggctgttcatggtagggatacttcaaaatggctgctggttttggttgagatgctttaaaatggcgtctgtttttctgtagcytaacctcagcgcatgtcacagagctgaacccckcagtgagcatcactaggccttgcaattaatcctccttccccaagctcccaacagcacttattgagccctggtagcgttcagtgatgctttgggaatgtagggagaagcttaccccagtgcaagagtctagaaaacagtgatagccatgaattttgcacccaccagygtgaggaggctgcaaccttcctcctcatgagctctgtccccatgactgcgaggcttcacaggggctgctcccgacaaaacccggcataaatcaggattagtgcacggcatctggggagctgcgccagcagcgcgtcgacgcgagagggaaatcaggcctcactgagcaggctccccaagtgacatgtttattcctgccaaactcccatcctttatccccagcacagagcagccctgtaagcccctctaagtccctggtatgtyaaactgatagggcagctctgctcttgccgtgytggga

SEQ ID NO: 39924 - DNA, 488 bp, Chicken  19866894274193_5
gaaaacagtgatagccatgaattttgcacccaccagygtgaggaggctgcaaccttcctcctcatgagctctgtccccatgactgcgaggcttcacaggggctgctcccgacaaaacccggcataaatcaggattagtgcacggcatctggggagctgcgccagcagcgcgtcgacgcgagagggaaatcaggcctcactgagcaggctccccaagtgacatgtttattcctgccaaactcccatcctttatccccagcacagagcagccctgtaagcccctctaagtccctggtatgtyaaactgatagggcagctctgctcttgccgtgytgggagggaaagtggcaggaagaagctggtgctgctgcttcagccttactggcccaggccatcacctcctgccttgctgtgggaccgatccttgtttgtggccaaggtgcagcatgcaacctgctcatggagtggggagggagcaacaggaaaatg

SEQ ID NO: 39925 - DNA, 456 bp, Chicken  19866894274193_6
ccagygtgaggaggctgcaaccttcctcctcatgagctctgtccccatgactgcgaggcttcacaggggctgctcccgacaaaacccggcataaatcaggattagtgcacggcatctggggagctgcgccagcagcgcgtcgacgcgagagggaaatcaggcctcactgagcaggctccccaagtgacatgtttattcctgccaaactcccatcctttatccccagcacagagcagccctgtaagcccctctaagtccctggtatgtyaaactgatagggcagctctgctcttgccgtgytgggagggaaagtggcaggaagaagctggtgctgctgcttcagccttactggcccaggccatcacctcctgccttgctgtgggaccgatccttgtttgtggccaaggtgcagcatgcaacctgctcatggagtggggagggagcaacaggaaaatg

SEQ ID NO: 39926 - DNA, 599 bp, Chicken  19866894274194_1
  misc_feature (1)..(261): n is any nucleotide
nnnnnnnnnnnnnnnnnnnnnnnnnnnnnnnnnnnnnnnnnnnnnnnnnnnnnnnnnnnnnnnnnnnnnnnnnnnnnnnnnnnnnnnnnnnnnnnnnnnnnnnnnnnnnnnnnnnnnnnnnnnnnnnnnnnnnnnnnnnnnnnnnnnnnnnnnnnnnnnnnnnnnnnnnnnnnnnnnnnnnnnnnnnnnnnnnnnnnnnnnnnnnnnnnnnnnnnnnnnnnnnnnnnnnnnnnnnnnnnnnnnnnnnnnnnnnnnnnnnnnacatacaaacaccttctctggggttttccttccccccaygctctctctccctctaccatctccatctccctcagcacacagacaatactttcctcaaaggaacgcagcgctcgctttttctccctgcttaaaattttatgggcacttatctctcttcaagaagatcctttcagatgagagccccggtgacctgcaggccctgcacgctgcctcagcaacacgcacagccccattgggtgctctgcaattcagtgcttgggcagaaggggmtgagtgctgctcaaccacaggtcaccagggccagagtcttggggcggattcggttgtgagtgcaggac

SEQ ID NO: 39927 - DNA, 599 bp, Chicken  19866894274194_2
  misc_feature (1)..(30): n is any nucleotide
nnnnnnnnnnnnnnnnnnnnnnnnnnnnnnacatacaaacaccttctctggggttttccttccccccaygctctctctccctctaccatctccatctccctcagcacacagacaatactttcctcaaaggaacgcagcgctcgctttttctccctgcttaaaattttatgggcacttatctctcttcaagaagatcctttcagatgagagccccggtgacctgcaggccctgcacgctgcctcagcaacacgcacagccccattgggtgctctgcaattcagtgcttgggcagaaggggmtgagtgctgctcaaccacaggtcaccagggccagagtcttggggcggattcggttgtgagtgcaggacaaagtttggtgagtgctcatcttctcatctcgcccattgagaacaaaaatcaggttaagwagccatggcaacagagctgcaacaactgccrgaagaagaagagcccgctcggccctcggaggctgaggcgttcagtggaattaagggaaatgaatggaaacaaagtggagatgcccaaggcaaaggcctcggccgtgctgggagagctcttgtaatccaaacacatttcct

SEQ ID NO: 39928 - DNA, 600 bp, Chicken  19866894274194_3
ggaacgcagcgctcgctttttctccctgcttaaaattttatgggcacttatctctcttcaagaagatcctttcagatgagagccccggtgacctgcaggccctgcacgctgcctcagcaacacgcacagccccattgggtgctctgcaattcagtgcttgggcagaaggggmtgagtgctgctcaaccacaggtcaccagggccagagtcttggggcggattcggttgtgagtgcaggacaaagtttggtgagtgctcatcttctcatctcgcccattgagaacaaaaatcaggttaagwagccatggcaacagagctgcaacaactgccrgaagaagaagagcccgctcggccctcggaggctgaggcgttcagtggaattaagggaaatgaatggaaacaaagtggagatgcccaaggcaaaggcctcggccgtgctgggagagctcttgtaatccaaacacatttcctatttcaaacatcacccgatgctgttaggctccgtggggagacaaggcagaacgctgccgtgcagcactcagacacatccgtccaaatcctgcctggtcttcatggatcaaacaactcaaaaccccagtg

SEQ ID NO: 39929 - DNA, 600 bp, Chicken  19866894274194_4
aaaattttatgggcacttatctctcttcaagaagatcctttcagatgagagccccggtgacctgcaggccctgcacgctgcctcagcaacacgcacagccccattgggtgctctgcaattcagtgcttgggcagaaggggmtgagtgctgctcaaccacaggtcaccagggccagagtcttggggcggattcggttgtgagtgcaggacaaagtttggtgagtgctcatcttctcatctcgcccattgagaacaaaaatcaggttaagwagccatggcaacagagctgcaacaactgccrgaagaagaagagcccgctcggccctcggaggctgaggcgttcagtggaattaagggaaatgaatggaaacaaagtggagatgcccaaggcaaaggcctcggccgtgctgggagagctcttgtaatccaaacacatttcctatttcaaacatcacccgatgctgttaggctccgtggggagacaaggcagaacgctgccgtgcagcactcagacacatccgtccaaatcctgcctggtcttcatggatcaaacaactcaaaaccccagtgaacactgggcaccaaggcgacttcttatgca

SEQ ID NO: 39930 - DNA, 584 bp, Chicken  19866894274199_1
cacattctttcaaatgagatcgggtctgtttattttcactcatctgcaggaaatgggaatttttaagtctattattctaaatccaggaaagcagtttgtattgcttaaccccagacaaaggcaaattagccacagccttcactcactacctcaaaatatttaatactcataccattaagtgacaaatggtttgcaaaaacccagagtgtaaattcttcttcttgaaccttgtccagaaggcatgagaaacttggtcacacctcccagatgaccagtatggggtatccctgcatgagatayggagctggtcaagyccaccctctgaccaccaggcaccgcttggtactgatgctgagccaaagggtttggcacgtttgaaagctcactgcctctcaactctattgaattagctgctgatttatgaggccacctgggagtgttgcactggaaaatgaaaatgctggttgaagagaggtgccatgaaaaatcctacatgcagtgtctgttcttgtcaatgacaagacgaagatgtcttcacaatactcacagcacaccccgccaaaacctacagcgggatcctactt

SEQ ID NO: 39931 - DNA, 570 bp, Chicken  19866894274199_2
tgagatcgggtctgtttattttcactcatctgcaggaaatgggaatttttaagtctattattctaaatccaggaaagcagtttgtattgcttaaccccagacaaaggcaaattagccacagccttcactcactacctcaaaatatttaatactcataccattaagtgacaaatggtttgcaaaaacccagagtgtaaattcttcttcttgaaccttgtccagaaggcatgagaaacttggtcacacctcccagatgaccagtatggggtatccctgcatgagatayggagctggtcaagyccaccctctgaccaccaggcaccgcttggtactgatgctgagccaaagggtttggcacgtttgaaagctcactgcctctcaactctattgaattagctgctgatttatgaggccacctgggagtgttgcactggaaaatgaaaatgctggttgaagagaggtgccatgaaaaatcctacatgcagtgtctgttcttgtcaatgacaagacgaagatgtcttcacaatactcacagcacaccccgccaaaacctacagcgggatcctactt

SEQ ID NO: 39932 - DNA, 600 bp, Chicken  19866894274201_1
gctaatgaatgtgctgaaccaatgactactaatgctagcaagttgcccagaagaaaagtccatcctgtgctgatcattttcaagtgatgctgagtcactagtatgtctgagagccaactcttgatgatttttctaaaatatcatttcatcctgggaagctgctgaaaacagtttttatactgttcttattttgtgtcccattgaaaactcagcacagacagcatgaggaatcaggttttgactccttagtacttctgacaaatatctggtgtgttaacaatcaggttaagaaattgatgyggcaggcagattgtgacccaatctttcaakcattcttcrttcttaattaaaagtcagggctgctgtaaataattgccacagtgataagtgtgtagctcagttcatgagtacgtgtgtgtgtgtatcagtgacatacccttcrcatcttagctaaagcctattttgcagctgtcatgaatrttgacttgcaagaacactagtgaaaagtaggaaagatttgagcttctgtgaatttaagtggtgtgatattttaatgatctgagattcaggtaaagttatgttctgctgataacatagttt

SEQ ID NO: 39933 - DNA, 600 bp, Chicken  19866894274201_2
aatgctagcaagttgcccagaagaaaagtccatcctgtgctgatcattttcaagtgatgctgagtcactagtatgtctgagagccaactcttgatgatttttctaaaatatcatttcatcctgggaagctgctgaaaacagtttttatactgttcttattttgtgtcccattgaaaactcagcacagacagcatgaggaatcaggttttgactccttagtacttctgacaaatatctggtgtgttaacaatcaggttaagaaattgatgyggcaggcagattgtgacccaatctttcaakcattcttcrttcttaattaaaagtcagggctgctgtaaataattgccacagtgataagtgtgtagctcagttcatgagtacgtgtgtgtgtgtatcagtgacatacccttcrcatcttagctaaagcctattttgcagctgtcatgaatrttgacttgcaagaacactagtgaaaagtaggaaagatttgagcttctgtgaatttaagtggtgtgatattttaatgatctgagattcaggtaaagttatgttctgctgataacatagtttattggaaaaataatcatgctcatattttat

SEQ ID NO: 39934 - DNA, 600 bp, Chicken  19866894274201_3
aagttgcccagaagaaaagtccatcctgtgctgatcattttcaagtgatgctgagtcactagtatgtctgagagccaactcttgatgatttttctaaaatatcatttcatcctgggaagctgctgaaaacagtttttatactgttcttattttgtgtcccattgaaaactcagcacagacagcatgaggaatcaggttttgactccttagtacttctgacaaatatctggtgtgttaacaatcaggttaagaaattgatgyggcaggcagattgtgacccaatctttcaakcattcttcrttcttaattaaaagtcagggctgctgtaaataattgccacagtgataagtgtgtagctcagttcatgagtacgtgtgtgtgtgtatcagtgacatacccttcrcatcttagctaaagcctattttgcagctgtcatgaatrttgacttgcaagaacactagtgaaaagtaggaaagatttgagcttctgtgaatttaagtggtgtgatattttaatgatctgagattcaggtaaagttatgttctgctgataacatagtttattggaaaaataatcatgctcatattttataatcatcgc

SEQ ID NO: 39935 - DNA, 600 bp, Chicken  19866894274201_4
atttcatcctgggaagctgctgaaaacagtttttatactgttcttattttgtgtcccattgaaaactcagcacagacagcatgaggaatcaggttttgactccttagtacttctgacaaatatctggtgtgttaacaatcaggttaagaaattgatgyggcaggcagattgtgacccaatctttcaakcattcttcrttcttaattaaaagtcagggctgctgtaaataattgccacagtgataagtgtgtagctcagttcatgagtacgtgtgtgtgtgtatcagtgacatacccttcrcatcttagctaaagcctattttgcagctgtcatgaatrttgacttgcaagaacactagtgaaaagtaggaaagatttgagcttctgtgaatttaagtggtgtgatattttaatgatctgagattcaggtaaagttatgttctgctgataacatagtttattggaaaaataatcatgctcatattttataatcatcgcattcttgttatggaataaatgagtttcctacccctcaagctgcctgtctgccttccactatataatctgtcttgttttcaatatacttatttcctctcatcac

SEQ ID NO: 39936 - DNA, 600 bp, Chicken  19866894274201_5
tgttcttattttgtgtcccattgaaaactcagcacagacagcatgaggaatcaggttttgactccttagtacttctgacaaatatctggtgtgttaacaatcaggttaagaaattgatgyggcaggcagattgtgacccaatctttcaakcattcttcrttcttaattaaaagtcagggctgctgtaaataattgccacagtgataagtgtgtagctcagttcatgagtacgtgtgtgtgtgtatcagtgacatacccttcrcatcttagctaaagcctattttgcagctgtcatgaatrttgacttgcaagaacactagtgaaaagtaggaaagatttgagcttctgtgaatttaagtggtgtgatattttaatgatctgagattcaggtaaagttatgttctgctgataacatagtttattggaaaaataatcatgctcatattttataatcatcgcattcttgttatggaataaatgagtttcctacccctcaagctgcctgtctgccttccactatataatctgtcttgttttcaatatacttatttcctctcatcactgccaactaaagcctctggctttttctggattgctttc

SEQ ID NO: 39937 - DNA, 599 bp, Chicken  19866894274211_1
  misc_feature (1)..(183): n is any nucleotide
nnnnnnnnnnnnnnnnnnnnnnnnnnnnnnnnnnnnnnnnnnnnnnnnnnnnnnnnnnnnnnnnnnnnnnnnnnnnnnnnnnnnnnnnnnnnnnnnnnnnnnnnnnnnnnnnnnnnnnnnnnnnnnnnnnnnnnnnnnnnnnnnnnnnnnnnnnnnnnnnnnnnnnnnnnnnnnnnnnnnnnnaataaaatgaagaaaatgcacattgcttgcaattaccaccctgctatcataggagtaaaactataaacgccacttactccttttatgcagtgagaatcaccagggggtggaaatctraaggtgcactgagatctttgactaaatataggttttgtagctctgcaactacaggtaaatggtagtttttgtagtctacaactaaattcctataaagggataaaagtgatgagtatatatggccccatgcgagaataattacagtttagctaaaaactgtgatgagaggaagatctttgtgaacaaagtgctgatgctgtatcctggacaaatccttcagcaaaagctaaaaaaaaaaatgaactgcaatattgccagcaattgtcagtgaaactttatcacttaatggatatgctttc

SEQ ID NO: 39938 - DNA, 600 bp, Chicken  19866894274211_2
tttttgtagtctacaactaaattcctataaagggataaaagtgatgagtatatatggccccatgcgagaataattacagtttagctaaaaactgtgatgagaggaagatctttgtgaacaaagtgctgatgctgtatcctggacaaatccttcagcaaaagctaaaaaaaaaaatgaactgcaatattgccagcaattgtcagtgaaactttatcacttaatggatatgctttcatacaatttaaattctcaattaactgactgccttcccttctactccctgtttttttttctctctcrtyttttttttctccttctatagagcactgaaataccctccccatctgcctttcatttgcttttgtgagattttttttttccttttaaatgcaccaaattgcaggaagggaaatcagaaatcatgaaagttcagcgagaaagccacatccattaaaacacactttcatcagagtgactgaaacagtgtgcaattcatggtataagtaaagtcagaagagctctaaatcccctcagttcatacatcagacgcattaactccccttttaccttacatactctaacacaacagtttcagtagct

SEQ ID NO: 39939 - DNA, 600 bp, Chicken  19866894274211_3
tttgtagtctacaactaaattcctataaagggataaaagtgatgagtatatatggccccatgcgagaataattacagtttagctaaaaactgtgatgagaggaagatctttgtgaacaaagtgctgatgctgtatcctggacaaatccttcagcaaaagctaaaaaaaaaaatgaactgcaatattgccagcaattgtcagtgaaactttatcacttaatggatatgctttcatacaatttaaattctcaattaactgactgccttcccttctactccctgtttttttttctctctcttyttttttttctccttctatagagcactgaaataccctccccatctgcctttcatttgcttttgtgagattttttttttccttttaaatgcaccaaattgcaggaagggaaatcagaaatcatgaaagttcagcgagaaagccacatccattaaaacacactttcatcagagtgactgaaacagtgtgcaattcatggtataagtaaagtcagaagagctctaaatcccctcagttcatacatcagacgcattaactccccttttaccttacatactctaacacaacagtttcagtagctaa

SEQ ID NO: 39940 - DNA, 600 bp, Chicken  19866894274211_4
agtttctgagatccagcaaagctctgcaaagctctgtggcagacctttttgatttttttttaatttgtctaaattatattctacttatttatttttgcttacatgctcttagcactggctgaaaataatctcctgttcctgaaatctgacttttcctatagacatgtgcaaattgttggacacagatgtgtcctggatggggtaccaaaaccacaagtaggacaatatatttttaaggaaaagtagttgagatattcagacaacagaaaccctatttttcctctaatctcattgtagacygtttgactgttttggcagtgtttttattattattatgattttttattgttatttttctttctttttttttcattttggaggatattcctgttgagatagcagtctgccttgaaaaattatagctcaagaggttaacatygtaagttagataccatcagcaatgtgatcttacagtgggaaatgctaggcacttacttagcaggcaattctataatggagacaaatgacaacaggctgtcctattgctttcaggatcttctgttttcatctgtgctttggtgtgcctggttttttgtttca

SEQ ID NO: 39941 - DNA, 600 bp, Chicken  19866894274211_5
atttgtctaaattatattctacttatttatttttgcttacatgctcttagcactggctgaaaataatctcctgttcctgaaatctgacttttcctatagacatgtgcaaattgttggacacagatgtgtcctggatggggtaccaaaaccacaagtaggacaatatatttttaaggaaaagtagttgagatattcagacaacagaaaccctatttttcctctaatctcattgtagacygtttgactgttttggcagtgtttttattattattatgattttttattgttatttttctttcyttttttttcattttggaggatattcctgttgagatagcagtctgccttgaaaaattatagctcaagaggttaacatygtaagttagataccatcagcaatgtgatcttacagtgggaaatgctaggcacttacttagcaggcaattctataatggagacaaatgacaacaggctgtcctattgctttcaggatcttctgttttcatctgtgctttggtgtgcctggttttttgtttcatcccttgccttgcaaatgttatgtactgcacttcaagtctgttgactggatttcttttaatc

SEQ ID NO: 39942 - DNA, 600 bp, Chicken  19866894274211_6
tgaaatctgacttttcctatagacatgtgcaaattgttggacacagatgtgtcctggatggggtaccaaaaccacaagtaggacaatatatttttaaggaaaagtagttgagatattcagacaacagaaaccctatttttcctctaatctcattgtagacygtttgactgttttggcagtgtttttattattattatgattttttattgttatttttctttctttttttttcattttggaggatattcctgttgagatagcagtctgccttgaaaaattatagctcaagaggttaacatygtaagttagataccatcagcaatgtgatcttacagtgggaaatgctaggcacttacttagcaggcaattctataatggagacaaatgacaacaggctgtcctattgctttcaggatcttctgttttcatctgtgctttggtgtgcctggttttttgtttcatcccttgccttgcaaatgttatgtactgcacttcaagtctgttgactggatttcttttaatcctgaaactttcccacatacaaagaacaccgcaaaattcacatggaatcagagctgcggcaagaaaatcaggagttga

SEQ ID NO: 39943 - DNA, 600 bp, Chicken  19866894274213_1
tttttaattattatttttttataattctggacatgggaaagcacagtttaatccccagtctcaataacttcgctctcatggctagaagcaaaataactgtatcctgctcacagctttccaaaagtaacatctgttacaggagggatacactttttgcctctgatttcacctgaagctgaaggaatagtagctgctgtagacacctaaaactgtcaacattcaatttgatcaccaggctcctgtgcattcctctctcccatatcacatacagccctgaagcaagctatacacattcaaaamagcaacattatatgcagagaaacttcagactcatttgaagtatttcagctaatcaaagtaatatgaaagtctggaggcagaggaaaaaaaatcttctacaatagtcgtgcttccaatttgtaaggaacagtattttagaaatgtaacatactggacctctttgaaagagaaaataaatttaaaaacaaacagaacacttactgtggttgcatttgctgaggtaatccaacaggaggcttctgcttgatggtgaatgccatctgagtcatagggccaaccttcggtgggacctgcaccttc

SEQ ID NO: 39944 - DNA, 600 bp, Chicken  19866894274223_1
ctgttaccataattatagaaatttggaagacatttccagtgttatttgaaagactgatcagtgttgtaccatgaagaattttagtctgtattcctcacttaatatagcagtagtgtatgcttatcgagcgtttgcaacattgctaatctaatttacttcttaaagctttttaaaggatctgaactcttagcactggccgcaagaaataaaacatttgcacttttatctctgatgtgtttattttttttaacattaaagtttttgcatttctcagtgaaagcactttctcaattggaaatmctatttgaaacttttgtgacagaactgtgatgtcttgtccactaaaaatatcttgtacagaagagtagttatttttactgtgttttcttctgctgataaaattgaataaacttattttcttgaaacttttgtgaagagcttatttataagtttctcagwgtgccttattcataaaataaatgttttataacaacctaataaaagtggttggatataaattctttcattgttcaccttgctgtgatttccttaaatgcaagttcaaaaatttcagtcttaatgcctaaattctaaaatcaa

SEQ ID NO: 39945 - DNA, 548 bp, Chicken  19866894274223_2
ttaaagctttttaaaggatctgaactcttagcactggccgcaagaaataaaacatttgcacttttatctctgatgtgtttattttttttaacattaaagtttttgcatttctcagtgaaagcactttctcaattggaaatmctatttgaaacttttgtgacagaactgtgatgtcttgtccactaaaaatatcttgtacagaagagtagttatttttactgtgttttcttctgctgataaaattgaataaacttattttcttgaaacttttgtgaagagcttatttataagtttctcagwgtgccttattcataaaataaatgttttataacaacctaataaaagtggttggatataaattctttcattgttcaccttgctgtgatttccttaaatgcaagttcaaaaatttcagtcttaatgcctaaattctaaaatcaacaactacttaaaagcaaagtatttctttcttaagtgtactttttacgatgagttcttagtgcttacaaaaaattgagatgaattatgtatagcactcctccaaagta

SEQ ID NO: 39946 - DNA, 600 bp, Chicken  19866894274229_1
gcggagtccttgaagggtaatctaagctgactggagtctggtcttgtgcattgattatgataaattaatgaagcagctgaaagggaagtccaatttaaaaccagcagtgaacaaaggaaccctctctaaatcctgcagaacgtgtgttgtttctctttggggaggaagaatccagtgctgctgtgggtattgcgttattaggcatgacacctttaatgagggcttttgcccattagtttaatctacttgaaaaggaagataatggaaacaaaaaaataatgacaatatcataaatactaygttcttcttagctaagaaggatagttcttaggacagttgtagcttctatccaaggcagcgctggagagctgggtttcacctcattctgcagcagcactgctgcagtgtcaagcagatgtaatagcacrggccactaatttctcagtttctcactgccagaggaaggcagatgtaattcagatgatgaactctcatttacagatccatttagaacatataagtccatgtaaggtttccttttcaaagcaagtctgtcagtatytcttaatagatgtaggcatatggctctctaaagcaaca

SEQ ID NO: 39947 - DNA, 600 bp, Chicken  19866894274229_2
aatcctgcagaacgtgtgttgtttctctttggggaggaagaatccagtgctgctgtgggtattgcgttattaggcatgacacctttaatgagggcttttgcccattagtttaatctacttgaaaaggaagataatggaaacaaaaaaataatgacaatatcataaatactaygttcttcttagctaagaaggatagttcttaggacagttgtagcttctatccaaggcagcgctggagagctgggtttcacctcattctgcagcagcactgctgcagtgtcaagcagatgtaatagcacrggccactaatttctcagtttctcactgccagaggaaggcagatgtaattcagatgatgaactctcatttacagatccatttagaacatataagtccatgtaaggtttccttttcaaagcaagtctgtcagtatytcttaatagatgtaggcatatggctctctaaagcaacagacaataggagagatttactgtggggatgtctgacatgctaactttatcgagtctagtggaaacatgcccacggggcggtactggagacctactgacctagaaattgtagtggccatcctctgacaaa

SEQ ID NO: 39948 - DNA, 600 bp, Chicken  19866894274229_3
tggaaacaaaaaaataatgacaatatcataaatactaygttcttcttagctaagaaggatagttcttaggacagttgtagcttctatccaaggcagcgctggagagctgggtttcacctcattctgcagcagcactgctgcagtgtcaagcagatgtaatagcacrggccactaatttctcagtttctcactgccagaggaaggcagatgtaattcagatgatgaactctcatttacagatccatttagaacatataagtccatgtaaggtttccttttcaaagcaagtctgtcagtatytcttaatagatgtaggcatatggctctctaaagcaacagacaataggagagatttactgtggggatgtctgacatgctaactttatcgagtctagtggaaacatgcccacggggcggtactggagacctactgacctagaaattgtagtggccatcctctgacaaagtcagaaagtacagcatggtactgcaaagggctttgggttttaaatcaagaagtaattggaacagacttgccctgggatgacccagcttgccatgtgtttgtgtccccgttgctccatgaggaaacacttcccg

SEQ ID NO: 39949 - DNA, 574 bp, Chicken  19866894274230_1
cccactattcccataagaaatcaaatataatcctatttaagaagctttaaataattttgagctttcatattgacttattaaaatgcagcttaaaaaacgccttccttgcaatccctttacaagggtcagggatataaaatttgaagaaatatgattagtagatcagttggaaagatatatgcagcaccttccagttttattccttaaagtgcccttttaggagaaaaggtgattcagttacacagaggcaccatctcgttgcagggatgagacccttacttcctagtgtatctcctgccycctcacccaaagcatttcataggtttttcttagagctgaagagcccttgcagtgaggactgaagagttggtgtcctcatagcatagcaaaatagaggctgatgaggctcaaggtgcagaggaaaccagttgcgcttttgcccatccattggttggtgctcaagatcaagtgatggtaatagagatgcaaatatgtcacgaagraaagggatgctgcagagctattgtgagcatgagctcacgttggcccacattgctttccttttattgcctgg

SEQ ID NO: 39950 - DNA, 371 bp, Chicken  19866894274230_2
ttaaagtgcccttttaggagaaaaggtgattcagttacacagaggcaccatctcgttgcagggatgagacccttacttcctagtgtatctcctgccycctcacccaaagcatttcataggtttttcttagagctgaagagcccttgcagtgaggactgaagagttggtgtcctcatagcatagcaaaatagaggctgatgaggctcaaggtgcagaggaaaccagttgcgcttttgcccatccattggttggtgctcaagatcaagtgatggtaatagagatgcaaatatgtcacgaagraaagggatgctgcagagctattgtgagcatgagctcacgttggcccacattgctttccttttattgcctgg

SEQ ID NO: 39951 - DNA, 600 bp, Chicken  19866894274238_1
agataatgtacagctgcaatgacgtcagctgccctaccaagagtcctgtgacagggccttagaataatgcaactgaataaaaataataaaaaagactccattagcacacataccatggtgatagactggggacttctgagtatccttttgaggcagatgacctctgcggagagcaaggaccttctcaggttttggggaaggataactgctgattcatttagatagcagtatctttcaaaatttgcctaaaagcaaacctcctatctacaaggccataaaagcacagctttcttcatcagygtaatggcggtcttctgtgctgtccttagtaatgatcccactaagagacttcatatttacagcacgggaaatgggaaaggaagaaagccctgaaagataccacatttcaaattcttatactctgatacacaataacgcagcaaagcaagttatcctctcctgtttttagacagctagaaatggaaagatattctgggtaaggccttgagagatacaggctctgagagacctcatctagtgtgccttcaaggaaatgcttcagctggccactctttagtgcctattattgacagaagaaca

SEQ ID NO: 39952 - DNA, 600 bp, Chicken  19866894274245_1
gtgttagaaactggttaggagctgcaatacaatatatttacacattataacaaaagtgttttaaaatttttttgctaataaacaagtgtgcacttcagttaacaaacaaataattgctagaaggctttaaggaagaaatatgttatgtctctgtgttcctactctgagatcagagagctctttgctgacacagcagtgcttgcagcagtgatccttttgttggagagtttgaatgacatattgagcagtacataaggaaatgtaaacatcttattggaggaatgaggcagaaatgatccyttgccttttaaggaaaaaaccaaacaagaagaattcagattagtgactcaaaaataggcatgtcagcagtgttttgctgtcctgtgtatcagaagcattaccctctacattgcagcaaaaatttggtatttaaataggagtagggcagtgttggtccaagctgctttgcaccatgatgtccagggcaagtgctactgttgtcacagcaaggcaattgtcttgataaatgtctcaattttgtctctccctctgctaaatttattatcatgttttattcttccttcagtcgcgaggttgtac

SEQ ID NO: 39953 - DNA, 588 bp, Chicken  19866894274245_2
ttagtgactcaaaaataggcatgtcagcagtgttttgctgtcctgtgtatcagaagcattaccctctacattgcagcaaaaatttggtatttaaataggagtagggcagtgttggtccaagctgctttgcaccatgatgtccagggcaagtgctactgttgtcacagcaaggcaattgtcttgataaatgtctcaattttgtctctccctctgctaaatttattatcatgttttattcttccttcagtcgcgaggttgtactgttatccttagctgccctcctcaaactaatccatacaytggccgggagggagtgctctagcagggctgccaacactattatccctgagtcttaacaggccctgttccagcaagcttgggaatgattgccctgaggtttctcatcaagctgcttccagctcacactaacatgagaagtcactcagcgcttctttttatgcctagtcatttggtatatttacagtattattttctccctcaaagtttggcactgctttcttttcccccactttctattttgcgtttgtttccctgcccctaaacttcccgtgctgcagtgctggggag

SEQ ID NO: 39954 - DNA, 599 bp, Chicken  19866894274247_1
  misc_feature (1)..(159): n is any nucleotide
nnnnnnnnnnnnnnnnnnnnnnnnnnnnnnnnnnnnnnnnnnnnnnnnnnnnnnnnnnnnnnnnnnnnnnnnnnnnnnnnnnnnnnnnnnnnnnnnnnnnnnnnnnnnnnnnnnnnnnnnnnnnnnnnnnnnnnnnnnnnnnnnnnnnnnnnnnnnnnnctctctgtgattctatgaacaggaaaagaatctaccttttagttacggtagcgcctgaagttttgcatgcagctgcatcctgcatgacattgtcacagggaccttgatgtctgaacagaaaaccaaaggcataaaatacaktctctatagtcttttaktagttgatgtgacatttgtgaatttggatagacttggaggtggctggcatttgtactgagcatgatgaattaagtcctagtagcagcctgagcatgttgtaatttatcttgaataaattgtaactttttatagtttcttttcaacttgttratgtcttgttttactaatgaatatattacatcaacagaacactttttttttcttcgcatttatgctgctgccttccagggatgacctttgaaatgttcttaactttgtttctctgatcagagttggctaga

SEQ ID NO: 39955 - DNA, 599 bp, Chicken  19866894274247_2
  misc_feature (1)..(142): n is any nucleotide
nnnnnnnnnnnnnnnnnnnnnnnnnnnnnnnnnnnnnnnnnnnnnnnnnnnnnnnnnnnnnnnnnnnnnnnnnnnnnnnnnnnnnnnnnnnnnnnnnnnnnnnnnnnnnnnnnnnnnnnnnnnnnnnnnnnnnnnnnnnnnnctctctgtgattctatgaacaggaaaagaatctaccttttagttacggtagcgcctgaagttttgcatgcagctgcatcctgcatgacattgtcacagggaccttgatgtctgaacagaaaaccaaaggcataaaatacaktctctatagtcttttaktagttgatgtgacatttgtgaatttggatagacttggaggtggctggcatttgtactgagcatgatgaattaagtcctagtagcagcctgagcatgttgtaatttatcttgaataaattgtaactttttatagtttcttttcaacttgttratgtcttgttttactaatgaatatattacatcaacagaacactttttttttcttcgcatttatgctgctgccttccagggatgacctttgaaatgttcttaactttgtttctctgatcagagttggctagaagcaatagaagaccact

SEQ ID NO: 39956 - DNA, 590 bp, Chicken  19866894274247_3
ctctctgtgattctatgaacaggaaaagaatctaccttttagttacggtagcgcctgaagttttgcatgcagctgcatcctgcatgacattgtcacagggaccttgatgtctgaacagaaaaccaaaggcataaaatacaktctctatagtcttttaktagttgatgtgacatttgtgaatttggatagacttggaggtggctggcatttgtactgagcatgatgaattaagtcctagtagcagcctgagcatgttgtaatttatcttgaataaattgtaactttttatagtttcttttratgtcttgttttactaatgaatatattacatcaacagaacactttttttttcttcgcatttatgctgctgccttccagggatgacctttgaaatgttcttaactttgtttctctgatcagagttggctagaagcaatagaagaccactctgcatacagcactcactactgcactcaggagcagctgagtagcgatgatgaggaagatgatacggtatctgttacagacctacaagaaacattgaaagtatgtactgaatacttactactcgtctcatgcatttaggcaat

SEQ ID NO: 39957 - DNA, 600 bp, Chicken  19866894274248_1
gcccggtgcaggatgtaccagtctcacatcctcaaaagtggatcagcttcgacttcttgaactgctcacatgttgtcacctacagcaccattatccacacagattacaagcagctaaatctatcatacaagggattgctgtctgccccacgcacacagcaatgttgttgcctttgcagaacaagacacggcagcagggaggcggcaagagagaatgggacgttatacatgtctcccactaggaacccagcccatggcaccccgtcacctccccacggtcaccatcccattcggcaccacrgaagaagatagggggagggaagggagatgaaaggaacaagtgacagcaggtttagtgcttcccaacctggtagctgtgccgtgctgtacaacgtggatgggaggtaaaggaatggtttttaattcaaggggaatacaccgtgggccaaacttatttacttgcatcaacataaaaatcacaggttggtattttctcagatctgtgagaaactatgaaggtttgtttcaaggcacaagctgaaaagttagcaaaacttgagtcttctgatttcagcacgttactgatttaaatcccaagacc

SEQ ID NO: 39958 - DNA, 599 bp, Chicken  19866894274253_1
  misc_feature (1)..(196): n is any nucleotide
nnnnnnnnnnnnnnnnnnnnnnnnnnnnnnnnnnnnnnnnnnnnnnnnnnnnnnnnnnnnnnnnnnnnnnnnnnnnnnnnnnnnnnnnnnnnnnnnnnnnnnnnnnnnnnnnnnnnnnnnnnnnnnnnnnnnnnnnnnnnnnnnnnnnnnnnnnnnnnnnnnnnnnnnnnnnnnnnnnnnnnnnnnnnnnnnnnnntgtctccttggtttttgagcccctgatgagtttgctcattcaaggcagattttcagatcatagaattaaaaatagctacttagaaatttaatcagaagtaagtytgaaatcctgcattattctcctcaaccttgaattacaacacagcatgtcatagaaccataagataaagaacattgcttgtttatctatactcttctttttgagattatctaactgccaattattgtgaggcaaacttgactgaatatattagtagaagaaaagaaaacgctttaatgctgttaatgctgtagcctacattgcaatttcatgtgatctttttcrttcatccccctctttgtatgtgactcatttattttctgaggtgaaagccaagatctgagttagtaggatgcaatgt

SEQ ID NO: 39959 - DNA, 600 bp, Chicken  19866894274253_2
gagtttgctcattcaaggcagattttcagatcatagaattaaaaatagctacttagaaatttaatcagaagtaagtytgaaatcctgcattattctcctcaaccttgaattacaacacagcatgtcatagaaccataagataaagaacattgcttgtttatctatactcttctttttgagattatctaactgccaattattgtgaggcaaacttgactgaatatattagtagaagaaaagaaaacgctttaatgctgttaatgctgtagcctacattgcaatttcatgtgatctttttcrttcatccccctctttgtatgtgactcatttattttctgaggtgaaagccaagatctgagttagtaggatgcaatgttgtgaatgtactttatagcttcatccactaatactgaaaattagtagtatcctttcagattcaatagacttcttgatatcccatatggaagcgtgcctgggtgaaaaatcagtatccagaggaacggctggttctatatgagatatataaggagttgtgcccatcacttcacaatcactatcttgttattagcccatcttgttgtgagatcatttagtacttta

SEQ ID NO: 39960 - DNA, 600 bp, Chicken  19866894274254_1
ggatgcatgccaaggcatcagtgggaggagaagggaatcaaatgccatgtctggccttctccttattaagaagtatggaagggatttgcacatagaggatgtctccaggagagggaatgaaagtcaagatcacagtgaggaaaaccaaaggagagctgtgttttaaacaactccttatttgaccatcttccagcatgaaaattggatataacctggggccggttataccatgcgtggaataaacagcattgaaaatgattgtttctgcagggaaaatgagatcaaatattacttcctttyaaaattaatagaaaggaaagtgttttcaaagatagagtgaacttcacaaarttaagaaacctttatgcaattactgacgtatttcttcagtgcatgctgttcttttgcaacttagttgctccaaattgacccagaaagcctaaaagatacacaactcgatggggtgttccttgtggtgctctagatgccaacatagctaagaactgcagcaatgaatgaggctgtaggctttaatagacattaacagattcctataagttgacaggaacacaagtaacccagatttgatctggcctgcat

SEQ ID NO: 39961 - DNA, 600 bp, Chicken  19866894274254_2
tggccttctccttattaagaagtatggaagggatttgcacatagaggatgtctccaggagagggaatgaaagtcaagatcacagtgaggaaaaccaaaggagagctgtgttttaaacaactccttatttgaccatcttccagcatgaaaattggatataacctggggccggttataccatgcgtggaataaacagcattgaaaatgattgtttctgcagggaaaatgagatcaaatattacttcctttyaaaattaatagaaaggaaagtgttttcaaagatagagtgaacttcacaaarttaagaaacctttatgcaattactgacgtatttcttcagtgcatgctgttcttttgcaacttagttgctccaaattgacccagaaagcctaaaagatacacaactcgatggggtgttccttgtggtgctctagatgccaacatagctaagaactgcagcaatgaatgaggctgtaggctttaatagacattaacagattcctataagttgacaggaacacaagtaacccagatttgatctggcctgcataaaaagtcaggcaccagagagcagagcccaccgctgcccctccgctccctg

SEQ ID NO: 39962 - DNA, 600 bp, Chicken  19866894274270_1
actgtatcgaagctattctagataaaagcggaaagcacagcaatatatgggcagatgtggggaaagttaactccgtcccagtcacattcagtataataatattgttatatattatataaatatatatataactatatataacaataatatatatgataaacacagctcctaacactgctttcagaacatgctgatagattttcagagaatgataggaactttcagatattgtgaactttctcaggcctgcctcatttatagagccagatagatcaccttacaattaagaatctattatgratcctgtctttcatgtcagcaacacagggttaaaaatcctttgactacaaacctttcattgtgggggaaatatttagttaagataacttgcctctcacgagtctgtggtaatttgctagaaaastgtgacactaaggggctcttaactgttgcgtattaatgttaatcagagcatgtttggagtcactcccttcagccaacaccagtattttccagtgacttcgcactgatgaaggttatctgcagagggacaacaaagaaaaagccattaaggaaaattttcaagacagagtaaataag

SEQ ID NO: 39963 - DNA, 600 bp, Chicken  19866894274270_2
tatataactatatataacaataatatatatgataaacacagctcctaacactgctttcagaacatgctgatagattttcagagaatgataggaactttcagatattgtgaactttctcaggcctgcctcatttatagagccagatagatcaccttacaattaagaatctattatgratcctgtctttcatgtcagcaacacagggttaaaaatcctttgactacaaacctttcattgtgggggaaatatttagttaagataacttgcctctcacgagtctgtggtaatttgctagaaaastgtgacactaaggggctcttaactgttgcgtattaatgttaatcagagcatgtttggagtcactcccttcagccaacaccagtattttccagtgacttcgcactgatgaaggttatctgcagagggacaacaaagaaaaagccattaaggaaaattttcaagacagagtaaataagagctcagaatagaaagcagccattttcttagatttctcttacgataacccaggtgtctttggtgttactgtctcttagctagttacaatatcactacactgggcattgaaataaatattctctt

SEQ ID NO: 39964 - DNA, 600 bp, Chicken  19866894274271_1
tgcctgcattgtcactgtgcagagtgcttctgtcacccaataaaggtcgccatccctacatcacccatgcagtttcactgccccagctgacagaggaactgtttgtgtgagtgctccttacctgacccagggtgaagtgaaagggactctcagggttctgacgtcacttcacaggctgaagccaaactgcttctgtacagtggaggttcttgctgacatccagcagcagtgttgtctctgctagctccccccaagagccaaaggaagatcccagcacccccggcagagctcctccaccascaccaggctctccactgggacaagcacaacagagttaaccaaaaagttctgcttggagggttaacagccatgctcatctgcactgcttcatcaccagggtgctggtaagggctgtggtgaaatgactggaaagaaattgtccatctgcagcccaggtcacttagctaaaatctgcttgggatgcacaaaaccggagctagcagcagctcacacactacagagctcacaaacactgtaaaagcagtgcaatcgcaggcgtaacaaattcagacaatttctgttttcagcaagtactcagct

SEQ ID NO: 39965 - DNA, 600 bp, Chicken  19866894274271_2
aaaaccggagctagcagcagctcacacactacagagctcacaaacactgtaaaagcagtgcaatcgcaggcgtaacaaattcagacaatttctgttttcagcaagtactcagctgcaagcaaatggagagcgagtaaatgggaatgatttaattatcatataaaagtaattaactagacacaggaatcaacagggaatccttttcaaaaactgatggcacattactgtcagttgtggaatacttatccactgacctacatgagcaagaacagattcaagtttctgcccctaatgtactaygattgtttgggcttttttycccctccawaagagacaaaaaataggttaaaaaaggcaacraaagaacrtacaaatatttcaaagcaaataacataaacccaaagctggaaatgactcactgttgcacttgtaatccgaatatatgaaatatattcaaatgtgatgatcaaattaatcactgtggctaatgagatcatttagtcccctggtacaggagtggggacaactagcacagcattacataccagtggagccactaccaggaggctgagagaaagaccatcttctcccaacctcttg

SEQ ID NO: 39966 - DNA, 600 bp, Chicken  19866894274271_3
gctcacacactacagagctcacaaacactgtaaaagcagtgcaatcgcaggcgtaacaaattcagacaatttctgttttcagcaagtactcagctgcaagcaaatggagagcgagtaaatgggaatgatttaattatcatataaaagtaattaactagacacaggaatcaacagggaatccttttcaaaaactgatggcacattactgtcagttgtggaatacttatccactgacctacatgagcaagaacagattcaagtttctgcccctaatgtactaygattgtttgggcttttttycccctccawaagagacaaaaaataggttaaaaaaggcaacraaagaacrtacaaatatttcaaagcaaataacataaacccaaagctggaaatgactcactgttgcacttgtaatccgaatatatgaaatatattcaaatgtgatgatcaaattaatcactgtggctaatgagatcatttagtcccctggtacaggagtggggacaactagcacagcattacataccagtggagccactaccaggaggctgagagaaagaccatcttctcccaacctcttgtacccaacacccacctgct

SEQ ID NO: 39967 - DNA, 600 bp, Chicken  19866894274271_4
ctacagagctcacaaacactgtaaaagcagtgcaatcgcaggcgtaacaaattcagacaatttctgttttcagcaagtactcagctgcaagcaaatggagagcgagtaaatgggaatgatttaattatcatataaaagtaattaactagacacaggaatcaacagggaatccttttcaaaaactgatggcacattactgtcagttgtggaatacttatccactgacctacatgagcaagaacagattcaagtttctgcccctaatgtactaygattgtttgggcttttttycccctccawaagagacaaaaaataggttaaaaaaggcaacraaagaacrtacaaatatttcaaagcaaataacataaacccaaagctggaaatgactcactgttgcacttgtaatccgaatatatgaaatatattcaaatgtgatgatcaaattaatcactgtggctaatgagatcatttagtcccctggtacaggagtggggacaactagcacagcattacataccagtggagccactaccaggaggctgagagaaagaccatcttctcccaacctcttgtacccaacacccacctgctctcttatcc

SEQ ID NO: 39968 - DNA, 600 bp, Chicken  19866894274271_5
caatcgcaggcgtaacaaattcagacaatttctgttttcagcaagtactcagctgcaagcaaatggagagcgagtaaatgggaatgatttaattatcatataaaagtaattaactagacacaggaatcaacagggaatccttttcaaaaactgatggcacattactgtcagttgtggaatacttatccactgacctacatgagcaagaacagattcaagtttctgcccctaatgtactaygattgtttgggcttttttycccctccawaagagacaaaaaataggttaaaaaaggcaacraaagaacrtacaaatatttcaaagcaaataacataaacccaaagctggaaatgactcactgttgcacttgtaatccgaatatatgaaatatattcaaatgtgatgatcaaattaatcactgtggctaatgagatcatttagtcccctggtacaggagtggggacaactagcacagcattacataccagtggagccactaccaggaggctgagagaaagaccatcttctcccaacctcttgtacccaacacccacctgctctcttatccttctgccaagagcacrgaatggacaatttcag

SEQ ID NO: 39969 - DNA, 600 bp, Chicken  19866894274271_6
ggcgtaacaaattcagacaatttctgttttcagcaagtactcagctgcaagcaaatggagagcgagtaaatgggaatgatttaattatcatataaaagtaattaactagacacaggaatcaacagggaatccttttcaaaaactgatggcacattactgtcagttgtggaatacttatccactgacctacatgagcaagaacagattcaagtttctgcccctaatgtactaygattgtttgggcttttttycccctccawaagagacaaaaaataggttaaaaaaggcaacraaagaacrtacaaatatttcaaagcaaataacataaacccaaagctggaaatgactcactgttgcacttgtaatccgaatatatgaaatatattcaaatgtgatgatcaaattaatcactgtggctaatgagatcatttagtcccctggtacaggagtggggacaactagcacagcattacataccagtggagccactaccaggaggctgagagaaagaccatcttctcccaacctcttgtacccaacacccacctgctctcttatccttctgccaagagcacrgaatggacaatttcagctgaagtt

SEQ ID NO: 39970 - DNA, 471 bp, Chicken  19866894274271_7
gttaaaaaaggcaacraaagaacrtacaaatatttcaaagcaaataacataaacccaaagctggaaatgactcactgttgcacttgtaatccgaatatatgaaatatattcaaatgtgatgatcaaattaatcactgtggctaatgagatcatttagtcccctggtacaggagtggggacaactagcacagcattacataccagtggagccactaccaggaggctgagagaaagaccatcttctcccaacctcttgtacccaacacccacctgctctcttatccttctgccaagagcacrgaatggacaatttcagctgaagttaaacatctaaactccaccattcacttttgggctggagaattagccgctgggagaattagatctcatcaagcagagatgctgggaatgactgagatgcaagagctgagctagaaggtgtgactgaggacctatgggagatctgaaccc

SEQ ID NO: 39971 - DNA, 600 bp, Chicken  19866894274272_1
gcaatgctgcaggagagaaaaaaagatgcatattatcacttagaaaaggacttgagcatcctttgaacaggagaaagaaattcaacattctatccaaattctatttcagctaattaggtttctttctgcaatgtcaactgagtaaaatgtattattattcatttcctgcgtaaataatgtattatgcatcaagcaaccaaaaccagttccaacagcctaccctccaacagctacaagataagctcaactaggaaattattttagtgtttatgaaggagtcatgataagtcatatacttaygtatatagtaagtcataataccccatagcaaatagagtggaaaagtgaaaagatgtattagaaaggtaatgaaaaaaatatttaactataaaccacaagcttctacattctggaaagtctaagtgccacttcaccaaccacggtctgggaattagcctgtataaaataagatgcagcatcttcattcagtacaaagaaaagacattttcttaacccactgacagcagcaggcacacaggagatattaatatggcctgaattccatgcagtcaaatattatcaactatctgctgttaactc

SEQ ID NO: 39972 - DNA, 600 bp, Chicken  19866894274272_2
taatgaaaaaaatatttaactataaaccacaagcttctacattctggaaagtctaagtgccacttcaccaaccacggtctgggaattagcctgtataaaataagatgcagcatcttcattcagtacaaagaaaagacattttcttaacccactgacagcagcaggcacacaggagatattaatatggcctgaattccatgcagtcaaatattatcaactatctgctgttaactcaggctgactacagtaggaataaagcacatacaaaatcagtttctctggcagaaacgaagtgcttgrgctcttacaacaactacagaagcagytgagagccttgattttcctgcaaaaactcttgaaagatcacatgtacctggaagatttaaaacctcctaaagatcacaagttttcacagtttcagaagtgctcactctcctttctgcaattagcaatttcagcaacctctgtaagatgctgacaacatttaacttaattctacaggagcctaattacaaaagcttgtaagtcaagaagctggaagtctgtgcagttgaatcaaaggcagcaacatcaaaactaaaggacgtgcaaagaagtgac

SEQ ID NO: 39973 - DNA, 600 bp, Chicken  19866894274272_3
ccacaagcttctacattctggaaagtctaagtgccacttcaccaaccacggtctgggaattagcctgtataaaataagatgcagcatcttcattcagtacaaagaaaagacattttcttaacccactgacagcagcaggcacacaggagatattaatatggcctgaattccatgcagtcaaatattatcaactatctgctgttaactcaggctgactacagtaggaataaagcacatacaaaatcagtttctctggcagaaacgaagtgcttgrgctcttacaacaactacagaagcagytgagagccttgattttcctgcaaaaactcttgaaagatcacatgtacctggaagatttaaaacctcctaaagatcacaagttttcacagtttcagaagtgctcactctcctttctgcaattagcaatttcagcaacctctgtaagatgctgacaacatttaacttaattctacaggagcctaattacaaaagcttgtaagtcaagaagctggaagtctgtgcagttgaatcaaaggcagcaacatcaaaactaaaggacgtgcaaagaagtgactgtgacacccacatgcctgaattcta

SEQ ID NO: 39974 - DNA, 600 bp, Chicken  19866894274277_1
gtctggaaaccaaataaaagaatgtttgaacatctgttcatcctacaaatgtctttaaaagctttgattttcccataatcattttgttccaccatttcaccctttttcgagtgtgtatccaacagcctcaggacagcagccagagatctgcagtaacagcacattataatcaaagttctcaggcacatgtgagttcttcttttagaattaaaactgggggaaaaaaaccaaaccagcctccaccagatacctccgcagcactccaccctgcacaaatctctgccaggggaggaaaatgargggctttatgcagaggattacaaagcagcggggcagaaaatggtggcaggtgaaggtactcacatgaggtttgtatggcacgtgtgctgcccggatttctgtcgtcttctccagaggcagaagtgggagaagcaaaatgcttggaaataggagcactggggaggaaggcagatcttggactgaggggatggaacaacgatgccaagctagtgttctagaccggagatgacagaaagggtgggggtacagattaagaaacatgcattacagaagactggagaaagggtggaggtacagctc

SEQ ID NO: 39975 - DNA, 600 bp, Chicken  19866894274284_1
aagagttgaagcactgcctgatgtaacgacagaggattcacacagcctggaaaaagcccacagcaggttacatactaattcagttcccgtttagggacacgagggggagctgctgctgctgccatgagcagggaaaaatgcagggtattaaggaaaaagggctggtgaggtagaaatcacagaaacgagtgctccatagacacctcaggctacattctactgtgcatggctaatgcctaacagatgtgtaactcctatgctttgataacaaatttttgctacaacacagcttgcaatccyctgccatcccctctgcccatccttgtcacagatgttaccttccaggtcttcgagttctttgggttttgcccagcgtgattcctttgtttgggaattatagtagtatggctttccagaatcagatttgtactctttccaggggcacttagacagcaattgctaatggacacaaaaacaaagacatccaaatcaaacttacagtagtattttaaaactaaaaaggttgctagaagtgagcctgtaatactactaagccaagtgatagtttaaggatcagcgaacacaagggatcgtgttcac

SEQ ID NO: 39976 - DNA, 600 bp, Chicken  19866894274284_2
catccttgtcacagatgttaccttccaggtcttcgagttctttgggttttgcccagcgtgattcctttgtttgggaattatagtagtatggctttccagaatcagatttgtactctttccaggggcacttagacagcaattgctaatggacacaaaaacaaagacatccaaatcaaacttacagtagtattttaaaactaaaaaggttgctagaagtgagcctgtaatactactaagccaagtgatagtttaaggatcagcgaacacaagggatcgtgttcaccgcgttcgtggaccctygatactctctagtgacacaaacacaccacttaaataagtgccagcctttcaataatggaaattgaccttagaattgaggaaaaaatgcttagaattttgtttagtttgcagcttcaagttgcaccaatgtaaggaaggtgataaaattagaaaagctgtagaaatgcttacaggcatttgctcccattgataaaaatgtgttggcacagctctgccatgtggaagtcacggcagtaaaccacgccttcacacaaagtcacacagcaatctgtctgaactgttacctcagcaggtgtttta

SEQ ID NO: 39977 - DNA, 600 bp, Chicken  19866894274285_1
tgccatggaagcatattgttgagaactgtcgcattgctgcaatgtgaaaacaggatttgaggaattagctgcactttaagattatatgcaaaaaacagaaaggaaaaaaaaagcaacaaaaacccaagtgcatggagttggcacatattgaggttactatttgcatacgctgcaaagttagaaaatgaagaggttgcacttctctcgtgaagctgagttgcacgtgcatgtctttccatataatactgctgggttttttttaagaccacatgaaattgagtgatgaaatctgcttttatrctattagtgctctacatacctgagagcagctttagacactggtaccacactgaagctccccctttcatgaaatacaagttgtgtgtctgtgtgtttagaacgaagtcctccctgctctgcagaggatgaagttgcctttgtgggatgttttcctcctcttcagtaagttgtgcacttccaacgcttcacatgctgactcttcgtatttattgcactagcagagatagtcttttctcagcatcactggagctgggtcaggccaggcttccagaaaatataaatatttggtattttctgtta

SEQ ID NO: 39978 - DNA, 600 bp, Chicken  19866894274288_1
gatcccacaccaacacccaaaacaccactttttaacacgagagggaaaagacatgaattccagcaggtggtggactactaaaaattgacctatttagctataacagcccataaaaagcataaaaaagcaaaaggaaatagagatttatggaagacggggaaggggaatctcgctcaaaactaaataaatcacaaagggcacacacacacacacacacacatagccacacacacaaaaagtctgtagaaaaaaagaaatgctgatagcaactgaacatttcatctttaacttgcatatccrtttcccactccattttcagaaatatcgttatctattccgtacaagctgacgaaatgaaaggttttagtaactcaaagcttatcccatccaacctctgcacttgtatactgcttaatgtgctcgtgcctgattgtttctgatggaaagatatagtgtatctcactaaagctggtggtgtgccaaaagctgggtgacgcagtgacaaatagccttctcgattcctgacaaaatactccctctgctgtacaatacacaccgttacataaagctcaatgcacatatatacatatttcaactaca

SEQ ID NO: 39979 - DNA, 529 bp, Chicken  19866894274294_1
caggatgcaatttgtgatctttgcccttacaactactgagctcagctttgtgtcagttcagggaccacagttcacagcttttcaatggcatggtgtgaagcaaaagactgatgcatctctggggctcagcttgctctccagacccccccgggcagggtaaaagttccctctgctctcaaaagctcccatgccaccaatgcctgctggcccctctgcatgtgtgttgtgctgcatgaaggatgctcggggtctccaaaggctcagtctggcttttggctcaagcttcagcctgaagaacaytcagcagctttgatatcttcaggtcaaatttagatttttcatactccattatggagatggtcacattgtagagcaattaaaaattaaacatcagcaatgtggtaaagatgaaaatctagattctgtcttagggacaggcagcatttttccacctgtccaaaggggtttggcagcacccagcccctcctggaccatccccaggcacagtcagggctccccactcaattcc

SEQ ID NO: 39980 - DNA, 590 bp, Chicken  19866894274302_1
tgttactctggcagtcatatggtggcaaattggaaagacaatgaaaaagcaaactggacagtcccaaacaaggtattgttgctgggagattgaggtgatggctcttgcaccagcccttgtcgtacgtggggaaaggtggagtgttttgaccaagctctgtccgaggatggctctttatgctctgaagaaatgcattttttatgtgtgcagtgcttactgtcagcttgaattgctcagtgaaaacatgttcaagctctcctgttgtgtaggaattgctttttaagactgtgcactttcccwgtgcttttgctgttctctccagctaaattccacagctgtgggctttcacccagcagatatcttgctgttccatctcagatgctgacttctttgaagtgactgattatcagaacagtcctgctctgtagggtgtttcctgaaagaatggttcttgtttccttctctaagggaagatctttctctttgcccgttgattgtttgactgcgctccccatgtacaaaatggcacactggttctgcttgaaaagcaaagacttctagactcataaaatcatttgagatgaacgggt

SEQ ID NO: 39981 - DNA, 600 bp, Chicken  19866894274304_1
aagagtctgctcttgttagcaatgagcttgtgcctctgctgcctattcagaaaggaaggatgaagccatggagggataattgcacgtggcgagcactgcagctgcaagtggtcactgtgaccaggctcacctcccactcactcacggcgtaactcaggagacgttcgcatttcagcagcactaaatggaaaaccagacttctgagatgctgctaagaattccacgtctttacacagagacggtttggtcttcaggagttttctaaaggaataaactcccgagaactgagaaatgctgaayrcttttggatggagtcttggctctcttgacaattgctcttgccactgtctcagagctaaggagtgaaagagagaagcaagagacgtggagggaaatcttcagtaagagtgaacgaaatcaggwtctggtcatatctacctaggaaccagacttgggaaaagagcaaaaggaaaaaagagtaaaaaagactgagcagggtgaacacagtcagatggagaaccgaggagatggggagcagcgggaggagagagaagcttttcccacagctcgggccagcaagctcacgcaaaagatttgggt

SEQ ID NO: 39982 - DNA, 600 bp, Chicken  19866894274304_2
agagtctgctcttgttagcaatgagcttgtgcctctgctgcctattcagaaaggaaggatgaagccatggagggataattgcacgtggcgagcactgcagctgcaagtggtcactgtgaccaggctcacctcccactcactcacggcgtaactcaggagacgttcgcatttcagcagcactaaatggaaaaccagacttctgagatgctgctaagaattccacgtctttacacagagacggtttggtcttcaggagttttctaaaggaataaactcccgagaactgagaaatgctgaayrcttttggatggagtcttggctctcttgacaattgctcttgccactgtctcagagctaaggagtgaaagagagaagcaagagacgtggagggaaatcttcagtaagagtgaacgaaatcaggwtctggtcatatctacctaggaaccagacttgggaaaagagcaaaaggaaaaaagagtaaaaaagactgagcagggtgaacacagtcagatggagaaccgaggagatggggagcagcgggaggagagagaagcttttcccacagctcgggccagcaagctcacgcaaaagatttgggtt

SEQ ID NO: 39983 - DNA, 600 bp, Chicken  19866894274304_3
ggctcacctcccactcactcacggcgtaactcaggagacgttcgcatttcagcagcactaaatggaaaaccagacttctgagatgctgctaagaattccacgtctttacacagagacggtttggtcttcaggagttttctaaaggaataaactcccgagaactgagaaatgctgaayrcttttggatggagtcttggctctcttgacaattgctcttgccactgtctcagagctaaggagtgaaagagagaagcaagagacgtggagggaaatcttcagtaagagtgaacgaaatcaggwtctggtcatatctacctaggaaccagacttgggaaaagagcaaaaggaaaaaagagtaaaaaagactgagcagggtgaacacagtcagatggagaaccgaggagatggggagcagcgggaggagagagaagcttttcccacagctcgggccagcaagctcacgcaaaagatttgggttctgccaaaggacacacatgcacatttccccttgtgttcctgtgcttcaatactgaggggaaagctgaaggaggagcagaaggatgaaaagaaaagccatcctgccttgagagcgaccctggc

SEQ ID NO: 39984 - DNA, 600 bp, Chicken  19866894274304_4
cacgcaaaagatttgggttctgccaaaggacacacatgcacatttccccttgtgttcctgtgcttcaatactgaggggaaagctgaaggaggagcagaaggatgaaaagaaaagccatcctgccttgagagcgaccctggcacgctgctgccagagcaggagagcatttttgcaacagagcaaaaaacagctaaggataatctgagttttgggggtttaacccctactgactgcaaatgagcagctctaccagataggtgctaacctctcacagattcattcctacagacaagagatacygaggaaaggctgcttaccgtgctgctgcagccagcaaagcaggcagacaggtaggtgaccccatctgccccacagactggagtgaaggaatcagtttggcattcacagttgttattgcagggggaatatgggtccagagatgaggttggagttgagctgtaagagaagcagaaaaataaattaacaggcagtgtaatgatatcagctggcttttctggtcagtgccacataaacatggctttgaagggggtctgataargcaaacaaattacaaaaagcagactacaggctatctgggtc

SEQ ID NO: 39985 - DNA, 596 bp, Chicken  19866894274304_5
gctaacctctcacagattcattcctacagacaagagatacygaggaaaggctgcttaccgtgctgctgcagccagcaaagcaggcagacaggtaggtgaccccatctgccccacagactggagtgaaggaatcagtttggcattcacagttgttattgcagggggaatatgggtccagagatgaggttggagttgagctgtaagagaagcagaaaaataaattaacaggcagtgtaatgatatcagctggcttttctggtcagtgccacataaacatggctttgaagggggtctgataargcaaacaaattacaaaaagcagactacaggctatctgggtcccagtttaaagaaatccaggctacagcctctcctggggacagaaatgccttggcccccatytttccacaacaggacatctaatgtgggacttgggctacctctccaatgagcagccccaaagacttgcccagggaagggctctgttcttctagaacagtgagcagccgagagcctgaaggtttcatctttaaaacagtcaccactatatgctgagaagcaccagaaaataaaagacagataactccctccaagtc

SEQ ID NO: 39986 - DNA, 494 bp, Chicken  19866894274304_6
catctgccccacagactggagtgaaggaatcagtttggcattcacagttgttattgcagggggaatatgggtccagagatgaggttggagttgagctgtaagagaagcagaaaaataaattaacaggcagtgtaatgatatcagctggcttttctggtcagtgccacataaacatggctttgaagggggtctgataargcaaacaaattacaaaaagcagactacaggctatctgggtcccagtttaaagaaatccaggctacagcctctcctggggacagaaatgccttggcccccatytttccacaacaggacatctaatgtgggacttgggctacctctccaatgagcagccccaaagacttgcccagggaagggctctgttcttctagaacagtgagcagccgagagcctgaaggtttcatctttaaaacagtcaccactatatgctgagaagcaccagaaaataaaagacagataactccctccaagtc

SEQ ID NO: 39987 - DNA, 600 bp, Chicken  19866894274306_1
tgtaattattactgatttgatgatacaacagaaaaatatattcactactaagcctactatttgtaaagtcattatgtctgtaaatattttctcctgtaaatttgacacatgacccttggcagacaatcatttctttctttcacactctgaacttttacagataaaacccttgctttctctgtaaagatttgtttacccaaagcaatacttggaaatctaaaatagtacagaggctaccaagtatgacaggcaaacacgaaagtatcatgatgtacacagcttcaaaaatatccccaatamctgaaaagtagaaaggtggaaaataaagaagaaaaagataagaatactagagacaaaaagcaataatagaaggtaaggctaggataaaataacttgtctttgatccctgtaaaaattagcttcaaatgaaaggaatgcagcatgattrtattcaacacaaaagatcytaagtttttgactttctgctgcactttctattttaagtctcctcagttcttctctttatttcattttctgtgtacctcttgcaatttatttatgcctttggwtgctgcatgcaaggtcaattactatcagcct

SEQ ID NO: 39988 - DNA, 600 bp, Chicken  19866894274306_2
gaacttttacagataaaacccttgctttctctgtaaagatttgtttacccaaagcaatacttggaaatctaaaatagtacagaggctaccaagtatgacaggcaaacacgaaagtatcatgatgtacacagcttcaaaaatatccccaatamctgaaaagtagaaaggtggaaaataaagaagaaaaagataagaatactagagacaaaaagcaataatagaaggtaaggctaggataaaataacttgtctttgatccctgtaaaaattagcttcaaatgaaaggaatgcagcatgattrtattcaacacaaaagatcytaagtttttgactttctgctgcactttctattttaagtctcctcagttcttctctttatttcattttctgtgtacctcttgcaatttatttatgcctttggwtgctgcatgcaaggtcaattactatcagccttccagatactcccattctgtccttcaccaaactctcagaacactctgtgtaactcgaacacaccatctcagtatcattgtcaaacagggcattatgcagggagccaaataagttgtgtagagctttgaactccaacaatatgctgaca

SEQ ID NO: 39989 - DNA, 597 bp, Chicken  19866894274306_3
ccttgctttctctgtaaagatttgtttacccaaagcaatacttggaaatctaaaatagtacagaggctaccaagtatgacaggcaaacacgaaagtatcatgatgtacacagcttcaaaaatatccccaatamctgaaaagtagaaaggtggaaaataaagaagaaaaagataagaatactagagacaaaaagcaataatagaaggtaaggctaggataaaataacttgtctttgatccctgtaaaaattagcttcaaatgaaaggaatgcagcatgattrtattcaacacaaaagatcytaagtttttgactttctgctgcactttctattttaagtctcctcagttcttctctttatttcattttctgtgtacctcttgcaatttatttatgcctttggwtgctgcatgcaaggtcaattactatcagccttccagatactcccattctgtccttcaccaaactctcagaacactctgtgtaactcgaacacaccatctcagtatcattgtcaaacagggcattatgcagggagccaaataagttgtgtagagctttgaactccaacaatatgctgacagcgcaaaagcatgatg

SEQ ID NO: 39990 - DNA, 495 bp, Chicken  19866894274306_4
atgtacacagcttcaaaaatatccccaatamctgaaaagtagaaaggtggaaaataaagaagaaaaagataagaatactagagacaaaaagcaataatagaaggtaaggctaggataaaataacttgtctttgatccctgtaaaaattagcttcaaatgaaaggaatgcagcatgattrtattcaacacaaaagatcytaagtttttgactttctgctgcactttctattttaagtctcctcagttcttctctttatttcattttctgtgtacctcttgcaatttatttatgcctttggwtgctgcatgcaaggtcaattactatcagccttccagatactcccattctgtccttcaccaaactctcagaacactctgtgtaactcgaacacaccatctcagtatcattgtcaaacagggcattatgcagggagccaaataagttgtgtagagctttgaactccaacaatatgctgacagcgcaaaagcatgatg

SEQ ID NO: 39991 - DNA, 600 bp, Chicken  19866894274312_1
cctaccggcacagatgcccagagcacaggagcagttctgctcccagcgggaggaccagtggggccagaggccggggcagagccatagggtaggcagcctggcttggcccttggggcaggccaagccctgatgaatgagggcactgttaggcccgggacgtgcagggggatgccacttggcactgacatattgctgcaggagtacaccaacaggcagcggctatttaggctgaagtaaaatgatacagctagagagatccaggtattagagagctgttgctgataccccgtgtttttctcyggctgccataatatatgaggtgtgtctgtgcgcacgtacaaactgaygacaagctttaccaacttttttctctgttccttttcagagtctgacttgattgatagtataatcaacccagggaggatttattaacatttacagaagactctgaggcaagtttcatgtgatactttgagattatgtggtcttgccatggaggtaggaaccggtaaaataaatagcatggtcgcagaagttgtcccacgtccaatacacctcattaacgaactcttcctttgctcacccttctgaacacaaaca

SEQ ID NO: 39992 - DNA, 600 bp, Chicken  19866894274312_2
gggaggaccagtggggccagaggccggggcagagccatagggtaggcagcctggcttggcccttggggcaggccaagccctgatgaatgagggcactgttaggcccgggacgtgcagggggatgccacttggcactgacatattgctgcaggagtacaccaacaggcagcggctatttaggctgaagtaaaatgatacagctagagagatccaggtattagagagctgttgctgataccccgtgtttttctcyggctgccataatatatgaggtgtgtctgtgcgcacgtacaaactgaygacaagctttaccaacttttttctctgttccttttcagagtctgacttgattgatagtataatcaacccagggaggatttattaacatttacagaagactctgaggcaagtttcatgtgatactttgagattatgtggtcttgccatggaggtaggaaccggtaaaataaatagcatggtcgcagaagttgtcccacgtccaatacacctcattaacgaactcttcctttgctcacccttctgaacacaaacacgccgttttcatatcgcctccatctattgcctacagattttctattt

SEQ ID NO: 39993 - DNA, 483 bp, Chicken  19866894274313_1
ggaatgggtgttcctctcccattacagttttattggtgctatatgatatactaccaaaccaaagttaccaaactgctttcatctccttcctgaaagccagtatttaatagagggagcacaagccaaagggagatgatgccaatattctaaccaaagatccatcttcaatttttgcttctgtcggtttaacctaaacccatgaactctttgctccacatttctcagaacactgctgtttcattctctaattttcagagctccttgcttctcccagggaaactgcacctcaatcctctagayccagtgttcctctgtctctgtttcttaatggaagattcttgtcttgaagaagtgcatgatagaagatctgttgcctttgataccagtatgttgggtttgggggtatttggataaacagcaagaacaattaatttttcttaggttgtagaagtcaagtgctcaatgtgatcaatttcctttttg

SEQ ID NO: 39994 - DNA, 600 bp, Chicken  19866894274314_1
tccttcatttcttgtaaatgggaattatgtttccttttttctagtctctggggacttttcaagcatgatggagcatggctcggcagccacatcatccagcttccttagtaccctgggatacatgtcatctggccctatggactatttccagcaatgtcttcaccttcaaaatatttaaaccatgtatgatttacagagaagatgagaagttattagatactagttatgctttaggtttatatttgaaaacacaaagagctttacacttgtaggtcctgagaaaaataaattcttaaaagyttctaaattctactaaaagggtgtccaatatttatgccatctacaacctataaggtaaaaataatactgtcctcccgacctcagcaattttgtcataatgtcttatataaaaccaccaaaagaataatgaggaaattaattattattttcatggcaacattcaaaattagaattttactatatattacatgatggtgttgaaatgtggaatagtcattcaagagtaatgcaaactgtgtctgaagaagagattatatgagggatgttccaaaactaacacctcctattttatggtgttgg

SEQ ID NO: 39995 - DNA, 599 bp, Chicken  19866894274317_1
  misc_feature (1)..(80): n is any nucleotide
nnnnnnnnnnnnnnnnnnnnnnnnnnnnnnnnnnnnnnnnnnnnnnnnnnnnnnnnnnnnnnnnnnnnnnnnnnnnnnnntatacgaggatatatatatatcattaatctacaaagatatatatgtataatctcattaatcttttaccagttatctggtgtgagaggacctggttcacttactggctataacgggctcactgttggtgccaggtagcatggcctgtaacaagtatgtacagctgtgcctgccctctggtgggactgggatcattcaatcttgccttgctctgtggctgcrgtataacagtccctatggaccrtttttaccttatctktatctaagctgtcattgcagtccagggcttttattcctctcattatagctatctgtgtttgtctgctgctgtgacctaatctaattcaaactgcagtaatttcattatggcaattgttctgaaggtggctgcaaggcaattttgtacatatttatgccagtgctattttatcttaccaggccagttagtagtctgagctgtttaaataagagggaattaaatcctgtaaataaaagacagagaacaagactttgttctgttc

SEQ ID NO: 39996 - DNA, 599 bp, Chicken  19866894274317_2
  misc_feature (1)..(58): n is any nucleotide
nnnnnnnnnnnnnnnnnnnnnnnnnnnnnnnnnnnnnnnnnnnnnnnnnnnnnnnnnntatacgaggatatatatatatcattaatctacaaagatatatatgtataatctcattaatcttttaccagttatctggtgtgagaggacctggttcacttactggctataacgggctcactgttggtgccaggtagcatggcctgtaacaagtatgtacagctgtgcctgccctctggtgggactgggatcattcaatcttgccttgctctgtggctgcrgtataacagtccctatggaccrtttttaccttatctktatctaagctgtcattgcagtccagggcttttattcctctcattatagctatctgtgtttgtctgctgctgtgacctaatctaattcaaactgcagtaatttcattatggcaattgttctgaaggtggctgcaaggcaattttgtacatatttatgccagtgctattttatcttaccaggccagttagtagtctgagctgtttaaataagagggaattaaatcctgtaaataaaagacagagaacaagactttgttctgttctttatgaatcattttctatcct

SEQ ID NO: 39997 - DNA, 599 bp, Chicken  19866894274317_3
  misc_feature (1)..(43): n is any nucleotide
nnnnnnnnnnnnnnnnnnnnnnnnnnnnnnnnnnnnnnnnnnntatacgaggatatatatatatcattaatctacaaagatatatatgtataatctcattaatcttttaccagttatctggtgtgagaggacctggttcacttactggctataacgggctcactgttggtgccaggtagcatggcctgtaacaagtatgtacagctgtgcctgccctctggtgggactgggatcattcaatcttgccttgctctgtggctgcrgtataacagtccctatggaccrtttttaccttatctktatctaagctgtcattgcagtccagggcttttattcctctcattatagctatctgtgtttgtctgctgctgtgacctaatctaattcaaactgcagtaatttcattatggcaattgttctgaaggtggctgcaaggcaattttgtacatatttatgccagtgctattttatcttaccaggccagttagtagtctgagctgtttaaataagagggaattaaatcctgtaaataaaagacagagaacaagactttgttctgttctttatgaatcattttctatcctctgaagtgcaaatgt

SEQ ID NO: 39998 - DNA, 600 bp, Chicken  19866894274317_4
ataagagggaattaaatcctgtaaataaaagacagagaacaagactttgttctgttctttatgaatcattttctatcctctgaagtgcaaatgtggactcctttgagatggaaaattgtagattgggaacagaaaccacatgagtgtgtttcgcaggagaatgatagacaagttcagactatataaagcctgtgcctttcagttgtcatttgtaaccactgctgctattaaatattatcaggccatataagaatttctaagacagtagaagaagacctcaagcattcttactgagtgggrtggactgatatctgaggtgaggtggccggaaagctgttctttgtatgggttcctccttaatggatgcttccctgttctgtaggattttattgagtatccagcacaaagctgcttctgagtctgaaggagttggttttatttatttatttttcggtcctactcagctttgtcaaaaacattagttctgttcttctgagtcatcagtggaggtggatctgtcctggagcaggtggttgccaaatgttggcagtgaactgatgcaaagtgagcaaagtgtttactgaagttaacagtcacctg

SEQ ID NO: 39999 - DNA, 599 bp, Chicken  19866894274318_1
  misc_feature (1)..(48): n is any nucleotide
nnnnnnnnnnnnnnnnnnnnnnnnnnnnnnnnnnnnnnnnnnnnnnnntgaaggcaatgcagaggatgtgttctttggaaatacattctaccacttgcttatcctgaaactccgtggctttttccttccctttccaaaaaagccccttctgtaggtgggctgtgtccaagcataacctttgttcctcacctgccagatccaaatcactgccaggtagtcctgatttccctactgcaggttctccgctcaccagcaaaacttgatacagagcctccaactctgttcaataactgtctttastcttcacatcatccacaccaatatcctgtctcttcaaccaatctgtctttattttcccatctttctgacttttcactgacrctgytttttgtcaagagaatgcctgtttccttggtatattgcttcctcatcaattcttctgcrtttctttttgtactgcttgtagcccaagcttcttgtttgacttttcattccttttctgatttgtctcttttcttttcctctagccagtcccagttacctctacctcttgctccttcctcctgtccctgattatttgatgcttatcttcactaatt

SEQ ID NO: 40000 - DNA, 600 bp, Chicken  19866894274318_2
tacattctaccacttgcttatcctgaaactccgtggctttttccttccctttccaaaaaagccccttctgtaggtgggctgtgtccaagcataacctttgttcctcacctgccagatccaaatcactgccaggtagtcctgatttccctactgcaggttctccgctcaccagcaaaacttgatacagagcctccaactctgttcaataactgtctttastcttcacatcatccacaccaatatcctgtctcttcaaccaatctgtctttattttcccatctttctgacttttcactgacrctgytttttgtcaagagaatgcctgtttccttggtatattgcttcctcatcaattcttctgcrtttctttttgtactgcttgtagcccaagcttcttgtttgacttttcattccttttctgatttgtctcttttcttttcctctagccagtcccagttacctctacctcttgctccttcctcctgtccctgattatttgatgcttatcttcactaattctaagctttgttatctttcatgtttcctaggactatctagaataaagagacagaaagaaaaggcatggaagaaaagctcttt

SEQ ID NO: 40001 - DNA, 600 bp, Chicken  19866894274318_3
ttctaccacttgcttatcctgaaactccgtggctttttccttccctttccaaaaaagccccttctgtaggtgggctgtgtccaagcataacctttgttcctcacctgccagatccaaatcactgccaggtagtcctgatttccctactgcaggttctccgctcaccagcaaaacttgatacagagcctccaactctgttcaataactgtctttastcttcacatcatccacaccaatatcctgtctcttcaaccaatctgtctttattttcccatctttctgacttttcactgacrctgytttttgtcaagagaatgcctgtttccttggtatattgcttcctcatcaattcttctgcrtttctttttgtactgcttgtagcccaagcttcttgtttgacttttcattccttttctgatttgtctcttttcttttcctctagccagtcccagttacctctacctcttgctccttcctcctgtccctgattatttgatgcttatcttcactaattctaagctttgttatctttcatgtttcctaggactatctagaataaagagacagaaagaaaaggcatggaagaaaagctctttcctt

SEQ ID NO: 40002 - DNA, 600 bp, Chicken  19866894274318_4
ccttctgtaggtgggctgtgtccaagcataacctttgttcctcacctgccagatccaaatcactgccaggtagtcctgatttccctactgcaggttctccgctcaccagcaaaacttgatacagagcctccaactctgttcaataactgtctttastcttcacatcatccacaccaatatcctgtctcttcaaccaatctgtctttattttcccatctttctgacttttcactgacrctgytttttgtcaagagaatgcctgtttccttggtatattgcttcctcatcaattcttctgcrtttctttttgtactgcttgtagcccaagcttcttgtttgacttttcattccttttctgatttgtctcttttcttttcctctagccagtcccagttacctctacctcttgctccttcctcctgtccctgattatttgatgcttatcttcactaattctaagctttgttatctttcatgtttcctaggactatctagaataaagagacagaaagaaaaggcatggaagaaaagctctttccttgaagtgttttagctaaaccatattgatggaaatatatattcagtggttgggaactttac

SEQ ID NO: 40003 - DNA, 600 bp, Chicken  19866894274318_5
ccagttacctctacctcttgctccttcctcctgtccctgattatttgatgcttatcttcactaattctaagctttgttatctttcatgtttcctaggactatctagaataaagagacagaaagaaaaggcatggaagaaaagctctttccttgaagtgttttagctaaaccatattgatggaaatatatattcagtggttgggaactttacctatgaagttaggtgaaaaacaggcaggttatcatgaaaactaaagctttttattatgttttatttccttgctctacagcacagggacrcttctgctcttaaggaagaaaagcttgtaaaaatttacagttaaccttggcaacagtaggttgttcttcctcaggggcccttctcagaaatggcagaaatgttgtggctgaaatgctcacagaaaattcagccctttggcaaatgccccagatggttaggaagtgacaaattaccaactgaggtaggggttcttcagccccagcaataatcgctgcttctggctttgcctgaaggactttacacagggttaggatttgcttgtgcttccatccgtgcctgtggtttagctgagctgcttt

SEQ ID NO: 40004 - DNA, 599 bp, Chicken  19866894274321_1
  misc_feature (1)..(41): n is any nucleotide
nnnnnnnnnnnnnnnnnnnnnnnnnnnnnnnnnnnnnnnnnctaaaactagaataaaataaataaaaagactgttaagattaagatacatccagacttaactctgcaggcaaagcaccacatcggatagccttctcaagctagctggactaaaagtagagcccaaaacagcagtcattacacactcaaatactttcaaagcaaaaaaaaaactcatgtcaatagaagttcttgaagaattactgaccatttgtatagtaaatgtaataggatcatgaataaataattcaagaaaactagratgtgaactctacatctggaagacagtttttgatgcacattagttcatgcacagcgcattctaaaatttccaccactctgagctagaaatgtattagttatcagcaaaccacaagataaagaggattatttgccaggtatcttgttgtgaataacaccatttcagatcgaaagagcttcacatcagaaaggaaaatttgacagagtaaaccatacttcatagagaagaaggattctgaaataaatgcaatccacacaagctactcaagttcctatttttcatcataaaaaaattcaaaa

SEQ ID NO: 40005 - DNA, 600 bp, Chicken  19866894274324_1
gaaagtgggccatctgctatttgattttttcaaattaaggtgagctgttagtgttccagaaaggagctgaactacactaagtttagattaaggaaggttttttaggaactcaaagcttaagctgcgaaggacaaaatatgcagtactaaatatgctgtactaaaaaattaaattggagaggatgaagcccaaagtttgctgctatataattcataaggatgtgcaggctcatttggaatctggatgcttttcagagagaaaaaaaaattgaatactagttctgtacatatgtactcctcrtggacttgaaaaaaatatcttatgtttcttttctaaatccctggtcctatgtgaaagaactgccaagctgtagaacctgacagggtgatgtgctgtcaacacgtgagggaaaaatagaagtgaacataacacacagagtgtatttgtgtcacttttagtaacaaccaaaaacacttcagttggtcattatttttaagatcttagtttaaaaaagtattttaagaaataaattgatccaaagtgaatgtttcaaggtcatgagtaaggtacaaagtttctgagttagctcagaatgaggaa

SEQ ID NO: 40006 - DNA, 599 bp, Chicken  19866894274325_1
  misc_feature (1)..(230): n is any nucleotide
nnnnnnnnnnnnnnnnnnnnnnnnnnnnnnnnnnnnnnnnnnnnnnnnnnnnnnnnnnnnnnnnnnnnnnnnnnnnnnnnnnnnnnnnnnnnnnnnnnnnnnnnnnnnnnnnnnnnnnnnnnnnnnnnnnnnnnnnnnnnnnnnnnnnnnnnnnnnnnnnnnnnnnnnnnnnnnnnnnnnnnnnnnnnnnnnnnnnnnnnnnnnnnnnnnnnnnnnnnnnnnnnnnnnnnattttatagaatatagaatggcctgggttaaaaaggaccataatgatcatcgattttcaacccccctgckatgtgcagggtcaccaaccaccagaccaggctgcccagagccacatccagcctggccttgaatgcctccagggatggggcatccacaacctccctgagcaacctgttccagtgcgtcaccaccctctgggtgaaaaacttcctcctaatatctaacctaaacctcctctgtcccagtttaaaaccactcccccttgtcctatcactatccacccttgtaaacagccatttcccctcctgattataggctctcttcaagtactggaaggccacaatgaggtctccccagagccttctctt

SEQ ID NO: 40007 - DNA, 600 bp, Chicken  19866894274326_1
gggcatagatagcaactgtactggtcaatattagtgccaataaattaactcattactttataactaaagtaattgttcttgattaaaaaaaaaaaaagcattatattgtcttcaaggagagaacatattctaatagctcatacacagaactgaccctaaaacacaagagaagatactaaattattttgatagcataccataaatactacttttccttacctctagttttaccttataaaaacaataatttgtacgtgcatctttcagcaagagatagtgatttttagtttacaaaaaaaytattaattacaaattttatagtatgcaaaacaaaggcaatgcgctaaacatttgctttgaagtaagttctgggcttcttaattcaaaaaagaaagagacctcctagaaggattccagcagagggccacaaagatgacaaagggcctggagcacctcctggatgaggaaaggctgagtaacctggggctgttcagcctggggaaaagaagtctgagaggagatctgataaacgtttataaatatctaaagggaggtgggaggcaaatggaggatgaggccaggttcttctccagtggtgtg

SEQ ID NO: 40008 - DNA, 600 bp, Chicken  19866894274326_2
gagggccacaaagatgacaaagggcctggagcacctcctggatgaggaaaggctgagtaacctggggctgttcagcctggggaaaagaagtctgagaggagatctgataaacgtttataaatatctaaagggaggtgggaggcaaatggaggatgaggccaggttcttctccagtggtgtgtagcgataggacaaggagtaatggcctaaaacttgaacacaggaagtttcgtactaacatgcagaagaacgtcttgatggtaagggtgatggagcactggagcaggttgcccagagagrtgatggagtctcctactacggagatattcaagacccagctagacctgtgcaacctgttgtagtgtagctgatttagcaggggggttgaacgcaatgttctcgaggtcctttccaacccgtgcaattctatgataatcacagaaatggatcaatactgactcttgctcctcatggataataaaaatacttatttgaccgattcatcttgctatcattcagatagagtacttaacactaaaatttgacattttatcagaagagcaagctgctgggcgtactcaagtaaacaaaaagcttgcc

SEQ ID NO: 40009 - DNA, 600 bp, Chicken  19866894274326_3
aaactgaagtcaaaactcttcccaagagagaaaaaaataagattgcaaatcatatcccacatgactgctctgattagtggctgattactaattgaaagttctacttattctcaaactcttcttagagttaaactgcaaaagcagttgaaattcattgaagtttctgaaatctctgaacgcttctggcgacgtcaaaattgacttctaacatagctctactcacacagtgaaaaacatcaggagggagatgtgttagaagatgtctctatatctattttaaaataacgtagaactcagcaraataaatctttacttgatcagtaatgctttaaaagctaaattacagctacaatatgtaatgaatagataaaattttctgaataagaataaaattaatataaagaaattaagttacaaytgcttgaggagacagaactatctgattttatgagatagctaccaaaggcaaatcagaggagtttcaaaagtccccttgtcttctaatcacgaagtttccaaggactcaaagcagaattttagtaaatcacaggctcgcacataaaactggatctcaatattagtattatgatagaacatctc

SEQ ID NO: 40010 - DNA, 563 bp, Chicken  19866894274326_4
ttcttagagttaaactgcaaaagcagttgaaattcattgaagtttctgaaatctctgaacgcttctggcgacgtcaaaattgacttctaacatagctctactcacacagtgaaaaacatcaggagggagatgtgttagaagatgtctctatatctattttaaaataacgtagaactcagcaraataaatctttacttgatcagtaatgctttaaaagctaaattacagctacaatatgtaatgaatagataaaattttctgaataagaataaaattaatataaagaaattaagttacaaytgcttgaggagacagaactatctgattttatgagatagctaccaaaggcaaatcagaggagtttcaaaagtccccttgtcttctaatcacgaagtttccaaggactcaaagcagaattttagtaaatcacaggctcgcacataaaactggatctcaatattagtattatgatagaacatctcaattaggaattatgaactttccaaagcactgaagacactgctagagggtagacacgagtagcataaatcaatttataaagt

SEQ ID NO: 40011 - DNA, 600 bp, Chicken  19866894274329_1
ctggtggggatgaccatcccgtccctgtggtactggtgtactgaccaggtgtgtcactgctcctgccttggtttggttttgaggatatgttcttggctgtttgactctgattgcagacctaagggccgcagcacagcctagactagccactatttctgacagcagtgcagtaaaatgtgttgctttcaatcctcacacctcaaaactgcagaagcacaaccaggttttgtgaattatttcaatgtagaaagaggggagaatgtgcctcattgttaatcccagtccataaagatgtgaggmattctcaaactctttcagctctgcaggggtctgatcacctccaccccagtgctcacttttctacaactgcaatagtttagagaacagaatatataaatgaacacagcatgaaatccacaccaaagagcagtacatgacccaaccacaccacagagctggctctgctccacccagcagcagatccattgcgtttctttctctctaggtcatcgttcagagatcccttgctgctaaaaacctctcacacgccaaggggggctccctgatgacctcctacctgaagattttaccactcttcat

SEQ ID NO: 40012 - DNA, 600 bp, Chicken  19866894274329_2
ttcagctctgcaggggtctgatcacctccaccccagtgctcacttttctacaactgcaatagtttagagaacagaatatataaatgaacacagcatgaaatccacaccaaagagcagtacatgacccaaccacaccacagagctggctctgctccacccagcagcagatccattgcgtttctttctctctaggtcatcgttcagagatcccttgctgctaaaaacctctcacacgccaaggggggctccctgatgacctcctacctgaagattttaccactcttcatgatggtgatgccrggcatgatcagccgggtcctcttcccaggtcagtgctgaaggagagctctgctccctctgacaaccacttcaggctgtgtccattctgtgcagctgagacagcttttgcagtgcatcacaagtgcccaaagtatgacaaaactccctcccagttacaactaacggaatgcaaattctctaaaagcagacttcagcaatactgtttcttgtgactcatgaacattgcttctcatttgccttgcttatttcagacctggtggcttgtgcagaaccggagatctgtcaaaaaatctgtggcaa

SEQ ID NO: 40013 - DNA, 600 bp, Chicken  19866894274333_1
tcgggtggaaggatgctcccctgcattgctagctctcccttgggccacgcttttcctgctgctcactcagtactgcattgagcagggcagggtgggtgggaggctgctccatcctattgggcacactctggtctcctggtcatgggctcttcagcctcctgggacttttggggctttccctggaatagaactgggatggtttccctgccatggtatgatttcccagcactttccgtaggaggcagattaatcagcatcccttgttgaggtggtggctatggatgtggtcacctactgccwggggtggtggagctcagtggggtccaggcaaaaccctctctcctctctcctggtggctccagagggagctcaggcatctctggggcatgcaaaagaggatgaggatacatctgcactcaggcctcaaattgcaccaggggaagttcaggttggctattaggaaacatttcttctcagaaggagcagtgatgcagtggcacagctgcccagggaggtggggggtcaccgtcccttgaggtgtttgagaaccgtggagatgtggcactgagggatgtggttatgggcacggtgggggtggtg

SEQ ID NO: 40014 - DNA, 600 bp, Chicken  19866894274341_1
gagctattggaaaagcactctgttagctgagggctccgttctctaaacagttgccacacatatagcctttattcatggagttatgcagttctttgactgcgtgtaaaggacagtgtttgctggattgaatcccttttcatgggaagagttactatacacagcagtttgccagggcaccctcttgagtgcaatcacacagtaaaagttgcagaagtagtttctactccacagccttgctatcacagcatgccaaaaacgttgccttttcagatgggacatttcatggttgattgcaatccrtaggtcgctgctgtaaagtcaaatcaaaatgtttcagctggtgatgaactctcattgtccctctatgygcaaggaattcactcgcagcttcctccactctcctcccaaggtaggtgtcacaggccagtgctgcaaagccatggaccaccaggttgagttggtagattaagggtgttgtcaaaaccctgtcacatttataagtactgctgtgarcccaggaacaaaccttaaaatgacaatgaaataacagttctagacattgctcaagttttttttcctaataaggctgagtgtaagacg

SEQ ID NO: 40015 - DNA, 600 bp, Chicken  19866894274341_2
ttattcatggagttatgcagttctttgactgcgtgtaaaggacagtgtttgctggattgaatcccttttcatgggaagagttactatacacagcagtttgccagggcaccctcttgagtgcaatcacacagtaaaagttgcagaagtagtttctactccacagccttgctatcacagcatgccaaaaacgttgccttttcagatgggacatttcatggttgattgcaatccrtaggtcgctgctgtaaagtcaaatcaaaatgtttcagctggtgatgaactctcattgtccctctatgygcaaggaattcactcgcagcttcctccactctcctcccaaggtaggtgtcacaggccagtgctgcaaagccatggaccaccaggttgagttggtagattaagggtgttgtcaaaaccctgtcacatttataagtactgctgtgarcccaggaacaaaccttaaaatgacaatgaaataacagttctagacattgctcaagttttttttcctaataaggctgagtgtaagacgttggcttctctgacagcatgaactttcaaggaacattccatacaaagtgtctatcaactttgcatcct

SEQ ID NO: 40016 - DNA, 600 bp, Chicken  19866894274341_3
gtagtttctactccacagccttgctatcacagcatgccaaaaacgttgccttttcagatgggacatttcatggttgattgcaatccrtaggtcgctgctgtaaagtcaaatcaaaatgtttcagctggtgatgaactctcattgtccctctatgygcaaggaattcactcgcagcttcctccactctcctcccaaggtaggtgtcacaggccagtgctgcaaagccatggaccaccaggttgagttggtagattaagggtgttgtcaaaaccctgtcacatttataagtactgctgtgarcccaggaacaaaccttaaaatgacaatgaaataacagttctagacattgctcaagttttttttcctaataaggctgagtgtaagacgttggcttctctgacagcatgaactttcaaggaacattccatacaaagtgtctatcaactttgcatccttcccattaaaccagaagtcactctaaaaagacttaaaaatggcttaaatgttttaggaacatagaagacttagtagggatttaaagtggctttaatgcttacattgtgctaccttaaagatttaagggggcttaaatgcttatgt

SEQ ID NO: 40017 - DNA, 600 bp, Chicken  19866894274347_1
atttttttcttgtttatgaaaactgtctttatccctctcagagccgttggtttatttttaattctcagctgactattaatgagactaatgaaattaaagtctgatttgttgtatgataattcaaatatagtaatgtagaaagcaaacaaatacaagaaagcctcacattcttaagatttttaaacatgtttccttttttttaattatgaagttttccacaaaagaaattatgactacatgtgtttatttaacagcagttatagtagttatagggttagtacatagttatacaccacgacrtactaacattcacaaaaacacatactgcaggcagaatacttttctccaagaatgwcttaataactgttttgattgtagtatatatgcctaaatattaaagtttgggttaccacagtggttgaagtttttggcctctatgtctgttgtccaaatcaaacattattactttacatttcttgttttgcagcaaaaaaaaaattgcaattttttcaagccctgggttttgattgttttttttaactgtgcaatattgtataaaatccagaagaaataaaattacaaactaaaaatcaaaacacc

SEQ ID NO: 40018 - DNA, 600 bp, Chicken  19866894274347_2
ttttaattctcagctgactattaatgagactaatgaaattaaagtctgatttgttgtatgataattcaaatatagtaatgtagaaagcaaacaaatacaagaaagcctcacattcttaagatttttaaacatgtttccttttttttaattatgaagttttccacaaaagaaattatgactacatgtgtttatttaacagcagttatagtagttatagggttagtacatagttatacaccacgacrtactaacattcacaaaaacacatactgcaggcagaatacttttctccaagaatgwcttaataactgttttgattgtagtatatatgcctaaatattaaagtttgggttaccacagtggttgaagtttttggcctctatgtctgttgtccaaatcaaacattattactttacatttcttgttttgcagcaaaaaaaaaattgcaattttttcaagccctgggttttgattgttttttttaactgtgcaatattgtataaaatccagaagaaataaaattacaaactaaaaatcaaaacaccaacaaccaattccaaatatgtacttttgaagtaggagaaagagaaggatattcaa

SEQ ID NO: 40019 - DNA, 599 bp, Chicken  19866894274350_1
  misc_feature (1)..(182): n is any nucleotide
nnnnnnnnnnnnnnnnnnnnnnnnnnnnnnnnnnnnnnnnnnnnnnnnnnnnnnnnnnnnnnnnnnnnnnnnnnnnnnnnnnnnnnnnnnnnnnnnnnnnnnnnnnnnnnnnnnnnnnnnnnnnnnnnnnnnnnnnnnnnnnnnnnnnnnnnnnnnnnnnnnnnnnnnnnnnnnnnnnnnnnttatacctttatatttaacaaaaaactgcaatacaatttttagaagacaataaatgaaagtagactactatactgacaattttaatggtattggaaggaaaaagaaaaaagcaacaaraactccccagcaataattagtcataataggctttctaacataaaataaatccagcattaatttctttacgtgtacagttaacaaaacatcrtacatacagtattaatgwggtctagaggtttggatctgtattatccgcacagaaaaaatacagcagttaaataatcaaactacaacaacagtttgctttacctttttctttttcagcaatttcctactggcatcagctttcatggcagatgtaatctgtggaactattcttctaccaaatggtgatggcatggtctcttccaactgaa

SEQ ID NO: 40020 - DNA, 599 bp, Chicken  19866894274350_2
  misc_feature (1)..(91): n is any nucleotide
nnnnnnnnnnnnnnnnnnnnnnnnnnnnnnnnnnnnnnnnnnnnnnnnnnnnnnnnnnnnnnnnnnnnnnnnnnnnnnnnnnnnnnnnnnnttatacctttatatttaacaaaaaactgcaatacaatttttagaagacaataaatgaaagtagactactatactgacaattttaatggtattggaaggaaaaagaaaaaagcaacaaraactccccagcaataattagtcataataggctttctaacataaaataaatccagcattaatttctttacgtgtacagttaacaaaacatcrtacatacagtattaatgwggtctagaggtttggatctgtattatccgcacagaaaaaatacagcagttaaataatcaaactacaacaacagtttgctttacctttttctttttcagcaatttcctactggcatcagctttcatggcagatgtaatctgtggaactattcttctaccaaatggtgatggcatggtctcttccaactgaagtttcttcatcttgggtttaccaactttacctttgattggtttaccaaccataccagccagaacatcttctctttcctgtgcttctacttt

SEQ ID NO: 40021 - DNA, 599 bp, Chicken  19866894274350_3
  misc_feature (1)..(73): n is any nucleotide
nnnnnnnnnnnnnnnnnnnnnnnnnnnnnnnnnnnnnnnnnnnnnnnnnnnnnnnnnnnnnnnnnnnnnnnnnttatacctttatatttaacaaaaaactgcaatacaatttttagaagacaataaatgaaagtagactactatactgacaattttaatggtattggaaggaaaaagaaaaaagcaacaaraactccccagcaataattagtcataataggctttctaacataaaataaatccagcattaatttctttacgtgtacagttaacaaaacatcrtacatacagtattaatgwggtctagaggtttggatctgtattatccgcacagaaaaaatacagcagttaaataatcaaactacaacaacagtttgctttacctttttctttttcagcaatttcctactggcatcagctttcatggcagatgtaatctgtggaactattcttctaccaaatggtgatggcatggtctcttccaactgaagtttcttcatcttgggtttaccaactttacctttgattggtttaccaaccataccagccagaacatcttctctttcctgtgcttctactttctaacaaacaaccagggg

SEQ ID NO: 40022 - DNA, 600 bp, Chicken  19866894274353_1
atttaaatgtatttaactgttcaatgcgctacccacaaataatgaaatagacatctgagaaaactgtacaattgtgtgcatgtttgttttatgttccttttgacattgggtattgctgttgaatggaaaatcgatcagtggatatcttgaaatgaggtcaacagttttgtcaaatcaccttaagtagaaatacatttggtatcccaagatgactcaaattatgaataaaacaaatacacacatacttatgcctcagatattttaagagttaagataatagggtagtgctcagttaagttytaactaatgctaactcaagatgtagtgctctgtatctttgtgcgattaaggactcaccccacccatgacaatgctgaatatagctggttttcacccaacagttaggttcctcaagcaagtcatgtatttggttttgttttgttttgtttttcaggtaaggtaagatttgtcatgtcacaatggcttaagtcccttttgtttcgtggcaagatttactgcattactagttggcctgctcatgtaaggagtgcagagtgatttccatgccacgttaaggcattttcaaactgctccttgatg

SEQ ID NO: 40023 - DNA, 600 bp, Chicken  19866894274379_1
gggcttcgtgatggtttgtggataattcagacacattgatacctttaaggatttctctgtgtgcgtttcatgtagaaaagctacaaaggaacagatctgctgttcagatgagtctccagttatgttggcagaggcgttacctgtttattctgaacacagtgattgcagaggtgagcactgttggtggctgagcttatgaattattactgaaggagcaaatcacagaaaaggaactagaacgtggaaatgaaattagtgatgacaaaggaaatacaaagaattacaataaacatctcagamcattagaaatattgtaagtggtaggcagtttgcattaattggttgcatgtttgcaaactaggactatgtattttattcaaaaagctcctggactgtttgctgtgctatcctattgtatattattgcaatgcattgctgcagcacttgaaacacagtargtggtattcttaagccagtgtaaaagcaaattaagtatggttttctgcagaatgcctgcacagtgtgtctgagctgcaatttgcctatgtaactttgagttatatagcgcaaacaaagcaaagtagtttcagcgtccatctg

SEQ ID NO: 40024 - DNA, 600 bp, Chicken  19866894274379_2
gtgattgcagaggtgagcactgttggtggctgagcttatgaattattactgaaggagcaaatcacagaaaaggaactagaacgtggaaatgaaattagtgatgacaaaggaaatacaaagaattacaataaacatctcagamcattagaaatattgtaagtggtaggcagtttgcattaattggttgcatgtttgcaaactaggactatgtattttattcaaaaagctcctggactgtttgctgtgctatcctattgtatattattgcaatgcattgctgcagcacttgaaacacagtargtggtattcttaagccagtgtaaaagcaaattaagtatggttttctgcagaatgcctgcacagtgtgtctgagctgcaatttgcctatgtaactttgagttatatagcgcaaacaaagcaaagtagtttcagcgtccatctgattcacatatgcactgcactaatgactttgtccattttgatttgcatagttctaattatgtgcttaaatatagttgtgttcttcatcaatcatatgttggctcaatgatttctcagatttacatctgctaatttcctaaccaggtggtataaactttg

SEQ ID NO: 40025 - DNA, 599 bp, Chicken  19866894274386_1
  misc_feature (1)..(19): n is any nucleotide
nnnnnnnnnnnnnnnnnnnctgcggctcaaccctgttgcagagatttctgtctccagaaccattagtgcatatcctaaactcaacaaagctcaaacccaacctctgtgtgtgacaagtcagattttcgccgtgtcaaccctggcaaaaggccttcacagctggtccctgtgcaccacaggcagccccgatggggctgaaagaagaggagcccagccagccaggtggttgggaagccctgtccactaccatccagacatgcgggaagcagcagcacacattggtctagacttgtggctccyttgcatgagatcggtgtttawgccagcaaagtgacagacagccctgagagtttgagcagaggttaggatctacgatcaggttgcattttagaagcacattytaaaagggactgttaactcccagcgtggataaggtggagggcttttccttatgaattatagataagctctctgatgcagcaaatgccacgtatccagaagctcagctaaacgtaagggaagaggtagaaaaaccatgcagagacacctcattctccaatctgatgtgagttgacaaagattgtttagaagccaagggc

SEQ ID NO: 40026 - DNA, 600 bp, Chicken  19866894274386_2
gcggctcaaccctgttgcagagatttctgtctccagaaccattagtgcatatcctaaactcaacaaagctcaaacccaacctctgtgtgtgacaagtcagattttcgccgtgtcaaccctggcaaaaggccttcacagctggtccctgtgcaccacaggcagccccgatggggctgaaagaagaggagcccagccagccaggtggttgggaagccctgtccactaccatccagacatgcgggaagcagcagcacacattggtctagacttgtggctccyttgcatgagatcggtgtttawgccagcaaagtgacagacagccctgagagtttgagcagaggttaggatctacgatcaggttgcattttagaagcacattytaaaagggactgttaactcccagcgtggataaggtggagggcttttccttatgaattatagataagctctctgatgcagcaaatgccacgtatccagaagctcagctaaacgtaagggaagaggtagaaaaaccatgcagagacacctcattctccaatctgatgtgagttgacaaagattgtttagaagccaagggccagactttcaaaagtactccct

SEQ ID NO: 40027 - DNA, 600 bp, Chicken  19866894274386_3
ctctgtgtgtgacaagtcagattttcgccgtgtcaaccctggcaaaaggccttcacagctggtccctgtgcaccacaggcagccccgatggggctgaaagaagaggagcccagccagccaggtggttgggaagccctgtccactaccatccagacatgcgggaagcagcagcacacattggtctagacttgtggctccyttgcatgagatcggtgtttawgccagcaaagtgacagacagccctgagagtttgagcagaggttaggatctacgatcaggttgcattttagaagcacattytaaaagggactgttaactcccagcgtggataaggtggagggcttttccttatgaattatagataagctctctgatgcagcaaatgccacgtatccagaagctcagctaaacgtaagggaagaggtagaaaaaccatgcagagacacctcattctccaatctgatgtgagttgacaaagattgtttagaagccaagggccagactttcaaaagtactccctcaagaatcttaacaagtggttagatcttcagacagctccgctctgattcgggcacataaatgaggtggacagattaaaac

SEQ ID NO: 40028 - DNA, 599 bp, Chicken  19866894274389_1
  misc_feature (1)..(34): n is any nucleotide
nnnnnnnnnnnnnnnnnnnnnnnnnnnnnnnnnntgcaaaccctgatggctggatgtgacccggctttatcatggcccaccagctgcatgtacaacccttgcctcctccccaatgattcagcaaatcttctctgaggagaaaaacaagcatacaagtgaacaaatcacaatgtcagattacaaagatgagcggggaaaagctgcagctcaaagaagggagataaaaagctggtgaaattgcatggcataagggctgaaatgcttgatagactttttatggagtttagcaatacaaattayttaaaaatagttgccttttggggtccttacaccttaaaatattgctaaatgagaacagagtgtgaaagggartgaagcacattccgccctctgtgatctgggcattgcacagggctgatrtggagccctcgtggcatcactgacagctaaagaatccatcctgtttcacactgaaattaagttctaccaggcaaactactttcaaaaagactttctgttcaccataaccaacattttcaatgctcagaagcctgttatcgaacacttaacagctagagatcagtcagaaggtgtagtac

SEQ ID NO: 40029 - DNA, 600 bp, Chicken  19866894274389_2
tggcccaccagctgcatgtacaacccttgcctcctccccaatgattcagcaaatcttctctgaggagaaaaacaagcatacaagtgaacaaatcacaatgtcagattacaaagatgagcggggaaaagctgcagctcaaagaagggagataaaaagctggtgaaattgcatggcataagggctgaaatgcttgatagactttttatggagtttagcaatacaaattayttaaaaatagttgccttttggggtccttacaccttaaaatattgctaaatgagaacagagtgtgaaagggartgaagcacattccgccctctgtgatctgggcattgcacagggctgatrtggagccctcgtggcatcactgacagctaaagaatccatcctgtttcacactgaaattaagttctaccaggcaaactactttcaaaaagactttctgttcaccataaccaacattttcaatgctcagaagcctgttatcgaacacttaacagctagagatcagtcagaaggtgtagtacttcccttaattgcattcagcccagatactccagtcagagcccactgttccagaaacaccatgaaattctaatg

SEQ ID NO: 40030 - DNA, 600 bp, Chicken  19866894274389_3
gcaaatcttctctgaggagaaaaacaagcatacaagtgaacaaatcacaatgtcagattacaaagatgagcggggaaaagctgcagctcaaagaagggagataaaaagctggtgaaattgcatggcataagggctgaaatgcttgatagactttttatggagtttagcaatacaaattayttaaaaatagttgccttttggggtccttacaccttaaaatattgctaaatgagaacagagtgtgaaagggartgaagcacattccgccctctgtgatctgggcattgcacagggctgatrtggagccctcgtggcatcactgacagctaaagaatccatcctgtttcacactgaaattaagttctaccaggcaaactactttcaaaaagactttctgttcaccataaccaacattttcaatgctcagaagcctgttatcgaacacttaacagctagagatcagtcagaaggtgtagtacttcccttaattgcattcagcccagatactccagtcagagcccactgttccagaaacaccatgaaattctaatgaaaacaaaagtgtctgcaattcacagagcactcatatcatgtttatgg

SEQ ID NO: 40031 - DNA, 599 bp, Chicken  19866894274394_1
  misc_feature (1)..(8): n is any nucleotide
nnnnnnnnactaccaacaaccaaacataactatttgtaataagctaaataatttttaaatacatctttttgattttcttggtcagtaagaatgaagatgaaatactttgctttttattttatcataatcaacagtagtgtcatatcctatcttcagtaagaaaaatataaagtcttagtatctaatttcaattacatcagtttcaactataatgaaattattcaacagggattaattagcaggaatagcctgccaacaccacagctgagacgatcttcaggagtttctggtattccaccyatagagtcaccatcttctaaatgggaacggagtaacagtaagagacctcatcaggactataatgtgtcaaggtaagcacctaataggatttttagggtagaataataaacattgcctttcaaaaatgttcatatctgtaacggtgtaagtatctaacgtagaatcttgtacttaaattatgccttcaaattctgacagattaaattggaaaacatatcaagttaataatataccatacttttataactctggcctcaagtggaaattaagtcattttgaggctgaatgtcttgcaccat

SEQ ID NO: 40032 - DNA, 599 bp, Chicken  19866894274404_1
  misc_feature (1)..(119): n is any nucleotide
nnnnnnnnnnnnnnnnnnnnnnnnnnnnnnnnnnnnnnnnnnnnnnnnnnnnnnnnnnnnnnnnnnnnnnnnnnnnnnnnnnnnnnnnnnnnnnnnnnnnnnnnnnnnnnnnnnnnnnnccctcgggctgccttgtttaaaacctctaatccgtagctaagtgcctgtggcttttgcaagaagttacactacaacagccacatctgtgccgtaactgagagagcagcaggaatgggtcctcctgaaggactcaaacccagcacacgagagcagggatttcctctccccaccctgcaaacrctgctgctctgctgctgaccctggaggactctggagaaacaatcgrtgttttcagcacacggctgttggacagccaaaaaggggacacagaaaagcyttcagatgaagaagtgcatcaatgcatttcacacggtatcttcaagcacacragaccaagggaagcacarcctgggagggtgcttggttgctttttaaagcaaaggaggcagcagtcacatggcagtgagcagcttgttctgtccagacctcccaccactttctgatacaagatcttgagggacactcgaacactgctggca

SEQ ID NO: 40033 - DNA, 599 bp, Chicken  19866894274404_2
  misc_feature (1)..(73): n is any nucleotide
nnnnnnnnnnnnnnnnnnnnnnnnnnnnnnnnnnnnnnnnnnnnnnnnnnnnnnnnnnnnnnnnnnnnnnnnnccctcgggctgccttgtttaaaacctctaatccgtagctaagtgcctgtggcttttgcaagaagttacactacaacagccacatctgtgccgtaactgagagagcagcaggaatgggtcctcctgaaggactcaaacccagcacacgagagcagggatttcctctccccaccctgcaaacrctgctgctctgctgctgaccctggaggactctggagaaacaatcgrtgttttcagcacacggctgttggacagccaaaaaggggacacagaaaagcyttcagatgaagaagtgcatcaatgcatttcacacggtatcttcaagcacacragaccaagggaagcacarcctgggagggtgcttggttgctttttaaagcaaaggaggcagcagtcacatggcagtgagcagcttgttctgtccagacctcccaccactttctgatacaagatcttgagggacactcgaacactgctggcagcctccagcagctgggaacgcgctgtgsacggagcactttgcccgc

SEQ ID NO: 40034 - DNA, 599 bp, Chicken  19866894274404_3
  misc_feature (1)..(22): n is any nucleotide
nnnnnnnnnnnnnnnnnnnnnnccctcgggctgccttgtttaaaacctctaatccgtagctaagtgcctgtggcttttgcaagaagttacactacaacagccacatctgtgccgtaactgagagagcagcaggaatgggtcctcctgaaggactcaaacccagcacacgagagcagggatttcctctccccaccctgcaaacrctgctgctctgctgctgaccctggaggactctggagaaacaatcgrtgttttcagcacacggctgttggacagccaaaaaggggacacagaaaagcyttcagatgaagaagtgcatcaatgcatttcacacggtatcttcaagcacacragaccaagggaagcacarcctgggagggtgcttggttgctttttaaagcaaaggaggcagcagtcacatggcagtgagcagcttgttctgtccagacctcccaccactttctgatacaagatcttgagggacactcgaacactgctggcagcctccagcagctgggaacgcgctgtgsacggagcactttgcccgcacagagctcccaccacccaacacaggagctcagctcgctgccagtcccagc

SEQ ID NO: 40035 - DNA, 600 bp, Chicken  19866894274404_4
tccgtagctaagtgcctgtggcttttgcaagaagttacactacaacagccacatctgtgccgtaactgagagagcagcaggaatgggtcctcctgaaggactcaaacccagcacacgagagcagggatttcctctccccaccctgcaaacrctgctgctctgctgctgaccctggaggactctggagaaacaatcgrtgttttcagcacacggctgttggacagccaaaaaggggacacagaaaagcyttcagatgaagaagtgcatcaatgcatttcacacggtatcttcaagcacacragaccaagggaagcacarcctgggagggtgcttggttgctttttaaagcaaaggaggcagcagtcacatggcagtgagcagcttgttctgtccagacctcccaccactttctgatacaagatcttgagggacactcgaacactgctggcagcctccagcagctgggaacgcgctgtgsacggagcactttgcccgcacagagctcccaccacccaacacaggagctcagctcgctgccagtcccagcacttacgatgggagggatggcagcagcgcgctgcttcagctgcttcaggtcca

SEQ ID NO: 40036 - DNA, 600 bp, Chicken  19866894274404_5
tggcttttgcaagaagttacactacaacagccacatctgtgccgtaactgagagagcagcaggaatgggtcctcctgaaggactcaaacccagcacacgagagcagggatttcctctccccaccctgcaaacrctgctgctctgctgctgaccctggaggactctggagaaacaatcgrtgttttcagcacacggctgttggacagccaaaaaggggacacagaaaagcyttcagatgaagaagtgcatcaatgcatttcacacggtatcttcaagcacacragaccaagggaagcacarcctgggagggtgcttggttgctttttaaagcaaaggaggcagcagtcacatggcagtgagcagcttgttctgtccagacctcccaccactttctgatacaagatcttgagggacactcgaacactgctggcagcctccagcagctgggaacgcgctgtgsacggagcactttgcccgcacagagctcccaccacccaacacaggagctcagctcgctgccagtcccagcacttacgatgggagggatggcagcagcgcgctgcttcagctgcttcaggtccagcggtttctgggcgagga

SEQ ID NO: 40037 - DNA, 445 bp, Chicken  19866894274404_6
actctggagaaacaatcgrtgttttcagcacacggctgttggacagccaaaaaggggacacagaaaagcyttcagatgaagaagtgcatcaatgcatttcacacggtatcttcaagcacacragaccaagggaagcacarcctgggagggtgcttggttgctttttaaagcaaaggaggcagcagtcacatggcagtgagcagcttgttctgtccagacctcccaccactttctgatacaagatcttgagggacactcgaacactgctggcagcctccagcagctgggaacgcgctgtgsacggagcactttgcccgcacagagctcccaccacccaacacaggagctcagctcgctgccagtcccagcacttacgatgggagggatggcagcagcgcgctgcttcagctgcttcaggtccagcggtttctgggcgaggagttca

SEQ ID NO: 40038 - DNA, 599 bp, Chicken  19866894274416_1
  misc_feature (1)..(192): n is any nucleotide
nnnnnnnnnnnnnnnnnnnnnnnnnnnnnnnnnnnnnnnnnnnnnnnnnnnnnnnnnnnnnnnnnnnnnnnnnnnnnnnnnnnnnnnnnnnnnnnnnnnnnnnnnnnnnnnnnnnnnnnnnnnnnnnnnnnnnnnnnnnnnnnnnnnnnnnnnnnnnnnnnnnnnnnnnnnnnnnnnnnnnnnnnnnnnnnntcttttctttcttttaagctactatttgaatgactagctggcactattcttgttttataggaatgtttgtgatattactagtgtggaaaaacatcttatgtagtcaargtggggatttgtattgaaaattattttttgtatggggaaaataaatctcctcattttctagttagacctttggccagataaaatatcttttgatttaagcatgtatttattcctcctctttcaaagtgagattccaggtaggatagagtggcctcatgtcaaaattagtgtcaaataaatgtttttgtagcaatgttttaagtctcaagcttaagacaaatacttgctttaagacaatattttccaagtgcataaataatcaatttcaccaaatattactcctctttttcatattttct

SEQ ID NO: 40039 - DNA, 600 bp, Chicken  19866894274418_1
aataaaaaagatgtctggggaaaaagctgagtgcacaaagtgtcccagaagaccccgagcgtttagagtacctgtgccaagaggctgctatgcatgaaaaataattgtgcgatgggtcagagcttgtttacttcctcttgtagacaacacaggagaaaatgggaccctgaagagaaaccggccctgaatgcaaggctaaatgattagcaggactagatcatcaactattaaccctgtcctgaggctcttggctggtgttatacatcatgcccatctaaagaatctggtctgagccccatsccayctccggccatgccagtgaggagaccctcactttcccactgctgagtttcagacccttccagcagcccggacatcctcccctccacagctttgcatatggtggggctgggctggcttgtggtctgcatggctgagctgactcctctggctgaatttgcctgaagcaagagaggaagcacagacaaattgatctctcagaagagatgcctctggaatcccccttttccaacaacagttaatgtttaaaagggaactttataggcattaacaagatctttattaatttggaaagaaaac

SEQ ID NO: 40040 - DNA, 600 bp, Chicken  19866894274418_2
aaaaagatgtctggggaaaaagctgagtgcacaaagtgtcccagaagaccccgagcgtttagagtacctgtgccaagaggctgctatgcatgaaaaataattgtgcgatgggtcagagcttgtttacttcctcttgtagacaacacaggagaaaatgggaccctgaagagaaaccggccctgaatgcaaggctaaatgattagcaggactagatcatcaactattaaccctgtcctgaggctcttggctggtgttatacatcatgcccatctaaagaatctggtctgagccccatsccayctccggccatgccagtgaggagaccctcactttcccactgctgagtttcagacccttccagcagcccggacatcctcccctccacagctttgcatatggtggggctgggctggcttgtggtctgcatggctgagctgactcctctggctgaatttgcctgaagcaagagaggaagcacagacaaattgatctctcagaagagatgcctctggaatcccccttttccaacaacagttaatgtttaaaagggaactttataggcattaacaagatctttattaatttggaaagaaaacatca

SEQ ID NO: 40041 - DNA, 599 bp, Chicken  19866894274419_1
  misc_feature (1)..(72): n is any nucleotide
nnnnnnnnnnnnnnnnnnnnnnnnnnnnnnnnnnnnnnnnnnnnnnnnnnnnnnnnnnnnnnnnnnnnnnnnttaaaaaaaaatagtattgttaaagatttattaacctcttggcaggaggagtcacctgccatttttatagcttaaaaatagacttttcaaggttgctattttttattacagagtactttctggcactcatttcatgacagtgctttttctctttttctgaagtcatactggaggtctgagaaaaagaaatctatatacagtttaattcagtgattatattgtcacctkcaattgagcatcatagtaactttgagttctttatttaggaagatatatatatatgttaagtttatgtcctagtctttgccgatcccaaatacatctaactaagtaataagaatgatttggagaagaaagtttctgagggcacctttggaggagcctgtttcattttctacctctaactcgtaacagacattctagggaggtggtccaactaaaccagccatgttagatgcctccggttgaggagtatgggacctcttcatagatagcctctgtttgcagagcaacttgctgaacggtga

SEQ ID NO: 40042 - DNA, 600 bp, Chicken  19866894274428_1
aaaccttttattcagggttagaatttgacctagcgtgataaccaggcaataaaatgggagtcggctgtcaatttcaggagaaataaggcatcaccagagcttaaagatctgcttcataacatttctatcaaataaatcacatctcctgagtggatatttccacaattcttgacaaggaagaaagaaaatattgtctttgcctagatctggtgaagtgaaataaagctgtaatgattgctagccaaccacatctacacacagaattaatgcaagcactcagtgtgcagagatgttttaaawtcttgatttacagtctgtgttttgtaaattaacagaatcctcacagccctcacatgatcttmatcgaccaattctgtgtttgaaacacatgccatatgtttgaaactgaccctaatgcttctgragaaaggagtggttggtgttttcaggaagcagcctggaatccagtgctagctggtgagtcattaaataaggagaataacatttacaggacgtaatacaatatatcagtttagcagaactgaaatttaactttctcaaatgccacttcagataaacagaatgtagtctttctccact

SEQ ID NO: 40043 - DNA, 600 bp, Chicken  19866894274428_2
ggctgtcaatttcaggagaaataaggcatcaccagagcttaaagatctgcttcataacatttctatcaaataaatcacatctcctgagtggatatttccacaattcttgacaaggaagaaagaaaatattgtctttgcctagatctggtgaagtgaaataaagctgtaatgattgctagccaaccacatctacacacagaattaatgcaagcactcagtgtgcagagatgttttaaawtcttgatttacagtctgtgttttgtaaattaacagaatcctcacagccctcacatgatcttmatcgaccaattctgtgtttgaaacacatgccatatgtttgaaactgaccctaatgcttctgragaaaggagtggttggtgttttcaggaagcagcctggaatccagtgctagctggtgagtcattaaataaggagaataacatttacaggacgtaatacaatatatcagtttagcagaactgaaatttaactttctcaaatgccacttcagataaacagaatgtagtctttctccactggaactggaccaggtgcagaataagctgctataattatgcctgccctaccatgaagaccatt

SEQ ID NO: 40044 - DNA, 600 bp, Chicken  19866894274428_3
ctatcaaataaatcacatctcctgagtggatatttccacaattcttgacaaggaagaaagaaaatattgtctttgcctagatctggtgaagtgaaataaagctgtaatgattgctagccaaccacatctacacacagaattaatgcaagcactcagtgtgcagagatgttttaaawtcttgatttacagtctgtgttttgtaaattaacagaatcctcacagccctcacatgatcttmatcgaccaattctgtgtttgaaacacatgccatatgtttgaaactgaccctaatgcttctgragaaaggagtggttggtgttttcaggaagcagcctggaatccagtgctagctggtgagtcattaaataaggagaataacatttacaggacgtaatacaatatatcagtttagcagaactgaaatttaactttctcaaatgccacttcagataaacagaatgtagtctttctccactggaactggaccaggtgcagaataagctgctataattatgcctgccctaccatgaagaccattgcaagtattttaatctttcttatttcttacattacactatgaaaacttcattgaaaaataca

SEQ ID NO: 40045 - DNA, 600 bp, Chicken  19866894274429_1
gccagggaagagctgctatttccctctaatgcctgctgaaactgtggattcctcccttggtctcagcagtgattttctttccttaattaatcaattacacatataactgtggtccattagcaaggcagatgactgtcttcagcctcttattactggttttggaagggcccaaaaatatttcagctaggatgaatagatttcttttatgaggttttaaggagaccatttagcatgaaaaaaaacaacaagaactaatatgggcataataagccaactccacctgcatcgtgcacttgggaraaacaacaggccccagttttagaccttgtctgcgcttaattggacttggaagagtacataatggaaggctaatggtacctatgagtttagttcacttagcagcacagaggggatgatttccttgcagtacagcgcttcgattggctgttttgtaagataatgatcaggacagatacattagtaatagactgccaggacctgagtgtcctgggttataaactccagctggtcatgatcatagttattaataataacagtaatctgcatttctagatcacaactgaccgcaaaagctaccag

SEQ ID NO: 40046 - DNA, 600 bp, Chicken  19866894274435_1
ccagcacctcaccacactctcagtgaaaaatttaccccagtatctaatctaaatcctcctccttttagtttaaaaccattcccccttgtcttgtctacccatgtaggaaattgatttccaacttgtttataagctctctttgagtactggaaggttgcagtgaggactcccaggagccttctccaggctgaacaagcccagctccctcagcctgtgtttgtaggagagattctccagccctttgacccctcgtggtcctcttctggaccccctccagcagctccacatctttctggtacyggataaaattttagatatgctgtcatagtttcccttgcataaaaatccttaaatctcagrgaagtttttcagcagccttgtttaacccaccagctgtgcaagagttatgcagagacttagcacatcattgtttaagaactggcagtcttgtgcagcacaacacagcccgagcttctggacataccataaacccgtctcagtgatactcagccgttattgtctactgggtcatgcacattaaatctgtgatgcacacaatgggtagagcatgtctcacggtgcagtgataaaatccagaca

SEQ ID NO: 40047 - DNA, 600 bp, Chicken  19866894274435_2
ccttttagtttaaaaccattcccccttgtcttgtctacccatgtaggaaattgatttccaacttgtttataagctctctttgagtactggaaggttgcagtgaggactcccaggagccttctccaggctgaacaagcccagctccctcagcctgtgtttgtaggagagattctccagccctttgacccctcgtggtcctcttctggaccccctccagcagctccacatctttctggtacyggataaaattttagatatgctgtcatagtttcccttgcataaaaatccttaaatctcagrgaagtttttcagcagccttgtttaacccaccagctgtgcaagagttatgcagagacttagcacatcattgtttaagaactggcagtcttgtgcagcacaacacagcccgagcttctggacataccataaacccgtctcagtgatactcagccgttattgtctactgggtcatgcacattaaatctgtgatgcacacaatgggtagagcatgtctcacggtgcagtgataaaatccagacacccaaggcatctggtatgcttatgttcagtggcataattagcagtaatttcccactgttg

SEQ ID NO: 40048 - DNA, 600 bp, Chicken  19866894274435_3
acccaccagctgtgcaagagttatgcagagacttagcacatcattgtttaagaactggcagtcttgtgcagcacaacacagcccgagcttctggacataccataaacccgtctcagtgatactcagccgttattgtctactgggtcatgcacattaaatctgtgatgcacacaatgggtagagcatgtctcacggtgcagtgataaaatccagacacccaaggcatctggtatgcttatgttcagtggcataattagcagtaatttcccactgttgctaccactactagaatttaaaaakgaaaacgatggaaatggattcatacttacagtcacgaccaaactagtcagactgcagagccaaggacatagaagaacttgaattgtcatagtgtttaatagtaagacagccagaatcagcttgacagataaagaaacctgtattctgccagttgtatacctgattttgtcattaaaaaagctgacgttttgggtaaacagtaatgatcgtgttggtttcctaatcatgttgaatatcgggaatatatttccaaaataagacttacctcatttttaaagttcaaaacaggcaagtgaagtt

SEQ ID NO: 40049 - DNA, 599 bp, Chicken  19866894274442_1
  misc_feature (1)..(43): n is any nucleotide
nnnnnnnnnnnnnnnnnnnnnnnnnnnnnnnnnnnnnnnnnnnaaggttgggagggtgggaagagaaatcttggctgtgccatacggtttccctctagctacccaacctttttgtctgcaaatgactctatcttttgtctctgctgcagctcaggctttcccagccagctgcatgatgagcctaacaagtctcttcagttcttcagctgtgcacagtgctctgagcagcagccagcaacacgcagggtgagcttctgctttgcagggcagtgacttaggaaaaccaggatacagaagtasatacacctttctcatgtttggaaaggggtttgtttgttgttttttaattattattattttttttaatttcagctcccagagtcagaaatttatctgacaaaaataagttttacttgctcaagaaaaacatacccttagcattcccagaagcaaaacaatcaaaactcctctggaggaaaggggaggggaacaygcagaattacctctgataagccttctaaaaatcacaagtttctctaaaagaaatacaaaaaagcaagcagatctcaatattctttttatctaaatactagtgccta

SEQ ID NO: 40050 - DNA, 558 bp, Chicken  19866894274442_2
ttcagttcttcagctgtgcacagtgctctgagcagcagccagcaacacgcagggtgagcttctgctttgcagggcagtgacttaggaaaaccaggatacagaagtasatacacctttctcatgtttggaaaggggtttgtttgttgttttttaattattattattttttttaatttcagctcccagagtcagaaatttatctgacaaaaataagttttacttgctcaagaaaaacatacccttagcattcccagaagcaaaacaatcaaaactcctctggaggaaaggggaggggaacaygcagaattacctctgataagccttctaaaaatcacaagtttctctaaaagaaatacaaaaaagcaagcagatctcaatattctttttatctaaatactagtgcctagacagctgaaaatgggaggtgagtttgtaaagatgggagaggaaaagaggttccatttttgtttgcatgtcaaaaggtacaatttagagggaattacgttgtccactgaaaagcagtgttcatagaataaaacactacattccatttaaatc

SEQ ID NO: 40051 - DNA, 600 bp, Chicken  19866894274445_1
ctctatcgcagaaaagtcatttaggagatgcctccagagcactggctgtatattaattggacacgggaacacttgaaaacaaggactacttctatgtcatctttccagtatcaaagggtcaaccttttttccctcttctcacttgaatatcaaatctatgacaacttattacagtgagaaaaaaagaacttttaaaattaaaaataaggaaggaggtatgggagattgattttccctgacttgccaaaatttctcttttctagtaagctcaagcacagaatattttggaagccttaaaaygtaaaaatacaggaaagctattcaagttattctgcatttttattctagcgctgccttcagtgaaatcatgtacatatccccgtaccactacagttttttataatgtgtatatttttaagtatcatggaagaaaaagaaaacaactataaccacaacatcaacaacaacataatctgctgaatcagatagatcaggaggtagctctaaaccaacccaaacacagcttccctcattgtagtatctgcagtataatcagtggtcttcacaggagatttcatctctttctactgcagcaaacta

SEQ ID NO: 40052 - DNA, 600 bp, Chicken  19866894274446_1
caaggcaaggcaagtccaggccaggcagggcaagtccacgcaaggcagggcaaggctaggcaaggcaaggcaatgcaagtccagtccagggcaagtccaggcaatacaaggcaaggcagggctaggccaagccaggctaggcagggctaggcaaggacaagcaaggaaaggcaataccaggcaaggccaggcaaggcaaggcaagaaaaggcatgtccaggcaatacgaggcaagtccaggcaaggcaaggaaagtccaggccatgcaggacaagtccaagcaaggcaaggtacttccargcaagacaaggcaagaccaggccaggcagggccaggcaaggccaagcaaggctaggcaagtccaggaaaggacaaaccaggccatgccaggcagggccagtcaaggccaagcaaggccaggcaagaaaaggcatgtccagtccaggcagggccaggcaagtccaagcaaggctaggcaagtccaggaaaggacaaaccaggccatgccaggcagggccagtcaaggccaagcaaggccaggcaagaaaaggcatgtccagtccaggcagggcaaggcaaggcaaggcaaggcaaggcaag

SEQ ID NO: 40053 - DNA, 600 bp, Chicken  19866894274448_1
tgagggtgccccatccctggaggtgcccaagggcacggatggggccctgggcagcccgagcagggaaggcacagctcagccccatttcatgcatttcaccccatgagctgctccctttcaggctgtggtcctgcgccccgagtgcagctgaggagcaggaggaggagggagaagagcaggagaagaagatggaagaggaggaggaggtggaggagagcgcagggtgagtgagtgctgcacaggggccggagagcagcgtgcaagcagcggtcggctcagatgcgtgcgtgatgctttggmggagggtgatttgggggctgctttgggaggatgctctcggggcrcgcggccatgaggacgctttcgcaatccgtctcgttgccgggtttgctgctgacgcgctcctggtgctgcgcgcatctcctggagacggcagctccggctccgcagccaccgtagcaacagcgcccgcagcgctgggctgcgcccgaccccggggcacggcgctgccgccggctccgttgcttcctgcgatcgggaccagtgggagcaggtcggagccgggtgcagagacagcgagtgctgccgaggaacagtarg

SEQ ID NO: 40054 - DNA, 600 bp, Chicken  19866894274448_2
ccctgggcagcccgagcagggaaggcacagctcagccccatttcatgcatttcaccccatgagctgctccctttcaggctgtggtcctgcgccccgagtgcagctgaggagcaggaggaggagggagaagagcaggagaagaagatggaagaggaggaggaggtggaggagagcgcagggtgagtgagtgctgcacaggggccggagagcagcgtgcaagcagcggtcggctcagatgcgtgcgtgatgctttggmggagggtgatttgggggctgctttgggaggatgctctcggggcrcgcggccatgaggacgctttcgcaatccgtctcgttgccgggtttgctgctgacgcgctcctggtgctgcgcgcatctcctggagacggcagctccggctccgcagccaccgtagcaacagcgcccgcagcgctgggctgcgcccgaccccggggcacggcgctgccgccggctccgttgcttcctgcgatcgggaccagtgggagcaggtcggagccgggtgcagagacagcgagtgctgccgaggaacagtargtgcgtttttgcttcttttcctgctgcagaaaacagccattgcgg

SEQ ID NO: 40055 - DNA, 438 bp, Chicken  19866894274448_3
mggagggtgatttgggggctgctttgggaggatgctctcggggcrcgcggccatgaggacgctttcgcaatccgtctcgttgccgggtttgctgctgacgcgctcctggtgctgcgcgcatctcctggagacggcagctccggctccgcagccaccgtagcaacagcgcccgcagcgctgggctgcgcccgaccccggggcacggcgctgccgccggctccgttgcttcctgcgatcgggaccagtgggagcaggtcggagccgggtgcagagacagcgagtgctgccgaggaacagtargtgcgtttttgcttcttttcctgctgcagaaaacagccattgcgggcagcagcttcggagcagggggtatttaaagggatcttcctgctcggttcgtggtttgctgtgatttcacacggcgagatatccaacccggta

SEQ ID NO: 40056 - DNA, 600 bp, Chicken  19866894274451_1
tttcaatcaaatcaaccaaggaagcctattttcaagaattaaaaaaataacaacaaattaaagatatgatttttttttccttttctagaagttatgagtgagttacacaacagttattcactttccagttctcaaccagaagccacaaataaaatcaagtgtttgtttggtaggtcttgagaaagtagggacaatctttacgtacaatccattccattaccagtctggagaggctcattctctaaaagcctgacttcttaaggggtactaagaacactcaattgtaacagaaacactgcrcataggaaaggaagcttaatatacttactctgttctccagtgccaaaactggactgttgagactcctaagggaataaaagatcacaggagatttttcaaagggaagtttaacatatcaaaaatcatgccataatcaagctattgttctgactttaaaggatagcacctatcctttaaaaaaaacacaacacaacamaaccaacacctactcccaaagaaaaamcaacatgccaaaaacaaaacccagcagtaacaaccaacaagaagcagggagccttgatctgggcccaagctgccttc

SEQ ID NO: 40057 - DNA, 600 bp, Chicken  19866894274451_2
tttacgtacaatccattccattaccagtctggagaggctcattctctaaaagcctgacttcttaaggggtactaagaacactcaattgtaacagaaacactgcrcataggaaaggaagcttaatatacttactctgttctccagtgccaaaactggactgttgagactcctaagggaataaaagatcacaggagatttttcaaagggaagtttaacatatcaaaaatcatgccataatcaagctattgttctgactttaaaggatagcacctatcctttaaaaaaaacacaacacaacamaaccaacacctactcccaaagaaaaamcaacatgccaaaaacaaaacccagcagtaacaaccaacaagaagcagggagccttgatctgggcccaagctgccttcaccagctgcgacagagcagtgagcacatgggaagagcacctgagattcctcatccttagctcatctgtcccattgacccatctgtccctgcttgcttgccttgaagatgggccacgtgccattttcatacacagcacctgaacctgcagaaactctgtgtaactcctgcaaaccctatcttccctttctcaccttc

SEQ ID NO: 40058 - DNA, 600 bp, Chicken  19866894274451_3
tctggagaggctcattctctaaaagcctgacttcttaaggggtactaagaacactcaattgtaacagaaacactgcrcataggaaaggaagcttaatatacttactctgttctccagtgccaaaactggactgttgagactcctaagggaataaaagatcacaggagatttttcaaagggaagtttaacatatcaaaaatcatgccataatcaagctattgttctgactttaaaggatagcacctatcctttaaaaaaaacacaacacaacamaaccaacacctactcccaaagaaaaamcaacatgccaaaaacaaaacccagcagtaacaaccaacaagaagcagggagccttgatctgggcccaagctgccttcaccagctgcgacagagcagtgagcacatgggaagagcacctgagattcctcatccttagctcatctgtcccattgacccatctgtccctgcttgcttgccttgaagatgggccacgtgccattttcatacacagcacctgaacctgcagaaactctgtgtaactcctgcaaaccctatcttccctttctcaccttcacccctctgtcggatcaacagccaaat

SEQ ID NO: 40059 - DNA, 600 bp, Chicken  19866894274456_1
tccaggctctgtccttagcccaagatacacagcatactttggatatcctgttatgcttttctgagtactgagacacataatcccattattcagaatatctccaataatcccattgtctccagagccgtgatctgatccttcatgctgtattttggcttaaatgcacccagtcccaggagaccagggagacgtgacagacatgtaaaatgagtcacataggtcagttttgatctatcttctaaaatgctatcactgcttattaaaaagtgcatgaagaaaaaataaataaatccaaaacaraaataatattctgcttcaatttgtttgactttacagagtgttatatcaggtttgattaggctcatggtctaccttttgagcaacagattgcctctagtgcagctatgctccagtgatgctgtctggtcctgccattaactccattcttgcaaatatgctgtgagaatattctacacctccagtgtttcaggcttcttgttacatttaaaagagcttgtcttagtctctgcaaattccttttaaatataactgttttggggtttttttttgccttgtcccatttgccagtcttattcttgg

SEQ ID NO: 40060 - DNA, 600 bp, Chicken  19866894274458_1
gatgccagatagctcagctcagctggttattaggaatctactttccagctttctttctccagtcactgcctttcctgctaagcattctcttcatgaaatgatgcaaataaaacttctccagccatctccttactggcctcttggtggtagtcttaacacagcatattcactgtctgtgctggcagcctttaaccaaaggcatcaatcccatcccagtctaagagaactaatgttttaaagtagatactaaatatatacaaattttatttacaaaagcaagacatttaaaggattttccaragatacagaagctctgcatcactgatccatgctgacctacttcagagcttcacctgttaagcaaagctcagtgctgaaatctgtcagatatccctgaagcacaggtatttgagtccagtgtgtacaaagaggcagcaaaagcaaaatgtacagggaggttgtcatttgcatacagaaggttttctagtactcaagaaaaaaaagagttttggcacagggatttgctcaagtgagttcactgacaggttgaactcaatgtcccctttctaatgaaagaagacaggatacccaaatggccaa

SEQ ID NO: 40061 - DNA, 599 bp, Chicken  19866894274459_1
  misc_feature (1)..(46): n is any nucleotide
nnnnnnnnnnnnnnnnnnnnnnnnnnnnnnnnnnnnnnnnnnnnnncaccgagggcctcgaagtggctccagtactggaagatggtgacctgctcaccctgggtgccaccgggtcgccgtggcagccgccggttcagcacatcttccaccagcttcacacatactgtgggaaaataacggggtcagggcatgcagcacctcgtagggtcggagattcccttgttgcacgcccacacctgcacaccctcacctgcatcagccagtcctgggtgccgctcactgatgggtgctgcgtactgmgcactgagcacttgcaggaaccgctccacggggcaggtgtagatgttgggcagctccacgcagtggtcccaaaggggcagcaccccttctttccgtgttgagaactgcaccactgcggggacaggcggtgtcaagctgcacatccagctggcacatccctcccgtgcagccccttgctgcccttacctccggcagcagagcccgctgcttccgaccgctcctccatcagttggcacacgatctccagcacctgcgcctcccgcagcagcctgtccagggcgaacatctcccggcacctc

SEQ ID NO: 40062 - DNA, 600 bp, Chicken  19866894274459_2
tcccaaaggggcagcaccccttctttccgtgttgagaactgcaccactgcggggacaggcggtgtcaagctgcacatccagctggcacatccctcccgtgcagccccttgctgcccttacctccggcagcagagcccgctgcttccgaccgctcctccatcagttggcacacgatctccagcacctgcgcctcccgcagcagcctgtccagggcgaacatctcccggcacctcagaggcccaaaggtgcccaggttctgtgaggcacaggtatgccagtgaccttaaggacagcacagcrcccagaccccagcacagccacagcaaggcatctcggagggtcttaggggggccagaaactgcgaggagccatggccagccccaggatgtgtcccactattgcatcccactccctgcagggagccttggccaaccccaccacgtgtccccgcatcgtgtcccagtccccagtctcaccagcagcaggtggttgcagttgtggaggtgaagcaccagggccttatccaggaactcactgccggtgctcatggggtccgcgctgccctcagagccgctgcacgttccagtgtcatccgctccc

SEQ ID NO: 40063 - DNA, 578 bp, Chicken  19866894274461_1
attagttatttgctctgtgaagtagttctggaatagccagggttaaaactgaatttagctcactagtttagggatgaggagaagttacattcatcacaactgtgagtactattcagagtttctagaagaaaataaagaattcaacacaatgactgaatgacctatatggtcatttttacctatatggtaaagaataattctgtcacaaattaaaaataagctaagaaatatgagaaaagtaaaagtaaattgcagtaagtcaaaatacacagtaactaatgctgagtcattctatggcaraatcaacacaagttcctgaacttcttaataatgtgaatgaaatatcaatagaggctgcatgatttgttagtatcaataaattaaactcacaagttagtgaaggtgtgggagtcctatggatatctaaagagagaaaacaggacataaagtattattaaaaaaaatggaaaactgaatatcaggtgtttcaatttatcatttgtcattccagcaaacccataatgacctcaataatataaaattttagagcatttacaaaaagggaaaaaattatttga

SEQ ID NO: 40064 - DNA, 599 bp, Chicken  19866894274463_1
  misc_feature (1)..(69): n is any nucleotide
nnnnnnnnnnnnnnnnnnnnnnnnnnnnnnnnnnnnnnnnnnnnnnnnnnnnnnnnnnnnnnnnnnnnnacctttttgcacgtttgtgttgtgttcacgaaaggtacatccagaaggcaagatgctctgatttaaggatgcttatgatctcactgagatcagtaaatgtggggtttggagctagcatggcatttcaggctctgtgttgctctgagatcagttctattttaagtgtgatacttctgaatcttccttaataggaccataagctacaggataagtgtgatatgcagaactgarctcttgtgtaagtctgttgcttgatttattgctcttctgaaattatcccaagctgtttataaagtgaataaactgactaaagaaaagtagagtaaacaaaatcggtgaaaatccggatgtggcatgaatgctttagctagctttgattccaagaaagcactgtctaaaatcaagttccttggtactgaagctttactgagcaatgaagtccagggaattgacggaactcatatttaaaaacgctgtatacaaagaagtgtttcactgtctgtgtgtttctaatttcctgtatatttgta

SEQ ID NO: 40065 - DNA, 600 bp, Chicken  19866894274464_1
cttgcatcagatatgaaatcatgactgggaacatatgaaaatttcaaaatcccaaaaaggaagtcatagagaaggcatttcaagtacatcatcatgtaaattgaaaatatttaccagtttgtagcatattgcaaacgctagtaaataggtttctttgttgaaaggtattccttgttttttcatttctgctaggacttccaaggcacctgccaaaaacacagtcgtgttactcacttcagaaattgaatgctgtatgtttaatgacttgaaaaaacctcagcactatgagtgctcaggaamtttacttcaaaaccagagtgcaaattgacatctattaactttttacaaattaacacatttcaagaaccttaacagaggatcaattggatgagatactgcttctgagaaaggaagctttcagtctgcactagcacctgacttcactattctactattttcacacaaacttaaaacaaacatcaggatacttgacaaagccactttttttcttcctaacagtctagaacaaagacaaattacacaataaaaccttcaactattttcaaccaaaagctcctcactaaagcataaccttcatta

SEQ ID NO: 40066 - DNA, 600 bp, Chicken  19866894274482_1
tgaatcatatatatattaatgaactagaaaggttcagcacatatcaccatacaggatcagctgtcttcagagcaaaatgaaaagtaccattttatcccaaagttcacagggcaaagacaacggaattactaaatgagaagcacctcatttagaagaaaactgtaaacctacaccaaactgaacaccctaaacccaggcagagcatctagactaaaggcttagccgttaacttaccagtttctcctctttaaattactgttttatttatgtcacaaagtgaatcttaatagattttttttycccctccattcagtgcagcctcaacaacaaatgaaatggatacgggaattgtgccaaaacaatgctgaccagaaaaaaaatctacagtcttcacagtgcaatgacaatrgatgctttaagttacttcttacattaaaaagaaacagtagatgaaaagaacactaggcacccctaaagagtcatttagaaattataaaacctgaatgaaatgccccaggaaacacaagtgtctgyacgaaccaagataacttaacaccttaccttaatacctacttttcatgtttccgtaacagtttataa

SEQ ID NO: 40067 - DNA, 600 bp, Chicken  19866894274482_2
ggcaaagacaacggaattactaaatgagaagcacctcatttagaagaaaactgtaaacctacaccaaactgaacaccctaaacccaggcagagcatctagactaaaggcttagccgttaacttaccagtttctcctctttaaattactgttttatttatgtcacaaagtgaatcttaatagattttttttycccctccattcagtgcagcctcaacaacaaatgaaatggatacgggaattgtgccaaaacaatgctgaccagaaaaaaaatctacagtcttcacagtgcaatgacaatrgatgctttaagttacttcttacattaaaaagaaacagtagatgaaaagaacactaggcacccctaaagagtcatttagaaattataaaacctgaatgaaatgccccaggaaacacaagtgtctgyacgaaccaagataacttaacaccttaccttaatacctacttttcatgtttccgtaacagtttataacagtaaaatattgtgtggaaggaatatggacttcattttaaaatacggtatcatcaaaaaaaaatcatgcaaatgcataaacatgatataatgtttggtgatgcaaata

SEQ ID NO: 40068 - DNA, 600 bp, Chicken  19866894274482_3
cagtttctcctctttaaattactgttttatttatgtcacaaagtgaatcttaatagattttttttycccctccattcagtgcagcctcaacaacaaatgaaatggatacgggaattgtgccaaaacaatgctgaccagaaaaaaaatctacagtcttcacagtgcaatgacaatrgatgctttaagttacttcttacattaaaaagaaacagtagatgaaaagaacactaggcacccctaaagagtcatttagaaattataaaacctgaatgaaatgccccaggaaacacaagtgtctgyacgaaccaagataacttaacaccttaccttaatacctacttttcatgtttccgtaacagtttataacagtaaaatattgtgtggaaggaatatggacttcattttaaaatacggtatcatcaaaaaaaaatcatgcaaatgcataaacatgatataatgtttggtgatgcaaataacatgtgttggtacaaatactgtatgctataatcttaacactttgagttaaaaccataaaagacaagatcaaaccgtcatcatctgggactcatgacaagcacacgctcacaaatactgtctaac

SEQ ID NO: 40069 - DNA, 600 bp, Chicken  19866894274489_1
gttgtcttccacaccaacatcttgcctcttgcccgttacctcagaaaaccacaccaaaacaacacacactatccgtaactttgaggcagcagagttcagagagtgcagccgtaactttgagtgaacagtcatcagcactgatggggaaaaagaaaacaggctttggggatacgagaagtagctcacgtgccccaaaacccaactatcctacctgcatctcttggcccagtccaagctaacacttctctttccaaaaatgcacctttctcctgtctttaacctgctccccatctgtattayctctaacttaaacagccttcagaaatggagaattctgcttgaacgcaaagacactgggaatactgaccacagtcctgggacagcaggctgttcaagtaagggatgctgatcctcttcagctcatccagcttctccttcagcttcctgacttggctgtctgagcggctgatcctctgcctcaacagtttcaactccccgttcttcttctctacctgttcacgcaagcagcacacctggcttttgctttgcctggaggagaaacagtacgagtggagggagtcgatgagcttgcaggctccc

SEQ ID NO: 40070 - DNA, 600 bp, Chicken  19866894274489_2
atgctgatcctcttcagctcatccagcttctccttcagcttcctgacttggctgtctgagcggctgatcctctgcctcaacagtttcaactccccgttcttcttctctacctgttcacgcaagcagcacacctggcttttgctttgcctggaggagaaacagtacgagtggagggagtcgatgagcttgcaggctcccgaggccgacatgatgacttcgttgatggacatggggttggcatccgtgtctcccttccgtcccaccacggcctcggcggcaggctgaggggtcaggtctgcyggggacgctgacaaactctgggaaggtttctgaggggtcgcagtgagggaggaagtaggggagtcttccrctacagtcttatcatgtccygtgagattrctactgcagcttggttccacatctctctttggccttttcctttctagctgctcttttgggaaagacggcctctctctggtatgcttagaggaaaagctgtaggagtgaagggagccgatgaacttgcaagcaccagaggcaggaggcgtgaaatcgtccaccgaaatgccgctcctgtccgccacccagctcccygtccag

SEQ ID NO: 40071 - DNA, 600 bp, Chicken  19866894274489_3
tctgcctcaacagtttcaactccccgttcttcttctctacctgttcacgcaagcagcacacctggcttttgctttgcctggaggagaaacagtacgagtggagggagtcgatgagcttgcaggctcccgaggccgacatgatgacttcgttgatggacatggggttggcatccgtgtctcccttccgtcccaccacggcctcggcggcaggctgaggggtcaggtctgcyggggacgctgacaaactctgggaaggtttctgaggggtcgcagtgagggaggaagtaggggagtcttccrctacagtcttatcatgtccygtgagattrctactgcagcttggttccacatctctctttggccttttcctttctagctgctcttttgggaaagacggcctctctctggtatgcttagaggaaaagctgtaggagtgaagggagccgatgaacttgcaagcaccagaggcaggaggcgtgaaatcgtccaccgaaatgccgctcctgtccgccacccagctcccygtccaggagcccttaggacagccctccgcagaagatctgtcggacttcttctgagggccgggctttgcaactaagc

SEQ ID NO: 40072 - DNA, 600 bp, Chicken  19866894274489_4
tccccgttcttcttctctacctgttcacgcaagcagcacacctggcttttgctttgcctggaggagaaacagtacgagtggagggagtcgatgagcttgcaggctcccgaggccgacatgatgacttcgttgatggacatggggttggcatccgtgtctcccttccgtcccaccacggcctcggcggcaggctgaggggtcaggtctgcyggggacgctgacaaactctgggaaggtttctgaggggtcgcagtgagggaggaagtaggggagtcttccrctacagtcttatcatgtccygtgagattrctactgcagcttggttccacatctctctttggccttttcctttctagctgctcttttgggaaagacggcctctctctggtatgcttagaggaaaagctgtaggagtgaagggagccgatgaacttgcaagcaccagaggcaggaggcgtgaaatcgtccaccgaaatgccgctcctgtccgccacccagctcccygtccaggagcccttaggacagccctccgcagaagatctgtcggacttcttctgagggccgggctttgcaactaagctatcgcctaacgtccttctc

SEQ ID NO: 40073 - DNA, 600 bp, Chicken  19866894274489_5
ttcttctctacctgttcacgcaagcagcacacctggcttttgctttgcctggaggagaaacagtacgagtggagggagtcgatgagcttgcaggctcccgaggccgacatgatgacttcgttgatggacatggggttggcatccgtgtctcccttccgtcccaccacggcctcggcggcaggctgaggggtcaggtctgcyggggacgctgacaaactctgggaaggtttctgaggggtcgcagtgagggaggaagtaggggagtcttccrctacagtcttatcatgtccygtgagattrctactgcagcttggttccacatctctctttggccttttcctttctagctgctcttttgggaaagacggcctctctctggtatgcttagaggaaaagctgtaggagtgaagggagccgatgaacttgcaagcaccagaggcaggaggcgtgaaatcgtccaccgaaatgccgctcctgtccgccacccagctcccygtccaggagcccttaggacagccctccgcagaagatctgtcggacttcttctgagggccgggctttgcaactaagctatcgcctaacgtccttctccgggggcct

SEQ ID NO: 40074 - DNA, 600 bp, Chicken  19866894274489_6
tctgcyggggacgctgacaaactctgggaaggtttctgaggggtcgcagtgagggaggaagtaggggagtcttccrctacagtcttatcatgtccygtgagattrctactgcagcttggttccacatctctctttggccttttcctttctagctgctcttttgggaaagacggcctctctctggtatgcttagaggaaaagctgtaggagtgaagggagccgatgaacttgcaagcaccagaggcaggaggcgtgaaatcgtccaccgaaatgccgctcctgtccgccacccagctcccygtccaggagcccttaggacagccctccgcagaagatctgtcggacttcttctgagggccgggctttgcaactaagctatcgcctaacgtccttctccgggggccttccagctggccatggagatgctcttcctcctcagacatcgacccgatctccgcttgcagagtcacctcctccatctcgtccgtcccctgcatcaccataaggtcctgctcgggagatgaggtcctctggactacctcacagcctccttccctcgggccctccccatcctgcagcgggacctggctggctattttc

SEQ ID NO: 40075 - DNA, 599 bp, Chicken  19866894274490_1
  misc_feature (1)..(158): n is any nucleotide
nnnnnnnnnnnnnnnnnnnnnnnnnnnnnnnnnnnnnnnnnnnnnnnnnnnnnnnnnnnnnnnnnnnnnnnnnnnnnnnnnnnnnnnnnnnnnnnnnnnnnnnnnnnnnnnnnnnnnnnnnnnnnnnnnnnnnnnnnnnnnnnnnnnnnnnnnnnnnncctgtgtgtaacatgcaactatgaaatgagaatcccaacccttttaaactgccttattttctgcatatacagaagttgacaacaccatcagtttctctgcacaatgtcaggcatatttttctaccttggaagttgtacttaygctaacagatgcagcaacatgcaccattttctctgcttttctcagcaatggcgtgactgacatattttataattctactccacagagtagcagatggtgcctaccctttcttatcctgtacaggacttggtatttcttctctgtcagtcatgagacatgatttttatttttgctggctgcacaagccatgaaatttcatacaacagtagttacttctcctgccaatctcatgtctcttgaggcccaggcttaacaaaatccctcaactcatgggatgacttgtgtgccagttctggcaa

SEQ ID NO: 40076 - DNA, 600 bp, Chicken  19866894274490_2
ataattctactccacagagtagcagatggtgcctaccctttcttatcctgtacaggacttggtatttcttctctgtcagtcatgagacatgatttttatttttgctggctgcacaagccatgaaatttcatacaacagtagttacttctcctgccaatctcatgtctcttgaggcccaggcttaacaaaatccctcaactcatgggatgacttgtgtgccagttctggcaagcactgaatgatcactgactagtactcttcagaaggactgtcttaaagtgtgtgcaaattaaaggcagwggcatgccatagcaattcaacacaaagattaatcactctcattatcactagagcaaatgtatctattagcagaaggactgataatgccagagcacaatctcttaagcatgtgaatggtcatccaccctttctgctccactttgatatgagatgacagtcccagagcacattaagacactacagtactcaacacactgtacctctcagtaaaggttgctcctttgggttcgaaatcatgctcaaacagctatgctcagtggaactgctacttgctagcatgaaaaatatgcccaacaactc

SEQ ID NO: 40077 - DNA, 600 bp, Chicken  19866894274491_1
tcagtttcatagctgctatgacagcactattgctgcaacacagaacctaccacctcactgtggtgatagccactgtttgatctccataaaagttccatcagcattgacgaatgtcaacgggtgccattttttccacatagagtaactcagtgacacacctcagtgacatgcctgtgtttcgtacacgcttccatgtcagacaccgttctgtcagactgcccctctgctgccatctatcacacagcaacaaaacataacagaatattgtcagtaaggttcaatctctgcagctataccacyaacatccacctctaacctcgtaagycaacataataaaatagaaggcgttactttaagagcagacctcatactagaatattgtactaggctgactaccaagcatgcaaactcttctatggctccataaatcaaagtacatcatcatcaaaactatgactgcttctaaaaataagcaatcagaagtacaaagcacatacttgacaactctacaaataacctaattatcttcagtacagtctcaaaggtgacagcacctagaaaataggcattcaagtaaaaaaaaaaaaagaacacagctct

SEQ ID NO: 40078 - DNA, 600 bp, Chicken  19866894274491_2
actattgctgcaacacagaacctaccacctcactgtggtgatagccactgtttgatctccataaaagttccatcagcattgacgaatgtcaacgggtgccattttttccacatagagtaactcagtgacacacctcagtgacatgcctgtgtttcgtacacgcttccatgtcagacaccgttctgtcagactgcccctctgctgccatctatcacacagcaacaaaacataacagaatattgtcagtaaggttcaatctctgcagctataccacyaacatccacctctaacctcgtaagycaacataataaaatagaaggcgttactttaagagcagacctcatactagaatattgtactaggctgactaccaagcatgcaaactcttctatggctccataaatcaaagtacatcatcatcaaaactatgactgcttctaaaaataagcaatcagaagtacaaagcacatacttgacaactctacaaataacctaattatcttcagtacagtctcaaaggtgacagcacctagaaaataggcattcaagtaaaaaaaaaaaaagaacacagctctttcacagttttgttagctcttcaga

SEQ ID NO: 40079 - DNA, 461 bp, Chicken  19866894274492_1
ctctttatcagtcttcttttgctatgaaataaatttttatctttccatgcagtgtgcagcaatgttctcaactgaactgtgaagtataaagaatgtgacattactgttacatctactgaagagctttgacagacctagagcttttcccctctatagcctgtctgcagggctgcacaccttcaagctgcacagctagtttcttaagccttccagaaagtagcctttcaacagcactttcacaacagaaatttgtaaatattcacataatgttgagtttcatttgaatgctgcagtttaagrgagatgacaaaatgagcaattggtccctccagtaagacataaacaatgactacccaacagggacaaatgttaacatgaagtcatggcaccagtgaaccaggagtatattgcttgcaaatggatttattatgaaacagtactactgatagcttcatagatta

SEQ ID NO: 40080 - DNA, 600 bp, Chicken  19866894274495_1
atgaggattttgaacctaaatctcttaccatcaaaggtactctactaatcccccatcttctctgcagtttgtatttatatttgaagtgctgcttctcccagctattcatgttttttccctttgtgtgactagttaaatagacactgaaaaagagactagacctataagtcctacctctcatgtgagcatttcaagttgctcaagtgcaagcctgtcttgcagttcatcatcgtctgtgagaattcttgaagaaaacaacaggctagctcctctaaaggaaatagtcacacattattaaasgttaatctgtttttaaatraaaagttttttgaagactctatggaaggtgagcttatatataaatacaaaacagattcaagcgttacattagactttgatcaaaaacacttttttgggggtgaaaaattcatgtggttatggaaccaacacatctagtcagagracgaataactgacaaggttcaacactcaagaacatgacattaccatgaaatagtttaaataggaggttttagcacaaagcaaagtaatgctccaagtacataacaaggtaagaaaatattatttctatggatctact

SEQ ID NO: 40081 - DNA, 600 bp, Chicken  19866894274495_2
atctcttaccatcaaaggtactctactaatcccccatcttctctgcagtttgtatttatatttgaagtgctgcttctcccagctattcatgttttttccctttgtgtgactagttaaatagacactgaaaaagagactagacctataagtcctacctctcatgtgagcatttcaagttgctcaagtgcaagcctgtcttgcagttcatcatcgtctgtgagaattcttgaagaaaacaacaggctagctcctctaaaggaaatagtcacacattattaaasgttaatctgtttttaaatraaaagttttttgaagactctatggaaggtgagcttatatataaatacaaaacagattcaagcgttacattagactttgatcaaaaacacttttttgggggtgaaaaattcatgtggttatggaaccaacacatctagtcagagracgaataactgacaaggttcaacactcaagaacatgacattaccatgaaatagtttaaataggaggttttagcacaaagcaaagtaatgctccaagtacataacaaggtaagaaaatattatttctatggatctactatcgcaaggatttcatcaa

SEQ ID NO: 40082 - DNA, 600 bp, Chicken  19866894274495_3
ataagtcctacctctcatgtgagcatttcaagttgctcaagtgcaagcctgtcttgcagttcatcatcgtctgtgagaattcttgaagaaaacaacaggctagctcctctaaaggaaatagtcacacattattaaasgttaatctgtttttaaatraaaagttttttgaagactctatggaaggtgagcttatatataaatacaaaacagattcaagcgttacattagactttgatcaaaaacacttttttgggggtgaaaaattcatgtggttatggaaccaacacatctagtcagagracgaataactgacaaggttcaacactcaagaacatgacattaccatgaaatagtttaaataggaggttttagcacaaagcaaagtaatgctccaagtacataacaaggtaagaaaatattatttctatggatctactatcgcaaggatttcatcaaatccttcaattacataactcaatttttcttcttttctattctaatttagtctttaaggcctttaagattttcaaaatcttactaaggcaggctcacaaagcagcagagccagtctctgtagcacacaaagtgggtatcagcaag

SEQ ID NO: 40083 - DNA, 600 bp, Chicken  19866894274499_1
ggaagcaggagacagagaagggaaagcaggtgtagcctgcacttcgtatgagctctgcagtaagctggattcaaattctgcagaaagcacttcacttggagaggagaaatttgcaactatttgaagttagaagatgggagagagaaggaaaaacactatatagttttatatgttgctcaccagagtctttataccaactgcccacctcaatcatctaatttaagtcatcttacgcttaaaagatggtccctatgtctagcagtgctcccacagccatgtgaaagtcttcaaagttgttcrgtgtgtgtgcacagccgtacatctattgccagtatatggacttagattttgcttgaggccaaaatctcaacacactcaacattaagcctgcctgagaatctccagtaatggcagattcaatacctgcagattctcatgttcagggctttgtgatgtagtccaaaastagcagccatggacatggagtccctgcatagctgtacctccacccctgccaaatgtctatgtactgcagaactgagctatttgtggagggttaatgcattttcttgtgcatgtaggtaaaggaggtggatcact

SEQ ID NO: 40084 - DNA, 600 bp, Chicken  19866894274499_2
gaagcaggagacagagaagggaaagcaggtgtagcctgcacttcgtatgagctctgcagtaagctggattcaaattctgcagaaagcacttcacttggagaggagaaatttgcaactatttgaagttagaagatgggagagagaaggaaaaacactatatagttttatatgttgctcaccagagtctttataccaactgcccacctcaatcatctaatttaagtcatcttacgcttaaaagatggtccctatgtctagcagtgctcccacagccatgtgaaagtcttcaaagttgttctrtgtgtgtgcacagccgtacatctattgccagtatatggacttagattttgcttgaggccaaaatctcaacacactcaacattaagcctgcctgagaatctccagtaatggcagattcaatacctgcagattctcatgttcagggctttgtgatgtagtccaaaastagcagccatggacatggagtccctgcatagctgtacctccacccctgccaaatgtctatgtactgcagaactgagctatttgtggagggttaatgcattttcttgtgcatgtaggtaaaggaggtggatcactc

SEQ ID NO: 40085 - DNA, 600 bp, Chicken  19866894274499_3
tatatgttgctcaccagagtctttataccaactgcccacctcaatcatctaatttaagtcatcttacgcttaaaagatggtccctatgtctagcagtgctcccacagccatgtgaaagtcttcaaagttgttctgtgtgtgtgcacagccgtacatctattgccagtatatggacttagattttgcttgaggccaaaatctcaacacactcaacattaagcctgcctgagaatctccagtaatggcagattcaatacctgcagattctcatgttcagggctttgtgatgtagtccaaaastagcagccatggacatggagtccctgcatagctgtacctccacccctgccaaatgtctatgtactgcagaactgagctatttgtggagggttaatgcattttcttgtgcatgtaggtaaaggaggtggatcactcatcactgaacactgaacacaactgaactgttgtctctgaacagttattaccctcaagtaccatgtgtaggatttactggcataaaccagtaagcaccaggtttcttgcaacatttatgttcacttattcataaagctgagcctcctctgaacaggattactttac

SEQ ID NO: 40086 - DNA, 600 bp, Chicken  19866894274499_4
tcaaatactgtgtctgatttttaaaagggttggataattttatgaccattaataacatttgcagttctgcaagctcagacaaggtaatcaaatgtcatgcttcagagtgtaggctgattgccatgtaggtcaggaggaatattttcaccagtacacattactgcataaaataaactcataaataaagttcaataaatgaaaaacttaatggcagcaaactttaccttctttatttaagtgtgagctgtattcagctatgaaataaaacaaatcatagaatcatggaattgctaaggttgkaaaagacccacaggatcatccagtccaaccattcgcytttcatcaacagttcttgctaaaccatgtccctcaacacaacatccaaatgtcctttgaacaccaccacctctctgggcagcccattccagtgcctgaccaccctttcagagaagtagtaaaagaatcatagaatcatagaatgtcctgagttggaggggacccataaagaccatcaagtctgactcttggctcttccacccagaacatcaggccatatgactgacagcattttccatacactccttgacctccagcagcttg

SEQ ID NO: 40087 - DNA, 600 bp, Chicken  19866894274499_5
ttttatgaccattaataacatttgcagttctgcaagctcagacaaggtaatcaaatgtcatgcttcagagtgtaggctgattgccatgtaggtcaggaggaatattttcaccagtacacattactgcataaaataaactcataaataaagttcaataaatgaaaaacttaatggcagcaaactttaccttctttatttaagtgtgagctgtattcagctatgaaataaaacaaatcatagaatcatggaattgctaaggttgkaaaagacccacaggatcatccagtccaaccattcgcytttcatcaacagttcttgctaaaccatgtccctcaacacaacatccaaatgtcctttgaacaccaccacctctctgggcagcccattccagtgcctgaccaccctttcagagaagtagtaaaagaatcatagaatcatagaatgtcctgagttggaggggacccataaagaccatcaagtctgactcttggctcttccacccagaacatcaggccatatgactgacagcattttccatacactccttgacctccagcagcttgtggctatgcctgctgccctggagaagctgctctgtgc

SEQ ID NO: 40088 - DNA, 600 bp, Chicken  19866894274503_1
ttttgttatgtgctcttatatccacagacacgtgcatatggtacatgtgtctaaatcactactgatttgtgattcatatggtatgaaacttctacataagcaatataacttttcctttcgttctgatttctcaaaacaacaaggcatctttcactggaagttcagatctgcttttagtacactgatccgtacaagcacttctgataacagaagatgagctggtgagtttgatttatcttcacatgcatcaggaaaatacactgctcactgcattcataggatgcttagcagcatatcacrtatgacatgataacactgcttatatcactccccacactcatcatttggcttcaagacaataacttcctaaatcacctttcactgattgtttatatctgtttgctctcccaattactcttagaagaaagccagaaaggtgagattccataacaggatatttttcatccatgagatgagaacgttcacttctgcagtaacgtagaagagctcttgtccaacctttccttcagaaggttgaacatcctgtcatctacctttctgactttgcaaacacagcagtgaggattttaggatcatttc

SEQ ID NO: 40089 - DNA, 600 bp, Chicken  19866894274511_1
agaagccacgggggcttggcaaagctgacgagagcctgctgcccagccagccccagggacaggctggtgacagccccgagtttgtggggtgcagccccggaacgggcttcctgtgccgcagcgccgagctgggctatgacccggactcctcctgttcagggggagaggaggatgaggaagaggaggacgatgggatggacactgcggagaggaagatgggctctgtgttgtgaagaggttcccgggtgaggagtcggaagcctctcggctggcagacacagactgtgcccatgtgcagcrtgggggctgaggggagcctgcccccccctcctttaacttatgtgtgtttggagtctatttaatgtgtaattattcctgtgtgtatcttggggtttccccacatccctcccctataaagctgttatccggatgcctctgcttttccttaggggatggggttctacatctcctgcccctgtactgcmctgccagtgtcttgcttgggaacagccccggggcccttctttggctgcaaactgccccttcctgatggcagggccatgagcctgccctgttctgcccttcacccgggtggtaggg

SEQ ID NO: 40090 - DNA, 600 bp, Chicken  19866894274511_2
gacgatgggatggacactgcggagaggaagatgggctctgtgttgtgaagaggttcccgggtgaggagtcggaagcctctcggctggcagacacagactgtgcccatgtgcagcrtgggggctgaggggagcctgcccccccctcctttaacttatgtgtgtttggagtctatttaatgtgtaattattcctgtgtgtatcttggggtttccccacatccctcccctataaagctgttatccggatgcctctgcttttccttaggggatggggttctacatctcctgcccctgtactgcmctgccagtgtcttgcttgggaacagccccggggcccttctttggctgcaaactgccccttcctgatggcagggccatgagcctgccctgttctgcccttcacccgggtggtagggaaggagggtgtggggcatgcatycctgttgcttccccagtgtggtctgcagcctgggggcagggcagcaccagcagccctgagggcacccagcctccctgcgttgcaccgtgcttatcccatggtggtgtctgacccactcttatcccatttctgggtccgttctatgatcccctgaggactgtg

SEQ ID NO: 40091 - DNA, 600 bp, Chicken  19866894274511_3
ccccctcctttaacttatgtgtgtttggagtctatttaatgtgtaattattcctgtgtgtatcttggggtttccccacatccctcccctataaagctgttatccggatgcctctgcttttccttaggggatggggttctacatctcctgcccctgtactgcmctgccagtgtcttgcttgggaacagccccggggcccttctttggctgcaaactgccccttcctgatggcagggccatgagcctgccctgttctgcccttcacccgggtggtagggaaggagggtgtggggcatgcatycctgttgcttccccagtgtggtctgcagcctgggggcagggcagcaccagcagccctgagggcacccagcctccctgcgttgcaccgtgcttatcccatggtggtgtctgacccactcttatcccatttctgggtccgttctatgatcccctgaggactgtgcttgttccgtctgggcttggatcaactcacagtaatgggatgataacagccaccctctactgcctccataggagatgctgtgatggcagtgtaggcggaaaaccaggggctgggggcagaggggtgagtgagaggagt

SEQ ID NO: 40092 - DNA, 600 bp, Chicken  19866894274512_1
agcaaagtctttgacactgtctcccacagtattctcctggagaagctgacagcccatggcctggacagatatactctttgatgggtaaaaaactggctggaagggtggtgaaggaagttaaatgcagctggcaaatggtcacagacagcatgccccagggtcagtactgaggcctttcctgttcagtatctctactgataactggatgcaccctcagtaagtttgcagatgacaccaaatttgcaggaagtgtagatctgcctgggggaaggaaggccttacagagcaatctggacaggytggatagctgcactagaccaatgggatgaagtttaacaacaccaagtgccagggcttgcactttggccacaacaaccccaggcaacamtacaggcctagggcagagtggctgaaagactgtgtaaaggaaatggatctgggggtattattggttgatgcttggctgaacatgagccagcagtgtgcccttgtggccaagaaggaaaatggcatcccagggtgcattaaaaagagtatggctaacaggtcgagggaggtgatcctcctcctcctctactatgccccagtgaggactcacat

SEQ ID NO: 40093 - DNA, 600 bp, Chicken  19866894274512_2
aaaactggctggaagggtggtgaaggaagttaaatgcagctggcaaatggtcacagacagcatgccccagggtcagtactgaggcctttcctgttcagtatctctactgataactggatgcaccctcagtaagtttgcagatgacaccaaatttgcaggaagtgtagatctgcctgggggaaggaaggccttacagagcaatctggacaggytggatagctgcactagaccaatgggatgaagtttaacaacaccaagtgccagggcttgcactttggccacaacaaccccaggcaacamtacaggcctagggcagagtggctgaaagactgtgtaaaggaaatggatctgggggtattattggttgatgcttggctgaacatgagccagcagtgtgcccttgtggccaagaaggaaaatggcatcccagggtgcattaaaaagagtatggctaacaggtcgagggaggtgatcctcctcctcctctactatgccccagtgaggactcacatagaatactgagtcaagctctgggctccccagtttaaaaaaaagacagggatttcctagaaggaatccagtggagggccacagagatga

SEQ ID NO: 40094 - DNA, 599 bp, Chicken  19866894274516_1
  misc_feature (1)..(15): n is any nucleotide
nnnnnnnnnnnnnnnagaaagattgctgcaaataaatactgtgatatttgcaaaatgaaatgaaaacacttgagatacaagtcctttgcacactgggctgttattcttccttaatactggaacaatggagctttgttggatctatgccaatgaaggcattaaaaaaatcctcaaatttgtataaagttggttttgtacaaaactccctcctgactgaaacgcaatgttgcaacaatgcagaagtgttttgagagctcagcattttcactttgcatgtagctgaagcacaggaaaacatarggttcttggccatatgaaatgtaagtttwtggtttctattccaagcagcrttactgggaagtctgacatcacactacagattggcatggtcttggggaaatgcctccttaattttccagtgcaacacttggccagaacacttacttgttattcctttcacagttatctcaaagacttttttttttctcttgcagaatttcctacaatgaagcagtggaaattttgaaacaggcttctcaaactttcacttttaagccagaggtgggtagttgcctggttgtttgtccctatacctggtg

SEQ ID NO: 40095 - DNA, 599 bp, Chicken  19866894274516_2
  misc_feature (1)..(7): n is any nucleotide
nnnnnnnagaaagattgctgcaaataaatactgtgatatttgcaaaatgaaatgaaaacacttgagatacaagtcctttgcacactgggctgttattcttccttaatactggaacaatggagctttgttggatctatgccaatgaaggcattaaaaaaatcctcaaatttgtataaagttggttttgtacaaaactccctcctgactgaaacgcaatgttgcaacaatgcagaagtgttttgagagctcagcattttcactttgcatgtagctgaagcacaggaaaacatarggttcttrgccatatgaaatgtaagtttwtggtttctattccaagcagcrttactgggaagtctgacatcacactacagattggcatggtcttggggaaatgcctccttaattttccagtgcaacacttggccagaacacttacttgttattcctttcacagttatctcaaagacttttttttttctcttgcagaatttcctacaatgaagcagtggaaattttgaaacaggcttctcaaactttcacttttaagccagaggtgggtagttgcctggttgtttgtccctatacctggtggtgcacac

SEQ ID NO: 40096 - DNA, 600 bp, Chicken  19866894274516_3
aaataaatactgtgatatttgcaaaatgaaatgaaaacacttgagatacaagtcctttgcacactgggctgttattcttccttaatactggaacaatggagctttgttggatctatgccaatgaaggcattaaaaaaatcctcaaatttgtataaagttggttttgtacaaaactccctcctgactgaaacgcaatgttgcaacaatgcagaagtgttttgagagctcagcattttcactttgcatgtagctgaagcacaggaaaacatarggttcttggccatatgaaatgtaagtttwtggtttctattccaagcagcrttactgggaagtctgacatcacactacagattggcatggtcttggggaaatgcctccttaattttccagtgcaacacttggccagaacacttacttgttattcctttcacagttatctcaaagacttttttttttctcttgcagaatttcctacaatgaagcagtggaaattttgaaacaggcttctcaaactttcacttttaagccagaggtgggtagttgcctggttgtttgtccctatacctggtggtgcacacagccagtctgaacactttaggt

SEQ ID NO: 40097 - DNA, 600 bp, Chicken  19866894274516_4
caaaatgaaatgaaaacacttgagatacaagtcctttgcacactgggctgttattcttccttaatactggaacaatggagctttgttggatctatgccaatgaaggcattaaaaaaatcctcaaatttgtataaagttggttttgtacaaaactccctcctgactgaaacgcaatgttgcaacaatgcagaagtgttttgagagctcagcattttcactttgcatgtagctgaagcacaggaaaacatarggttcttggccatatgaaatgtaagtttwtggtttctattccaagcagcrttactgggaagtctgacatcacactacagattggcatggtcttggggaaatgcctccttaattttccagtgcaacacttggccagaacacttacttgttattcctttcacagttatctcaaagacttttttttttctcttgcagaatttcctacaatgaagcagtggaaattttgaaacaggcttctcaaactttcacttttaagccagaggtgggtagttgcctggttgtttgtccctatacctggtggtgcacacagccagtctgaacactttaggtctcagggacctttccctcttt

SEQ ID NO: 40098 - DNA, 600 bp, Chicken  19866894274517_1
tcagatgctgtcagtgggtaccaattaggatgtcttacactcttgcaggtggcattcacgtgtgtcactcaaagaggaaagtgatttcattaagactaccttataaaatgctcttacatctcacgctaagaacttgatgcaagcttgagaacttacctttgtgaaacgtgattgaggagccctttgaaatggagtggtggttacattttaaagccaggctgctggatttctaacatcgtttcctaaggaggaatgctgcgtgtgttggcagtcctgttgctcctcctataagccatcacrtgctgctgtaatagccacctatctgaaagccagagaggatatccagctgatgcattttggcttttgcagtcctcatgtctttgtgaggagcttgtagtgcttggatgttgacaggcatgaaaggagatgtgtctggcctgcttagggtgagctcttagtttatctcaacctgggtaaagttgctttattgcaagaaagattacattccagccgttcactgatgatccttttacaggcaggctgagggatgaaagcgtacccagcttttctatccatctctccaccaaaccactgcttctt

SEQ ID NO: 40099 - DNA, 600 bp, Chicken  19866894274526_1
ccaggactgcgctctgttctccgtacaagcagactgaagctgagggttaattccctaaatcatcatgcatttattatgctgtgatgatattcatgggagcagccactatagatgcaaagatcctgctggtattagtaggaaccaagcttctgatttgctcaattttgacctagagttttttgattgggggtaaggatgaaaacaaacaggtgtgcttttcatagagtcatcacagaatggctcgagttggaagggatccttaggcaatttggcccacctttcctgcagtgaacagggacrcgtacggcaaaatcacgttgctcagagaactcgtacctgctgtggagcacaggtcctaacatgttcagtccagttctcaattagggcctcacctsgttaggtcagcttgcaggagattcagcaccgcttaatgaaacctctttggatttaccttacagctcgaggtgtaaaatacctgtttcctgtgcaagtgaagacttttcagcccatatatgatggcaaagacctgattgctcaggctcggacaggaactgggaaaacattttcttttgctattccactgactgaaaagcttcagag

SEQ ID NO: 40100 - DNA, 600 bp, Chicken  19866894274526_2
ggagcagccactatagatgcaaagatcctgctggtattagtaggaaccaagcttctgatttgctcaattttgacctagagttttttgattgggggtaaggatgaaaacaaacaggtgtgcttttcatagagtcatcacagaatggctcgagttggaagggatccttaggcaatttggcccacctttcctgcagtgaacagggacrcgtacggcaaaatcacgttgctcagagaactcgtacctgctgtggagcacaggtcctaacatgttcagtccagttctcaattagggcctcacctsgttaggtcagcttgcaggagattcagcaccgcttaatgaaacctctttggatttaccttacagctcgaggtgtaaaatacctgtttcctgtgcaagtgaagacttttcagcccatatatgatggcaaagacctgattgctcaggctcggacaggaactgggaaaacattttcttttgctattccactgactgaaaagcttcagagtgtctcacaagatgagaaaagaggccgttcaccaaaggtaatttattaaaggttaacaccaaaacctttgagtatggcaaagcgggtttttggat

SEQ ID NO: 40101 - DNA, 599 bp, Chicken  19866894274534_1
  misc_feature (1)..(15): n is any nucleotide
nnnnnnnnnnnnnnntggcttagataaaatgtttaaattcagtaagtcacttttagttactttgaatacctaaaatgcagtaaatttaactcaaatataagtttcaaaatgcagtcttttttttttatttcaggtatttcatatcatcaaatgatgataagcaaagagtgcaactgttgcaaatgaccacttagcactactggcaaaatgtgcatatttaaatgcagttatttatacagtttaatatgaggatataggtaacttggagtgaagaacaaatatttttcttcaaaaaataayattacaggaaattataaatatctatctctgtacgatttcttcatacagtgttgtggcactaacagttaaaaaaaaaatctcatttaccaaggaacagaagcaaagaacagtctttccctatgtaacattttggtgagaccactcttataacacttattcacactgcaaagaatgtgtgaagagaaaactcagaacagagccacgtaagtgatcyaaggttaaaaaaaaaaaaagccaaaaatatgggactgaaggtgctccaactagtttatcacaaggaaggtcaaaagtgtaggtat

SEQ ID NO: 40102 - DNA, 600 bp, Chicken  19866894274534_2
tatttaaatgcagttatttatacagtttaatatgaggatataggtaacttggagtgaagaacaaatatttttcttcaaaaaataayattacaggaaattataaatatctatctctgtacgatttcttcatacagtgttgtggcactaacagttaaaaaaaaaatctcatttaccaaggaacagaagcaaagaacagtctttccctatgtaacattttggtgagaccactcttataacacttattcacactgcaaagaatgtgtgaagagaaaactcagaacagagccacgtaagtgatcyaaggttaaaaaaaaaaaaagccaaaaatatgggactgaaggtgctccaactagtttatcacaaggaaggtcaaaagtgtaggtatttacaaatggaaaaaaactataactgagacagctcaaaatatacttcataaaaactttgaaggacctttttacatgcatggaagcrtaaatgaattcttcaagtgtgatcaggcaagctagaaatgaagagttaagggaarggaaaattgtaactggtacgatgcattaaccctaatgtgggaatctaaaactsagatgaagcgtaggctcttta

SEQ ID NO: 40103 - DNA, 600 bp, Chicken  19866894274534_3
accaaggaacagaagcaaagaacagtctttccctatgtaacattttggtgagaccactcttataacacttattcacactgcaaagaatgtgtgaagagaaaactcagaacagagccacgtaagtgatcyaaggttaaaaaaaaaaaaagccaaaaatatgggactgaaggtgctccaactagtttatcacaaggaaggtcaaaagtgtaggtatttacaaatggaaaaaaactataactgagacagctcaaaatatacttcataaaaactttgaaggacctttttacatgcatggaagcrtaaatgaattcttcaagtgtgatcaggcaagctagaaatgaagagttaagggaarggaaaattgtaactggtacgatgcattaaccctaatgtgggaatctaaaactsagatgaagcgtaggctctttagagctaataaagaaccaaacacctttacagaacaatatgtctcatcataattggtgcctgaaattatgtagaatgtatctggtcataggttagcaaaagtgactccygcctacaggaaaggcaggaaggaggatccagggaattacagacctataagtctgacctctgtac

SEQ ID NO: 40104 - DNA, 600 bp, Chicken  19866894274534_4
actcttataacacttattcacactgcaaagaatgtgtgaagagaaaactcagaacagagccacgtaagtgatcyaaggttaaaaaaaaaaaaagccaaaaatatgggactgaaggtgctccaactagtttatcacaaggaaggtcaaaagtgtaggtatttacaaatggaaaaaaactataactgagacagctcaaaatatacttcataaaaactttgaaggacctttttacatgcatggaagcrtaaatgaattcttcaagtgtgatcaggcaagctagaaatgaagagttaagggaarggaaaattgtaactggtacgatgcattaaccctaatgtgggaatctaaaactsagatgaagcgtaggctctttagagctaataaagaaccaaacacctttacagaacaatatgtctcatcataattggtgcctgaaattatgtagaatgtatctggtcataggttagcaaaagtgactccygcctacaggaaaggcaggaaggaggatccagggaattacagacctataagtctgacctctgtaccagggaaggttatggagcagatcatcttgaatgttaccacagggcacatacaaga

SEQ ID NO: 40105 - DNA, 600 bp, Chicken  19866894274534_5
acagagccacgtaagtgatcyaaggttaaaaaaaaaaaaagccaaaaatatgggactgaaggtgctccaactagtttatcacaaggaaggtcaaaagtgtaggtatttacaaatggaaaaaaactataactgagacagctcaaaatatacttcataaaaactttgaaggacctttttacatgcatggaagcrtaaatgaattcttcaagtgtgatcaggcaagctagaaatgaagagttaagggaarggaaaattgtaactggtacgatgcattaaccctaatgtgggaatctaaaactsagatgaagcgtaggctctttagagctaataaagaaccaaacacctttacagaacaatatgtctcatcataattggtgcctgaaattatgtagaatgtatctggtcataggttagcaaaagtgactccygcctacaggaaaggcaggaaggaggatccagggaattacagacctataagtctgacctctgtaccagggaaggttatggagcagatcatcttgaatgttaccacagggcacatacaagacaacggagtgaytggagacagccagcgaatgtttatgaaataaacattctcag

SEQ ID NO: 40106 - DNA, 600 bp, Chicken  19866894274534_6
actgagacagctcaaaatatacttcataaaaactttgaaggacctttttacatgcatggaagcrtaaatgaattcttcaagtgtgatcaggcaagctagaaatgaagagttaagggaarggaaaattgtaactggtacgatgcattaaccctaatgtgggaatctaaaactsagatgaagcgtaggctctttagagctaataaagaaccaaacacctttacagaacaatatgtctcatcataattggtgcctgaaattatgtagaatgtatctggtcataggttagcaaaagtgactccygcctacaggaaaggcaggaaggaggatccagggaattacagacctataagtctgacctctgtaccagggaaggttatggagcagatcatcttgaatgttaccacagggcacatacaagacaacggagtgaytggagacagccagcgaatgtttatgaaataaacattctcaggtcctgcctgaggaacccaatctccttctacaacaagatgatccatttagtagatgagggctatagatgttgttcacctagattttagtaaagtatttgacacttcatcacagcattcttctggagaa

SEQ ID NO: 40107 - DNA, 515 bp, Chicken  19866894274534_7
ctggtacgatgcattaaccctaatgtgggaatctaaaactsagatgaagcgtaggctctttagagctaataaagaaccaaacacctttacagaacaatatgtctcatcataattggtgcctgaaattatgtagaatgtatctggtcataggttagcaaaagtgactccygcctacaggaaaggcaggaaggaggatccagggaattacagacctataagtctgacctctgtaccagggaaggttatggagcagatcatcttgaatgttaccacagggcacatacaagacaacggagtgaytggagacagccagcgaatgtttatgaaataaacattctcaggtcctgcctgaggaacccaatctccttctacaacaagatgatccatttagtagatgagggctatagatgttgttcacctagattttagtaaagtatttgacacttcatcacagcattcttctggagaaactgactrtttgtggcttggacagatgtgtagtttgcagggtaaag

SEQ ID NO: 40108 - DNA, 338 bp, Chicken  19866894274534_8
gaaaggcaggaaggaggatccagggaattacagacctataagtctgacctctgtaccagggaaggttatggagcagatcatcttgaatgttaccacagggcacatacaagacaacggagtgaytggagacagccagcgaatgtttatgaaataaacattctcaggtcctgcctgaggaacccaatctccttctacaacaagatgatccatttagtagatgagggctatagatgttgttcacctagattttagtaaagtatttgacacttcatcacagcattcttctggagaaactgactrtttgtggcttggacagatgtgtagtttgcagggtaaag

SEQ ID NO: 40109 - DNA, 600 bp, Chicken  19866894274538_1
cctgaaattcatactccaatacacacaaaagtaagagtacccgaaaagatatttccagattttctcctccccagatgtccatgccactgtcatactgtccaagctcattaaagtactcacggtccatggcaaacaggcctccagccatagtgggtgatctaaaatggaacagtgaaagctggtcagtattttaaacaagatgactgatttcagctgaactggttaaaaagcttgcatttagacatacaatttttagctggatttccaacttgttcaggatttcagttctatagtctctcygtgcgatctttcactattgatgtacttgtaagccatatttcttcgtatagtaaactcaaggaataaggatgggacagagaaagagaaacaaactgccatttctctactcaaaaaatagcaaacacctgtgcaggcttgaagtccatttagttttctaaattgaaaattaggagccatctttaattagctgctggtaaagagatctttttcctagtcacaaatgcatatagttacagtgatgtgctcatctccctcttacaggagagatttatactgactgggcttgactgaacagcagaa

SEQ ID NO: 40110 - DNA, 600 bp, Chicken  19866894274538_2
ttcactattgatgtacttgtaagccatatttcttcgtatagtaaactcaaggaataaggatgggacagagaaagagaaacaaactgccatttctctactcaaaaaatagcaaacacctgtgcaggcttgaagtccatttagttttctaaattgaaaattaggagccatctttaattagctgctggtaaagagatctttttcctagtcacaaatgcatatagttacagtgatgtgctcatctccctcttacaggagagatttatactgactgggcttgactgaacagcagaaaaatagcaraatccagaaggcacatyaaatcagatcaagaaataataccctagttatgcaaaaagagatcaaaatttaagtcatacaagccaagcaatctactaaaatacatggtactttacctcagacaattcaagtaccaggagcagcactgtttcatcatcaatgctgtggtcagttggtaaagtcattggtaagtatttgagtttctgaacttgcatagatgttctcattggagtttctcagttttctgccttgcctgtgtattaatagaattgtcgtctatttcataaaaacctcactttttcc

SEQ ID NO: 40111 - DNA, 600 bp, Chicken  19866894274538_3
tgtaagccatatttcttcgtatagtaaactcaaggaataaggatgggacagagaaagagaaacaaactgccatttctctactcaaaaaatagcaaacacctgtgcaggcttgaagtccatttagttttctaaattgaaaattaggagccatctttaattagctgctggtaaagagatctttttcctagtcacaaatgcatatagttacagtgatgtgctcatctccctcttacaggagagatttatactgactgggcttgactgaacagcagaaaaatagcaraatccagaaggcacatyaaatcagatcaagaaataataccctagttatgcaaaaagagatcaaaatttaagtcatacaagccaagcaatctactaaaatacatggtactttacctcagacaattcaagtaccaggagcagcactgtttcatcatcaatgctgtggtcagttggtaaagtcattggtaagtatttgagtttctgaacttgcatagatgttctcattggagtttctcagttttctgccttgcctgtgtattaatagaattgtcgtctatttcataaaaacctcactttttccagccctgacatcaaaat

SEQ ID NO: 40112 - DNA, 600 bp, Chicken  19866894274541_1
cacctgctgctgaacctgcagatccgtcctctctcactttcacctgaggaaggctgggcccccgccacgcaaaccgaacaatcatttttaattaaactcacagtcatggggcttccattgccagcatcaggcaagcaaagcctggtggtgctcgcgggctccctgctgcccacaaatgctggtgtttagccgtgctactttgccaggagaagtgcatcaggtctcctatacccccatactgctccccgctgccctatgggcaatgctcaaccttagagcacatggagaatgagggagcgyggctttggtaacccatgcaaccccaaagttcatgcactgtgctcctggagaggcattcagtgttgtgcaagttgcagaaatgcaggaaaaggctgcgatattcacttgtgtaagagagaattcggggatgatagcagaactggcagcaccccagcaccaggagtccatggcttttaattaagtaagttcagagcaaaattggcagggtcttatctgcagctcacacttccctgctgcgaatgcaccacagcaccccgtcctgctgtgctgctgtggaagggaagggatggggcgggggtt

SEQ ID NO: 40113 - DNA, 600 bp, Chicken  19866894274541_2
cactgtgctcctggagaggcattcagtgttgtgcaagttgcagaaatgcaggaaaaggctgcgatattcacttgtgtaagagagaattcggggatgatagcagaactggcagcaccccagcaccaggagtccatggcttttaattaagtaagttcagagcaaaattggcagggtcttatctgcagctcacacttccctgctgcgaatgcaccacagcaccccgtcctgctgtgctgctgtggaagggaagggatggggcgggggttgcagtggggacacagctcaggggacacacagcastgctcccagcccagatgggctcatcgcattttgtttagtgctgaaagcagggctttatttccccttccttaagaaaaaaataaaaatwaaaattaaataaatcacattcaaagctgtttctttctttcttttctttctttctctttttttttttttttttccagctgccccaattatcccatttgttcaaagcaaaatcttgcaattcgaggcagtttatttattctgcccaagccgtgtttacaacgccacagcggagcggtggggttgagttaagtggtgctgggggttggggccggg

SEQ ID NO: 40114 - DNA, 600 bp, Chicken  19866894274541_3
cggggatgatagcagaactggcagcaccccagcaccaggagtccatggcttttaattaagtaagttcagagcaaaattggcagggtcttatctgcagctcacacttccctgctgcgaatgcaccacagcaccccgtcctgctgtgctgctgtggaagggaagggatggggcgggggttgcagtggggacacagctcaggggacacacagcastgctcccagcccagatgggctcatcgcattttgtttagtgctgaaagcagggctttatttccccttccttaagaaaaaaataaaaatwaaaattaaataaatcacattcaaagctgtttctttctttcttttctttctttctctttttttttttttttttccagctgccccaattatcccatttgttcaaagcaaaatcttgcaattcgaggcagtttatttattctgcccaagccgtgtttacaacgccacagcggagcggtggggttgagttaagtggtgctgggggttggggccgggctggggaaaaaaaacaacccccaaaaaaactaaagggagaaaattaaaaagagcaattttaaaaacgcagacatcaaaggcatcattt

SEQ ID NO: 40115 - DNA, 600 bp, Chicken  19866894274545_1
ttttacatgggtcatgtttcagagcttttttttcccaagtggtcgatgccaccaacaagtaaaaggaattataactgccacacaacgtttttcccttctagtcttaatttaggaaatgatgaaatagctttgactgaaaaaaatatcagaccaaggcagacgatcagcttgaaaattttcagcacaaacacgtgatgtttggcaaaattagaagcaaatggaaagaggatgttacactggcaggaatgagacaagtttcgtaacagtgactgctgtcatgcctgcatataaacagacagmcactccataatgattgcaatgaatgatgccaagatgatggtatttaattattcagaattatttttttttccacataaatgtgcttattaaaaattgatcctatagaaatatgtttttgcccttcagattgcttgcaagtgcatactgagatcaattgaaataaaaaaaagttctccttgattttgctcttcatgctgtctgatcttgttccatctacttcactgcctcttccagctcgccaacagagcgtcctccagtgcctacccacccacacatttgctaccccactttccacctgtt

SEQ ID NO: 40116 - DNA, 600 bp, Chicken  19866894274551_1
gattttaaaaatagcagaacagcaaacactgaagatatctgcacatctccttaatagcactgctgtacaatatttcagatctttttgtgcatttaaattttctttctccagagaagaggccaagttagttacctcctgagtactgcacactcctcatcagttctctaacagttaaaaagatcagactgttaaaaaagttgactagtcttggaaacaaacctaaaacttaacattaactttgaagagaccagttttttgtgttgctaatagtgtggtagggaataccgaagggggaagaaygctaattgagtgcaattgagttattttctgattggaataatttttttgagaggataacggtttgatgtttttatttgaatccatgtgttggtgacatcaaatggagcagagctgagaattcaaagccattaatctaatcctgtgtaagggaaaggcacgttttagtctaagtttataaatgcttgcaaaatggtgagtgaacctgttagaagtgtgtgtcactaggaaacgactcagaagagtaagagtaaatactcattttattgcatcttgacatgataatgttaatgcatgtgtttt

SEQ ID NO: 40117 - DNA, 600 bp, Chicken  19866894274558_1
gttataaataataaagaaagaaaaggtcaatcagagccattaaaatttaaatactgcatttaacttttgttgcagaaaattgttttctctcatgccaagtactgctttgctctggttcaagaaagcatttatgcatgtgattaattcaaaacatatgcttacttccattcctattcagcaaagtacctaagcctattcccagctttaatgcaaagtctgtatcttttaactaaatcaggggcttaaaaatatagtggatttggttgggatttcctatggcattatttttatgagaaaaartaatttgattttctgtaagtggattttttttccactcttaattgttagtgttttccaggtaacaaataaagtaaaacatatcatagtaatattttaaaaggaaatttaaatcatttcataatcgyttgttacatttttagctgtatattttctaggagaacaatgccttttggcttgttttgtttattattaaagaagttcatgctgtttatactgtagaatggtaaatmatatttagagtattttgacagggcaattttttttttttttgtgaaagttgttcttaacactatctgtagt

SEQ ID NO: 40118 - DNA, 600 bp, Chicken  19866894274558_2
catttatgcatgtgattaattcaaaacatatgcttacttccattcctattcagcaaagtacctaagcctattcccagctttaatgcaaagtctgtatcttttaactaaatcaggggcttaaaaatatagtggatttggttgggatttcctatggcattatttttatgagaaaaartaatttgattttctgtaagtggattttttttccactcttaattgttagtgttttccaggtaacaaataaagtaaaacatatcatagtaatattttaaaaggaaatttaaatcatttcataatcgyttgttacatttttagctgtatattttctaggagaacaatgccttttggcttgttttgtttattattaaagaagttcatgctgtttatactgtagaatggtaaatmatatttagagtattttgacagggcaattttttttttttttgtgaaagttgttcttaacactatctgtagtacttcctattattgtaagtcactggacgaaattcattattagtattaatgatctcatgattgtatgattttagagtaagaatgacattacatgcaaagctatttcttttgtttcatatatttgga

SEQ ID NO: 40119 - DNA, 600 bp, Chicken  19866894274558_3
taaatcaggggcttaaaaatatagtggatttggttgggatttcctatggcattatttttatgagaaaaartaatttgattttctgtaagtggattttttttccactcttaattgttagtgttttccaggtaacaaataaagtaaaacatatcatagtaatattttaaaaggaaatttaaatcatttcataatcgyttgttacatttttagctgtatattttctaggagaacaatgccttttggcttgttttgtttattattaaagaagttcatgctgtttatactgtagaatggtaaatmatatttagagtattttgacagggcaattttttttttttttgtgaaagttgttcttaacactatctgtagtacttcctattattgtaagtcactggacgaaattcattattagtattaatgatctcatgattgtatgattttagagtaagaatgacattacatgcaaagctatttcttttgtttcatatatttggagatgttttgaaagaatgctatcaaaaacaatgaaagttctcctgcaaattgtgtcaaatggtaaaaatgtaaaatgggggtgcattgcttgagagaaataatgag

SEQ ID NO: 40120 - DNA, 600 bp, Chicken  19866894274562_1
aatcaaactctttctattgcaggtgaaattcatagctctggcccatgtaggaagataagatcagaatgtgctgtgttgtggaccaggaaaatagtttctatgatatctctcctggcacctgctgcttatgctttctgtattgtcatttcagtgagtattgcccagtgtcattactgtcaattggcaccctgtttcatccttctgtaaataatctcatcaggtcctacagtatctcatcccatcccatcccgttctatcccattccgtccttttagaaacaggcagtagcaagagcctccmctctccactttgacaaatcctttcaacatccttggttatttttgctgtttgtaacctctacccaatgtaggttgcaataaccctccatctccattgtcttggacaataattctcttctctattcattttcaggttaattccttttatttcttccattgaagtaaggaatgccatccaaactgttaattaagtgacaggcaaatgataacttgcccatgtagttggcccccttttctcaggaaggggagtggccttcatctcttgagatctgacttgtctgccttcctgctaatcatcagt

SEQ ID NO: 40121 - DNA, 600 bp, Chicken  19866894274562_2
ttccttttatttcttccattgaagtaaggaatgccatccaaactgttaattaagtgacaggcaaatgataacttgcccatgtagttggcccccttttctcaggaaggggagtggccttcatctcttgagatctgacttgtctgccttcctgctaatcatcagttttcaatgagtgacctttacactgcagatttcagctatggggcttacaactgtaaaggataaaatctctaaattaacagcatctttgggcagggttaattttgccagggtatatctgtatggagagagagagagagygagcaaaagaataacagccatagtattctgttgtttgaaataagtctgtggcttaaaaggctctgggcagtgtaatttttacttttataggcatggcctgaatgtgtttgacktttcaaatcctctctccagagatccaaaggggtctgtttataaaatctacatctcagactccttcctatatgaagttcagagagcagtttctactgctatatataaatttgtccctgatgctttatccttggaacgatctccttctaactcaaacacttcctttcacagacaaaaaagggtgtccta

SEQ ID NO: 40122 - DNA, 600 bp, Chicken  19866894274562_3
gccttcatctcttgagatctgacttgtctgccttcctgctaatcatcagttttcaatgagtgacctttacactgcagatttcagctatggggcttacaactgtaaaggataaaatctctaaattaacagcatctttgggcagggttaattttgccagggtatatctgtatggagagagagagagagygagcaaaagaataacagccatagtattctgttgtttgaaataagtctgtggcttaaaaggctctgggcagtgtaatttttacttttataggcatggcctgaatgtgtttgacktttcaaatcctctctccagagatccaaaggggtctgtttataaaatctacatctcagactccttcctatatgaagttcagagagcagtttctactgctatatataaatttgtccctgatgctttatccttggaacgatctccttctaactcaaacacttcctttcacagacaaaaaagggtgtcctaggcagactgtttcctatacaactccctcccagacttacatatggagagagagagagagagatgttctgtctgctgtgggagcctttgtacaaaatctgaagcattaactgtac

SEQ ID NO: 40123 - DNA, 599 bp, Chicken  19866894274572_1
  misc_feature (1)..(105): n is any nucleotide
nnnnnnnnnnnnnnnnnnnnnnnnnnnnnnnnnnnnnnnnnnnnnnnnnnnnnnnnnnnnnnnnnnnnnnnnnnnnnnnnnnnnnnnnnnnnnnnnnnnnnnnnnattttttaaattagttttacaactaattttaatgcgtgttttatgatggcaatcagaaatatggattccaaaaaacatatggtatagtcacctgaaaagaatagtgatttatttttttttatctgagttgagtcaactaacaaattctaatggcaaattccagaggaagcccagttcaacaacagcaagatacayagacctgatgttatcaacagatgctttactgggtaattttgacctcctgatttctaatagcagaattggttacttgaaccaagaacaaagtacagactatttatatttatctgctgccatctaatagacttcttaatgtttattttgctgggtttgtattcaactttacagctcactgaattgtgaaaatagattgctgtgctgtaaattaaattgtatgaattattactaagttgatactgcagcttctgaaatgaattttacttaatttcatagagaataataattgtttatcatga

SEQ ID NO: 40124 - DNA, 600 bp, Chicken  19866894274575_1
ccccaagatgtcagaaacaccccccagaacggggctgcagctgccagcctggcctccaccacgttgcacgttggaaacgttgtgaccccgctggagtcggggccagaacccagctcagcctgaagcgggctgcggggaggaaggaatgggatgggtgctggggggaagggatccccgtggttccagcccccaaagctgcccacctcgggaaaggcagagaagaatgaaagcgacagtggcatgatggaactctgttttattgtgatagactctgatgactttggacaggtttggacaagyggagcttgcacgcagctgctcctatagcatcaccggggccggctgttgatgttccgggcccgacgtggtacccgggagcggcttcgcccctggrctggccctcgccgcctggaccggctcctgcggcgtcttcggggctggctgtgggtctcagcaggcttcgagtccggacccacccyggctgcctggaccggcttccagcagcctctgtggaatcccctgaggccccyggtgctcctggtctggtgtagctgtggstgcagctctcggcacttagggttgattcctgcctgctcccac

SEQ ID NO: 40125 - DNA, 600 bp, Chicken  19866894274575_2
agtcggggccagaacccagctcagcctgaagcgggctgcggggaggaaggaatgggatgggtgctggggggaagggatccccgtggttccagcccccaaagctgcccacctcgggaaaggcagagaagaatgaaagcgacagtggcatgatggaactctgttttattgtgatagactctgatgactttggacaggtttggacaagyggagcttgcacgcagctgctcctatagcatcaccggggccggctgttgatgttccgggcccgacgtggtacccgggagcggcttcgcccctggrctggccctcgccgcctggaccggctcctgcggcgtcttcggggctggctgtgggtctcagcaggcttcgagtccggacccacccyggctgcctggaccggcttccagcagcctctgtggaatcccctgaggccccyggtgctcctggtctggtgtagctgtggstgcagctctcggcacttagggttgattcctgcctgctcccacggtgtgtttggggctggcttggagaacgtggggcccggcgctgcaacggagagcggctttgtgtccgggcccgcagtccctgtctgcaccggag

SEQ ID NO: 40126 - DNA, 600 bp, Chicken  19866894274575_3
gttccagcccccaaagctgcccacctcgggaaaggcagagaagaatgaaagcgacagtggcatgatggaactctgttttattgtgatagactctgatgactttggacaggtttggacaagyggagcttgcacgcagctgctcctatagcatcaccggggccggctgttgatgttccgggcccgacgtggtacccgggagcggcttcgcccctggrctggccctcgccgcctggaccggctcctgcggcgtcttcggggctggctgtgggtctcagcaggcttcgagtccggacccacccyggctgcctggaccggcttccagcagcctctgtggaatcccctgaggccccyggtgctcctggtctggtgtagctgtggstgcagctctcggcacttagggttgattcctgcctgctcccacggtgtgtttggggctggcttggagaacgtggggcccggcgctgcaacggagagcggctttgtgtccgggcccgcagtccctgtctgcaccggaggttgtagccagctgcaggggagtgccgcgaggactctgatgtcccctggctggcagagtttggggtgctgccctcagcagtggag

SEQ ID NO: 40127 - DNA, 600 bp, Chicken  19866894274575_4
cgacagtggcatgatggaactctgttttattgtgatagactctgatgactttggacaggtttggacaagyggagcttgcacgcagctgctcctatagcatcaccggggccggctgttgatgttccgggcccgacgtggtacccgggagcggcttcgcccctggrctggccctcgccgcctggaccggctcctgcggcgtcttcggggctggctgtgggtctcagcaggcttcgagtccggacccacccyggctgcctggaccggcttccagcagcctctgtggaatcccctgaggccccyggtgctcctggtctggtgtagctgtggstgcagctctcggcacttagggttgattcctgcctgctcccacggtgtgtttggggctggcttggagaacgtggggcccggcgctgcaacggagagcggctttgtgtccgggcccgcagtccctgtctgcaccggaggttgtagccagctgcaggggagtgccgcgaggactctgatgtcccctggctggcagagtttggggtgctgccctcagcagtggaggtagcattacggcagctcccacggtgtcctcggggctgattgcaggcgttc

SEQ ID NO: 40128 - DNA, 600 bp, Chicken  19866894274575_5
attgtgatagactctgatgactttggacaggtttggacaagyggagcttgcacgcagctgctcctatagcatcaccggggccggctgttgatgttccgggcccgacgtggtacccgggagcggcttcgcccctggrctggccctcgccgcctggaccggctcctgcggcgtcttcggggctggctgtgggtctcagcaggcttcgagtccggacccacccyggctgcctggaccggcttccagcagcctctgtggaatcccctgaggccccyggtgctcctggtctggtgtagctgtggstgcagctctcggcacttagggttgattcctgcctgctcccacggtgtgtttggggctggcttggagaacgtggggcccggcgctgcaacggagagcggctttgtgtccgggcccgcagtccctgtctgcaccggaggttgtagccagctgcaggggagtgccgcgaggactctgatgtcccctggctggcagagtttggggtgctgccctcagcagtggaggtagcattacggcagctcccacggtgtcctcggggctgattgcaggcgttctcttcctggtgtaaacgtgggctggttc

SEQ ID NO: 40129 - DNA, 600 bp, Chicken  19866894274578_1
tttgtagaagtcaacatacttctagctttttcttttatcatatttccataccgaattttcttggtctgtactactgcaaaatgactgtaagataaaggtagcctgaaagataaagctgtcacaactcctgctggttttctggtttccagctgaatgtaatcaaaagagaaaattttccacggtcttgtaggcaggtagccagatttccagtttatgtcctaccgccctgttcagctttcagcactgcataattctggtgcattaaaaaggaaaacagaagtaaaaagggaggctctaaayaacacrgtgattgtaaaagttgtaatttgatgtaaaagctgtaattgcagctgstttgtgaccatggagtggctgtgtcctgtctggattctgtgccgttttacagtgcttcttcatacctccyattttggtcttctctttctctcttttcttttttccagtgtgaatgatgtagtagctgtggggccggacagcttctacgctaccaatgaccactacttttctgacttcatcttgatgttcttggaaatgtacttgggtttaacatggtcaaatgtggtttactacagtccaaaagaa

SEQ ID NO: 40130 - DNA, 600 bp, Chicken  19866894274578_2
gaagtcaacatacttctagctttttcttttatcatatttccataccgaattttcttggtctgtactactgcaaaatgactgtaagataaaggtagcctgaaagataaagctgtcacaactcctgctggttttctggtttccagctgaatgtaatcaaaagagaaaattttccacggtcttgtaggcaggtagccagatttccagtttatgtcctaccgccctgttcagctttcagcactgcataattctggtgcattaaaaaggaaaacagaagtaaaaagggaggctctaaayaacacrgtgattgtaaaagttgtaatttgatgtaaaagctgtaattgcagctgstttgtgaccatggagtggctgtgtcctgtctggattctgtgccgttttacagtgcttcttcatacctccyattttggtcttctctttctctcttttcttttttccagtgtgaatgatgtagtagctgtggggccggacagcttctacgctaccaatgaccactacttttctgacttcatcttgatgttcttggaaatgtacttgggtttaacatggtcaaatgtggtttactacagtccaaaagaagttaaa

SEQ ID NO: 40131 - DNA, 600 bp, Chicken  19866894274578_3
attttcttggtctgtactactgcaaaatgactgtaagataaaggtagcctgaaagataaagctgtcacaactcctgctggttttctggtttccagctgaatgtaatcaaaagagaaaattttccacggtcttgtaggcaggtagccagatttccagtttatgtcctaccgccctgttcagctttcagcactgcataattctggtgcattaaaaaggaaaacagaagtaaaaagggaggctctaaayaacacrgtgattgtaaaagttgtaatttgatgtaaaagctgtaattgcagctgstttgtgaccatggagtggctgtgtcctgtctggattctgtgccgttttacagtgcttcttcatacctccyattttggtcttctctttctctcttttcttttttccagtgtgaatgatgtagtagctgtggggccggacagcttctacgctaccaatgaccactacttttctgacttcatcttgatgttcttggaaatgtacttgggtttaacatggtcaaatgtggtttactacagtccaaaagaagttaaagaagtagcagctgggttttattcagccaatggaattaacatttcaccc

SEQ ID NO: 40132 - DNA, 600 bp, Chicken  19866894274578_4
ctcctgctggttttctggtttccagctgaatgtaatcaaaagagaaaattttccacggtcttgtaggcaggtagccagatttccagtttatgtcctaccgccctgttcagctttcagcactgcataattctggtgcattaaaaaggaaaacagaagtaaaaagggaggctctaaayaacacrgtgattgtaaaagttgtaatttgatgtaaaagctgtaattgcagctgstttgtgaccatggagtggctgtgtcctgtctggattctgtgccgttttacagtgcttcttcatacctccyattttggtcttctctttctctcttttcttttttccagtgtgaatgatgtagtagctgtggggccggacagcttctacgctaccaatgaccactacttttctgacttcatcttgatgttcttggaaatgtacttgggtttaacatggtcaaatgtggtttactacagtccaaaagaagttaaagaagtagcagctgggttttattcagccaatggaattaacatttcacccgacaaaaagtaagtttcttcttgcctcagattttattcaaccacacgtgagaatccccaaagcctagttt

SEQ ID NO: 40133 - DNA, 599 bp, Chicken  19866894274585_1
  misc_feature (1)..(28): n is any nucleotide
nnnnnnnnnnnnnnnnnnnnnnnnnnnntttctggaagaaatttgattccagaagtgcaagaggccgtgagtgaaaattctttcataagaaggaagtgagagggagaactataaggaaatattctgtttattttggccatcattctaaaaaaaaaaacaaaaaaacaaacaaaaaaaaacctggagtaaaaccaaagagaaatgaaagaaagaatattgataaatgatgtgtgaaatgtacctcaaattttggacactgcaaagcctaattatgaatgcgtgtaatatattcatgtgttrtcccagaactaatcaatattttgcactttattaggaatagaaacatgcgttgtctctttcaaacatacggtagttaactgattcattgggtggtttgtgcagtagtatgaccagctgttataaatgtttcagtaattttttagcattaaaagtaaacaggccttttttttttttttttttctttttgctgggctgagtaggaaagtacaaggccaataaacctagatcttgtttcatatcctgaattctgttttgaatctgtaataaccctaaatgtgttgctgtaagtctaagaaagt

SEQ ID NO: 40134 - DNA, 600 bp, Chicken  19866894274586_1
gtgctacttgacacttcttaaggatgcttgcctccttgctttggtcaacacatcctagttggccctccagctcatttttgtttttacacaaaattaagtatcattttaagacactcaatccaaagttaatatatccaaagcctgctgtttcaaatgctaccagagaaggaacgatcagctgcaaagtgctttttttgttcttgaggccgcagaacaaagaaataccctactagccaacacatcggtccagggtgccccataagtagctcacacctgactgtccctggtgtatttatttgygtgggaaggaatggttagcgatatttagggttacctgcttcaggcgcacattggttgttacaatctgatttacttcatccttgaaaggaaaaaacaaaaagagagaaaggagacacaagtaacaagcattgggattaaaggaggagagcaaaaccatgtggcgatagcacatgaagtgttggttccgcctccctactgcctaccacattgatgagctgaatgagctgcagcccgacggtgacgacgacggcatcgcggtgattctccacggggcgcaccaccttgctgtagtcccggaac

SEQ ID NO: 40135 - DNA, 600 bp, Chicken  19866894274587_1
gaactcgcaggacggggtcctgcggcgcagcatgctgttctcggagggtttggtgcgcgaggccgccccgctgtcgtcctccatgggaggatctatagaaatgcagggcgggctcatcttcttcttcctccgggctccgtggatgtactcggactctggctggacgtgggccggggggagcgcggcttttcctcggcgcgctcctcgaagccgcagtccccatcgcggacggaggggcagatctcgatggagtgccgcctttggtcatccgcccagctgggcttggtgaggaagcccttygtatcgatgctgtaaaacttcttcaagtccctctccttgccgctgcctgccgtcaggctgcttgtgctgcaattcttcaggggcaccggcgacgcggccggcgagacgaacggcgacgtggagcagctcccggcctccgagtgctccccccagtctttggctgagctgttgatgtggcgaacctcctcgtcagccaggtcagagggctccaggaggcagccctgggggcttggggggctctcggtgggactggggaccccgcgctggctgcaggggtgtttccgagtcagcgatgggtgc

SEQ ID NO: 40136 - DNA, 599 bp, Chicken  19866894274592_1
  misc_feature (1)..(43): n is any nucleotide
nnnnnnnnnnnnnnnnnnnnnnnnnnnnnnnnnnnnnnnnnnntgcctcagcaaactactccagttggagttttaaggtcaggctctcatttgccatgacgggtgaaaccgatctgcacaaattccataacaagcaagcacaatggcactttaactccacaaaatgtggtatgggaaaggcaagtgaaaacagttgatgttatttgaagaaagcaaacaaagatcactattcccacagaaaacaacagagcaaagggaggacacctccttttgcactcaccattcttgcgctcattgagrggaggtaagtactgactgggctgcagggacagctccttaaactcgtgtgcaaccgcttcactgtgagggctgggggcgagacgtggcagggttccagggtcatcctcagcatccactgtgcccacgtgatccatagtgttaaatcctctggagacagggaaagcaagtgatcttttaatcacacagtagttgatgaaactaatacaggaaaaaaaaaaaaaccaacatcatgtagacctgttactgccagttttggtcagctcctctacatagaggattcagtttaaaattgtctttgc

SEQ ID NO: 40137 - DNA, 600 bp, Chicken  19866894274608_1
atcttaagtgttagaatagaatagaatagaactgttctcaggtgagcctttgtcaagtgcaattgtgtgaatgagagttaacagaattttattgcaggtgcactttgtctttatactgtataggtatacatgctcaagagattattgggagttttcattaaatgaagatgccctttatagaggtgctagggccagggaatggtagggatctttaggtcctgctgcaggtactagcctctcagtggttttcagctcacctgttgccaagcacctacaagtttaatagtgtttccaacgtgmatgaaagttggtataaaattttttggtgtgttgttgaagtgtgtgtgtaactaagcaaatggcagtaatgtctgcagcaaagtcatccttgaactggtagaccctctggaaaaggaagtgctgttttgttttgttgccttcaaaataccaggtgactataagggattaataaagggtcatgattctcaagtagagtaaagaaccacagaatctgatgtcactgaaggaaaaaaagaagtgccgaaggcccattgcaagtatggacctcagtggaaaggtgctgctgaggagttttgtggt

SEQ ID NO: 40138 - DNA, 600 bp, Chicken  19866894274614_1
tgtctcccagcaggtaaccacagaagacaaaggatcacgtaaaaccattttctttacagtcgctccagtttagcctgcgtgaggtgctctcttgtgtctgttttagagacaatattgatgtaatctgattgcagagaagttatgctggcacagaactggagcagcctgtgggagagctgggctcacgtgcactgtgctctttggtcctgcatgagaattagggacttctacatgtagttatcccactagtagtcttttaatccttattttttccccaccttctctcccactcatgtctgwaaagaacaagatcggtgtgtttgaaatcataactattgaatcttataagatttatctgcataatctgcattaattaaaaaatatatggttgaagggagagaaatgcttattcagaactgtatcaaccttcatttgatggtctttgggaagtaactaaagctgaatgacagctgcttacactgggagaaggatgcttcctcagggtttggcgtggtgtagctaattcatttttaaggtcagccttcataggtgatggcattcctgagcttctctgtgcagacaagcgtttagatgtagctt

SEQ ID NO: 40139 - DNA, 600 bp, Chicken  19866894274620_1
attgggttttgtttcgatggtaacgttccccgttttgataaattctaagctttgatggttagcgttgttttgataatgttgagttgtcggtgttgatggctaaaggtcttggtctggattgatggttaaagtcactgatgggagcgttggatgcttttgatggttaaagtcactgatgggagcgttggatgcttttgatggttaaagtcactgatgggagcatttggatgcttttgatggttaaagtcactgatgggagcatttggatgcttttgatggttaaagtcactgatgggagcrttgggatggctaaagcagtyggttctgatggtggaaagagtttgtctttgatggtgaaaagttggtggctttgatggttggtttagtttgggtattgaagtttgagtattgaagtttaggttagtttgagtactgaagtttagttttgtttgagtactgaaggcttcaatcagtaatccgcatctgaaagacaaagagaagaaacatcattccccgctgtgagactcaaggtgcagctgcctgcctcgctgctcctacttctagatgcagaagtcctgaagctgtgtgcagtttgatcag

SEQ ID NO: 40140 - DNA, 600 bp, Chicken  19866894274620_2
taacgttccccgttttgataaattctaagctttgatggttagcgttgttttgataatgttgagttgtcggtgttgatggctaaaggtcttggtctggattgatggttaaagtcactgatgggagcgttggatgcttttgatggttaaagtcactgatgggagcgttggatgcttttgatggttaaagtcactgatgggagcatttggatgcttttgatggttaaagtcactgatgggagcatttggatgcttttgatggttaaagtcactgatgggagcrttgggatggctaaagcagtyggttctgatggtggaaagagtttgtctttgatggtgaaaagttggtggctttgatggttggtttagtttgggtattgaagtttgagtattgaagtttaggttagtttgagtactgaagtttagttttgtttgagtactgaaggcttcaatcagtaatccgcatctgaaagacaaagagaagaaacatcattccccgctgtgagactcaaggtgcagctgcctgcctcgctgctcctacttctagatgcagaagtcctgaagctgtgtgcagtttgatcagctctgtgactgcagggctga

SEQ ID NO: 40141 - DNA, 600 bp, Chicken  19866894274631_1
ggtggtttgaggagtaaatccattttctgctgattgctctttctttaaagtttttaaacatcccaaggaaaccaatgaagcgcagtgggctcagggggcctcgcgatggctgcgggctgtgggctgctgccccacctctgggcacacagctctgcctctgctgccctcccagcaggacctgggccagagcagggggtggatcttcactgtttcccactgtgtctttagtctgtcttctctttgccttttctgtaacagcaataatggcagaactgagcagctggagatgtcaggggaggsccataaaacctgagcgagctgctctgtgagctttgccttcagaggatggcagccactgaaaaatttattcaaggagctttttgtgcttggagttgtgaggtcttcagaggtgcagctccttccatgaacccctgctgggtgctgcagggtgctgcagggtcagctcttcccctcctgctgcaagaaccctcagcatccaaagctgcatgtctggcacctgcaagtgtgcttttataagagggtaccacagcctgcaaatgggacttagttcatgttgtcttcctccaggaaaacttactg

SEQ ID NO: 40142 - DNA, 600 bp, Chicken  19866894274641_1
gaagtccaggtagatgccatctacctggtagatgacagatagattcccttatccaccagtcctgtaacctcatcatagaaggctgccaaatttgtaaggtacaatttgcactagtaaaacaatattggctttggcatagtttctaggaggatctgctccattatcttgctgatcataaaagtgggactgactagcctgcagttccctaggtctccttttttttacctttttaaaaaattgtggtaatgttccctcttttccagttaatgcaaatttcaccagactgccatgacttctcaratctgaygggtgattcttcattctcctagtccttgcctttgctttctcaggcagtactagcacttgctggtgaagaccaatgcaaaaatgctgattacctcagcctcctccacattatgttgctaaaggtcttaggttttgaagacatccaaagatagagattccacaacttctctgggcacctatagatagagattccacaacttctctgggcacctattccattgttttactgccttgtcctagaaaaagaaaattcttaacattttgttcttctgcaagtggagattaaaggataaa

SEQ ID NO: 40143 - DNA, 600 bp, Chicken  19866894274641_2
aggtagatgccatctacctggtagatgacagatagattcccttatccaccagtcctgtaacctcatcatagaaggctgccaaatttgtaaggtacaatttgcactagtaaaacaatattggctttggcatagtttctaggaggatctgctccattatcttgctgatcataaaagtgggactgactagcctgcagttccctaggtctccttttttttacctttttaaaaaattgtggtaatgttccctcttttccagttaatgcaaatttcaccagactgccatgacttctcaratctgaygggtgattcttcattctcctagtccttgcctttgctttctcaggcagtactagcacttgctggtgaagaccaatgcaaaaatgctgattacctcagcctcctccacattatgttgctaaaggtcttaggttttgaagacatccaaagatagagattccacaacttctctgggcacctatagatagagattccacaacttctctgggcacctattccattgttttactgccttgtcctagaaaaagaaaattcttaacattttgttcttctgcaagtggagattaaaggataaaacaaagt

SEQ ID NO: 40144 - DNA, 600 bp, Chicken  19866894274659_1
cagtaactagacctacagatcaattcctcctcctccttaagtaaagaaagcaccttctttgtgaaggaggcaaacagcacatttcacttttgattcacagtgaaatgctactgttcaaatgtatttcttgcatgggcaggatgggactagaagcgcatatacagaaattccatctctgtgcatgtgaagagggggggggatggaccaacacgcctaacttggaaaggccctaggtacttttccagctggtgcccacctggaagtctgcagagcatgcacaaggctgcagaatgggagaamagtacattggtgaccagcatgcaccactacattacattagcagagacagtcatgcaagatacagtgttatacaaaatccaaaccacctacagaagcatgggcagtgcctccagcaagcaggagaaccatccttttgaggtctttcaagagttagcaacgtcaatagtagtttctgattattctttcaccctacagccctaaaaattgaacaaggctcattcttactcgaccaacaatttctgaaggcaggactgggcctttatgctcttgaaaggcagaaacagaagactgcatcctact

SEQ ID NO: 40145 - DNA, 600 bp, Chicken  19866894274664_1
ttagtacatggttactaagcttgatatcctttcagcaagcacagttgtgtacctgcattcaatagaagtcaattcatgcaatattactcagttgtacatgcaaagatttaagtttgcaatattcaatttaagtgttaataatgtttcaatccatttgaaacaaatttccaccagaatttcattaggttagaaaattattataacgtgcaactattggctttatatttttttaatatattaaacaactttctagtaagagattagctatatatttattccaaatcaacaaggcaaggatakagtgcagcatgcaagtgtgcatgcattaaagcagtttggtttttctgaaagtagaaagtcatacagtagaagactatacctgtatcaatctatctgccaaggaagcactttcctacaaaggaaaaattcagataggaataaggaaaagaaaaaacaaaagtgtgataatagtgacaaaaaaagaccagagcagagaaagaaaatgcccaaattctacccatttttctatacaggcaacttgtttttacaaagttaagagctcttatgtaagttaaggcaactcaggctggaaattgcagt

SEQ ID NO: 40146 - DNA, 600 bp, Chicken  19866894274667_1
agcacagcctccttgctccttcacggccccatgttctgccacagcagctgggggcacaaaaacagcccggagagagcccggccgcctgcatcccgctcagcttcccggggtggggaagggctctgggtgagctcagcacggaggaggtgaggaggagcggcagggcagggcgagcacagagctgcacgcgcacccggaaccgggccgaacccgggcctcgctgcccccgtcccacggctgcaatgcgccggttccgccgtgccgtgctcgacccctgcagagccccgactcctccggcarcgatctgctgggacggcacagcctgggggcaacgggagcgctgccggtgccgcagctgcagcccacgccggggtcacagcagtcctggttttatggccgggctcgtgatggtgctggttttatggccgggctcgtgatgcgtttatggccgcgctggcactgccgcgggtcctcccggccccgtaccccgcatcccgctggcactggggtggaggatggcagccgaactttgcccggcgaggtgcggctcccgagggctcccgcgagagctgcggtaccgcggctgcgtccgtcccctgc

SEQ ID NO: 40147 - DNA, 600 bp, Chicken  19866894274667_2
gcggctcccgagggctcccgcgagagctgcggtaccgcggctgcgtccgtcccctgccgggcacctggatgggcagcgggatcccgcccggcccctgcgcagcgtcctcaccgcccgcatgtcaccagcggtgtgctttggtgccgagaccccgcgtcacgtagcggccgtcggcccggcggcgtggagcagcgcttagcaggtacgtgaccccgagatccgccccgcaccgcccagggcagcgggacccactccgggcccgtcctggagcaccatccccgcgctccccgagcaccggcrttgctgcccacggcccctcagcctccggagcccggcagtgcgatggtgccccagggaggggtttggcggcgggggggcgatgaggacactcacggtccccgcacggctgggggatgggatgcggccctggtccccagcatcgccctgacggctccttctccccaggctcggccagaggagggaccctgcggttcccagcgccgctccggggatctggggggggggaccgggctgtctcggtcacccacacagcacacatcagttgccatcctcaaaactgccctgctcagcaaaccccct

SEQ ID NO: 40148 - DNA, 600 bp, Chicken  19866894274670_1
ccctcatactttcagttttccctggaagtctgatttcctattgtgtcttcagcttttcatagtgtatccagctactaccatgtttatcttccaataatattcatttctgcacttggctttgctcccctggatatttcctgtccagcctgtaataaaatttcttcataaagacaaattaatgggactgagaaactgcctacatgttaccttgtatgccatcctcatagaacttcctttccatcaaaatcaaatttgtcttcaactgtaactatttttcaagcctgagtttagttttttttwatttaatcctctttcccacaggtctttcatgaccacaggcattttctaatctcatgtctttaccagccaatgcctagtaatgaaatgctttctttcttttagactgtgtaagtggtgaattycataaaactctctgatatctttacgagaaatccacctgcagtttataatcagactatgcatctcaaggcaacactgaactctgacttggtcaagatgagaaaaaaataaaatgtttgagggaatgcagtattatcaagatttacacagctttcagtgtatttgtcaagcagctgaaca

SEQ ID NO: 40149 - DNA, 600 bp, Chicken  19866894274670_2
tcccctggatatttcctgtccagcctgtaataaaatttcttcataaagacaaattaatgggactgagaaactgcctacatgttaccttgtatgccatcctcatagaacttcctttccatcaaaatcaaatttgtcttcaactgtaactatttttcaagcctgagtttagttttttttwatttaatcctctttcccacaggtctttcatgaccacaggcattttctaatctcatgtctttaccagccaatgcctagtaatgaaatgctttctttcttttagactgtgtaagtggtgaattycataaaactctctgatatctttacgagaaatccacctgcagtttataatcagactatgcatctcaaggcaacactgaactctgacttggtcaagatgagaaaaaaataaaatgtttgagggaatgcagtattatcaagatttacacagctttcagtgtatttgtcaagcagctgaacatcttttccaaaaacaaaaaataaaggcctcttttgaaagttattaactaccagcactgatgtgttttctcatttttcattaaaatatgtccttagcaatcaataacagccaaattttaaaac

SEQ ID NO: 40150 - DNA, 600 bp, Chicken  19866894274671_1
ggtacttacaggttttgataggtttttgttgcctcttggaatgtactaaattaggacccaatctcataatttaatttttaatttaaaaaaaatagttttctcattctttgagataaagtgcccagttttcttaatctttctgtgtattttgttataggcatgtctgttttgtgtaagaacagagaaacaaattcttggttctccaagcaatttttcttcactttacaaaatatttcctttaacagaaaaaataaaattcttgttggaggaactctggatgtgcattgacagtgcaaaagwaaaaggagagaagcaggaaaatgattccaccttgggtgagatggcrtacaaagtcttgaaattctcttgaagctgtctcttctttttattwaaaaaaaatatatatatatatatgtatgtatgtatttgtaccttttttattcagtttctgctcaggacaaggcatggcctgggaaaagaaggctgtttgttacaaaaggtaggttctagtaaatgtgaatatattaatatgcaagtgtgttgattttagccatactggaacatcatcagattgggtactatttgtgtaactcttttgag

SEQ ID NO: 40151 - DNA, 600 bp, Chicken  19866894274671_2
taaattaggacccaatctcataatttaatttttaatttaaaaaaaatagttttctcattctttgagataaagtgcccagttttcttaatctttctgtgtattttgttataggcatgtctgttttgtgtaagaacagagaaacaaattcttggttctccaagcaatttttcttcactttacaaaatatttcctttaacagaaaaaataaaattcttgttggaggaactctggatgtgcattgacagtgcaaaagwaaaaggagagaagcaggaaaatgattccaccttgggtgagatggcrtacaaagtcttgaaattctcttgaagctgtctcttctttttattwaaaaaaaatatatatatatatatgtatgtatgtatttgtaccttttttattcagtttctgctcaggacaaggcatggcctgggaaaagaaggctgtttgttacaaaaggtaggttctagtaaatgtgaatatattaatatgcaagtgtgttgattttagccatactggaacatcatcagattgggtactatttgtgtaactcttttgagatggacttaaatactttactttgagattgcttgatcaagtacatgt

SEQ ID NO: 40152 - DNA, 600 bp, Chicken  19866894274671_3
atagttttctcattctttgagataaagtgcccagttttcttaatctttctgtgtattttgttataggcatgtctgttttgtgtaagaacagagaaacaaattcttggttctccaagcaatttttcttcactttacaaaatatttcctttaacagaaaaaataaaattcttgttggaggaactctggatgtgcattgacagtgcaaaagwaaaaggagagaagcaggaaaatgattccaccttgggtgagatggcrtacaaagtcttgaaattctcttgaagctgtctcttctttttattwaaaaaaaatatatatatatatatgtatgtatgtatttgtaccttttttattcagtttctgctcaggacaaggcatggcctgggaaaagaaggctgtttgttacaaaaggtaggttctagtaaatgtgaatatattaatatgcaagtgtgttgattttagccatactggaacatcatcagattgggtactatttgtgtaactcttttgagatggacttaaatactttactttgagattgcttgatcaagtacatgtgtgattagaatatttgaataccattgcaaatttttatttgaacag

SEQ ID NO: 40153 - DNA, 600 bp, Chicken  19866894274676_1
tactgacttcactttttctacatgggcactacacgagtccagctgcaatgtgtgttgtgtaaacctgatgtgaccctgctgaagtcagcagatacagacaagatttgcacaacttttctgaaatgagaattttttctatttataacatacttccttgctaaagaaatagtctaaaatggaattcactttttcagtaaatgcttttaaataaatgaaacaaaacaaaaaaaaactccatcaaatactatgaaaaccccctatttaagagcaaaaaatagcatataggccaagttttgttgytatgctgacataaagctggagtcatcctgatctcatcattaacatgagtacatctttgctctaatttaaacagacaacataaagctgttctcacgcaagtaatacatacatctgccagaaattggtgggacttcagctcaatttgacagctaaatataccatcagacaagtattgatgataaataaagataatggatgggaaacttatgttcagcagcctaagaaatccctaaatagggaaagaaattctctgactagggaaagacaggcagacatacaaaatctgtcagcacagggaaa

SEQ ID NO: 40154 - DNA, 388 bp, Chicken  19866894274681_1
tagtctgtcatgttatttaatgtttgtatcccaaatcctttggacatgctgacagcaagatagtttgataatgaatactgagtgaatgcatgtgatgaaatcagcttaagatccgaatcagttgttaagtgcttcttgtagcttagaatgagagcagtactggatgcagaaggccagatttccagagaatggtatcaagagactaatcatcacctgctgttattttcaaaattgcttaagttgtttagaatttcatattcaagaacaagatgtttaaaacatctggtccatcatccatcyaggtaaagatcaggacaaagactgacactactgcacagcaacaaacaattccagcttgatctgcttgatgaagggtatgagctgaatg

SEQ ID NO: 40155 - DNA, 599 bp, Chicken  19866894274688_1
  misc_feature (1)..(10): n is any nucleotide
nnnnnnnnnncagtgttaaaagcaaaggaaaactaatcttggagcaacagtgcatagtacagaacaacttggacatgtggtgccaactgccactaatgcaggcagtgagggacctcagttcttgttagtccactgatcccaatagaattgtatttatcagtcagtcactcgtgatacatttcaaatcccaatcagagtaatcagtcaatcactggagctaggagatttcccttcatctttatgtttcaagtctaatttccttacaatgtggtcaattttttttattatagattttttatsgtgctggacacccctggcttacaaatggcacttacaatactgcagactcattagcatagtcccatttgcgatataggggaggtttttggaaaactgttcccctttaatttcagtgctgttagtttggagcagttggaaaggattttaaaggcaggctggaagcagcaagtgtgcaacaaatcaggaaagatgactgtcctgataagaaaagagattgaactttattctgtgcttattactaagacactagggggagcgtctgtccttttcctgccaaagccccttaaaactaaaaggaa

SEQ ID NO: 40156 - DNA, 599 bp, Chicken  19866894274689_1
  misc_feature (1)..(218): n is any nucleotide
nnnnnnnnnnnnnnnnnnnnnnnnnnnnnnnnnnnnnnnnnnnnnnnnnnnnnnnnnnnnnnnnnnnnnnnnnnnnnnnnnnnnnnnnnnnnnnnnnnnnnnnnnnnnnnnnnnnnnnnnnnnnnnnnnnnnnnnnnnnnnnnnnnnnnnnnnnnnnnnnnnnnnnnnnnnnnnnnnnnnnnnnnnnnnnnnnnnnnnnnnnnnnnnnnnnnnnnnnnggaggtgtctgtatgcactacgcacagttactctgttaagctttctatcagactacattatggatctggagcacattttacrtgccccaaaacaaaaaagactagagaaacttcggcagtaaatgccttcagcaggagctggatacaaagataactactttggatcagaaagtcmctggacagaatgccacatgtccttgtagagaacattttgatgatgtgtaattgtaagattcctagtgtagtgcttttcctcaagtattacttgatggtaatagtcagagacactgtcctgggacaaacagtgctttggttggttgcctacaagaattttgtggttttcagtgaagctgacaattattacttagttattactcatgt

SEQ ID NO: 40157 - DNA, 599 bp, Chicken  19866894274689_2
  misc_feature (1)..(125): n is any nucleotide
nnnnnnnnnnnnnnnnnnnnnnnnnnnnnnnnnnnnnnnnnnnnnnnnnnnnnnnnnnnnnnnnnnnnnnnnnnnnnnnnnnnnnnnnnnnnnnnnnnnnnnnnnnnnnnnnnnnnnnnnnnnnnggaggtgtctgtatgcactacgcacagttactctgttaagctttctatcagactacattatggatctggagcacattttacrtgccccaaaacaaaaaagactagagaaacttcggcagtaaatgccttcagcaggagctggatacaaagataactactttggatcagaaagtcmctggacagaatgccacatgtccttgtagagaacattttgatgatgtgtaattgtaagattcctagtgtagtgcttttcctcaagtattacttgatggtaatagtcagagacactgtcctgggacaaacagtgctttggttggttgcctacaagaattttgtggttttcagtgaagctgacaattattacttagttattactcatgttactacctactggttaacactattgcttacaaattactaactggctaatagaataaaaacagtcggaaaaaaatatcacctctccaaactacc

SEQ ID NO: 40158 - DNA, 600 bp, Chicken  19866894274689_3
acagtgctttggttggttgcctacaagaattttgtggttttcagtgaagctgacaattattacttagttattactcatgttactacctactggttaacactattgcttacaaattactaactggctaatagaataaaaacagtcggaaaaaaatatcacctctccaaactaccagttgcaacatttactctaagaccatcccattgtctcatcagaatctccctcagagaagtctgagctaactaatatccatcatgggcatctccatccttctcctccacacttgtccttgcaaaagayttttctctacttgaggtctattatcatcacatcccttgtcattctttactatataaacccatttcctttcatgactttaattcttcttactgttctcttcctggctttctagcaagtccatatctttctcaaacagaatgcctcaaaactgtgacctcacaagttctaattaacaggaagcattactcatttatctatatatcattatattgtgactgtttttttcaaattacatatcttaaacttttggtcccagagataccttactcaggatggctaaatgcaacaaaaggagytttt

SEQ ID NO: 40159 - DNA, 600 bp, Chicken  19866894274689_4
agayttttctctacttgaggtctattatcatcacatcccttgtcattctttactatataaacccatttcctttcatgactttaattcttcttactgttctcttcctggctttctagcaagtccatatctttctcaaacagaatgcctcaaaactgtgacctcacaagttctaattaacaggaagcattactcatttatctatatatcattatattgtgactgtttttttcaaattacatatcttaaacttttggtcccagagataccttactcaggatggctaaatgcaacaaaaggagyttttgttgcataacttctctactgrctgaaactccaatttcattatactattcttctcctaattaaaatgcttatgttataattattaatctcccaaaatagatctaaactgcaaacaactgaacagggagcaggactttctaaaagtatcagagctatgtagctttggatctgcctccttatcggtattgtagaaaaataacccatgtaagctctttagttccttcacattgaagacagttcacagatgtcagtgaagaaaatatccagcaggaggcagagaactataacccttcccac

SEQ ID NO: 40160 - DNA, 600 bp, Chicken  19866894274689_5
tatcatcacatcccttgtcattctttactatataaacccatttcctttcatgactttaattcttcttactgttctcttcctggctttctagcaagtccatatctttctcaaacagaatgcctcaaaactgtgacctcacaagttctaattaacaggaagcattactcatttatctatatatcattatattgtgactgtttttttcaaattacatatcttaaacttttggtcccagagataccttactcaggatggctaaatgcaacaaaaggagyttttgttgcataacttctctactgrctgaaactccaatttcattatactattcttctcctaattaaaatgcttatgttataattattaatctcccaaaatagatctaaactgcaaacaactgaacagggagcaggactttctaaaagtatcagagctatgtagctttggatctgcctccttatcggtattgtagaaaaataacccatgtaagctctttagttccttcacattgaagacagttcacagatgtcagtgaagaaaatatccagcaggaggcagagaactataacccttcccacttgtcatcactgaatctattgaaaa

SEQ ID NO: 40161 - DNA, 600 bp, Chicken  19866894274689_6
caggaggcagagaactataacccttcccacttgtcatcactgaatctattgaaaaaatagcaatgataatattaaaacagttctggcagttaacaagtgaaaactaagcaattctgttttatttatttcatattctctttgagccttgtctccagtaataactgcaaaatagatgtgtatacatagacatgtatacatctatcttgtatgtattggcacatttaagcatattatcacacataaatactcagtatttaaatgtagggatgagtcttcatctggtacaataattgggtttaygggcttgaataagagaaagctctggggagaccagatagcagcctttcagtatcttaatgggatagatacccagcagggtctgttttgctaggacaaggggaaatggcttcaaaccaagaaaagagagatttagattggacataaggaagaagttttttttataataagggtggtgaggcactagaacaggttgtccacagaggtggtggaagtcctgtcactggagacattcgaagtcaggctgggctctgctatgagcaacctgatctatctgtaggtgtccctgttcattgcagggga

SEQ ID NO: 40162 - DNA, 600 bp, Chicken  19866894274695_1
cttgaagaccagagtgacactggatatcctccagtctacaggcacatctcctgttctccaagacctgtcaaaaatgatagagagcagtttggcaatcacctctgccagttccctcagcacatgtggatgcatcccatcaggcccatggatttgtgcgcactgatcccacccagactctcccagacaaccctctcctcaaccagagggaagcgctccacttcctggactctctctcttccctccagggtccaagagtcccgagggggagtctctgaagcaaagaccaaagcaaaggtgttyagcatcttctcagyatcccctgttactaggacaccctcctcgttcagaaggggacccacattagtcttccttttactgctgacatatgttaaaaaacccttcttatcctttatctcctttgccagatgtcaacaaactaaaatggaccaggctcatagacacctacagcagaaatttataaaaacaaacaaacaaaaaagaggaggtcaaaatcatcatgctgaatgagaagaaatgtgaatttacgtatagactcaacctatgataatggacaatagcagatatcaggaatagatacac

SEQ ID NO: 40163 - DNA, 600 bp, Chicken  19866894274695_2
tgacactggatatcctccagtctacaggcacatctcctgttctccaagacctgtcaaaaatgatagagagcagtttggcaatcacctctgccagttccctcagcacatgtggatgcatcccatcaggcccatggatttgtgcgcactgatcccacccagactctcccagacaaccctctcctcaaccagagggaagcgctccacttcctggactctctctcttccctccagggtccaagagtcccgagggggagtctctgaagcaaagaccaaagcaaaggtgttyagcatcttctcagyatcccctgttactaggacaccctcctcgttcagaaggggacccacattagtcttccttttactgctgacatatgttaaaaaacccttcttatcctttatctcctttgccagatgtcaacaaactaaaatggaccaggctcatagacacctacagcagaaatttataaaaacaaacaaacaaaaaagaggaggtcaaaatcatcatgctgaatgagaagaaatgtgaatttacgtatagactcaacctatgataatggacaatagcagatatcaggaatagatacacaaatagggcaagca

SEQ ID NO: 40164 - DNA, 600 bp, Chicken  19866894274700_1
tgaaaacacaatgaaaccaaacaattagttagaattattgctcttaaagaaaactgatttgcttgtctgtcttctaagaaaaattcagttaccgtatactgtcaaccttggcttgactggcaatgattttcctggtctagtctgctgggaaccttaaatgaacatgagcaattataaacctaaagtcttcagcaatttgtaggcattatctcaggataattgccctgaaatgttcacactgcaaagcaaaggtagataatttaaaaatccatctttctctgtctgcactacaagttgggyctaacactcttccctcctgtgggccctgcagtagcacaataaagcttggcattagtcctttgaaaatgtctgttgctgtctttaagaaagcacagaggccaagtctgagtttaaccttttctgactttattatttttacaaaacgtaacccaagtcatacttactggcaaagaaaacacagaaaaaccggaatattaaaagtcaagggaacaaatctgccctgaggagctctggccaataacatccatcgcaggcacgctctcctgctcccctggtaagatgagtacccctcagaaagaa

SEQ ID NO: 40165 - DNA, 600 bp, Chicken  19866894274700_2
tttgtaggcattatctcaggataattgccctgaaatgttcacactgcaaagcaaaggtagataatttaaaaatccatctttctctgtctgcactacaagttgggyctaacactcttccctcctgtgggccctgcagtagcacaataaagcttggcattagtcctttgaaaatgtctgttgctgtctttaagaaagcacagaggccaagtctgagtttaaccttttctgactttattatttttacaaaacgtaacccaagtcatacttactggcaaagaaaacacagaaaaaccggaataytaaaagtcaagggaacaaatctgccctgaggagctctggccaataacatccatcgcaggcacgctctcctgctcccctggtaagatgagtacccctcagaaagaaacactgggtcctggcctcctcatggytgtctatgttctacccgagcttaatattttctgggagatttaccaacgagcttcctaaagtgctctgttcttaagtgctcagctccctctctacaactgggaaaaacctcctgagaagtgctgaacatttctctcttctcacgattcacataactgcctcaactgtagg

SEQ ID NO: 40166 - DNA, 600 bp, Chicken  19866894274700_3
tgcagtagcacaataaagcttggcattagtcctttgaaaatgtctgttgctgtctttaagaaagcacagaggccaagtctgagtttaaccttttctgactttattatttttacaaaacgtaacccaagtcatacttactggcaaagaaaacacagaaaaaccggaatattaaaagtcaagggaacaaatctgccctgaggagctctggccaataacatccatcgcaggcacgctctcctgctcccctggtaagatgagtacccctcagaaagaaacactgggtcctggcctcctcatggytgtctatgttctacccgagcttaatattttctgggagatttaccaacgagcttcctaaagtgctctgttcttaagtgctcagctccctctctacaactgggaaaaacctcctgagaagtgctgaacatttctctcttctcacgattcacataactgcctcaactgtaggtggtttcctcagttccttgcccccatcccactgagcaagcacctgaaatgcacttatcgccttactgatttacagcagctcttccctccactgcgaggaaggagcactgtatctggcttacaagtagagca

SEQ ID NO: 40167 - DNA, 600 bp, Chicken  19866894274700_4
ctcaactgtaggtggtttcctcagttccttgcccccatcccactgagcaagcacctgaaatgcacttatcgccttactgatttacagcagctcttccctccactgcgaggaaggagcactgtatctggcttacaagtagagcacagtgatctgagctccttctgcaaagaaccagcagttagaagcatgtttggagtggggaggaatggaaaggctcgaactctccaaatgattctggagcccttcagcagaacatggcatcactgtgctctttcctgatttcatggaatcacagaattytacacaattgatccacaaacagaaaaacaaacaaacagtggaactggacttgtgcaaaaccacaacacttggttcagtgaggaatggagagtagtgaattctaaaggaagagcaagaagaggcccccaagatcaggaacagcaggtacagcagccacctggtacctgtacctacccttcactggatcaaaaatggttatacaaaaatcagcaaaaaacgcttatcagaaagattgtataaagagacaagaaatcagtcaagtaacaatatagtaacactgctggaaattagcaatgaaaa

SEQ ID NO: 40168 - DNA, 600 bp, Chicken  19866894274707_1
acttcgccccaaaataaatctactcctcccagagcaagagactgtttgaaatgagcaagtgagccagaagccggtccaaacctagctggagtcagatatcagcagataaatacaaaggatcctattaatttttaatacatagagaggaaggtacttataaacactgaggggcagatgtaaggcagttcctttgttatgacttttccaggctaaatgtagtgcattggacaacatatatatatatacattttaattaacaaataggaatggccacatgcctcagatacagatcaaagaaaygggatggatactgaaggcacagattaaagttggttgcctttcctctgcatctgggagtgctcagtttgtaacatttttattgataggagcactcaggtgttcagcagcggaacagagcacaaagtctggagtgttgtgttaaagtgaaacttgctgaagggaggggaagaaggataaaattggagcaggataatctctagagcacattatacatgtatgctggtcagggatggcttgcagcagctctgaaatactgtgcagcagggctctgccaacagaattcatgctgaaaacatatgt

SEQ ID NO: 40169 - DNA, 600 bp, Chicken  19866894274709_1
tttgtgggagaggtgagcgaatgctgggtgtaatgagctgctgtcgcttagaagaagttgagtggtcttctctgttaagataagctgttactcctctagaaaatgattgccgtcagtttattgcagctttattttgctctttgccagctgtgtgaggagcttgttcagcacaactggtcattccaatagcttgatttgtcccgcttcttttgggatgtccctacaatcaccttgaaaagcctgctaatagtaattgaaagcaatcttcagtttgcatgtagcactggggattgagttgcrtttcatttctgtaaaacagaaatcaaagttagctgttacagatgctaggaagctaaacaacagccagggttaccacgcttttggaaagtcgtggtggtagaggaaactccaagtgtgttttgatccaaagccccttaagatgatgtgaatcttcccagtggcttcagtgacctttgtgatcaggttctgaatgccaagtacaaccagcagtggcagaaagaggttaggcactaagtactcaaggagtttgcatttgcaggggggtacctgagtcaccagcctgtatctgggggacggggt

SEQ ID NO: 40170 - DNA, 600 bp, Chicken  19866894274711_1
gagaacagtgctgatgggagacaacccggtcataacacatttagaaaagtgtcagtgaacttcctttatttaccacacaacattgtccaaatatttccctattccatgggaacaatttataagaaatgctatcctgtggggttttttttccacccaaatatttgccgctgctcccactgctgtgtgatgctccaagtctcaagagcttcctgcgtgtgttgttcttcctctgccctttccctttccgtgcaggaagggagagcatttcacaacacatgagaacaggtctgcttcggcagygcctgctcgagtggtcctcagaagaagactcccactcctccctgctctgctgctgcccacctgcacacggacctgcctctggcatagcagctgcgggctgcaatgcactcaccaaaggcaccacagcatctcgtcctctggctgccactggcacacactccaccctccctttggactcrggttgcacggcctcagagcacacartgtgctggaaacatccattatttatatgttaaacatattcttctgcccggccaacttttcgttctctggaaatgtttttgggatgtcatccaagaa

SEQ ID NO: 40171 - DNA, 567 bp, Chicken  19866894274711_2
ctgtgtgatgctccaagtctcaagagcttcctgcgtgtgttgttcttcctctgccctttccctttccgtgcaggaagggagagcatttcacaacacatgagaacaggtctgcttcggcagygcctgctcgagtggtcctcagaagaagactcccactcctccctgctctgctgctgcccacctgcacacggacctgcctctggcatagcagctgcgggctgcaatgcactcaccaaaggcaccacagcatctcgtcctctggctgccactggcacacactccaccctccctttggactcrggttgcacggcctcagagcacacartgtgctggaaacatccattatttatatgttaaacatattcttctgcccggccaacttttcgttctctggaaatgtttttgggatgtcatccaagaatttcctgatgaggctgtgttctcagcaggctgtcctcagggtgtaggcactgcgatgcaggatggcatggagatgctcatttgatctgtgtgcaatatcaaatgcaagagacacaaaagagagcaaggtgcaacctcaaaacccca

SEQ ID NO: 40172 - DNA, 542 bp, Chicken  19866894274711_3
gcttcctgcgtgtgttgttcttcctctgccctttccctttccgtgcaggaagggagagcatttcacaacacatgagaacaggtctgcttcggcagygcctgctcgagtggtcctcagaagaagactcccactcctccctgctctgctgctgcccacctgcacacggacctgcctctggcatagcagctgcgggctgcaatgcactcaccaaaggcaccacagcatctcgtcctctggctgccactggcacacactccaccctccctttggactcrggttgcacggcctcagagcacacartgtgctggaaacatccattatttatatgttaaacatattcttctgcccggccaacttttcgttctctggaaatgtttttgggatgtcatccaagaatttcctgatgaggctgtgttctcagcaggctgtcctcagggtgtaggcactgcgatgcaggatggcatggagatgctcatttgatctgtgtgcaatatcaaatgcaagagacacaaaagagagcaaggtgcaacctcaaaacccca

SEQ ID NO: 40173 - DNA, 600 bp, Chicken  19866894274712_1
ggacagcctgccatactatcctcacgccatagagacccaacagataacaggagtattacatcagctcttccagccactgcagaaccctggcagcctaaagagggtacagccacactggcctcaattgcatacaatcacatgatcacagaaccatagaacagcccaagttggaagggacccacaggcatcactgagtctaactccttgactatctaaaaattaaatatatgtctgagagcactgtccaaaacactccttgaacttcatcagcttgaggccgtgaccactgccatggggagyctgttccagtgccggaatactctctgtagaacmttttcctaacccccatgtgacaytcccctaatgttgctctcacctgaaagaacagcacctgcctcttcacttggcttgtgaagaagcaaaccaagtgacttcagacacacygcatagttcwtcacctctatacccctcaccaatttggtagctctcagtaggtaggatacctcctattaattttacaagggctgctctgaaagtaatgatggcctccaaagttagaggcagatgttggtggtatggcagtacaggctgaaccttccc

SEQ ID NO: 40174 - DNA, 600 bp, Chicken  19866894274712_2
gacccaacagataacaggagtattacatcagctcttccagccactgcagaaccctggcagcctaaagagggtacagccacactggcctcaattgcatacaatcacatgatcacagaaccatagaacagcccaagttggaagggacccacaggcatcactgagtctaactccttgactatctaaaaattaaatatatgtctgagagcactgtccaaaacactccttgaacttcatcagcttgaggccgtgaccactgccatggggagyctgttccagtgccggaatactctctgtagaacmttttcctaacccccatgtgacaytcccctaatgttgctctcacctgaaagaacagcacctgcctcttcacttggcttgtgaagaagcaaaccaagtgacttcagacacacygcatagttcwtcacctctatacccctcaccaatttggtagctctcagtaggtaggatacctcctattaattttacaagggctgctctgaaagtaatgatggcctccaaagttagaggcagatgttggtggtatggcagtacaggctgaaccttcccaccaatattctgttacatgttgttgctgtgtga

SEQ ID NO: 40175 - DNA, 600 bp, Chicken  19866894274712_3
tacatcagctcttccagccactgcagaaccctggcagcctaaagagggtacagccacactggcctcaattgcatacaatcacatgatcacagaaccatagaacagcccaagttggaagggacccacaggcatcactgagtctaactccttgactatctaaaaattaaatatatgtctgagagcactgtccaaaacactccttgaacttcatcagcttgaggccgtgaccactgccatggggagyctgttccagtgccggaatactctctgtagaacmttttcctaacccccatgtgacaytcccctaatgttgctctcacctgaaagaacagcacctgcctcttcacttggcttgtgaagaagcaaaccaagtgacttcagacacacygcatagttcwtcacctctatacccctcaccaatttggtagctctcagtaggtaggatacctcctattaattttacaagggctgctctgaaagtaatgatggcctccaaagttagaggcagatgttggtggtatggcagtacaggctgaaccttcccaccaatattctgttacatgttgttgctgtgtgatggcagcagaggggcagtctgac

SEQ ID NO: 40176 - DNA, 600 bp, Chicken  19866894274712_4
acagaaccatagaacagcccaagttggaagggacccacaggcatcactgagtctaactccttgactatctaaaaattaaatatatgtctgagagcactgtccaaaacactccttgaacttcatcagcttgaggccgtgaccactgccatggggagyctgttccagtgccggaatactctctgtagaacmttttcctaacccccatgtgacaytcccctaatgttgctctcacctgaaagaacagcacctgcctcttcacttggcttgtgaagaagcaaaccaagtgacttcagacacacygcatagttcwtcacctctatacccctcaccaatttggtagctctcagtaggtaggatacctcctattaattttacaagggctgctctgaaagtaatgatggcctccaaagttagaggcagatgttggtggtatggcagtacaggctgaaccttcccaccaatattctgttacatgttgttgctgtgtgatggcagcagaggggcagtctgacagaatggcgcctgacatggaagtgtacatgaagcaaaggtgtgtcactgaattcctccacatggaaaaaattgcacccattgacattc

SEQ ID NO: 40177 - DNA, 600 bp, Chicken  19866894274712_5
agaacagcccaagttggaagggacccacaggcatcactgagtctaactccttgactatctaaaaattaaatatatgtctgagagcactgtccaaaacactccttgaacttcatcagcttgaggccgtgaccactgccatggggagyctgttccagtgccggaatactctctgtagaacmttttcctaacccccatgtgacaytcccctaatgttgctctcacctgaaagaacagcacctgcctcttcacttggcttgtgaagaagcaaaccaagtgacttcagacacacygcatagttcwtcacctctatacccctcaccaatttggtagctctcagtaggtaggatacctcctattaattttacaagggctgctctgaaagtaatgatggcctccaaagttagaggcagatgttggtggtatggcagtacaggctgaaccttcccaccaatattctgttacatgttgttgctgtgtgatggcagcagaggggcagtctgacagaatggcgcctgacatggaagtgtacatgaagcaaaggtgtgtcactgaattcctccacatggaaaaaattgcacccattgacattcactgacactt

SEQ ID NO: 40178 - DNA, 600 bp, Chicken  19866894274717_1
gcgagctgcccgagctctgtctccggaacacatggcagctgtcaggctgagcaccagcatgcatttccaccaccagctgaaggtgaaggagttcatgctcttcctgcccccgcccagcacacggggcattccaccagctggtatttttgatggcattttgttcttaaaaacgtcacgtttgccacatagagcatatcgcagacacaggcagcattacagataacgtgcaacactttacacacacattaatcgtgagcaaagcttcccagaaagcaaaaggcatcaaagcagcgagaagargcgtgatgcattccccccttactacatcataggagtcaaagagagattatttttactctttttcgttcaggagccattcctacaccagaatgtggagtcctgccaaagctccacagacaattggggaaccagcaagcccatgacatcagatattccggggaagtgaaactcacttaacggaagtgatttttgttacagaaaaacagatatcgaaacaggcactaacaaaagtattttaagaccatacgcgggggtggttcttttttaataactttaaaataaatctataattgtaggcag

SEQ ID NO: 40179 - DNA, 599 bp, Chicken  19866894274718_1
  misc_feature (1)..(182): n is any nucleotide
nnnnnnnnnnnnnnnnnnnnnnnnnnnnnnnnnnnnnnnnnnnnnnnnnnnnnnnnnnnnnnnnnnnnnnnnnnnnnnnnnnnnnnnnnnnnnnnnnnnnnnnnnnnnnnnnnnnnnnnnnnnnnnnnnnnnnnnnnnnnnnnnnnnnnnnnnnnnnnnnnnnnnnnnnnnnnnnnnnnnnntatatacaggaggcaaggaccagtttctctgaaatcataaatgtagatagtaaaaatagtttatcctaaaattgtttgctgacagactacaggaaatgacctttctatttattgtttytatttttacagaggagaaacttttcatttcagcgtaaggcaatataggattaatttgttgttctgcctggtcacaagtgtcagcctgttctgttgcattttgaaagctgaagtatgaagaggttaagcaaactgatcacagtgtggtggttgctaattagattgctcagctgagcaaggaacagatataattttacttacatctacgtaaaagtccacgtataattttaacaaaatcagattaataagaaagctctccggtaggacctggtgggaaaatattcagtgctaatatagtga

SEQ ID NO: 40180 - DNA, 600 bp, Chicken  19866894274718_2
agcaaggaacagatataattttacttacatctacgtaaaagtccacgtataattttaacaaaatcagattaataagaaagctctccggtaggacctggtgggaaaatattcagtgctaatatagtgaaagaccagcttctgtgttatccctcaaaggcaaagtcagaagcggtgatcacatcaccatcccaaagtggctcatttctgctgtgtcagctctccataaaccagcttccaccttattaattttcaggtgtaaagtttggcaatgacattgcagatttatgtgcaatacaagtktaagtacacaaaatgctcttcacattagctgaccctcagtctgacatgttgcttggtaatttttacgtagattagccaaataccaggacagttattcacagactttcttgaccatccggacaggatctgattatgctttccatggccaaaggccattcacatttccaaatcatccaaaggatgactaaactgcttctttatggagagtcaataaatccttggggtccctggtgcagaaggcaagcagggtttgaaacttggtgaggcagcattaggatagatgaggaaatgtgtgcttaa

SEQ ID NO: 40181 - DNA, 498 bp, Chicken  19866894274724_1
ttgtagtgatcaggttatttaacgtgtgaaatatatatatatatttaataaatttgtatccaaatacaatatagtatttaaaatgaatgatgacagcaattatttccaggtggctcaagcttgtcatggatacttatttacatttcagattgaaaaagcacttaggaggcaaactgactgattaaggacatccttttttttttttttttaggttaaatggatccactgatcaaactctctttatgttctgtggtcaccactggtatataaaacgatgcctataacaagcttatgctggtrttctatgatttggatggtgattatctacatgctcacaggaacacatttgctcagttttgcagatttctacctcaaagcatgctttttatgctgcatttctcaagcttcttccaatcagtgattctagttcctttgtcaagattttctttagctttgccaacttctgggggcatgatgattttcacagtaagaagctat

SEQ ID NO: 40182 - DNA, 599 bp, Chicken  19866894274729_1
  misc_feature (1)..(16): n is any nucleotide
nnnnnnnnnnnnnnnnaaggttccaaatgtgtcgctcccagtttttttcatgagagaggatttttgtatctttttgtttcgttttgttttcttgcactggtgtgcaaacgaaggccaaatttatgtccctagcacatcgccagagtggtgtgcagggacaaggatgtccccattggatgttggacattgacacagagcagtgatgcagtgcacgaggctgtgatctctgagctgggttagtgaaggtgccagttatgaccagccctgctcactgtctccacgtttgccctatggagcagytctgtggagcrttgttccagaacattctgtggattctgggctccaaccatctgcccttctgccagatagagcaaggatggtgtatacggaaggtgaggaagaatggggctcaccccttactcataaccatgctctaattccgtgatgtgaatgaatattactcccaagaaaggctgtcattaagatccctgaggtttttttccttcacttgatacgctaatttattctcacttaatagcaagcctttgttttgaaatgtggccaaaatgaatttataaatgtggtgttcttctaaaatt

SEQ ID NO: 40183 - DNA, 599 bp, Chicken  19866894274729_2
  misc_feature (1)..(5): n is any nucleotide
nnnnnaaggttccaaatgtgtcgctcccagtttttttcatgagagaggatttttgtatctttttgtttcgttttgttttcttgcactggtgtgcaaacgaaggccaaatttatgtccctagcacatcgccagagtggtgtgcagggacaaggatgtccccattggatgttggacattgacacagagcagtgatgcagtgcacgaggctgtgatctctgagctgggttagtgaaggtgccagttatgaccagccctgctcactgtctccacgtttgccctatggagcagytctgtggagcrttgttccagaacattctgtggattctgggctccaaccatctgcccttctgccagatagagcaaggatggtgtatacggaaggtgaggaagaatggggctcaccccttactcataaccatgctctaattccgtgatgtgaatgaatattactcccaagaaaggctgtcattaagatccctgaggtttttttccttcacttgatacgctaatttattctcacttaatagcaagcctttgttttgaaatgtggccaaaatgaatttataaatgtggtgttcttctaaaattctgcactgaaa

SEQ ID NO: 40184 - DNA, 600 bp, Chicken  19866894274737_1
ttttgttttgttttgttttcctagtgatcattattttagtattctactattgtgaaatgcagaataattgatttggtagctattttgaatctcagtattttttacagtacctgtagagctcacattttaaaaaatgatgtaaaattgaaacatacagaaaaagggctatttagaggccagagacaatgcctcactgcaccacatttaaaaaactcactctgtttagtttaccagaaagaagattgtgagtaatttgattacagttcttaagtgtgttcatagggagaaaatagcaagtamtaaaccctcttaaatccaacagaaaaggcatagcaaaaaacaatgtctgagatttcaaaagtgagacgacttcaaagggaaaataatcttgactttgtatatttatttttatttattttgttttgcttggttggcttcaagataatccaatgaaattgaaaaattattcttcatgctaggaatgtctgtctatgatatgtattaatataatgcaagtcactgagcttacagagtttcatcagagtggaatgtagcagtagagtctttgaagaccatgaatatattgagttacatatttac

SEQ ID NO: 40185 - DNA, 600 bp, Chicken  19866894274747_1
cttgcttctctggaaagagatgtgtgcactgcattaaagccctggttaagagaaactccagcactgggacagccaggtgatacctttacacagtgtgctcacctagtgcagctgtacacatccgttggcagcctcaatgctggggttctgggggcattgccttccaagacaggagctccattcccttaggatcagttgtcgcacagcttttggcaaattattcctggttacacgtaactggggaataacctgtcctggtcatctgcaggactgcacggcagtgagctgagctgtagcacrgtgtccgcacactgctgcacagtrgcatttcagctggrttcttcccattcctcacacctacttgcagctcttgttttctagtttagaccaaargtctgaagcactgtcttggttgtggaaaaatctatccaacttattttctttaagcacgcccttctcttatcrttagtttgcacattgttggtgtagagaggaatgctgccaactatgtgctcttggaagagcaggatgtctgcagaggctctgttcggttatctctgacactctgtaggctgagctctggcagctccatggaaatag

SEQ ID NO: 40186 - DNA, 600 bp, Chicken  19866894274747_2
tgcactgcattaaagccctggttaagagaaactccagcactgggacagccaggtgatacctttacacagtgtgctcacctagtgcagctgtacacatccgttggcagcctcaatgctggggttctgggggcattgccttccaagacaggagctccattcccttaggatcagttgtcgcacagcttttggcaaattattcctggttacacgtaactggggaataacctgtcctggtcatctgcaggactgcacggcagtgagctgagctgtagcacrgtgtccgcacactgctgcacagtrgcatttcagctggrttcttcccattcctcacacctacttgcagctcttgttttctagtttagaccaaargtctgaagcactgtcttggttgtggaaaaatctatccaacttattttctttaagcacgcccttctcttatcrttagtttgcacattgttggtgtagagaggaatgctgccaactatgtgctcttggaagagcaggatgtctgcagaggctctgttcggttatctctgacactctgtaggctgagctctggcagctccatggaaatagtctcctcagatatcagtgcctttc

SEQ ID NO: 40187 - DNA, 600 bp, Chicken  19866894274747_3
gccctggttaagagaaactccagcactgggacagccaggtgatacctttacacagtgtgctcacctagtgcagctgtacacatccgttggcagcctcaatgctggggttctgggggcattgccttccaagacaggagctccattcccttaggatcagttgtcgcacagcttttggcaaattattcctggttacacgtaactggggaataacctgtcctggtcatctgcaggactgcacggcagtgagctgagctgtagcacrgtgtccgcacactgctgcacagtrgcatttcagctggrttcttcccattcctcacacctacttgcagctcttgttttctagtttagaccaaargtctgaagcactgtcttggttgtggaaaaatctatccaacttattttctttaagcacgcccttctcttatcrttagtttgcacattgttggtgtagagaggaatgctgccaactatgtgctcttggaagagcaggatgtctgcagaggctctgttcggttatctctgacactctgtaggctgagctctggcagctccatggaaatagtctcctcagatatcagtgcctttccccaatctctgtgc

SEQ ID NO: 40188 - DNA, 600 bp, Chicken  19866894274747_4
tgtgctcacctagtgcagctgtacacatccgttggcagcctcaatgctggggttctgggggcattgccttccaagacaggagctccattcccttaggatcagttgtcgcacagcttttggcaaattattcctggttacacgtaactggggaataacctgtcctggtcatctgcaggactgcacggcagtgagctgagctgtagcacrgtgtccgcacactgctgcacagtrgcatttcagctggrttcttcccattcctcacacctacttgcagctcttgttttctagtttagaccaaargtctgaagcactgtcttggttgtggaaaaatctatccaacttattttctttaagcacgcccttctcttatcrttagtttgcacattgttggtgtagagaggaatgctgccaactatgtgctcttggaagagcaggatgtctgcagaggctctgttcggttatctctgacactctgtaggctgagctctggcagctccatggaaatagtctcctcagatatcagtgcctttccccaatctctgtgctgctgaaataacaggcaatagrcttcttactctgcaaagtgtaacatcaattagt

SEQ ID NO: 40189 - DNA, 600 bp, Chicken  19866894274747_5
aagacaggagctccattcccttaggatcagttgtcgcacagcttttggcaaattattcctggttacacgtaactggggaataacctgtcctggtcatctgcaggactgcacggcagtgagctgagctgtagcacrgtgtccgcacactgctgcacagtrgcatttcagctggrttcttcccattcctcacacctacttgcagctcttgttttctagtttagaccaaargtctgaagcactgtcttggttgtggaaaaatctatccaacttattttctttaagcacgcccttctcttatcrttagtttgcacattgttggtgtagagaggaatgctgccaactatgtgctcttggaagagcaggatgtctgcagaggctctgttcggttatctctgacactctgtaggctgagctctggcagctccatggaaatagtctcctcagatatcagtgcctttccccaatctctgtgctgctgaaataacaggcaatagrcttcttactctgcaaagtgtaacatcaattagtgcctccaggattctagatggtcctaactcatccacaaatcctctggagagaatttgaggcaaaagacagtct

SEQ ID NO: 40190 - DNA, 600 bp, Chicken  19866894274747_6
cttgcagctcttgttttctagtttagaccaaargtctgaagcactgtcttggttgtggaaaaatctatccaacttattttctttaagcacgcccttctcttatcrttagtttgcacattgttggtgtagagaggaatgctgccaactatgtgctcttggaagagcaggatgtctgcagaggctctgttcggttatctctgacactctgtaggctgagctctggcagctccatggaaatagtctcctcagatatcagtgcctttccccaatctctgtgctgctgaaataacaggcaatagrcttcttactctgcaaagtgtaacatcaattagtgcctccaggattctagatggtcctaactcatccacaaatcctctggagagaatttgaggcaaaagacagtctatgtgtaagtgacttattttcctacaagcgtggtaatttggataactatgtgctcaatctggaagggaaacaaattgctttcagatcgcaactacagtagatatttttccatctatgaaaatgagaaaacagaactatcctatgctgttctgagtcaaagttattacagcaacgtgtgtgtatcaatgcacttgt

SEQ ID NO: 40191 - DNA, 600 bp, Chicken  19866894274761_1
cttccactcaagtgaaagctttgagcagaatgaaatcactaaacatcccaggaatccttaggatgttctaccatttctgaaagctgtgtggaaattgtactcgagagtttttatgctgggaatacttgacagcagccctgaactgtgaaactgatccacctagttctgcaggtctgtccttctccaggggtagggatattagttactcaccacaaaggacactgatgttggaagctgagctttgtcccctcttgcacttgctatatgtgctggaactttaaatgactttattagaagttraaaagcagtgtacagacacactcaactttgtttccttcttgtcaggaagagacgatggcatcaacaatgtgcccctgtgtctgaaagacataattactkggtggaggaacaggctgctcatctcctcctgggcaggatgagaatggtgccggtaaggaatgaaaatacttccaggaaytgaaggaatgattagagcatatctaaagaggatatttgcccatgactgttaaagtgctgaattgactttcttgatcctagataaataaacagagaggaggctttctgctactgtaggctgtg

SEQ ID NO: 40192 - DNA, 600 bp, Chicken  19866894274761_2
ctcgagagtttttatgctgggaatacttgacagcagccctgaactgtgaaactgatccacctagttctgcaggtctgtccttctccaggggtagggatattagttactcaccacaaaggacactgatgttggaagctgagctttgtcccctcttgcacttgctatatgtgctggaactttaaatgactttattagaagttraaaagcagtgtacagacacactcaactttgtttccttcttgtcaggaagagacgatggcatcaacaatgtgcccctgtgtctgaaagacataattactkggtggaggaacaggctgctcatctcctcctgggcaggatgagaatggtgccggtaaggaatgaaaatacttccaggaaytgaaggaatgattagagcatatctaaagaggatatttgcccatgactgttaaagtgctgaattgactttcttgatcctagataaataaacagagaggaggctttctgctactgtaggctgtgctggaggcttcaccttttcctgtcagatgtggactttgctacagcatttcaaggtttgtttatccctgtgctggattgcttcagactgttctgcttggg

SEQ ID NO: 40193 - DNA, 600 bp, Chicken  19866894274761_3
cttctccaggggtagggatattagttactcaccacaaaggacactgatgttggaagctgagctttgtcccctcttgcacttgctatatgtgctggaactttaaatgactttattagaagttraaaagcagtgtacagacacactcaactttgtttccttcttgtcaggaagagacgatggcatcaacaatgtgcccctgtgtctgaaagacataattactkggtggaggaacaggctgctcatctcctcctgggcaggatgagaatggtgccggtaaggaatgaaaatacttccaggaaytgaaggaatgattagagcatatctaaagaggatatttgcccatgactgttaaagtgctgaattgactttcttgatcctagataaataaacagagaggaggctttctgctactgtaggctgtgctggaggcttcaccttttcctgtcagatgtggactttgctacagcatttcaaggtttgtttatccctgtgctggattgcttcagactgttctgcttgggcttgtcagctgaaaagcagagaaacatcacatgttaaatcttgatgaaatttctaagcaacataaagaagagtgcagcc

SEQ ID NO: 40194 - DNA, 600 bp, Chicken  19866894274776_1
gtcagacctgcttctggaaaaagtctccctgctccagagagagacgcggcgactcaacaccggctgtgctttccttgtctaaatattctgcagagaaaagaactagccacagctatcaaatgtgaccatctgcagacaggagctcttcggcttttgtctctctcccattccttcctgtcccctcttctttttttcttttctttaaatagcagaaacatcacgacatttcttctaaacagttctgtattacacatgcttgatcttcaaccagcaagaggtaataaacatttactactttcmttggagtacaagggtggggggtggggggaggtgggagaaaaggaagaaaccttgactacatctagtgctctgagccagtttgatttagcacttgaaagtggcagtcaggctaccacagctggcaaaaaggctgcagaaggatgcacttgggcaaggagatggcttcaagactcaagagcaatttggtggcttccgagctgtctcccctctgctccagcattctcccaagaagttaagcaagcactaggaaaacctacagttttcaagctagaactttaactctttcattcaatagcttat

SEQ ID NO: 40195 - DNA, 600 bp, Chicken  19866894274778_1
actgcagcagtggcttccttccctggacaggaaacagcccaccaatgggaacacagcacagaattagatgagcacaatacaccagggtgaaagtggcactatataaatagaagcagattgatcttaatagtatcattagaagccaaagcttcagtgttataggcttgctgcagaaagtataagaaagggacatattttaaaacttgagctacaccaatgttaataggaagttttgtctgttgtgccacaccaacatgctatactaaaaatacttccattcttcagtaatactttgctctrgaactgcagctatatcgcaccactgaacctatacagctctcttacaccaataggaagcaagtgtttgggctgaggttttactgtcacactattttgctgcttttgcctatataagagacactgcattgagtcagcccaggttccgatcagcataattaggcagaaattgtcctgtatgtgcatttcagagtctgtcccgaatttcacaagggagtacaacttcatgatagaagtgtatctgcttaagatattaaagcaacttggaataatgcttagcaaacggcactaaagaaaatctga

SEQ ID NO: 40196 - DNA, 600 bp, Chicken  19866894274781_1
tttaaatggcagctctgagttcctttgttgaagttgagatttatttgttctctaagatgagttctgttaaaagaagagaaggaagagggatgcagaataaggcaaagttgctcgctgtctttttctgttgctttttgtgaagctcaggcaaataggatgaactttattagctgctgtctaacagggctattcaaatacgaattttcaaatagcccttggctacagtgcagatgtgatgatatttatcctcatgcctttacagacctaatacaaagaaagagataataaaagagatggaarctggtgctctataaggtggggaattgacattataagctaatagcctcggagcagctgctcagggctcagatgtagagataacaaatagtctgttttccttctaccctggatggtatcccagagcaccaggcagaactaggagaagcagctcagggtacacccatgggttatgmtgcacgatgttatctatagctttgcagtacttagggtctacttgaaacgttattgctgagcaaatgtgtgcaattaactgtgctatcaaaacaaatttgcagtgaaccatatgttggtattttgtta

SEQ ID NO: 40197 - DNA, 600 bp, Chicken  19866894274781_2
ctgtctaacagggctattcaaatacgaattttcaaatagcccttggctacagtgcagatgtgatgatatttatcctcatgcctttacagacctaatacaaagaaagagataataaaagagatggaarctggtgctctataaggtggggaattgacattataagctaatagcctcggagcagctgctcagggctcagatgtagagataacaaatagtctgttttccttctaccctggatggtatcccagagcaccaggcagaactaggagaagcagctcagggtacacccatgggttatgmtgcacgatgttatctatagctttgcagtacttagggtctacttgaaacgttattgctgagcaaatgtgtgcaattaactgtgctatcaaaacaaatttgcagtgaaccatatgttggtattttgttatttggtcctcacataaaagccaataagtggctggattgaatgcaagaagcagagaagttttttataagtaagtggttgtgcaaaagagcttggattgtagctgagcaatgagatttggtttgtgtttaatttcagctgggcaatccctgtcttccctgataaaaataactgac

SEQ ID NO: 40198 - DNA, 600 bp, Chicken  19866894274785_1
atactgttattcagcccagttaatactgccatcaaccagttcttcccatattcacttctatttgtctaatactgactggctgctttccacctcttttagcctacatgagtgactactgcagcagtaaaatcatgatggcaatctctaagctgtgattatattaatcattttgctttgaatgataaatctgattttctaagctctcattacttatacacagaatgtccactcgtataggtagagcttgtaaaaagtgtgacacttaagaatattttaaattacttatgattcccaaaattrttacatctagaacctctaacagttaatgactcagggaggttaggctaaaaaaaaaaaaaatagaattaatcactgcctactttggcgtatgctttataaataggaagagttaaactcttctcagatctgtggattttcagccttgcacttgcacactgcggtgacatgtgaaatggactttttctggaaaggaagccagctgccttttgaataaaaaaagtggcagagtagctggattcaaagaaagacagatgttgatattcttcaccacacagagcaggaacaaaagtgtgaaagagc

SEQ ID NO: 40199 - DNA, 600 bp, Chicken  19866894274789_1
cacaggaagggtaatcaagaattttgctgtattcctaaaccatctccgagtgctccagtgaataacgtcccactttactaggctcctcccataacgcagcctcaaaaccacagaatcccacctggcacttctataacagaacatgcaagaacctgtaacgtgaactagaaatttcatcagcaacacattctcagccatagtgattcccattgagaaggtataatacagctttcagaacaagtttaaaattggatgatgtatcaaatatcctgcaaactactgctcacatttgcatgaatrtgtgtccatatttcaaatagargaaatcctgggtagatgtgttatttttttttattgactgatgacaccagtaagccatttcccttaactccgattatttgattgtatgaaatcttatgccttatatagcagtgttaatcctcagaaagcagtcattagcctccaaacatcactagaaagaaggctgtatgttttaagcacactktcaataaatatgatcaaacaagaaatactaattggacatgaaaaaacacccaccaccacagcttcactacttttaagaaatgctcattaagtgtc

SEQ ID NO: 40200 - DNA, 600 bp, Chicken  19866894274789_2
tttgctgtattcctaaaccatctccgagtgctccagtgaataacgtcccactttactaggctcctcccataacgcagcctcaaaaccacagaatcccacctggcacttctataacagaacatgcaagaacctgtaacgtgaactagaaatttcatcagcaacacattctcagccatagtgattcccattgagaaggtataatacagctttcagaacaagtttaaaattggatgatgtatcaaatatcctgcaaactactgctcacatttgcatgaatrtgtgtccatatttcaaatagargaaatcctgggtagatgtgttatttttttttattgactgatgacaccagtaagccatttcccttaactccgattatttgattgtatgaaatcttatgccttatatagcagtgttaatcctcagaaagcagtcattagcctccaaacatcactagaaagaaggctgtatgttttaagcacactktcaataaatatgatcaaacaagaaatactaattggacatgaaaaaacacccaccaccacagcttcactacttttaagaaatgctcattaagtgtcactgaagtacctcttaaacaat

SEQ ID NO: 40201 - DNA, 600 bp, Chicken  19866894274789_3
ccgagtgctccagtgaataacgtcccactttactaggctcctcccataacgcagcctcaaaaccacagaatcccacctggcacttctataacagaacatgcaagaacctgtaacgtgaactagaaatttcatcagcaacacattctcagccatagtgattcccattgagaaggtataatacagctttcagaacaagtttaaaattggatgatgtatcaaatatcctgcaaactactgctcacatttgcatgaatrtgtgtccatatttcaaatagargaaatcctgggtagatgtgttarttttttttattgactgatgacaccagtaagccatttcccttaactccgattatttgattgtatgaaatcttatgccttatatagcagtgttaatcctcagaaagcagtcattagcctccaaacatcactagaaagaaggctgtatgttttaagcacactktcaataaatatgatcaaacaagaaatactaattggacatgaaaaaacacccaccaccacagcttcactacttttaagaaatgctcattaagtgtcactgaagtacctcttaaacaattgtctaaggtactgagaaactgt

SEQ ID NO: 40202 - DNA, 595 bp, Chicken  19866894274789_4
cccattgagaaggtataatacagctttcagaacaagtttaaaattggatgatgtatcaaatatcctgcaaactactgctcacatttgcatgaatrtgtgtccatatttcaaatagargaaatcctgggtagatgtgttatttttttttattgactgatgacaccagtaagccatttcccttaactccgattatttgattgtatgaaatcttatgccttatatagcagtgttaatcctcagaaagcagtcattagcctccaaacatcactagaaagaaggctgtatgttttaagcacactktcaataaatatgatcaaacaagaaatactaattggacatgaaaaaacacccaccaccacagcttcactacttttaagaaatgctcattaagtgtcactgaagtacctcttaaacaattgtctaaggtactgagaaactgtatcctattgactgtaaccaaaatgatgcaccttttattaaatcattgaacaaccaacagcatgcagaactagcatttgtctgcagaattgtttttgagctcaccaagcacacggcaaagctatttatttgaagctataaacatataccacattta

SEQ ID NO: 40203 - DNA, 600 bp, Chicken  19866894274791_1
caacagggctcacattttgcttgcctggtctagaagatagctctctcctaagcccttgtgggagatgagcttcttctctccatcacattttccctgtgcagggaggataacaactcccaaggcagaagaagctagtcgtggtgcagaaggaaaatggaacaagtatatgtttctatgccagaaaactgggttggcctattcccctgcctgctcagaggtggctggcccaacaggagggaaacaagagctgacaggcagtcagaaacatgcacagggacggggagaagagctggtgggccragcaggctgtcctcatctcccatcatacttatctgccccacttgtgtggcgggcagttgttggctcactcctcagcgtggctccctttcttctctctctgcaaatgctgaagacaacttggaaatgtggaacaatgaggtccttaggactgatgggatatcttgagtataccaggatgtacctggtacatcatgaaagtgaagagattcatttaacccacttagttcctccttgtagagaagctatatttagttttgtaaacgttctctgtttctcccaaagcagtactgtcaatgcctg

SEQ ID NO: 40204 - DNA, 600 bp, Chicken  19866894274796_1
taattcaagctcagtaactgtcctgtgcacttccttccaagaagctgaacagaattatgctctgattcctagaaatgttcttactgcatacgtggaaaaaaaggaaaaacaccaaaattctggtctcgagtcctgcaaatgactgaagtgaaacctatgcaccaatttaaagctccaacccagtatagaaaagactgaaggttctgatcctagggttattctggaagtcaataaatcgttgctaatggaaagataatgagttcaagccctgcacaacagtcagtgtccccacatgatacrtccggaggcacaaggaggtcacartgtggtgaaagctttaaccacatgcagaagttcactaaggacctcactggccctgtggcagctttaaggacatcatttattgcatttcagtccgcagagttcagctccaatctcatcccacacaacttcaggtggctgggcagcctgcagtttaagacacaaaacaccttttcagctsgatgaggtttaaattgtgaggaagtgttgccaaagttttctactgaagaggctcaatcattcccttattcccacacagagytcctaaaagctgccaaa

SEQ ID NO: 40205 - DNA, 600 bp, Chicken  19866894274796_2
gtgcacttccttccaagaagctgaacagaattatgctctgattcctagaaatgttcttactgcatacgtggaaaaaaaggaaaaacaccaaaattctggtctcgagtcctgcaaatgactgaagtgaaacctatgcaccaatttaaagctccaacccagtatagaaaagactgaaggttctgatcctagggttattctggaagtcaataaatcgttgctaatggaaagataatgagttcaagccctgcacaacagtcagtgtccccacatgatacrtccggaggcacaaggaggtcacartgtggtgaaagctttaaccacatgcagaagttcactaaggacctcactggccctgtggcagctttaaggacatcatttattgcatttcagtccgcagagttcagctccaatctcatcccacacaacttcaggtggctgggcagcctgcagtttaagacacaaaacaccttttcagctsgatgaggtttaaattgtgaggaagtgttgccaaagttttctactgaagaggctcaatcattcccttattcccacacagagytcctaaaagctgccaaaacacgcaatgaaccaagtcagtct

SEQ ID NO: 40206 - DNA, 600 bp, Chicken  19866894274796_3
tctgatcctagggttattctggaagtcaataaatcgttgctaatggaaagataatgagttcaagccctgcacaacagtcagtgtccccacatgatacrtccggaggcacaaggaggtcacartgtggtgaaagctttaaccacatgcagaagttcactaaggacctcactggccctgtggcagctttaaggacatcatttattgcatttcagtccgcagagttcagctccaatctcatcccacacaacttcaggtggctgggcagcctgcagtttaagacacaaaacaccttttcagctsgatgaggtttaaattgtgaggaagtgttgccaaagttttctactgaagaggctcaatcattcccttattcccacacagagytcctaaaagctgccaaaacacgcaatgaaccaagtcagtctgcaagcagtyggagcagagattatgataaaaccttccttctcacacctaaatcacagacaccacccctgatttgcgtgtgataacccaaagcccaaaaccagcaaacatagctaagagacagactgcagtcttcaaaggggcagaaaagaaataaaacatcaataaaaacttaacgaa

SEQ ID NO: 40207 - DNA, 600 bp, Chicken  19866894274796_4
tgtccccacatgatacrtccggaggcacaaggaggtcacartgtggtgaaagctttaaccacatgcagaagttcactaaggacctcactggccctgtggcagctttaaggacatcatttattgcatttcagtccgcagagttcagctccaatctcatcccacacaacttcaggtggctgggcagcctgcagtttaagacacaaaacaccttttcagctsgatgaggtttaaattgtgaggaagtgttgccaaagttttctactgaagaggctcaatcattcccttattcccacacagagytcctaaaagctgccaaaacacgcaatgaaccaagtcagtctgcaagcagtyggagcagagattatgataaaaccttccttctcacacctaaatcacagacaccacccctgatttgcgtgtgataacccaaagcccaaaaccagcaaacatagctaagagacagactgcagtcttcaaaggggcagaaaagaaataaaacatcaataaaaacttaacgaaggacaaaggttacaaattgctcagagttctctggggaactcatcttccttacaaagcgtttaattcataagaactgactat

SEQ ID NO: 40208 - DNA, 600 bp, Chicken  19866894274796_5
gctttaaccacatgcagaagttcactaaggacctcactggccctgtggcagctttaaggacatcatttattgcatttcagtccgcagagttcagctccaatctcatcccacacaacttcaggtggctgggcagcctgcagtttaagacacaaaacaccttttcagctsgatgaggtttaaattgtgaggaagtgttgccaaagttttctactgaagaggctcaatcattcccttattcccacacagagytcctaaaagctgccaaaacacgcaatgaaccaagtcagtctgcaagcagtyggagcagagattatgataaaaccttccttctcacacctaaatcacagacaccacccctgatttgcgtgtgataacccaaagcccaaaaccagcaaacatagctaagagacagactgcagtcttcaaaggggcagaaaagaaataaaacatcaataaaaacttaacgaaggacaaaggttacaaattgctcagagttctctggggaactcatcttccttacaaagcgtttaattcataagaactgactattggttaactgatgcatttattggagtgagctgcggtgcactgattgcagtt

SEQ ID NO: 40209 - DNA, 599 bp, Chicken  19866894274812_1
  misc_feature (1)..(59): n is any nucleotide
nnnnnnnnnnnnnnnnnnnnnnnnnnnnnnnnnnnnnnnnnnnnnnnnnnnnnnnnnnntaaacaagtaccccgcgcacatttgcaagtgattaccccgccgttaagtcgggccttgggtaggtcactgtgccccccccccttccaacaccccccgatttcctcccaagcgccggtgtctgggtgggatccctgagccctgcatggggctgggggtgccaatgccatcgggtcccactttgtgccggcacagcatcagctccagctccagcaccctgctccctctggtgatccccagccytataacagctctgatccagcaaatcaccagatcggggtcacccacaagagcgtccccccaaatcccccaaagccctactgcgtgcagccttcttacagctgcatcccatgggatatgggtgggcaactgcagcaccagcgtgtaacgccggacctcctgagctcagccccagcccagrcactatcttcctttactccccttctgacagcagtccctgtgcacgctggaaggattcagctgagcaaataatgggaccgctgcgttgattttcctttggaaaatcattctaatctttcgtg

SEQ ID NO: 40210 - DNA, 600 bp, Chicken  19866894274812_2
ctgggtgggatccctgagccctgcatggggctgggggtgccaatgccatcgggtcccactttgtgccggcacagcatcagctccagctccagcaccctgctccctctggtgatccccagccytataacagctctgatccagcaaatcaccagatcggggtcacccacaagagcgtccccccaaatcccccaaagccctactgcgtgcagccttcttacagctgcatcccatgggatatgggtgggcaactgcagcaccagcgtgtaacgccggacctcctgagctcagccccagcccagrcactatcttcctttactccccttctgacagcagtccctgtgcacgctggaaggattcagctgagcaaataatgggaccgctgcgttgattttcctttggaaaatcattctaatctttcgtgttttaataaaataataaaaccggagcccttttcactcctacaccttctaaatcaaaccaggctgcctttgtcacggcatccaaatttagcacttctccaactttgggtgagtttcttttagttttgcgtctcctgttcatgttggggggaaacggcgagcggttcagattaggggattt

SEQ ID NO: 40211 - DNA, 600 bp, Chicken  19866894274815_1
ggtgatgccgcagtaatacaaacgaaaaggacccttttggaggtggtgaaaaaacagctggtgcttggtgctgtttgcaggagagggttacttaattccgtgcagccaactccttttatcaattttcactgtaatgtgtgtggcaaaccttggtaaagcattgatagggcttgttcttgactggtgaaataggttaattcatctgagaaagaagctatgtttttcttgatagtaaagggattattgaaatgctgaacaggctcttttctctattccttcctataggctgggtttctgatrctgcagactgtaacactaaaccttgtgctggttattatcaaatgcaagcatagggcagtggtttcctcttctccacacctgctgaaaataaaaaggaagtgctcattccattaagcagcctctgagcactgctggctgataggggatatacagtgggattcacctccactttaagctaaattacccaccgtagtgaagtgaacccaggacaaaattgggctgaagccatgtgacaggtttgttagcttgagcatcagggtgctcttcttcctaacagcactgagagcattgtgcatgaga

SEQ ID NO: 40212 - DNA, 600 bp, Chicken  19866894274815_2
tgggattcacctccactttaagctaaattacccaccgtagtgaagtgaacccaggacaaaattgggctgaagccatgtgacaggtttgttagcttgagcatcagggtgctcttcttcctaacagcactgagagcattgtgcatgagaggcaaggaatgctgggttgggttgaaaatgtgaacactggcagcaatgcccattaaaccaatgggtatcactttcttttttttctgtacatgtacggagttctgggtttaagtttttattattattattattattattaatgctgtgcatttraaataaaaaatggaggaaaaattaggagtctgagaacacactgaagccgaaacatacaaatcagtgattgagcagtttgtgtctattagcagagggcatgctctcattcacaatgggtaaagctaacgtctgaacagcttttcttgctggaatcaactcactgcgcaggaattggttgcaatatttgtttagctctcatctctccctgcacaatcgcatcacttgctcagctgtagccagttcctttaagtctcttgtattctgcaacaactgcctcatcactgccacggagcgcttgtt

SEQ ID NO: 40213 - DNA, 599 bp, Chicken  19866894274818_1
  misc_feature (1)..(66): n is any nucleotide
nnnnnnnnnnnnnnnnnnnnnnnnnnnnnnnnnnnnnnnnnnnnnnnnnnnnnnnnnnnnnnnnnnaaggtgaatgctttgtagcctgattcatgtatgccatggtgtcatgctacaaacgagcgtttcctcaatccattctggtttgtcagatctaccctctgcctggttcagatgttaagcatggattccacttcaaccttaagctttgtgtgaatccaatcaatatccatccaatagtcctctcataaaaattttcaacaaagtaacaaggaacatttttcaatgtaaggagagaayaggacaagggggaatggttttcaacggagacaggggaggtttaggttagatactgrgagggagtttttcacccagagggtggtgacacactggaacaggttgcccaaggaggttgtggatgycccatccctggaggcattcaaggccaggctggatgtggctctgggcagcctggtctgstggttggcgaccctgcacatagcagggggttgaaactcggtgatcattgtggtccttttcaacccaggccattctatgattctatgattaccaaattgaatccgatctgaccttacatt

SEQ ID NO: 40214 - DNA, 599 bp, Chicken  19866894274818_2
  misc_feature (1)..(10): n is any nucleotide
nnnnnnnnnnaaggtgaatgctttgtagcctgattcatgtatgccatggtgtcatgctacaaacgagcgtttcctcaatccattctggtttgtcagatctaccctctgcctggttcagatgttaagcatggattccacttcaaccttaagctttgtgtgaatccaatcaatatccatccaatagtcctctcataaaaattttcaacaaagtaacaaggaacatttttcaatgtaaggagagaayaggacaagggggaatggttttcaacggagacaggggaggtttaggttagatactgrgagggagtttttcacccagagggtggtgacacactggaacaggttgcccaaggaggttgtggatgycccatccctggaggcattcaaggccaggctggatgtggctctgggcagcctggtctgstggttggcgaccctgcacatagcagggggttgaaactcggtgatcattgtggtccttttcaacccaggccattctatgattctatgattaccaaattgaatccgatctgaccttacattaccaaggagaaaaactacactgctcctcatgtacttataacaaagtcactctcagg

SEQ ID NO: 40215 - DNA, 600 bp, Chicken  19866894274818_3
gcgtttcctcaatccattctggtttgtcagatctaccctctgcctggttcagatgttaagcatggattccacttcaaccttaagctttgtgtgaatccaatcaatatccatccaatagtcctctcataaaaattttcaacaaagtaacaaggaacatttttcaatgtaaggagagaayaggacaagggggaatggttttcaacggagacaggggaggtttaggttagatactgrgagggagtttttcacccagagggtggtgacacactggaacaggttgcccaaggaggttgtggatgycccatccctggaggcattcaaggccaggctggatgtggctctgggcagcctggtctgstggttggcgaccctgcacatagcagggggttgaaactcggtgatcattgtggtccttttcaacccaggccattctatgattctatgattaccaaattgaatccgatctgaccttacattaccaaggagaaaaactacactgctcctcatgtacttataacaaagtcactctcaggaaagttctcctgtgcctcgttgtgaagtgtgagagacttaatttcaccacagtttgcctcacatggc

SEQ ID NO: 40216 - DNA, 600 bp, Chicken  19866894274818_4
agcatggattccacttcaaccttaagctttgtgtgaatccaatcaatatccatccaatagtcctctcataaaaattttcaacaaagtaacaaggaacatttttcaatgtaaggagagaayaggacaagggggaatggttttcaacggagacaggggaggtttaggttagatactgrgagggagtttttcacccagagggtggtgacacactggaacaggttgcccaaggaggttgtggatgycccatccctggaggcattcaaggccaggctggatgtggctctgggcagcctggtctgstggttggcgaccctgcacatagcagggggttgaaactcggtgatcattgtggtccttttcaacccaggccattctatgattctatgattaccaaattgaatccgatctgaccttacattaccaaggagaaaaactacactgctcctcatgtacttataacaaagtcactctcaggaaagttctcctgtgcctcgttgtgaagtgtgagagacttaatttcaccacagtttgcctcacatggccttggacaagaaacattgtctttgtgccactttcagttctgtgggtatgaaatgagcg

SEQ ID NO: 40217 - DNA, 598 bp, Chicken  19866894274818_5
ttttgctaccgtgtttcctaaggcacacgcttgatctagaatgagatggttgagggaggggtgaagggaggaggtagggagagacctacagtttagttcaaattacatccacagtgatctaaggtttttcagaggagattttgctaatgccagcagaggagctacccttaggaggacgcgtatggatgtagcggtagtactttccatccacaccacgagatactgtaggcagtattcttacctcatggacacatccttggcatcttgcagcctgttagctcaggcattcttaggcagagrggcttgtaacactcttatctgctacagcatggttacatatgaggcatacagagcttgtacattgcgtcagaggagtgagacacacagcatcctctttacaacrtgtgcaaggtctaactccttgcaatctttccgatgagtacggcataagaggcaaaaaagtagcagagttttcatcttcagggaaggcttttgttcacttagtgaagacaactgagtggtttggtgcagatcctcatgttttcaaaagaaagcagaacgagaaattagatgaaagcaacttctaagtgtttttcaa

SEQ ID NO: 40218 - DNA, 495 bp, Chicken  19866894274818_6
tacatccacagtgatctaaggtttttcagaggagattttgctaatgccagcagaggagctacccttaggaggacgcgtatggatgtagcggtagtactttccatccacaccacgagatactgtaggcagtattcttacctcatggacacatccttggcatcttgcagcctgttagctcaggcattcttaggcagagrggcttgtaacactcttatctgctacagcatggttacatatgaggcatacagagcttgtacattgcgtcagaggagtgagacacacagcatcctctttacaacrtgtgcaaggtctaactccttgcaatctttccgatgagtacggcataagaggcaaaaaagtagcagagttttcatcttcagggaaggcttttgttcacttagtgaagacaactgagtggtttggtgcagatcctcatgttttcaaaagaaagcagaacgagaaattagatgaaagcaacttctaagtgtttttcaa

SEQ ID NO: 40219 - DNA, 600 bp, Chicken  19866894274819_1
tcaggaaatgggaaatactcaatatttgtacttgaggagaccttcaagatctgcagaaaatgcacagaaaagatccacaactatagatatccctgcctgaatgccactcttctgtgcacattaatctgttgggcattgctttagcacagaacaagtactgcagagccacagtgtaaatgaactcacactgcaaaaagcagtgcctttacttctagctgctgtctgactggcaaacacatcacacaatgacaacgtagcagtccctcacatctctgccctatttaaatctttgaggttacmtcgcctggtaaaatcacactcagagagcccattatttcttatgcatcgctgctttctctcctgggtactgtttgccttcccagtatagcctgtttatacaattaggcatttcctaccytgggacatggcctttgcagtgtcattgatcacagcaaataacaagtgcaggcaggatgctgcaaagcctcagcgggccaacgctgcgctttcctcttagcaatttttccagcagattttgttttgaacggggcatcagaagagccagaacagcctcctgtgtacctgcagcacagcaccgag

SEQ ID NO: 40220 - DNA, 600 bp, Chicken  19866894274819_2
cattaatctgttgggcattgctttagcacagaacaagtactgcagagccacagtgtaaatgaactcacactgcaaaaagcagtgcctttacttctagctgctgtctgactggcaaacacatcacacaatgacaacgtagcagtccctcacatctctgccctatttaaatctttgaggttacmtcgcctggtaaaatcacactcagagagcccattatttcttatgcatcgctgctttctctcctgggtactgtttgccttcccagtatagcctgtttatacaattaggcatttcctaccytgggacatggcctttgcagtgtcattgatcacagcaaataacaagtgcaggcaggatgctgcaaagcctcagcgggccaacgctgcgctttcctcttagcaatttttccagcagattttgttttgaacggggcatcagaagagccagaacagcctcctgtgtacctgcagcacagcaccgagtacagcacaggaacaggagcactaacattacttggaataaaatgacccaaggatagcacagtgttgtacctcatttctttgtacaccagaggaagtagttaagggttctatgggacag

SEQ ID NO: 40221 - DNA, 600 bp, Chicken  19866894274829_1
gtgagcacactgctcagagtagaagaaacatctaacacagcactgctccgtctgcttgaaagagaccaccaaagttggaacttggcaagaagtctctttttgatctgcaatgaatacaggtggcatcgacccactgatacgtggcatggtggttgatcatgcaaaactgatgaaacagaatcaaatgctcattgaggagctccagaaccacctttttgaacaaacagagataatgggtctggatctagcagctctgaacttgcagcggggaagagaccacggacttccaggtaaggagaytctaggcctgtcctgtggacaatactccttttcctttactggttatagcatctctgtgaatgtagacctgtggggggaaaaaaaatgatactttgatttgagatggcagtcagattcagagaaggagaggtctttatattgtaaagatctttctctgggggatttacaaagagtgtaagaaggacttgagaggcaaacgtgatatttggaaaaatttgttaaagatgggtagaagcaatggtgtactgcaaagaaagagtgaggggtagagcagatacagtcccaattgaccgagctcag

SEQ ID NO: 40222 - DNA, 599 bp, Chicken  19866894274832_1
  misc_feature (1)..(168): n is any nucleotide
nnnnnnnnnnnnnnnnnnnnnnnnnnnnnnnnnnnnnnnnnnnnnnnnnnnnnnnnnnnnnnnnnnnnnnnnnnnnnnnnnnnnnnnnnnnnnnnnnnnnnnnnnnnnnnnnnnnnnnnnnnnnnnnnnnnnnnnnnnnnnnnnnnnnnnnnnnnnnnnnnnnnnnnntggcactgtgaaaacaatgtgggatgactaggcatttttttccagttcttgagtaggccccttacctctgtgcagtaatgtttttcaagcctttgactttccttttgcttctgacaagtcaaggagaccacrgacacgattgtgccattgctaccactctcatgtgaggctgtccaggaagtcagggcagtagtggagctgagcactgtcaccgtcacatgctggggcttttccgtgagctcttctatccattcacctgtggggcctgggacatgccaagaaagcatgtgtgagcaaggcactctgcacatttaagtcactcatgttaaaacatccttctttatgtgaattctttttactagggaaaaagggtgaacagrcagctgtccatctccacaaagcaaagatgggaaacagcctgcagtcaacac

SEQ ID NO: 40223 - DNA, 600 bp, Chicken  19866894274832_2
tttttcaagcctttgactttccttttgcttctgacaagtcaaggagaccacrgacacgattgtgccattgctaccactctcatgtgaggctgtccaggaagtcagggcagtagtggagctgagcactgtcaccgtcacatgctggggcttttccgtgagctcttctatccattcacctgtggggcctgggacatgccaagaaagcatgtgtgagcaaggcactctgcacatttaagtcactcatgttaaaacatccttctttatgtgaattctttttactagggaaaaagggtgaacagrcagctgtccatctccacaaagcaaagatgggaaacagcctgcagtcaacactattttcaccagyagcagagcaagagttgaaaaragaaacatttgttttgaaaatctsgattgaatgtattttctgttgcttaccagaaaccacccagtagtatcagttatgctccgaaggagtattttaagagtggtgatatccagtaatgtaaagatcaattataaatattacacaccatttttcctttccctatacaccaaattacccgagtgtactatgtacctgaagtgataaaattgagttca

SEQ ID NO: 40224 - DNA, 600 bp, Chicken  19866894274832_3
ccattgctaccactctcatgtgaggctgtccaggaagtcagggcagtagtggagctgagcactgtcaccgtcacatgctggggcttttccgtgagctcttctatccattcacctgtggggcctgggacatgccaagaaagcatgtgtgagcaaggcactctgcacatttaagtcactcatgttaaaacatccttctttatgtgaattctttttactagggaaaaagggtgaacagrcagctgtccatctccacaaagcaaagatgggaaacagcctgcagtcaacactattttcaccagyagcagagcaagagttgaaaaragaaacatttgttttgaaaatctsgattgaatgtattttctgttgcttaccagaaaccacccagtagtatcagttatgctccgaaggagtattttaagagtggtgatatccagtaatgtaaagatcaattataaatattacacaccatttttcctttccctatacaccaaattacccgagtgtactatgtacctgaagtgataaaattgagttcacagtctaccatagtgaagaattctccatcagacttttttatgcacttgtttaaatatatatata

SEQ ID NO: 40225 - DNA, 600 bp, Chicken  19866894274832_4
gaggctgtccaggaagtcagggcagtagtggagctgagcactgtcaccgtcacatgctggggcttttccgtgagctcttctatccattcacctgtggggcctgggacatgccaagaaagcatgtgtgagcaaggcactctgcacatttaagtcactcatgttaaaacatccttctttatgtgaattctttttactagggaaaaagggtgaacagrcagctgtccatctccacaaagcaaagatgggaaacagcctgcagtcaacactattttcaccagyagcagagcaagagttgaaaaragaaacatttgttttgaaaatctsgattgaatgtattttctgttgcttaccagaaaccacccagtagtatcagttatgctccgaaggagtattttaagagtggtgatatccagtaatgtaaagatcaattataaatattacacaccatttttcctttccctatacaccaaattacccgagtgtactatgtacctgaagtgataaaattgagttcacagtctaccatagtgaagaattctccatcagacttttttatgcacttgtttaaatatatatatatatttaaatttggaaaataaa

SEQ ID NO: 40226 - DNA, 600 bp, Chicken  19866894274832_5
gtagtggagctgagcactgtcaccgtcacatgctggggcttttccgtgagctcttctatccattcacctgtggggcctgggacatgccaagaaagcatgtgtgagcaaggcactctgcacatttaagtcactcatgttaaaacatccttctttatgtgaattctttttactagggaaaaagggtgaacagrcagctgtccatctccacaaagcaaagatgggaaacagcctgcagtcaacactattttcaccagyagcagagcaagagttgaaaaragaaacatttgttttgaaaatctsgattgaatgtattttctgttgcttaccagaaaccacccagtagtatcagttatgctccgaaggagtattttaagagtggtgatatccagtaatgtaaagatcaattataaatattacacaccatttttcctttccctatacaccaaattacccgagtgtactatgtacctgaagtgataaaattgagttcacagtctaccatagtgaagaattctccatcagacttttttatgcacttgtttaaatatatatatatatttaaatttggaaaataaaattagttagtcttggtcaaaattt

SEQ ID NO: 40227 - DNA, 600 bp, Chicken  19866894274843_1
ctatgagcacagtggctgtgacattctaaaaaggaattgtatttcacttcttccagacagctttatgtcacgtttctgtaacgcagaacaccttcctcaattccttggagaaaaaggcctcgttagaataaagaatttcagtgtgactgtcagaggctgggagttttcagccctttccacacgtttgcccgatgtcacctaccaagcacaaacacacaagttacagtgctgcagaaggtggctcagtgctgttcaataggagaaacagcagcaaaagaagagcagaactaacagctgtgytccccgtctctctgtctcacagtaccaaagcagtgaggtgctcaatagggtacagtattccactcctctgaaggcaaacatctcggtgactttcaaagaacaggaaaaaaraaagacaagctttatcttacagcaccaaagcaagaggtcaacaacccttcttccaaaacaggacgtcagtaaggaatgtactgaatccacgctgtttcctcggaagatacaccgacagcaaagcttaaagcttggcagcgggtactgggagcgacacgtgtaactccygggtacgccaaggcaggtgca

SEQ ID NO: 40228 - DNA, 600 bp, Chicken  19866894274843_2
tggagaaaaaggcctcgttagaataaagaatttcagtgtgactgtcagaggctgggagttttcagccctttccacacgtttgcccgatgtcacctaccaagcacaaacacacaagttacagtgctgcagaaggtggctcagtgctgttcaataggagaaacagcagcaaaagaagagcagaactaacagctgtgytccccgtctctctgtctcacagtaccaaagcagtgaggtgctcaatagggtacagtattccactcctctgaaggcaaacatctcggtgactttcaaagaacaggyaaaaaraaagacaagctttatcttacagcaccaaagcaagaggtcaacaacccttcttccaaaacaggacgtcagtaaggaatgtactgaatccacgctgtttcctcggaagatacaccgacagcaaagcttaaagcttggcagcgggtactgggagcgacacgtgtaactccygggtacgccaaggcaggtgcagagcaaagacagaagggaagtgacacctactggagctcttctgagcactcacacgtcctgacaccgccgcacagcctccccctgtggtgatgacctctgtctgca

SEQ ID NO: 40229 - DNA, 600 bp, Chicken  19866894274843_3
aaaaggcctcgttagaataaagaatttcagtgtgactgtcagaggctgggagttttcagccctttccacacgtttgcccgatgtcacctaccaagcacaaacacacaagttacagtgctgcagaaggtggctcagtgctgttcaataggagaaacagcagcaaaagaagagcagaactaacagctgtgytccccgtctctctgtctcacagtaccaaagcagtgaggtgctcaatagggtacagtattccactcctctgaaggcaaacatctcggtgactttcaaagaacaggaaaaaaraaagacaagctttatcttacagcaccaaagcaagaggtcaacaacccttcttccaaaacaggacgtcagtaaggaatgtactgaatccacgctgtttcctcggaagatacaccgacagcaaagcttaaagcttggcagcgggtactgggagcgacacgtgtaactccygggtacgccaaggcaggtgcagagcaaagacagaagggaagtgacacctactggagctcttctgagcactcacacgtcctgacaccgccgcacagcctccccctgtggtgatgacctctgtctgcaccccag

SEQ ID NO: 40230 - DNA, 526 bp, Chicken  19866894274843_4
gagcagaactaacagctgtgytccccgtctctctgtctcacagtaccaaagcagtgaggtgctcaatagggtacagtattccactcctctgaaggcaaacatctcggtgactttcaaagaacaggaaaaaaraaagacaagctttatcttacagcaccaaagcaagaggtcaacaacccttcttccaaaacaggacgtcagtaaggaatgtactgaatccacgctgtttcctcggaagatacaccgacagcaaagcttaaagcttggcagcgggtactgggagcgacacgtgtaactccygggtacgccaaggcaggtgcagagcaaagacagaagggaagtgacacctactggagctcttctgagcactcacacgtcctgacaccgccgcacagcctccccctgtggtgatgacctctgtctgcaccccaggggctcccacagaaccccaaagcacagcacaacccacctcacctcggatattcgtttcgaagacggacgcgttgacatcgatatcgaaatccag

SEQ ID NO: 40231 - DNA, 599 bp, Chicken  19866894274844_1
  misc_feature (1)..(17): n is any nucleotide
nnnnnnnnnnnnnnnnnctcgcactgcacagcagcaaggggcatctcaggatgagatcccaacctccctgtcattagcctggtctagcactaaatggggaggttggtggccctgcctgtggcagaggcgttggagattcacaatcctcaagcccctccaaacccaggccattctgtgattagcagaacccctttgggttccacctcagctggtggtgtgctggtgagatggaaaggaaggtacgaggtacttctgggccttccccccttcaccccccagtaaagcactggagtgttgctytgctttgctgccaggcaggagggacaaggcctttgagcaggaatattccgttgttcttttgtctaagtttgtaagtgtttggggctgttgagttgttgggttttttcctcctctctctccgtttcctttttaattctttttaatgactttccccgatgcaatcggcagaggactgcgcagagactgcttccccctgctgagagggaaacaagactgagggaaaagggcaccaagggacctgttcacatcctctattcatctctgccagcccctgttccccaatgactagccccacacag

SEQ ID NO: 40232 - DNA, 600 bp, Chicken  19866894274846_1
ctattcagttgcatgtctctggagcaatctcaggaggcacaggtcctcctctaacctgttctgcatggtagtatggtgttgtcacttccttgctcttggctggtctcttgctgtccataggattcaaagaaagctttcttatgtgttcacatttttcttaaatgatggcatgcacactgttttaggctggagtttgtgttacaaaaccaatctatctaaggtctcagcctgctggggtagcagtgactactgcagttcttataaaaccacaccttctttagcacagcatcctgtacaacyccatatcctcctagcaccagatgtgccattttagcctgtatccacgccttccacaggtggacatcctactggtattactggaactgatttaaaaaattaaagatcttagctgaaatgacattctttccttcataatttctctgggttgggtgacactttggagttttgcctcattttcaagtgccctccatgtttattgattgtattgggtatttccttccaaactggaagcccatcagacattcatgtcaaaataaaatcaggttagaaagttcattcaccattgctttacttctacct

SEQ ID NO: 40233 - DNA, 600 bp, Chicken  19866894274846_2
ttcatgtcaaaataaaatcaggttagaaagttcattcaccattgctttacttctaccttccaactcttctcagaagtgcttttctgctgaaggagaagtgctcatcttctcaatctcacactttggaaaagtggaaggggctttctgaacaggtggttgaatagtaactatcatcgagacagaaagttgataacaaatttcaatgataaacacatttctctccagccagagtgaacatgtatcagaagaataaaactgtgtgattttaggactaaaataatagttgatagaaaacaacarcarcaacaaagaattagaagattaaattgcagattaaagaagaggtttgctttcagacagcaggtataggctgtttatgtgtgcagactatgtcactcttgtagaaagcaagttggaaatagtggggtttaactggcatcagaggaaaggaggtctgttactgtactgygagtkagggggtcagtgagaagtagacagggttgctggtgtgtatttattcagtgtctgtataaattcaaaatccagggaggttcctcagatccagggccagaacccagccatgcctaatccatcatctca

SEQ ID NO: 40234 - DNA, 600 bp, Chicken  19866894274846_3
atgtcaaaataaaatcaggttagaaagttcattcaccattgctttacttctaccttccaactcttctcagaagtgcttttctgctgaaggagaagtgctcatcttctcaatctcacactttggaaaagtggaaggggctttctgaacaggtggttgaatagtaactatcatcgagacagaaagttgataacaaatttcaatgataaacacatttctctccagccagagtgaacatgtatcagaagaataaaactgtgtgattttaggactaaaataatagttgatagaaaacaacarcarcaacaaagaattagaagattaaattgcagattaaagaagaggtttgctttcagacagcaggtataggctgtttatgtgtgcagactatgtcactcttgtagaaagcaagttggaaatagtggggtttaactggcatcagaggaaaggaggtctgttactgtactgygagtkagggggtcagtgagaagtagacagggttgctggtgtgtatttattcagtgtctgtataaattcaaaatccagggaggttcctcagatccagggccagaacccagccatgcctaatccatcatctcactc

SEQ ID NO: 40235 - DNA, 600 bp, Chicken  19866894274846_4
atcatcgagacagaaagttgataacaaatttcaatgataaacacatttctctccagccagagtgaacatgtatcagaagaataaaactgtgtgattttaggactaaaataatagttgatagaaaacaacarcarcaacaaagaattagaagattaaattgcagattaaagaagaggtttgctttcagacagcaggtataggctgtttatgtgtgcagactatgtcactcttgtagaaagcaagttggaaatagtggggtttaactggcatcagaggaaaggaggtctgttactgtactgygagtkagggggtcagtgagaagtagacagggttgctggtgtgtatttattcagtgtctgtataaattcaaaatccagggaggttcctcagatccagggccagaacccagccatgcctaatccatcatctcactcagcattcccgcatgtccattaatctctgccatggctgggagagtcccttttccatcacataccttagagctggcttcggggtctgtttactgctagattagagatttgggtgtgaagtcactctggaactcagcctctcccacagctggggctcatgcctttggga

SEQ ID NO: 40236 - DNA, 600 bp, Chicken  19866894274846_5
cgagacagaaagttgataacaaatttcaatgataaacacatttctctccagccagagtgaacatgtatcagaagaataaaactgtgtgattttaggactaaaataatagttgatagaaaacaacarcarcaacaaagaattagaagattaaattgcagattaaagaagaggtttgctttcagacagcaggtataggctgtttatgtgtgcagactatgtcactcttgtagaaagcaagttggaaatagtggggtttaactggcatcagaggaaaggaggtctgttactgtactgygagtkagggggtcagtgagaagtagacagggttgctggtgtgtatttattcagtgtctgtataaattcaaaatccagggaggttcctcagatccagggccagaacccagccatgcctaatccatcatctcactcagcattcccgcatgtccattaatctctgccatggctgggagagtcccttttccatcacataccttagagctggcttcggggtctgtttactgctagattagagatttgggtgtgaagtcactctggaactcagcctctcccacagctggggctcatgcctttgggaacact

SEQ ID NO: 40237 - DNA, 599 bp, Chicken  19866894274850_1
  misc_feature (1)..(208): n is any nucleotide
nnnnnnnnnnnnnnnnnnnnnnnnnnnnnnnnnnnnnnnnnnnnnnnnnnnnnnnnnnnnnnnnnnnnnnnnnnnnnnnnnnnnnnnnnnnnnnnnnnnnnnnnnnnnnnnnnnnnnnnnnnnnnnnnnnnnnnnnnnnnnnnnnnnnnnnnnnnnnnnnnnnnnnnnnnnnnnnnnnnnnnnnnnnnnnnnnnnnnnnnnnnnnnnntcttgtcacttgctacttgtaaatcacaaaatgataccaatgtgagggtatgatcaccatcatcattaccccagtgatgttcagttctgtgytttcacacagaaattaggcagatctgattctccagtaatgctgtcacagagagtccctagagaatgctggcttatttagcctaaacctgttaaaaagacacaatggtagatggcaagaaatactttgacactgtgggctggtgattatgggtgagccttttgctgaaagcgcctgctcatgaaattccaactttatgaaccatagtaaactcttgctgaattgttgttgattttggaggcacagagagccactattgctgaaaaatagctaactctaggtatcargatgactcaaacaa

SEQ ID NO: 40238 - DNA, 600 bp, Chicken  19866894274850_2
tgttcagttctgtgytttcacacagaaattaggcagatctgattctccagtaatgctgtcacagagagtccctagagaatgctggcttatttagcctaaacctgttaaaaagacacaatggtagatggcaagaaatactttgacactgtgggctggtgattatgggtgagccttttgctgaaagcgcctgctcatgaaattccaactttatgaaccatagtaaactcttgctgaattgttgttgattttggaggcacagagagccactattgctgaaaaatagctaactctaggtatcargatgactcaaacaatttttgctataacacctttcttttattttttatgttcccaggagaagttaagcttcactaggtattacatgaatataaactgaaagaagacccagataattatgctcgtcttagagcatactggaagatagcaaagacagttgtctttgtgaaaatccattgcatatgctgaaaactcatttgcaagaattaggcaaaggttaatgtggtattgtcagttgacactatagagtataggaaggttctggctataattataattggagatttattattacagaagaac

SEQ ID NO: 40239 - DNA, 600 bp, Chicken  19866894274852_1
cagccccaacacagtttgactctttcaggcctcctgactgtatttctctggttgcagctgtcatccagcataaagatgcaaaaatctctcaggtctctgtggtatatgcatgtgattttgaatccttccaattagtacaataaaaataatttgatcttttatgcagtgacagtaatcagaacacccgtaattgtatgttttcaatacacatatcaatcttaattaagctttacagatttttagaaattcctttaagagatgttcagtaaatctgttgtcagtttggattgaggaaactgsracacagtcatttcttcaaggccttttaacatcctgagcatagagctgatgccacaaactccacaaactcaatgtctttacacagtcattccccactctgtaccggaagaaaggccaggctctgtcctcatttttaggtgctttttgttgaaagcaaaaagcaaaaagcagtgctttgtcacacatgtaaggtgctgggactttccttccttgttttgttccttgaaaatactggggaaaatgtattgattggctggctgaactgtgaaacagattgccctggaaaagtatttcttctct

SEQ ID NO: 40240 - DNA, 600 bp, Chicken  19866894274852_2
agccccaacacagtttgactctttcaggcctcctgactgtatttctctggttgcagctgtcatccagcataaagatgcaaaaatctctcaggtctctgtggtatatgcatgtgattttgaatccttccaattagtacaataaaaataatttgatcttttatgcagtgacagtaatcagaacacccgtaattgtatgttttcaatacacatatcaatcttaattaagctttacagatttttagaaattcctttaagagatgttcagtaaatctgttgtcagtttggattgaggaaactgsracacagtcatttcttcaaggccttttaacatcctgagcatagagctgatgccacaaactccacaaactcaatgtctttacacagtcattccccactctgtaccggaagaaaggccaggctctgtcctcatttttaggtgctttttgttgaaagcaaaaagcaaaaagcagtgctttgtcacacatgtaaggtgctgggactttccttccttgttttgttccttgaaaatactggggaaaatgtattgattggctggctgaactgtgaaacagattgccctggaaaagtatttcttctctt

SEQ ID NO: 40241 - DNA, 600 bp, Chicken  19866894274856_1
caacggtcagttctcagagctgttaaattaaatactcctcgttgccagaccactaattcattttgtcttgcattccctaaccagcagtggctgaaacctgctaattcaggtagaagagaatcaattcagcttacaacatgctggaacattaggacagccagatggcagaaaagaccaaccgaaaaaggctcctgactgaatgtccttttatttttatttttttcctatcaagccatagcagagatcgctgtcgatgctggagcccaacctccatccctcatcctccactctcctgttgcrgtgctaggaaaggctcttcggagggaagcatgaggcaggggaaatcttgtattcttccctgaaatggaggatggagcaattgcaaatacaggagacagcaatccgtgtttgtttcaggactgccccagtcacctcatataaaggagaaaaaggattaatctcccagtgccaaacataaataacctgaagaaataggaccgtaagccttcactttctaaaacgaattccttttcacatatgctgactttaattacacagaagttcctcatcccttttttcaatctgtgatatgtgtctcaa

SEQ ID NO: 40242 - DNA, 600 bp, Chicken  19866894274861_1
cagctgtttgttcctggggaaacattcacttcatattgctgcaataaactgatcattgccaattaaatgcccattaattgtgtaagcaaggattactgccagatgtttacattagaaagaaaaatatcctttgctatttattttccagttataaccatcacttttcatgtagataattacatgaaagtgttttacttttaaaatattccacaaatttgggcttgagaatttataaaatacagtcttcctgggttattcctttgaaggatttattcactatacttgtaattaaaactgagygttttcttttaaagagaacactacacaaattttaatattaaatctacttttagtgcttattgatagatttaagtgttcagtgaaatcaagaaatccacacatttcttgaacactttcagagacagtgactgcaccactttgcttcacagcctgttccagtgcctcaccacactttcagggaagacattcgtcctcatatccaacctgaacctaccctggtgcaacttgaggtcatcacttcttatcactgttacccaggaaaagtcaaactcacctcaccacaggtctcccctgtgcctc

SEQ ID NO: 40243 - DNA, 600 bp, Chicken  19866894274863_1
cagagcaaggaaaaggcctgagattatcgcaagctggtacttgtgcttaaaagagaacgtagaagagaagcatcccaaggaaaccaatgctgtgacatataataggcaggaacagcaaccacaactacgctgacaactcaaactgtgctccaattgcatggtaacgggcagcagagctgtaacagttccttgaataacaacttttacacagcatgcaggagaccactgtataatttacagaagaaaaaggagttaagtcctattagaacaagggctccaagaagtttgggtaaactgtargagacagcataatgaaacctttaacatattcacacatacatgaaagtcacaaaatgtgwcytcactaccttgacatcaagtgttaaaaacgttcctatcgtacagtggaacatacagcatctgttcttcatttacaaggatgatctatttctttctttttcagcaaatcatcagctctttaaaataactctggtgaaagggatacagaaaacgggagaagtaamgtattggcttggttttgaaatcacagccatgctgactgtagtttgttggcattttataactagaatggctgtacta

SEQ ID NO: 40244 - DNA, 600 bp, Chicken  19866894274863_2
tagaagagaagcatcccaaggaaaccaatgctgtgacatataataggcaggaacagcaaccacaactacgctgacaactcaaactgtgctccaattgcatggtaacgggcagcagagctgtaacagttccttgaataacaacttttacacagcatgcaggagaccactgtataatttacagaagaaaaaggagttaagtcctattagaacaagggctccaagaagtttgggtaaactgtargagacagcataatgaaacctttaacatattcacacatacatgaaagtcacaaaatgtgwcytcactaccttgacatcaagtgttaaaaacgttcctatcgtacagtggaacatacagcatctgttcttcatttacaaggatgatctatttctttctttttcagcaaatcatcagctctttaaaataactctggtgaaagggatacagaaaacgggagaagtaamgtattggcttggttttgaaatcacagccatgctgactgtagtttgttggcattttataactagaatggctgtactatatrcacattaggtaacctttaggagtacctcgcgcaatgcagtcaagagcaatgggat

SEQ ID NO: 40245 - DNA, 600 bp, Chicken  19866894274863_3
gaagagaagcatcccaaggaaaccaatgctgtgacatataataggcaggaacagcaaccacaactacgctgacaactcaaactgtgctccaattgcatggtaacgggcagcagagctgtaacagttccttgaataacaacttttacacagcatgcaggagaccactgtataatttacagaagaaaaaggagttaagtcctattagaacaagggctccaagaagtttgggtaaactgtargagacagcataatgaaacctttaacatattcacacatacatgaaagtcacaaaatgtgwcytcactaccttgacatcaagtgttaaaaacgttcctatcgtacagtggaacatacagcatctgttcttcatttacaaggatgatctatttctttctttttcagcaaatcatcagctctttaaaataactctggtgaaagggatacagaaaacgggagaagtaamgtattggcttggttttgaaatcacagccatgctgactgtagtttgttggcattttataactagaatggctgtactatatrcacattaggtaacctttaggagtacctcgcgcaatgcagtcaagagcaatgggatgc

SEQ ID NO: 40246 - DNA, 556 bp, Chicken  19866894274863_4
actgtataatttacagaagaaaaaggagttaagtcctattagaacaagggctccaagaagtttgggtaaactgtargagacagcataatgaaacctttaacatattcacacatacatgaaagtcacaaaatgtgwcytcactaccttgacatcaagtgttaaaaacgttcctatcgtacagtggaacatacagcatctgttcttcatttacaaggatgatctatttctttctttttcagcaaatcatcagctctttaaaataactctggtgaaagggatacagaaaacgggagaagtaamgtattggcttggttttgaaatcacagccatgctgactgtagtttgttggcattttataactagaatggctgtactatatrcacattaggtaacctttaggagtacctcgcgcaatgcagtcaagagcaatgggatgctcttactacttaccccaagtgagatcaaaacattcaatagcaacgttgcaaacacttttgaagtaacaaataaatcacagaacgtatcttaggatcagaggaacaggttggtataaata

SEQ ID NO: 40247 - DNA, 476 bp, Chicken  19866894274863_5
cagcataatgaaacctttaacatattcacacatacatgaaagtcacaaaatgtgwcytcactaccttgacatcaagtgttaaaaacgttcctatcgtacagtggaacatacagcatctgttcttcatttacaaggatgatctatttctttctttttcagcaaatcatcagctctttaaaataactctggtgaaagggatacagaaaacgggagaagtaamgtattggcttggttttgaaatcacagccatgctgactgtagtttgttggcattttataactagaatggctgtactatatrcacattaggtaacctttaggagtacctcgcgcaatgcagtcaagagcaatgggatgctcttactacttaccccaagtgagatcaaaacattcaatagcaacgttgcaaacacttttgaagtaacaaataaatcacagaacgtatcttaggatcagaggaacaggttggtataaata

SEQ ID NO: 40248 - DNA, 599 bp, Chicken  19866894274864_1
  misc_feature (1)..(129): n is any nucleotide
nnnnnnnnnnnnnnnnnnnnnnnnnnnnnnnnnnnnnnnnnnnnnnnnnnnnnnnnnnnnnnnnnnnnnnnnnnnnnnnnnnnnnnnnnnnnnnnnnnnnnnnnnnnnnnnnnnnnnnnnnnnnnnnnntgaaatgctaagcagaatggggaatccattctagcttgaatgcaaatgataatcataatctcagaaacatatttctctatcaaaatgtgtttgaaaactacttctgtgcactttatttccctttttgagatgctccccctccaacatctaaaagaaaaaaatagtacttcwtgtaatttccataacctagaactattctagttcatgttggtttgatattacaatttctagatgtcacttgaagcccagaacacttatacaaggtcatgagtctgccttgtgctgaatatccaggagaaaaaaaattccctttgtttctcaacaacatcaataggtaattaaatatttgctagtagttgcagaaaacatttctttgttaagcaaagttcattctaacattgtcccacttaactgacagtcattactcttcaatgtcattgaaaagggaaaggcacacatactgaatccca

SEQ ID NO: 40249 - DNA, 599 bp, Chicken  19866894274864_2
  misc_feature (1)..(2): n is any nucleotide
nntgaaatgctaagcagaatggggaatccattctagcttgaatgcaaatgataatcataatctcagaaacatatttctctatcaaaatgtgtttgaaaactacttctgtgcactttatttccctttttgagatgctccccctccaacatctaaaagaaaaaaatagtacttcwtgtaatttccataacctagaactattctagttcatgttggtttgatattacaatttctagatgtcacttgaagcccagaacacttatacaaggtcatgagtctgccttgtgctgaatatccaggagwaaaaaaattccctttgtttctcaacaacatcaataggtaattaaatatttgctagtagttgcagaaaacatttctttgttaagcaaagttcattctaacattgtcccacttaactgacagtcattactcttcaatgtcattgaaaagggaaaggcacacatactgaatcccagtacaagtcctagcagaagtcagcagattgcaagagagatcattttgacgtactctctgcctggataccatatttcttccctgactgaaaacctgtgaaactcatgaaatgtttcactgcacatatt

SEQ ID NO: 40250 - DNA, 593 bp, Chicken  19866894274864_3
ttgtttctcaacaacatcaataggtaattaaatatttgctagtagttgcagaaaacatttctttgttaagcaaagttcattctaacattgtcccacttaactgacagtcattactcttcaatgtcattgaaaagggaaaggcacacatactgaatcccagtacaagtcctagcagaagtcagcagattgcaagagagatcattttgacgtactctctgcctggataccatatttcttccctgactgaaaacctgtgaaactcatgaaatgtttcactgcacatattaaactgttcaactyaagaaagtcccatggaacgcactactagaaaaatgggcacgcatatttcagagaagatattactgatgcagttgctgttctgctaccagcagtgtaaaagtttgaaatatgccatgagagggagctcttcttgccagggcattgctggacgtacagggtatagagatgcagctgaagagcaaccagcatgggacttgaaaagccaagaagaaaagaaaaattgcagtacttgagctgggtgtcaggaaaagctgattgaggcttattaaataatgcctcagtgcatattccat

SEQ ID NO: 40251 - DNA, 600 bp, Chicken  19866894274867_1
gagctccacatggacgggtggggtctgcccctgcctgggcacatccaaatctcttccatttgcaccctactccccttctctttgggtccccaaatgcccacgtttgggggctccaaatgccccctccttgggtccccgtatccaatccttttggcacaaacaaatctcctttctttggcaacccaattgccatctctttaggtccccgatcccctctgttctgttttcccccattctcctctctttgagatccccgttcctctccatttgacacccccagtctcttgtcagccctattcycctccctttgggccccgcaagtccctgccctgtccctgtgtccatccccagccctgagctcctccataggcagaggcgcacacagaccttggcagccatgggggtgggggcagacccagggccaaccagggggctcggatggggacacccagttctgcagttcctcatggctgccctatggctcttcttccccagtacgtgccaccagatgatgtccttcctgttcatgtgagttgaggggtgaccctggggcgagaatggggctgggatgtgttgctgtcctctctgttctcctgggac

SEQ ID NO: 40252 - DNA, 600 bp, Chicken  19866894274877_1
gtgcgaaacgtgtgttttgttgcctggcctttgatcagcaacctagagaaaacactgaagacatttcctaaacaggaaggcaaaatgcctctttgttatttcccttctctcccagcttctgcctgggatcctgaaacaatggggctcttcaggctgctttctccgtccagagattggagggacttgccatgccattgggatcctaaatttagccctgtttaaatgtcacttgcaagagttgttctgaatatcttaatttcatttatccttggtttcatggctctttgtttgaaatcctcrcagaaacattttttggatacgaagggctcagatttatggagcgcgatatgcgaaggggatgctcaccgtgtgcccccaccctgccacatcaaactcgccacgtccgaggtggaccaggagtgcctgctgctcatcctcgatgggaacacaggtcaggagctgagccccagccatcaccatgcctcgggccccagagaggggctggggggggtctctgtagggcaccaattctcacttgcagcctgggaggagctctttcttctggggttttgcttcagccatggcgttgcacccggagag

SEQ ID NO: 40253 - DNA, 599 bp, Chicken  19866894274879_1
  misc_feature (1)..(86): n is any nucleotide
nnnnnnnnnnnnnnnnnnnnnnnnnnnnnnnnnnnnnnnnnnnnnnnnnnnnnnnnnnnnnnnnnnnnnnnnnnnnnnnnnnnnnnaataccttgcaatatcttggagaggaatgtgagttgcagaactttggtctggattccaaactctccaacagttccaggatatttattcctgtccggaattttggcctaattcattggagggaagagtcagtcatgagttttggatctaacttcagactatgctatcataaatccaaaagaactggacgttctcatacaggaattcttttttttrtttttttttcctttaaaatgtgattcactcagcatgactaagggcatgtctacatagatgggtgaacaacttctttccactyaccctacaggccagctcttttccagggatcatatagtagtcaccttggcacagggctgcatgtaggttagtaagagcatccacagtcagagtcctcacagtaactgctgtgaaatgagcaataacattttcctccttttagatctgactctaatacagtgattaaaactcaactagtgcagaaatttatcagaataaataaatattctcacttagtt

SEQ ID NO: 40254 - DNA, 599 bp, Chicken  19866894274879_2
  misc_feature (1)..(4): n is any nucleotide
nnnnaataccttgcaatatcttggagaggaatgtgagttgcagaactttggtctggattccaaactctccaacagttccaggatatttattcctgtccggaattttggcctaattcattggagggaagagtcagtcatgagttttggatctaacttcagactatgctatcataaatccaaaagaactggacgttctcatacaggaattcttttttttctttttttttcctttaaaatgtgattcactcagcatgactaagggcatgtctacatagatgggtgaacaacttctttccactyaccctacaggccagctcttttccagggatcatatagtagtcaccttggcacagggctgcatgtaggttagtaagagcatccacagtcagagtcctcacagtaactgctgtgaaatgagcaataacattttcctccttttagatctgactctaatacagtgattaaaactcaactagtgcagaaatttatcagaataaataaatattctcacttagttatccaagtaaaaattaaatgtctttctgacaaaggatttttatcttgatttcttgtttctgaaggtttgctgtctttaaaat

SEQ ID NO: 40255 - DNA, 600 bp, Chicken  19866894274879_3
tagttttagttgaacaggtttagactttggaggtctgccagtggaaattgatgtttgaaaatcttggtcttacctgaaagtaagcttcatggtatacatagtctgaaatgtcatgttttgtgttgggtgggtcattacagcattcattttccttcttaattgtaacttaagcaaatatcttccacttttccattggaaaagtctttgagaaccatttctgacgattttgtgtaggaaaaaatatgtttagaatggtttcaaaacaaaattgctatttataaattaatttggttgctttcrtattatttcacgacaactcattagcagcagtggtttatagctgtcatataatggggtcacagcacaattatcaaagtgtatatttttgttctcactgccttgaaaaggacttgtgatttaatattgattgaggcatctatttagcagcccatcctgttggagttgtaacgaaatagcttcatactttgaacaaggattgaagtatataattcagtgtattaattagcrtagtgactggtttcagtttcttcaaaaagatttctgagtatcacaataaatgatagagaaagggtgtgtttt

SEQ ID NO: 40256 - DNA, 600 bp, Chicken  19866894274879_4
gtgtaggaaaaaatatgtttagaatggtttcaaaacaaaattgctatttataaattaatttggttgctttcrtattatttcacgacaactcattagcagcagtggtttatagctgtcatataatggggtcacagcacaattatcaaagtgtatatttttgttctcactgccttgaaaaggacttgtgatttaatattgattgaggcatctatttagcagcccatcctgttggagttgtaacgaaatagcttcatactttgaacaaggattgaagtatataattcagtgtattaattagcrtagtgactggtttcagtttcttcaaaaagatttctgagtatcacaataaatgatagagaaagggtgtgtttttcctagtgatttgaagtgcataaattgtgcttctcttccctgagtttattggtggagcagttctttccctagtgactgtaagcaaatcagcctaagcataggagacagtttcaccccagtgcaaacaactaaaagacaaagaaatacacaagagatatccctctggatgccaagctttgtgttgtatgcacggcaagattttctcttggctccaaccatgggtcttag

SEQ ID NO: 40257 - DNA, 561 bp, Chicken  19866894274880_1
tacgttgtctctttatgttgttttgtagcttttttggggagcattgagtatctcttgttcacaaataccagggtgttgtcagtttatacccccctctctttctctgtctttcccttccagggcccatgaggaacccagggaccatctatattgcttctaacatcttgtagatgcagtttctcccttactagaacctgttgcgtgtccaagtttttcttacttccaagttcttggctttctggtggtcagattgagctctcaggttctgtttcaagtaatgtcactgcattcattcatcastattaatctgtttatccaaaaatgccacctttaatgacagaactgcagggctgtaatctcagttaggtattggcagtgggagacacagagcataatttaatatttattttggtgtcatacggtgtttgaagaaaaaggaactgagattttcctgagttaaaaggctcgctcttcattaaaaaaaaacccaataactttatttccatttcaagtgcaggcatttttttgtatcgatatttactttagtcaatgaaaatgtag

SEQ ID NO: 40258 - DNA, 600 bp, Chicken  19866894274886_1
ttctgatgtgctctggaagtagtaacagctgtttaagattactgagccagcctggtctgttgtggtcatacccacagcaggagtgcttttcttattgtccaagaaatacggctatccttgctccttgagaacagcattcctcagactgggcttcagctacccagcagttccagcctgtgccagggtagtaaaaccaccctgggaagggctttgtggttttctgtctccccagtaaaagctgacttttatgaggccatttgtcagccagacagggacttagataacttgctgtagaccaaygcaacagctctgttagctgaaatgccaacacaaacacagtagcatccttgggcatgtggcagtttgattctgtgcctcgagaaagtgctcttctggtttatgtagttactgtgaatagactcactgtgtggacagacatgggggtgaacgaatgcctgcataagggagagttttctcttggccaaaataatgatttcatgttaatttaggtagactgctgaagaaggttgcacggacacacttgtttggatgtaaaccttatttgtttcccatcagttttgaatggctgcaatttctcta

SEQ ID NO: 40259 - DNA, 600 bp, Chicken  19866894274887_1
ctgtgggcagcaaaaccttgcacaagatctggctgcccaggaccccatccaacctggccttgcacatttcctgggatggggcaccccagtttctctggacaacctgttccagtgccagttttgcactcgctccacttttaacgttcctttgaaatactgaattggactccctgttcaatagcagtgtcatcactgatgtgggctgtggggatgatgtgaagtgtagcactttgttaccatacagattacccgcagtggtgattgatggccctgtcagatggctgtttatcatgctgtctygtattgctcattaatctttggtctctcctacctgtcagcttatttctgctgatgtcttatctaacaactggatgggaagagagagggtattatcatgtgatctgaatttgttcagtgttcatggtggtgtgtttaataaaactgacaatattgcaaatgataccattattaaataatatatgagttccattttaatattatttaaataccaaatattgtacagctccttgtagggatcatagtaatgtttcgagttctggtaagggatcccatatctattctattctatgattctgtgat

SEQ ID NO: 40260 - DNA, 600 bp, Chicken  19866894274888_1
ttatactctgactgcttttttgaactatttcagtgtttttatgtcagaccttagaggcatagtggtaatatactctttctgatttagcttatttggttagtgttggggctatgaaagatatatacatatattattctctgttgtgagggctaatagcatttcgtgcactgtgtaagtgtgagtgcattgcaccttaaatcaatatatcactgtgatctaacatgcctctttgtatttcagccttgcttctttaccagtcctggcactggctagccttgtcacattaagatctatgagcgytgttcacagtccaaatgtggaaggaatggattcttctgggcacagttgtttttgtgtgtgtggtgktgttttgtttcatttttgttttgcttctttttacaacgttgtttccatctatgctttcagatataggccagaagaacgctaaaattcagcaaggtgaagttttgaggtgtaagtagctctatcttttttcaaaactttcttagtatatgtgtttacgaatgctttagagactggagtttagtattggctttgactgtggtctaatgagaacagttctaaaatctggttttataa

SEQ ID NO: 40261 - DNA, 600 bp, Chicken  19866894274888_2
aatatactctttctgatttagcttatttggttagtgttggggctatgaaagatatatacatatattattctctgttgtgagggctaatagcatttcgtgcactgtgtaagtgtgagtgcattgcaccttaaatcaatatatcactgtgatctaacatgcctctttgtatttcagccttgcttctttaccagtcctggcactggctagccttgtcacattaagatctatgagcgytgttcacagtccaaatgtggaaggaatggattcttctgggcacagttgtttttgtgtgtgtggtgktgttttgtttcatttttgttttgcttctttttacaacgttgtttccatctatgctttcagatataggccagaagaacgctaaaattcagcaaggtgaagttttgaggtgtaagtagctctatcttttttcaaaactttcttagtatatgtgtttacgaatgctttagagactggagtttagtattggctttgactgtggtctaatgagaacagttctaaaatctggttttataaatctaagaatttcacagttgctggtctgtaaaaataaagctgtaaagatagaatgctttcccataa

SEQ ID NO: 40262 - DNA, 600 bp, Chicken  19866894274888_3
tgaggtgtaagtagctctatcttttttcaaaactttcttagtatatgtgtttacgaatgctttagagactggagtttagtattggctttgactgtggtctaatgagaacagttctaaaatctggttttataaatctaagaatttcacagttgctggtctgtaaaaataaagctgtaaagatagaatgctttcccataagctgttcgctggcatgtgtattttgttgtaatgaacaatgatggagttattaattttactgaaagttttggtctgagtttgacccctgtgattttgtgattkatttattttgaagttgcctgcttgtgctggagtttaccacattgtctttgcgttagtgtgatttcacgcactttaataaaggtcatcttcatcaagtctaatctggttttgactgcaccagacaattttgaagaccatggtwagccagggtgcatactacccaagacccaccttacttctctagttagaaaacacatgtgcatttgttttgcattatgtcttactggtaaatgggcactttgtaaactcccacctgagggcatggcacctctataaaggactgtgtcaaggttagtcata

SEQ ID NO: 40263 - DNA, 561 bp, Chicken  19866894274888_4
ttcacagttgctggtctgtaaaaataaagctgtaaagatagaatgctttcccataagctgttcgctggcatgtgtattttgttgtaatgaacaatgatggagttattaattttactgaaagttttggtctgagtttgacccctgtgattttgtgattkatttattttgaagttgcctgcttgtgctggagtttaccacattgtctttgcgttagtgtgatttcacgcactttaataaaggtcatcttcatcaagtctaatctggttttgactgcaccagacaattttgaagaccatggtwagccagggtgcatactacccaagacccaccttacttctctagttagaaaacacatgtgcatttgttttgcattatgtcttactggtaaatgggcactttgtaaactcccacctgagggcatggcacctctataaaggactgtgtcaaggttagtcataatgaggaaaatatgcaaattcaaattaaaaatattttcttaatcgaggatgcgtaaattattaccctgtggacatttaagtgacaataaatttcacatggctg

SEQ ID NO: 40264 - DNA, 599 bp, Chicken  19866894274889_1
  misc_feature (1)..(115): n is any nucleotide
nnnnnnnnnnnnnnnnnnnnnnnnnnnnnnnnnnnnnnnnnnnnnnnnnnnnnnnnnnnnnnnnnnnnnnnnnnnnnnnnnnnnnnnnnnnnnnnnnnnnnnnnnnnnnnnnnnntgagatgttatttgggacatttaaaacatcccaaaaatggtgataactttttattacactgatgaaggtatggtttcctttttaagggaaaacacagtattttaaacattgaggctgtccaattttttttgttttgttttgttttaacatttataaaagggttttaaagccatgttaccactttrtttaaggttttctgctttttgaagcacagcttattaatgccactgtgcaggaattttaaaggtgctcccaaagactttgtggcctcaccacgcgctgtgcatcctttgtcccttccctccctcctgagatctcgtatgattggaggtacttctcataaaaaatgggttgttcaggctccatgaaaggaggtcaaaacctaaggtctaagcataattttaaacaataaaaagctccaggtagcttaggatgttcctagttaataaccatagctttcctctaccattttcaggtgggtgtg

SEQ ID NO: 40265 - DNA, 599 bp, Chicken  19866894274893_1
  misc_feature (1)..(121): n is any nucleotide
nnnnnnnnnnnnnnnnnnnnnnnnnnnnnnnnnnnnnnnnnnnnnnnnnnnnnnnnnnnnnnnnnnnnnnnnnnnnnnnnnnnnnnnnnnnnnnnnnnnnnnnnnnnnnnnnnnnnnnnnnaaactagaatcagtagttgagtgattaaaaaaattcattagacttagagggaaaggctttacaaaagagtttgtagaatttatcttcaacaaaataatttcaagattaaatagtctgattaagattttagagggaaattctggtttcagtgtcagaacaaaagaatttcaatcacacartctcaggcatggcctccattaccatcatatcagtgacccacaaataccgtatttctaaaaatccagggtgtacccacctcctcctattcaaagatctgttttctttataggctcagattaccacagtgaaaaatcataaagttacccattaaccaccaccaaactaaaatctctttaaagctgatagagcaacaggactgaaarcactacagataaataaaaattaccactagccatgcaccaacctgctaggccgtttccttgggctgggaaaaagtatcttgcgtcgtctcggtcct

SEQ ID NO: 40266 - DNA, 600 bp, Chicken  19866894274893_2
cttcaacaaaataatttcaagattaaatagtctgattaagattttagagggaaattctggtttcagtgtcagaacaaaagaatttcaatcacacartctcaggcatggcctccattaccatcatatcagtgacccacaaataccgtatttctaaaaatccagggtgtacccacctcctcctattcaaagatctgttttctttataggctcagattaccacagtgaaaaatcataaagttacccattaaccaccaccaaactaaaatctctttaaagctgatagagcaacaggactgaaarcactacagataaataaaaattaccactagccatgcaccaacctgctaggccgtttccttgggctgggaaaaagtatcttgcgtcgtctcggtcctgttgaaaacaaggaatttagaaaaatgatagtaacatatttgagagagtaaaataggaaaagattcagaaaatgtcgtgtgtttcatccatttctaattccagaggaaatttcaagtgtttttgttttgtttttccatcagtgcacagcagaaatgcaaacacatacctgcctttaaggagacttggaaacctctggagcaagac

SEQ ID NO: 40267 - DNA, 599 bp, Chicken  19866894274894_1
  misc_feature (1)..(47): n is any nucleotide
nnnnnnnnnnnnnnnnnnnnnnnnnnnnnnnnnnnnnnnnnnnnnnnccgatatgttgtgatgttgtgtcagatgttttggaccttgtgttggggacatggtttagtgagaaccattggtgatgggtgaatggttggactgggtgatcctgtgggtcttttccaaccttggtgattctgtgattccatgattctatgtgatgaattctctgttgtatatcatgaattctttaaaattttatttatatatacatataaaaaaagaacagttccaggacatctatgaaagttgtgcgaaaawtttccgacttggaaaaaaacaaaatgaaacattacagaaataagtttgcatttccactgatggtaacaacagcaacattttttatcagtcgacatttcgtggatccatgcatcagttcctatgaatgtggacctttatgtggaaaagttaagatagttaagtaatgtaagtagctgcatgagagtagaagaaacaataataaaaacaaccaaatctgtttgcctttgctacagaaggaatggagttttgctggatggctcactgtagaagttgaaatatttgaagtcagccacgtttac

SEQ ID NO: 40268 - DNA, 600 bp, Chicken  19866894274897_1
gaaatgagagctatcattttccacctagtcaagaggagttaacagaccatttccaggaaggtctgcgttctggctgaagagaaaaagaagatcgagatgaacagcagaagaaacctatcgagaaccattagtggatgtcagccattgtccatctgttcacagtggaatctgtccagacctgaaggaacaactgcaacctgccccatatggctcgctcccttctgtgctggcagggctgctttggggatttgacattgttcgaggtaaaggagaagcagcacaatctgtgctcccaggaaygaacagccaattaacatgacagaacaaacagcgcttgtaacccacgggggaggttttctccttctcacctgcctgaaatgttggagctcgttcaaactgttgcagagatcctatgtcgcagtctccttatttcagtgaaatccttaaaaattagttaccaacaaaattctgcaggcagtggggagccccccaaccaccaatgcagctgcctctgaaggtgttcaaaacagcacttggacagaacacattacactgaatgttctattataattccagcacaatacacttccatcataatga

SEQ ID NO: 40269 - DNA, 600 bp, Chicken  19866894274897_2
ttgcttctcaagtcttaaatcaggaagcaaggtaatattttctgtgtgacgaagggcagcaggttcaggcccattcagagtagctatgacatccaaagtttctctttaaaattgcactattaaattgtgctatcctctttaaaactgcactataccaccttcagtggtgctagattctgcacacaaagacacagcaagtcaagtgacagacgtatccaagccaactggacggatcaaaaaactggaagtctgtaatacatttgataacctgtttgatgggactaattttgcaggtaatayggagaataattagctgtccagtagcctaagcacagccagcagatgtcccgagtgaacttcccattgtgatacatcttcagcaatgtacaaggggtacattcacccacactgactgaagggcacagtgacgccatttccagaagaaagcagagagatgctcaggctggaggctctatctctatgctgctcaggctctgaaaccatgagcagctaagatttgccagcattacttcaaacctgaggcaattttctgctcagaagtgggatttactattttgagcctggcacaaggctaaaagc

SEQ ID NO: 40270 - DNA, 482 bp, Chicken  19866894274897_3
acagcataacagtcatcagtatttgcacagacaccttcagcagctctcagactgcacagcagctgtaacaagtggcagagaacgcctggaacaccaaaaaaaatcagatacatttataggaacgtagcaagatctgcccacagataactattagacaatttaatgggctataataaaaactgtaagctccagcagcattgattttaactcgtttcagtttaaaatcagtatatccaaaattttataataatactggaaaacccattctattaaatatgtaaaaagaaaaaccagtaacarcctccacaaatggccccttgtactctaagaaaccaggaaaattagaatggagagaacagtaagagacagtcagagaaaatcaattccatagttacaacatatggaagaacacgcagccaaggcaatccataacagggaatggtcgatgatttggaacagtaaaaagaaacagcaaggtttca

SEQ ID NO: 40271 - DNA, 600 bp, Chicken  19866894274899_1
atccatacaaactgaaaggagaaaggagaaagaggaagcaaaacagcttccaggctgcttctgcacaaactttctcaacatcttcagacaccttccctatgtgagtcccaatctctgtttctgtgtggaagtccagcacttcaaagtacttgggttccttatttcccaaggaatctttaagaacgaggggccagggttgctcctaggcttgaatcagaatcattttcctacaaaaagcatctccaaggttgtgtaactcaatgctttgtgtctggacaacatggtggaagaaggaagaayccaacctccagggcaggtggatttgggatgggtgatggcatgaaatagcttgtagggttctctggtggcaggtgccagcagagggtgatgagctccttttcttattcccaatctgcaaaaagggctttgcttgcactttgtatttcaccctgtttgcagcgctgcaatgcaaagagggagagtgtccataaagagtgttttctttatggtggcagcagtgcttcgggagcagggtgctcgctgtgctgtgcactcacaccgtgattgatggaagagatcagagggaacagcagatcaaac

SEQ ID NO: 40272 - DNA, 599 bp, Chicken  19866894274903_1
  misc_feature (1)..(37): n is any nucleotide
nnnnnnnnnnnnnnnnnnnnnnnnnnnnnnnnnnnnngatgcagcatcaccttgggctggctctggagctgggcctgctttaagggcaggaatatctccccctctcctctgctttttgggagtagatgaaaagagaaaggccacaaaatgaagaaaatgtacagcaaagggtcatgaacaattctacatgttactgtggtcagatttccctgtgaaatctagagaaaatgtgtttaaaatctttcagaatgaacacttatgtagtgctcaggtacggtactgactggtgtttcaaataaktttttgtaagaattctgattatattttaatttttgacttgaggtaaaaaataaagcaggaaggcatgcactaaaactacgatttactycacttggtagcttctctgtaagaaagctgtacccatttcatgaactgagtgatggggtgtggagttaggactcctatgggaaaagcaagaagtggatatgtgagagaggtgtatgctataaaagcaggaaacttcagttctggcatttcctctcattctttcagcagtaatacgcatttgttctggttcaccactagattgtgcagctata

SEQ ID NO: 40273 - DNA, 600 bp, Chicken  19866894274903_2
ggaatatctccccctctcctctgctttttgggagtagatgaaaagagaaaggccacaaaatgaagaaaatgtacagcaaagggtcatgaacaattctacatgttactgtggtcagatttccctgtgaaatctagagaaaatgtgtttaaaatctttcagaatgaacacttatgtagtgctcaggtacggtactgactggtgtttcaaataaktttttgtaagaattctgattatattttaatttttgacttgaggtaaaaaataaagcaggaaggcatgcactaaaactacgatttactycacttggtagcttctctgtaagaaagctgtacccatttcatgaactgagtgatggggtgtggagttaggactcctatgggaaaagcaagaagtggatatgtgagagaggtgtatgctataaaagcaggaaacttcagttctggcatttcctctcattctttcagcagtaatacgcatttgttctggttcaccactagattgtgcagctataagtctatatttttttatttattattttacttggaattccaatttacaattgcaaggaatttcataatgtaggatttgatttagcatact

SEQ ID NO: 40274 - DNA, 569 bp, Chicken  19866894274904_1
tgtctccctgggctggctgcaaagtgcacctttcagcccttagaacagactctgtgcaaccagaggcgtgatgagactacataacttgggcagatttttgtctcagctcatggatctgcacagagcaggcagacagtgagggctgtggcctgtgcccaaggtccatatcacaaagatacacagatcagctcatcctgatgggccttttgatgagtaggctgaacagtgtggccaaggtcttgttactgatctgagctcccgaggcacaggtgcagggcaacataaacatgcccagcaacktattaatggattagtacagaggatttcactctccacagctagcaggacagcaccagtgcacagattacctgatcactttcaaatacgaaatgaaatcacaggtgcttaagtcccatttgtaaacagaccccgtgctgcaggataaatgctctgctccamgtggaaaaggtgagacctcttcatttctcctctgccttactcaaaggaaaacatctcacagttcagctgcttagatcagtgctgctaagtgaagcagactgtctctcaag

SEQ ID NO: 40275 - DNA, 410 bp, Chicken  19866894274904_2
ggtccatatcacaaagatacacagatcagctcatcctgatgggccttttgatgagtaggctgaacagtgtggccaaggtcttgttactgatctgagctcccgaggcacaggtgcagggcaacataaacatgcccagcaacktattaatggattagtacagaggatttcactctccacagctagcaggacagcaccagtgcacagattacctgatcactttcaaatacgaaatgaaatcacaggtgcttaagtcccatttgtaaacagaccccgtgctgcaggataaatgctctgctccamgtggaaaaggtgagacctcttcatttctcctctgccttactcaaaggaaaacatctcacagttcagctgcttagatcagtgctgctaagtgaagcagactgtctctcaag

SEQ ID NO: 40276 - DNA, 600 bp, Chicken  19866894274909_1
aagatttaaacagctaaaatggattgtatttacatagcagtttactaaacatgggacataaatttgtttctctttattggctacctaatcacataagtgtctaagctcacttggcatgcctgatttgatctacaagtttcatagaagtgcagttcttgactgtgtgcaggtctagaggagtccaaaccaaacacaccagaaactaaaatagtcttgagaatgcaagattcaaaaatgtggctgtttcttctgaagtacatgttcttggttcataccagcaaaacacaaaagttacagagytatatacatatatatatattcttcccaatttaagattttggaaatgttatttagtcagataagagtttaagctgatatcattttccacttttccagctgaatctgagaagctgtgtrggaagcaatacacgttcctgacctctggccaggcagttacaaccatcagctgtgagaaatgagacctgtgcttggaacttgattcctttttgaatgattttactccttcatttcagattctgtgacatagaatcatagaatcattagtgttagaagaaacccgatcattttgtccaaccatcc

SEQ ID NO: 40277 - DNA, 600 bp, Chicken  19866894274909_2
gcctgatttgatctacaagtttcatagaagtgcagttcttgactgtgtgcaggtctagaggagtccaaaccaaacacaccagaaactaaaatagtcttgagaatgcaagattcaaaaatgtggctgtttcttctgaagtacatgttcttggttcataccagcaaaacacaaaagttacagagytatatacatatatatatattcttcccaatttaagattttggaaatgttatttagtcagataagagtttaagctgatatcattttccacttttccagctgaatctgagaagctgtgtrggaagcaatacacgttcctgacctctggccaggcagttacaaccatcagctgtgagaaatgagacctgtgcttggaacttgattcctttttgaatgattttactccttcatttcagattctgtgacatagaatcatagaatcattagtgttagaagaaacccgatcattttgtccaaccatccacctgccaccaatattgcccactaaaccacaactcttagtgctacatctatcctttccttaaacacttcccttttccagggacagtgattctgcctcttccctgggcaacttgttcc

SEQ ID NO: 40278 - DNA, 600 bp, Chicken  19866894274914_1
tagcagaaatagatattcttgtttctgttggttagaagaaggcttctcaattctgtagccaatgaaaataacaccaagataatctgaagtgatttgctgacatttctcttaaaaccggttcatactttagagtttcactcctaaaaatatttactggctttatactggcagaacttattccacatggaggaaaaaaaggggatcctggaatgtatcctgcctctgctctaggagtaaagtgtaacttataaaataccagccccgtccaatacctgaaactttctaggtagggcctatatraaaaaaagaagatgaaaaggaggatttaatataagcacataaaataaggagcagtgcagggaaggtaggctggaacacctatttatccttttctttcctagagcatgaacaacaaactttcaacatgaaaggaacccttttccacataaaacaaatctagatagtgccactcttcaccgcaagattacattgccatcattaatgcagagaaaataaatttaaaaaatgctgtctataggaaaataaacaatacaataggtacaaaggggaatattacagaaatataatagttacaaatgt

SEQ ID NO: 40279 - DNA, 599 bp, Chicken  19866894274916_1
  misc_feature (1)..(129): n is any nucleotide
nnnnnnnnnnnnnnnnnnnnnnnnnnnnnnnnnnnnnnnnnnnnnnnnnnnnnnnnnnnnnnnnnnnnnnnnnnnnnnnnnnnnnnnnnnnnnnnnnnnnnnnnnnnnnnnnnnnnnnnnnnnnnnnnntgttaatgtttaaagggagataaggaatatcctgactctcctcagaaaaaaagggggaagagaatttacagcaagtgccaggcaatcttgttggctcccagatcttccatgcagcatatatagtaggattaactttaattgcttccatcctctatctaaagatgaagaacrggataccagctggttggaatagagctaccttaccagtcattatccatttaaaaaactgtctggctcatgcaccaattgcccataaatygggtacctcttgaggacacttttcaacctcaccagctgtcttagcatttcataaactactgccattcccacaagccatgctcaggctatttcactttctcattgaggcctgtgtcttgcaatatctggggctcacagttaggtccacagttttcagactaggggctgtgctggatcagcaccagactgctaagcaycttacaggattgagc

SEQ ID NO: 40280 - DNA, 599 bp, Chicken  19866894274916_2
  misc_feature (1)..(41): n is any nucleotide
nnnnnnnnnnnnnnnnnnnnnnnnnnnnnnnnnnnnnnnnntgttaatgtttaaagggagataaggaatatcctgactctcctcagaaaaaaagggggaagagaatttacagcaagtgccaggcaatcttgttggctcccagatcttccatgcagcatatatagtaggattaactttaattgcttccatcctctatctaaagatgaagaacrggataccagctggttggaatagagctaccttaccagtcattatccatttaaaaaactgtctggctcatgcaccaattgcccataaatygggtacctcttgaggacacttttcaacctcaccagctgtcttagcatttcataaactactgccattcccacaagccatgctcaggctatttcactttctcattgaggcctgtgtcttgcaatatctggggctcacagttaggtccacagttttcagactaggggctgtgctggatcagcaccagactgctaagcaycttacaggattgagcctctagtcgtggatctgccgtattctcactgagttgtctcttctccacaaagactgattgtttcagctgggctgctttagtagttaaa

SEQ ID NO: 40281 - DNA, 600 bp, Chicken  19866894274916_3
ctaaagatgaagaacrggataccagctggttggaatagagctaccttaccagtcattatccatttaaaaaactgtctggctcatgcaccaattgcccataaatygggtacctcttgaggacacttttcaacctcaccagctgtcttagcatttcataaactactgccattcccacaagccatgctcaggctatttcactttctcattgaggcctgtgtcttgcaatatctggggctcacagttaggtccacagttttcagactaggggctgtgctggatcagcaccagactgctaagcaycttacaggattgagcctctagtcgtggatctgccgtattctcactgagttgtctcttctccacaaagactgattgtttcagctgggctgctttagtagttaaatacagctcagatttagcagatagcagaactgcacttttgcctatacacagtgagcaaaccaaagagaaaagtaattctagtgaatgatttctcttagyccgaaaccattttctgcgctagraaatatttagaataagagaaaactgtggaatgtaaatgggcaacattttctaacgctggaaaatgtttcttctgac

SEQ ID NO: 40282 - DNA, 470 bp, Chicken  19866894274916_4
ctcattgaggcctgtgtcttgcaatatctggggctcacagttaggtccacagttttcagactaggggctgtgctggatcagcaccagactgctaagcaycttacaggattgagcctctagtcgtggatctgccgtattctcactgagttgtctcttctccacaaagactgattgtttcagctgggctgctttagtagttaaatacagctcagatttagcagatagcagaactgcacttttgcctatacacagtgagcaaaccaaagagaaaagtaattctagtgaatgatttctcttagyccgaaaccattttctgcgctagraaatatttagaataagagaaaactgtggaatgtaaatgggcaacattttctaacgctggaaaatgtttcttctgaccttataaaaggtcctttttttttctcctggatgaacaccaatctcacatacgcaatagagtattcatccct

SEQ ID NO: 40283 - DNA, 447 bp, Chicken  19866894274916_5
atatctggggctcacagttaggtccacagttttcagactaggggctgtgctggatcagcaccagactgctaagcaycttacaggattgagcctctagtcgtggatctgccgtattctcactgagttgtctcttctccacaaagactgattgtttcagctgggctgctttagtagttaaatacagctcagatttagcagatagcagaactgcacttttgcctatacacagtgagcaaaccaaagagaaaagtaattctagtgaatgatttctcttagyccgaaaccattttctgcgctagraaatatttagaataagagaaaactgtggaatgtaaatgggcaacattttctaacgctggaaaatgtttcttctgaccttataaaaggtcctttttttttctcctggatgaacaccaatctcacatacgcaatagagtattcatccct

SEQ ID NO: 40284 - DNA, 600 bp, Chicken  19866894274927_1
gagatggtcattgatccactggagctgctggaaagaagggttgatttccagattcacattgcagagtgccttggagtcaaatggctgcgaggcgctgtgggaagaggcattcagatcgggtattgtgttgcaccacttccccaccacatcagcataatgccactttgtgctgctggtgaaactgagagcacgtttagccttgctcctgtggaagtcacgagcccacataacccattatctgttttgcttgggtctttgagctgcagtaagaatttaaccttgaatctatgaaactacagragatatgttgtgttggcctaaaaatgtcactcccgtttttaaaaactctgtgtggagcagggattgtcatggctttgttatccacagagaaatgggtggggtggagctggagaaatgccccatggattactgaacagaataggcagaaagctggaggtctcggggcaaacaaaggagttatgaatatttaaaggcttttgtgcatttctgacagtgtgccgcactgctcctgtcaacacaataagtactaaaccattaataaagtaccgtgatattttcgcatgtcctgtgggtgctgaa

SEQ ID NO: 40285 - DNA, 599 bp, Chicken  19866894274936_1
  misc_feature (1)..(199): n is any nucleotide
nnnnnnnnnnnnnnnnnnnnnnnnnnnnnnnnnnnnnnnnnnnnnnnnnnnnnnnnnnnnnnnnnnnnnnnnnnnnnnnnnnnnnnnnnnnnnnnnnnnnnnnnnnnnnnnnnnnnnnnnnnnnnnnnnnnnnnnnnnnnnnnnnnnnnnnnnnnnnnnnnnnnnnnnnnnnnnnnnnnnnnnnnnnnnnnnnnnnnnnatacgtagtacctgcactcagggttgcattgctctgttctccaaaacacagcacccaggtgtcctggcttttgtgtctgtgctgcattctttgtaagttaytgagtgattgggaattgagaatatccctgccaatattctaatttgacaagtacatgcacagataataacagaaagcttttattatggtaatagagatcaagttaaaaaaaaatcagagccctgtttattaaagcttcggttgcactgtaatatgttacatttggtgactcaccctgagagtcatcgggacacgcatgctaatgctgcagtgcagaaggctgggtaatgaagagcgaaagatcattccttttagaatatgactgaaacagctctgattatccactacctgcttctctgtc

SEQ ID NO: 40286 - DNA, 573 bp, Chicken  19866894274936_2
ttaaaaaaaaatcagagccctgtttattaaagcttcggttgcactgtaatatgttacatttggtgactcaccctgagagtcatcgggacacgcatgctaatgctgcagtgcagaaggctgggtaatgaagagcgaaagatcattccttttagaatatgactgaaacagctctgattatccactacctgcttctctgtcatggctaatgcacggagcaccttatctggatgcctaatctgcttaaatgcatgactcacaccgcaggcccatgccagagagatgacagcaagagattgagcrctggggccagcagcctgcttgccagcagattgagctgtgtctcaacatcctgaggctgaagctcctagccagcgacgaagtggtggtccaagtgctctgggcatccttgctagcatgtttgctgaagtgatggggcagcaccacgggtgggatcaccgcctcatcctggtcctgtctggcagcagggcagcacggcagcacgaggcttggggcaagtgggggggcattgcagctgacagctgaagtgtgctttaaaatgcagctattttgaga

SEQ ID NO: 40287 - DNA, 600 bp, Chicken  19866894274941_1
tgtcaaaacaataattgctccagcactgagtataaagattggttattttctgctgtttctgataatgccttggattagagtgctgcagtttgaaaagactgtcctaactgctagctatctgtgtacagtagacttcatcacatatgcaactagtatggacactgtttttttcaagtgatcctgcaagttcatggaaccacagatacagaaaggtaagcatgtagcctgctctgagagtaatgtcttctatttatttccatggaaactacaacaagtacaagatgcacaaggacattattwgatagaaaaaactctcacctacaaaaacagtatttttcactatagtcaccaccattagctatgcattttcaccagtsatgaacaacagcctgcatgctgtgctcataaaaaatctgcatggcaatccagaatgtggttcgcctttcacattcctgtcaccattgctgaaatccaccacctaccacctcaccctgctgatatccactgtttggtttccataaaagttcagcaagcatcagtgaatgtcaagtttttctgtatggacgaattcaatgacacacttttgcttcatacgcacct

SEQ ID NO: 40288 - DNA, 600 bp, Chicken  19866894274941_2
gagtgctgcagtttgaaaagactgtcctaactgctagctatctgtgtacagtagacttcatcacatatgcaactagtatggacactgtttttttcaagtgatcctgcaagttcatggaaccacagatacagaaaggtaagcatgtagcctgctctgagagtaatgtcttctatttatttccatggaaactacaacaagtacaagatgcacaaggacattattwgatagaaaaaactctcacctacaaaaacagtatttttcactatagtcaccaccattagctatgcattttcaccagtsatgaacaacagcctgcatgctgtgctcataaaaaatctgcatggcaatccagaatgtggttcgcctttcacattcctgtcaccattgctgaaatccaccacctaccacctcaccctgctgatatccactgtttggtttccataaaagttcagcaagcatcagtgaatgtcaagtttttctgtatggacgaattcaatgacacacttttgcttcatacgcacctctatgtcagatgccactttgtcagactgcccctctgctgccatctgttgcacagcaaccatatgtaatggtatatgg

SEQ ID NO: 40289 - DNA, 600 bp, Chicken  19866894274952_1
gaaaatcctgcattcctgcaggcaggtctcagcctttctgtcctttctgtcactttgtcaccatcagatttaaggctgcactccctcgtgcagctatcagttcccctgggtgactgaagagagttgggacagcccgtgcatgctcaagcaaagcccatctggggctcagttcaggctgtaaacacacctctaacaccattaacagtgataatcaatcaccctcctctacaggaggcttcaggcaagaggccagagagaatcacacacatctgtgggggctttggagaagtgaggccatgrggctgaccaaggaggaggtgggaagcagcagcacagaactcagggctgtttgtacacagtacatggcatgagcagtcccacagagctgctgagctgaagtagggaattctgattcctattgattgaaatcatgaaggatgcgtactcggggactaggaaactatgaaggatgtgtattcaggaactaggaaattctctcttttgcttttaaggcagttctatttttttcccaacttatttttgggtgtgcctggaaatatttacttggaagtgcttaaaagaaaatctttgcaaagcgtg

SEQ ID NO: 40290 - DNA, 600 bp, Chicken  19866894274954_1
acttttaggctgaatttgtcttgccatagcataacttaattgtcagaaactacatccctctcttagtcagagaaccctgtcaacttgatgcttgttcttgagcaagataagaggccaaattatgcaaaataagatatcattagaagaatgaatgtctgtcctttcatggagaggctggagatgtagggattccaggctgcagaaacacccaggttctctgcaattattttcctggaatgcagggaattaaccatatcaattctaaacatatctctttctgtctctaggctattacccttwctttttccagcttcctcctttttcctttccagtatcagaacccaggtctcaccttcatcttcctttcggcaagctaagcagaacaagttttggaatcttgtgccagtaggagtagttctcaattagtcatttttatagttctaagcctgtcacttcctcatacgaacctgaagcaggactttaccaagcttcagcctcagtgttacagtgtccagcagacactgcagaaatgtaaacacacatgcattctttcaagctcagttgttaattgtaacagatggaatactcacccatttggac

SEQ ID NO: 40291 - DNA, 599 bp, Chicken  19866894274957_1
  misc_feature (1)..(177): n is any nucleotide
nnnnnnnnnnnnnnnnnnnnnnnnnnnnnnnnnnnnnnnnnnnnnnnnnnnnnnnnnnnnnnnnnnnnnnnnnnnnnnnnnnnnnnnnnnnnnnnnnnnnnnnnnnnnnnnnnnnnnnnnnnnnnnnnnnnnnnnnnnnnnnnnnnnnnnnnnnnnnnnnnnnnnnnnnnnnnnnnnggctttgcacagcttggacctctgctggccaagcagtcgggccttcatctgctcatcctgagattgcacttcagatgatgaccacatagactcagatccatcaaaacttcatataaaccccargtttgtggctcgttatctccagcccaccatctctatcccattagctgcagcaattgccacaaacctaccacagaggtatcacctgcccaggaaccacaacgccggcacccaacttcaaactgggaactatttgtcctgacttgtccttgaagacgctcatcttctcccctgatagggatctagaaaaaaatgcagagaaaacatctctgcactttaggcctgaatattaagccagttccaatgcagacctcggggctaagatattaaaaagagaaactgcctcagtgtttgatctcggg

SEQ ID NO: 40292 - DNA, 600 bp, Chicken  19866894274958_1
tcattttattgattgagatgtcttactccagggcaagatatatggggacaaacaactgttcagtgaccactgaaactgtggtgattgtggtttccacataggctcataatctcacgttctcccagtttgcagttctccaaaacttaagtattgataccacttcacatctttctctgactggtgtttgtttgacagctttagataaatggtgactttacctgctaatgctttgtgaaaagtgggacacaaagttacagaccttaactgcagaattctaatttttaatgactgattcctttycttctcttgtagtgaaaggagacatactggatgactatttaagaacagatggtgtttggattcttactaggaataaagagttttacagtacaaataatgaaaaagaatgtgcagagaaatgtgatgctgarataaattttaattgcaggtaatttctgttgaatcttaaaacactttctgccgttgcttagaagtaagtccacatcctcacatttggacagaaagcaaataaataaataaacctctggaatatgtggctagaaaaaagaaagtatggaagaggaaaacaagtaatgcttt

SEQ ID NO: 40293 - DNA, 600 bp, Chicken  19866894274958_2
gttctccaaaacttaagtattgataccacttcacatctttctctgactggtgtttgtttgacagctttagataaatggtgactttacctgctaatgctttgtgaaaagtgggacacaaagttacagaccttaactgcagaattctaatttttaatgactgattcctttycttctcttgtagtgaaaggagacatactggatgactatttaagaacagatggtgtttggattcttactaggaataaagagttttacagtacaaataatgaaaaagaatgtgcagagaaatgtgatgctgarataaattttaattgcaggtaatttctgttgaatcttaaaacactttctgccgttgcttagaagtaagtccacatcctcacatttggacagaaagcaaataaataaataaacctctggaatatgtggctagaaaaaagaaagtatggaagaggaaaacaagtaatgctttttttttttttttcatttcaacagtgtagtgaagtggtgcacatttcctacaaaaaaaacattgtaatacaataatactgagttctcttcaacccctttgctctacacatcctcttcagaaatgtgctactc

SEQ ID NO: 40294 - DNA, 599 bp, Chicken  19866894274973_1
  misc_feature (1)..(52): n is any nucleotide
nnnnnnnnnnnnnnnnnnnnnnnnnnnnnnnnnnnnnnnnnnnnnnnnnnnntaaagaataaaccaattgttaacctctgtcactccacttctgactacctgcactggagaatgctaatacgagtcctgacagtgttgcagataatcttatatgctctaaatggaagaaaatagagcagatctgcatgggatgaaacagcgctctgtcttagaacatttagatttatatgtctgcacatattattcagcacaagctttcaagagagcagaaagacaacatccctgagaaaatagcagatsgcaaaataagaattatcagtatttcaacagaaaaacaatgcttaaaacttacccattaatagagtggaatattctatcatactcttcatctgaaagatttaatctgaaataccaagaaaatagttacaaaacacatactatatacgtatttaaccataaaaatatcatagttattgaactgaaagaagaagtgtagaaaaaatacaaaaagtatggcttaaacattcagaataaaatagtccaagtgcaaatgaaacaggtacttgtcaggtatggttcaggattagatactctgagac

SEQ ID NO: 40295 - DNA, 600 bp, Chicken  19866894274978_1
ctcattcataaacacaaagaataggtatttagaatggaaatacttataagttcttctgcctttgcagttacatattttttttaagaaggtactatgaccagattcacttcacctcatttattcaagtgtctttatcctttaacagcatgcaaggagaataaacaaattcttgaagagtcaaagatacttctcttatttcacccacacttggagtcgcttcatgtacaagtacatagaaaggaaattccagtaacagactatttacagcagagcaaaaagcaactgatagaatcttttttwaaaaaaaccactttgtatacatgatagatctgaggctactgtaaacaatgttgtcttggacagacttaagatcgcagctcagagaagcttttgggaaacttttacgtggattatgtgttggaatgaatgcaagtataactttcctttttgtagatgtcccccagttccttggacgatgaagaaaaaaataacatcgttaagttgcgtaggtgcaaattgatgctgggtttacaagaggtacaccacaggtgctgactgcacaccagtaaaaaaatactgggctcaagtttggtggcagag

SEQ ID NO: 40296 - DNA, 600 bp, Chicken  19866894274982_1
agcagcctgcccagcagcacatccagccaggttgtttgggtttgaagacaagaaagtgctcctgttctgatctgactgattgaagtgagaaattactgccttatttctgattgggttccatttgagttcactttctaacctccagctcttacatccttctgctagcaatttgacatcttgcacaccctaggatgttcttctggtcaggaatgcctatatatgataatcatatcatctctcagccaaatttccagtaagccaaatagatggagctatgtgactggggaggctccttgcccraaggtataaccagtggtcaaaaattgctatggagttcctcatttgtattgaatcttaagatatgaatctcttcaacctgctgtgtgctttggcttacaggactgtcacagctgcacgaggtagctcgagcaatacaatactgtcagccttaccctctccaccttctcctgagttagcaggcacagtgacctcacatgcattgggacttcatcctcttgctgccatttggttggtcctctgaaaggaaaccctgaccttcatctttcattctctggtcttcatagtaattctctttgcttt

SEQ ID NO: 40297 - DNA, 600 bp, Chicken  19866894274982_2
tgctgtgtgctttggcttacaggactgtcacagctgcacgaggtagctcgagcaatacaatactgtcagccttaccctctccaccttctcctgagttagcaggcacagtgacctcacatgcattgggacttcatcctcttgctgccatttggttggtcctctgaaaggaaaccctgaccttcatctttcattctctggtcttcatagtaattctctttgctttgcaggaagagctggtgcccggatcgtgggagcaatgcagggtggagacacagaggaagatgtaagtaaccaatgccrtgtgcttgcagagctcctctgacagtgctttagaacacctgccctctccwcagctggagaaacagattcttacctgctcactctctgtgccatgggctcacctttttccctcctcctctccagctgactgctctctccttctcagcacacacacacttttctattgctcttttgctcttcgggtctctgcacattgccctgtgctttaacctcagcctgcagtgtgtaagtgctggcacacagctacagcaatgctgctttgctgagcatattaataggagggaatcagtgcaatgtagc

SEQ ID NO: 40298 - DNA, 600 bp, Chicken  19866894274982_3
agcaatacaatactgtcagccttaccctctccaccttctcctgagttagcaggcacagtgacctcacatgcattgggacttcatcctcttgctgccatttggttggtcctctgaaaggaaaccctgaccttcatctttcattctctggtcttcatagtaattctctttgctttgcaggaagagctggtgcccggatcgtgggagcaatgcagggtggagacacagaggaagatgtaagtaaccaatgccrtgtgcttgcagagctcctctgacagtgctttagaacacctgccctctccwcagctggagaaacagattcttacctgctcactctctgtgccatgggctcacctttttccctcctcctctccagctgactgctctctccttctcagcacacacacacttttctattgctcttttgctcttcgggtctctgcacattgccctgtgctttaacctcagcctgcagtgtgtaagtgctggcacacagctacagcaatgctgctttgctgagcatattaataggagggaatcagtgcaatgtagcaggagttggatgcgttggtgggaatcccctgatttactctgaaatcgtac

SEQ ID NO: 40299 - DNA, 600 bp, Chicken  19866894274985_1
attgtattccatttgaaaaatcctctgcagtttgaaggcttttattattttctgtcattccttttaaactgtaaacgctagcttttgggagaagatatgcagattatagagccattataagtgagtatgctttttgtgcttttaacattgtaagtgttaaaaaaattctgctttgtgattcctgtggatactgataaactcactgatttcagtgcatttgtttgcgtcagcttgatgccttttgtttgtttgttttggtttttgtttgtttgtttgttttttcccataatgctcttgatrtatttatggtctggttgcatttactaaatgcctgcctttgttttgacattgatccaaagtgctgctggttagaagcaaaatgaatttagaagatatgcagctgaacacaattcttgtatacttgtcaacaaacaaaaggatgtcttcaatcaaactacattgaacataaagttgcaacaaactttaccacagtatatatactttattgagtacaatagaagtcttagcatgggacactgaggagggccactaagatgatcagagggttggagcacttctcctgtgaagaaaggttgaggg

SEQ ID NO: 40300 - DNA, 600 bp, Chicken  19866894274990_1
aaatcaacacctcccagggaagaattgccagactgaatgacaaggacatacccaggaaacaaattatcgtgccattacacaggagaggctgaaaatttagtgagattctggcactgctgcccagagaagagggggtgccccatcccttggaggtgctcaaggcaatggatggggccctgggcagcctgagctggtgggtggcaaccagaccgcagcagggcttggaactggatgggctgtgaggtctcttccaatccaaccatgctgtgattcatctggcaatctgataacagacagaargggaggggttgtgctagccacactgtgcctgtgagtggttccgtgctgttttatctggatgagtgtctggatgaaggtcaaattggctgccttatgacccatccagtcaagcatttacacatttctccactgccagcacagttcagttcattctccagatgacatgaccagttagagaccctctaaatatctgtgctgaaatgccttgttcaacctcgggggcctggatgcaaaaccagagtgtgtgtctgagattcagcagggaagaggagtgcacagtctctctacagccagtcgaag

SEQ ID NO: 40301 - DNA, 599 bp, Chicken  19866894274991_1
  misc_feature (1)..(62): n is any nucleotide
nnnnnnnnnnnnnnnnnnnnnnnnnnnnnnnnnnnnnnnnnnnnnnnnnnnnnnnnnnnnnnaattatggaaagagcagggaacgtcctgaaaatacagaatgacagagggtagagaaatgcctaatcagctttgatgtggagcagatgtaccccaccattcctcaggcacaatgctaggcatctcagaaaacagcgaggagggaaaactctcctggatcccattaggtttcacaaagaaccctcacaggaattaaaatgtgtagcaaaaacatttctaacagccccctcccaaactttwcccatctgaggaaaggagcaaaaagcagccagagctagagttacactcttgggyatgcagcattagttttccaaattactcctgaactctcacacttcccaaagtgccccatgttatcctcaatcgggggatttttgtcctgcctcttagaggtatttaatacgttgcatgaaagtgtccaattaatgtgacaagcaaataaggaggttatctatttttaatacatcacggtggcagcaaatgcaagacaaaggaaccagcagtgtcagttaatagcattagttcaaatctttatttct

SEQ ID NO: 40302 - DNA, 599 bp, Chicken  19866894274991_2
  misc_feature (1)..(8): n is any nucleotide
nnnnnnnnaattatggaaagagcagggaacgtcctgaaaatacagaatgacagagggtagagaaatgcctaatcagctttgatgtggagcagatgtaccccaccattcctcaggcacaatgctaggcatctcagaaaacagcgaggagggaaaactctcctggatcccattaggtttcacaaagaaccctcacaggaattaaaatgtgtagcaaaaacatttctaacagccccctcccaaactttwcccatctgaggaaaggagcaaaaagcagccagagctagagttacactcttgggyatgcagcattagttttccaaattactcctgaactctcacacttcccaaagtgccccatgttatcctcaatcgggggatttttgtcctgcctcttagaggtatttaatacgttgcatgaaagtgtccaattaatgtgacaagcaaataaggaggttatctatttttaatacatcacggtggcagcaaatgcaagacaaaggaaccagcagtgtcagttaatagcattagttcaaatctttatttctaataacagagacgatcctttcaagccgttacgttagggaagcsttcaaaaaggg

SEQ ID NO: 40303 - DNA, 600 bp, Chicken  19866894274991_3
acactcttgggyatgcagcattagttttccaaattactcctgaactctcacacttcccaaagtgccccatgttatcctcaatcgggggatttttgtcctgcctcttagaggtatttaatacgttgcatgaaagtgtccaattaatgtgacaagcaaataaggaggttatctatttttaatacatcacggtggcagcaaatgcaagacaaaggaaccagcagtgtcagttaatagcattagttcaaatctttatttctaataacagagacgatcctttcaagccgttacgttagggaagcsttcaaaaagggagagggtggtacagtttacttggtaccagcattggatccaaacccacgtgggaaagcctgtgatgccagcattgccattaaacctgtgcagaaacgtggggtgccattctggatctttcagagaataaactgtgtattatatggctgttctctaccatttatatggttgaaagttagaaatagtcgtggtattttatataaaaattactcttctgtttctcctggcctcatctgttcagtatgaagaaagggcatgggttcagtattaacctcttgcctatctgcatta

SEQ ID NO: 40304 - DNA, 600 bp, Chicken  19866894274998_1
tcacgtcctgggctcttccagcagctgaagctgagcttcccagccttgccctcagcagtaacatgagatggagctgagtactgcctcttagacttctagctttcctccttagctttcctatgtacgtgatctgctgggctgtgaaatgacacaatgttctggcataaacaccaaacgctgtctgagttgtttaggacagactatttgaggtaggaaatgagatcagatgtgccatgtgctcaaagtgcagggttagcctgagctgcaggacttcctatgggagcagcctgctcctccacrgggcggctgaggctgctctgagctcagcaggacctcacagtaatgcttcaggctgagcagattgcttctgtccaaccaaactgagcgctgtaccccaaatgyaacagctgctgtgctgccatgcctgctgctygctggtcctgcrgatggagrcmcaggcagcacacactggtgggagcaatgtgccctgcctgggggctgcaaggaggggcttcattggagcctgtaacgtggggcagggttggatttctgtctggaagtcacctgcaaacagttaccgaaggaaagcctggtacctct

SEQ ID NO: 40305 - DNA, 600 bp, Chicken  19866894274998_2
tcctccttagctttcctatgtacgtgatctgctgggctgtgaaatgacacaatgttctggcataaacaccaaacgctgtctgagttgtttaggacagactatttgaggtaggaaatgagatcagatgtgccatgtgctcaaagtgcagggttagcctgagctgcaggacttcctatgggagcagcctgctcctccacrgggcggctgaggctgctctgagctcagcaggacctcacagtaatgcttcaggctgagcagattgcttctgtccaaccaaactgagcgctgtaccccaaatgyaacagctgctgtgctgccatgcctgctgctygctggtcctgcrgatggagrcmcaggcagcacacactggtgggagcaatgtgccctgcctgggggctgcaaggaggggcttcattggagcctgtaacgtggggcagggttggatttctgtctggaagtcacctgcaaacagttaccgaaggaaagcctggtacctctccagataactcgccttgttcctttggtttaaatacatactaaaacacattttgagaggtttctgtcatcctgctgactcgatggggctgttaccaacagctg

SEQ ID NO: 40306 - DNA, 600 bp, Chicken  19866894274998_3
ctgggctgtgaaatgacacaatgttctggcataaacaccaaacgctgtctgagttgtttaggacagactatttgaggtaggaaatgagatcagatgtgccatgtgctcaaagtgcagggttagcctgagctgcaggacttcctatgggagcagcctgctcctccacrgggcggctgaggctgctctgagctcagcaggacctcacagtaatgcttcaggctgagcagattgcttctgtccaaccaaactgagcgctgtaccccaaatgyaacagctgctgtgctgccatgcctgctgctygctggtcctgcrgatggagrcmcaggcagcacacactggtgggagcaatgtgccctgcctgggggctgcaaggaggggcttcattggagcctgtaacgtggggcagggttggatttctgtctggaagtcacctgcaaacagttaccgaaggaaagcctggtacctctccagataactcgccttgttcctttggtttaaatacatactaaaacacattttgagaggtttctgtcatcctgctgactcgatggggctgttaccaacagctgctgttctcgcagtggcctcaggggagatgga

SEQ ID NO: 40307 - DNA, 600 bp, Chicken  19866894274998_4
atgacacaatgttctggcataaacaccaaacgctgtctgagttgtttaggacagactatttgaggtaggaaatgagatcagatgtgccatgtgctcaaagtgcagggttagcctgagctgcaggacttcctatgggagcagcctgctcctccacrgggcggctgaggctgctctgagctcagcaggacctcacagtaatgcttcaggctgagcagattgcttctgtccaaccaaactgagcgctgtaccccaaatgyaacagctgctgtgctgccatgcctgctgctygctggtcctgcrgatggagrcmcaggcagcacacactggtgggagcaatgtgccctgcctgggggctgcaaggaggggcttcattggagcctgtaacgtggggcagggttggatttctgtctggaagtcacctgcaaacagttaccgaaggaaagcctggtacctctccagataactcgccttgttcctttggtttaaatacatactaaaacacattttgagaggtttctgtcatcctgctgactcgatggggctgttaccaacagctgctgttctcgcagtggcctcaggggagatggagagctgcttgga

SEQ ID NO: 40308 - DNA, 600 bp, Chicken  19866894274998_5
atgttctggcataaacaccaaacgctgtctgagttgtttaggacagactatttgaggtaggaaatgagatcagatgtgccatgtgctcaaagtgcagggttagcctgagctgcaggacttcctatgggagcagcctgctcctccacrgggcggctgaggctgctctgagctcagcaggacctcacagtaatgcttcaggctgagcagattgcttctgtccaaccaaactgagcgctgtaccccaaatgyaacagctgctgtgctgccatgcctgctgctygctggtcctgcrgatggagrcmcaggcagcacacactggtgggagcaatgtgccctgcctgggggctgcaaggaggggcttcattggagcctgtaacgtggggcagggttggatttctgtctggaagtcacctgcaaacagttaccgaaggaaagcctggtacctctccagataactcgccttgttcctttggtttaaatacatactaaaacacattttgagaggtttctgtcatcctgctgactcgatggggctgttaccaacagctgctgttctcgcagtggcctcaggggagatggagagctgcttggagaggagct

SEQ ID NO: 40309 - DNA, 600 bp, Chicken  19866894274998_6
gttctggcataaacaccaaacgctgtctgagttgtttaggacagactatttgaggtaggaaatgagatcagatgtgccatgtgctcaaagtgcagggttagcctgagctgcaggacttcctatgggagcagcctgctcctccacrgggcggctgaggctgctctgagctcagcaggacctcacagtaatgcttcaggctgagcagattgcttctgtccaaccaaactgagcgctgtaccccaaatgyaacagctgctgtgctgccatgcctgctgctygctggtcctgcrgatggagrcmcaggcagcacacactggtgggagcaatgtgccctgcctgggggctgcaaggaggggcttcattggagcctgtaacgtggggcagggttggatttctgtctggaagtcacctgcaaacagttaccgaaggaaagcctggtacctctccagataactcgccttgttcctttggtttaaatacatactaaaacacattttgagaggtttctgtcatcctgctgactcgatggggctgttaccaacagctgctgttctcgcagtggcctcaggggagatggagagctgcttggagaggagctgt

SEQ ID NO: 40310 - DNA, 600 bp, Chicken  19866894275002_1
gtacaagtctgctgttgggagagtcaattgttgaaatgctaaatatgctcatctccagttaccactagtagtgcaaagcatgctgcaagattgtcagagcaatggtgtttatatctctttgtaaagtagtagttgtagttgaacgagtatcataaataactttgattatacagtgtgtagaaatgaggtcatctttaatatgtgtacagtctaggtatttctgttctgtagatctagcagtaatcacatttcctatgaaaactgttttttgtgactacttagataattaattatatttasatgtattaactgagctgctatctgattttagtcctttttctgatgtgttaaaaggtaaagaggaaggaatgtttgtggccttttctggtcaagttgcaggtgcagtattttatttttgagttaaggcayccttatctcttatgtcacatattcatctcggaggtgaaaattgaagatctcttcatgatgattcrgcagttattcctctattttcttyactcagttcaacatgataagagaaattcttggtttcttttgaaaactttttatcccactgttgcatggtagctgtaccattta

SEQ ID NO: 40311 - DNA, 600 bp, Chicken  19866894275002_2
tagttgtagttgaacgagtatcataaataactttgattatacagtgtgtagaaatgaggtcatctttaatatgtgtacagtctaggtatttctgttctgtagatctagcagtaatcacatttcctatgaaaactgttttttgtgactacttagataattaattatatttasatgtattaactgagctgctatctgattttagtcctttttctgatgtgttaaaaggtaaagaggaaggaatgtttgtggccttttctggtcaagttgcaggtgcagtattttatttttgagttaaggcayccttatctcttatgtcacatattcatctcggaggtgaaaattgaagatctcttcatgatgattcrgcagttattcctctattttcttyactcagttcaacatgataagagaaattcttggtttcttttgaaaactttttatcccactgttgcatggtagctgtaccatttaaaatgttcatctgctctggtagctgtctcctctgtacgatactgtggagctaggcatcaatttactctgcagcgtgctagaatctcagtctagaaatggcttaggtcttgagatagtcaaagaattgct

SEQ ID NO: 40312 - DNA, 600 bp, Chicken  19866894275002_3
ttaatatgtgtacagtctaggtatttctgttctgtagatctagcagtaatcacatttcctatgaaaactgttttttgtgactacttagataattaattatatttasatgtattaactgagctgctatctgattttagtcctttttctgatgtgttaaaaggtaaagaggaaggaatgtttgtggccttttctggtcaagttgcaggtgcagtattttatttttgagttaaggcayccttatctcttatgtcacatattcatctcggaggtgaaaattgaagatctcttcatgatgattcrgcagttattcctctattttcttyactcagttcaacatgataagagaaattcttggtttcttttgaaaactttttatcccactgttgcatggtagctgtaccatttaaaatgttcatctgctctggtagctgtctcctctgtacgatactgtggagctaggcatcaatttactctgcagcgtgctagaatctcagtctagaaatggcttaggtcttgagatagtcaaagaattgctcagtctcttgtgaagatgtaaaagttgttatgaaggagcatatgtataagtgggtttgtttcttt

SEQ ID NO: 40313 - DNA, 600 bp, Chicken  19866894275002_4
tttctgttctgtagatctagcagtaatcacatttcctatgaaaactgttttttgtgactacttagataattaattatatttasatgtattaactgagctgctatctgattttagtcctttttctgatgtgttaaaaggtaaagaggaaggaatgtttgtggccttttctggtcaagttgcaggtgcagtattttatttttgagttaaggcayccttatctcttatgtcacatattcatctcggaggtgaaaattgaagatctcttcatgatgattcrgcagttattcctctattttcttyactcagttcaacatgataagagaaattcttggtttcttttgaaaactttttatcccactgttgcatggtagctgtaccatttaaaatgttcatctgctctggtagctgtctcctctgtacgatactgtggagctaggcatcaatttactctgcagcgtgctagaatctcagtctagaaatggcttaggtcttgagatagtcaaagaattgctcagtctcttgtgaagatgtaaaagttgttatgaaggagcatatgtataagtgggtttgtttctttgattgtccttgtacttgactttc

SEQ ID NO: 40314 - DNA, 600 bp, Chicken  19866894275014_1
agtgcacattgacatttttgggatgtaaagcacgtgtttttgaaatgatccagagatcaacatacgtgaaaacagagaagcattattttaaattcctcgtagtgaaaataaagattcaaattaatattttgatttctagatatgaattacagaaagataaaatcataatcacaatattaagcatcaggctatgttttactaaattgctactaagtattattaaaccttagaatcagggtgttgttttttaagtaaagcagaaagctaatcttgtttattagcaccttcacagtgagaaakgmaagcagaatactgagggacttcaatgtgcctttgtaggaggattaaytcacatataatacaattatgttgatataaaggattaattacgctcactgcatcccactaggagttctgtaaggtgaggaccagagctctactggaaaaaggtgtgatagacctggctagcaaaacatgattttggaaccccttctccaagcccactttgcaattatcaccactgttttctatgggaaccaactggtttgtatgttggttaacagatggtctycctctttctctgcttgcttaggcctagac

SEQ ID NO: 40315 - DNA, 600 bp, Chicken  19866894275014_2
tgcacattgacatttttgggatgtaaagcacgtgtttttgaaatgatccagagatcaacatacgtgaaaacagagaagcattattttaaattcctcgtagtgaaaataaagattcaaattaatattttgatttctagatatgaattacagaaagataaaatcataatcacaatattaagcatcaggctatgttttactaaattgctactaagtattattaaaccttagaatcagggtgttgttttttaagtaaagcagaaagctaatcttgtttattagcaccttcacagtgagaaakgmaagcagaatactgagggacttcaatgtgcctttgtaggaggattaaytcacatataatacaattatgttgatataaaggattaattacgctcactgcatcccactaggagttctgtaaggtgaggaccagagctctactggaaaaaggtgtgatagacctggctagcaaaacatgattttggaaccccttctccaagcccactttgcaattatcaccactgttttctatgggaaccaactggtttgtatgttggttaacagatggtctycctctttctctgcttgcttaggcctagaccc

SEQ ID NO: 40316 - DNA, 600 bp, Chicken  19866894275014_3
ccagagatcaacatacgtgaaaacagagaagcattattttaaattcctcgtagtgaaaataaagattcaaattaatattttgatttctagatatgaattacagaaagataaaatcataatcacaatattaagcatcaggctatgttttactaaattgctactaagtattattaaaccttagaatcagggtgttgttttttaagtaaagcagaaagctaatcttgtttattagcaccttcacagtgagaaakgmaagcagaatactgagggacttcaatgtgcctttgtaggaggattaaytcacatataatacaattatgttgatataaaggattaattacgctcactgcatcccactaggagttctgtaaggtgaggaccagagctctactggaaaaaggtgtgatagacctggctagcaaaacatgattttggaaccccttctccaagcccactttgcaattatcaccactgttttctatgggaaccaactggtttgtatgttggttaacagatggtctycctctttctctgcttgcttaggcctagacccagcagtccacagtccctaatccctctttcaggcagtcactcatagac

SEQ ID NO: 40317 - DNA, 600 bp, Chicken  19866894275014_4
tgtttattagcaccttcacagtgagaaakgmaagcagaatactgagggacttcaatgtgcctttgtaggaggattaaytcacatataatacaattatgttgatataaaggattaattacgctcactgcatcccactaggagttctgtaaggtgaggaccagagctctactggaaaaaggtgtgatagacctggctagcaaaacatgattttggaaccccttctccaagcccactttgcaattatcaccactgttttctatgggaaccaactggtttgtatgttggttaacagatggtctycctctttctctgcttgcttaggcctagacccagcagtccacagtccctaatccctctttcaggcagtcactcatagacttcttttcatcttctcaaaaaagaaaaataaagtgaatgtgaagcaaaaagaataatcagaaggaatgtgcagagtttttgatggtcttagcactgaattaaagagaagatactctcctgcagcagcatcctagcaaacagttacaataaatgtktttgtttgttgtaaaaatgggaagaattttgcaaacattaggattattagacatctgttttgtggag

SEQ ID NO: 40318 - DNA, 550 bp, Chicken  19866894275014_5
tttgcaattatcaccactgttttctatgggaaccaactggtttgtatgttggttaacagatggtctycctctttctctgcttgcttaggcctagacccagcagtccacagtccctaatccctctttcaggcagtcactcatagacttcttttcatcttctcaaaaaagaaaaataaagtgaatgtgaagcaaaaagaataatcagaaggaatgtgcagagtttttgatggtcttagcactgaattaaagagaagatactctcctgcagcagcatcctagcaaacagttacaataaatgtktttgtttgttgtaaaaatgggaagaattttgcaaacattaggattattagacatctgttttgtggagtggaaattagagcttagaggccattcttttgcagagagacatcagagagctcaaaacgctttacaagaggaggccacttccattctttccatttccagatgtggacaccacagcagaagtgatggctatctagcagcccagaagcacagctgaaggcaaagctctgaacaggagcacacacag

SEQ ID NO: 40319 - DNA, 600 bp, Chicken  19866894275020_1
atgggacagagagaagccataaatacaaaagaccttccatttgattttggagatcagccagtagcagagccagagcacgcacagggacaaggaaagtgggaagagatcaagctaggacagggggaggaattgtgcctctgcacatttctttgcctgaataacatgagaaatggcacccctagacacaagaattggagtagggctgcagttaaaaagaattccagaatgttattctcataatattcctgcagtgcaaataaatggtgtcaccttcagtctgacaacaaataaaataagatycaaagtgatcaaagcagtgttttgaaagactaaattctgcatttcatagtaaaaatcaagttttcaaggaagtttgtgtgtaaagcttttacggtgtttgtacatttgcctactggaaagaacaatcctaagaagcattcagcaagaattgaatcatagaatcatagaatggcctgggttgaaaaggaccacagtgatcatctagtttcaacccccctgctgtgtgcagggtcgccaactactagaccaggctgcccagagccacatccagcctggattgtttaatttccaaccgatcta

SEQ ID NO: 40320 - DNA, 599 bp, Chicken  19866894275026_1
  misc_feature (1)..(194): n is any nucleotide
nnnnnnnnnnnnnnnnnnnnnnnnnnnnnnnnnnnnnnnnnnnnnnnnnnnnnnnnnnnnnnnnnnnnnnnnnnnnnnnnnnnnnnnnnnnnnnnnnnnnnnnnnnnnnnnnnnnnnnnnnnnnnnnnnnnnnnnnnnnnnnnnnnnnnnnnnnnnnnnnnnnnnnnnnnnnnnnnnnnnnnnnnnnnnnnnnnctaactgggctagcagctttatcctaagtgatctttgttcccctgcataagaataatgcacaatgacttgggtacttgaaggcagctctctgcttaccagctatcygtgtgcaggaatgggctgaatgggtgtaagctctaaaagaatggtactgtgacttctacttcacagtttgtgtgttctggtggtgaagaaaagctcctgaacatcagacagcactgtttgtgtcagcaggaagaactattcagttcctagtaaggtataccaactttatacagggttttcataagaaactctaatacatctgctgtactgaatggtctggcctgctaggaacagcaaagacttgggctacagttgyttctgtggttttctgaatccatagaagaaattaatgtgttctc

SEQ ID NO: 40321 - DNA, 600 bp, Chicken  19866894275026_2
atgacttgggtacttgaaggcagctctctgcttaccagctatcygtgtgcaggaatgggctgaatgggtgtaagctctaaaagaatggtactgtgacttctacttcacagtttgtgtgttctggtggtgaagaaaagctcctgaacatcagacagcactgtttgtgtcagcaggaagaactattcagttcctagtaaggtataccaactttatacagggttttcataagaaactctaatacatctgctgtactgaatggtctggcctgctaggaacagcaaagacttgggctacagttgyttctgtggttttctgaatccatagaagaaattaatgtgttctcagttttttccttctttgaaaagcaaatccttctgctgtggtaaggaaggaatggaggttagaggcaaagatgaaggagcctttcattcaacagagaaggctttgttgatgtacaacacaaatctggtaagttagccacaaagacctctcctgacttgctttaaacaggggctcttgttacggaacctgttttccatctctcatcttccatacgctgtcttttctgtgcagcttagtttgtcttctgaaaatccatac

SEQ ID NO: 40322 - DNA, 600 bp, Chicken  19866894275027_1
gccgcatacctgaacttcctaaagtcattaatgatacttcacgaaaggatcagcagatacaggacataattatccccaactaaattatgtttacaatacagacacggtcacaaaaattccagaagatgccatttgttggcaaaacattcataaattaagcacaaaggatgtgcatctccagtgcactgagggtagaagcactgcgaacacacgcactggctcttccttccctcagactgacaggggctttctgacagcagacaacatctctaggcaagaaaatctgcttacataaaaaayagctttgcattagtcctattgcagcattattgattactaaaggaggctgcagacaacaaaaataggtatttttaaataaataaggtgccttaaagagaggaaaaatccttatgtatagaaattctaaggaatatcaacgtctgacatgttttccccactatattagctaatccagcaaaaaagatccttggtatgtcatttgctgattgatgagcacagagagctgagacccgagcacggaattttattgctgaagacattttcatctgcagccaaatcaccagggaaacactttgtcaa

SEQ ID NO: 40323 - DNA, 600 bp, Chicken  19866894275027_2
acaggacataattatccccaactaaattatgtttacaatacagacacggtcacaaaaattccagaagatgccatttgttggcaaaacattcataaattaagcacaaaggatgtgcatctccagtgcactgagggtagaagcactgcgaacacacgcactggctcttccttccctcagactgacaggggctttctgacagcagacaacatctctaggcaagaaaatctgcttacataaaaaayagctttgcattagtcctattgcagcattattgattactaaaggaggctgcagacaacyaaaataggtatttttaaataaataaggtgccttaaagagaggaaaaatccttatgtatagaaattctaaggaatatcaacgtctgacatgttttccccactatattagctaatccagcaaaaaagatccttggtatgtcatttgctgattgatgagcacagagagctgagacccgagcacggaattttattgctgaagacattttcatctgcagccaaatcaccagggaaacactttgtcaaacaacttcattctgccgggagattttgtgacaatattggcaacttaagaatttgttct

SEQ ID NO: 40324 - DNA, 600 bp, Chicken  19866894275027_3
atactgtcataatagcaactgatcttacactgagcatctgcagagctacaaattgttacttgttttcaagagctcaatcatggtttagtagtcccccccacacacacttttctgcacctagggggactgaatccagacaaaatgatgctaacttttataccatcaggttaggcaagatgataagctaccgctgagatacagtgggttaatacatccaaacttatatcctctggctgctcctgaaattgctaaggaatttgagtcctgctgattgtcttgaagcttctaattattttctgygttgaatgaaattcccaggtttcacaattttctactgcgatggcagcaaaagtgacctctatgaagttttcttggccaagtaacaggcactcagtgttctcagtgcctctgttatgccgcccgcaatgggctgaatctgaacatctagaaatatgatgcctaaataggagcgtatgcataaattgtgcatgtttcctttgttgataggaaagaatcagaaaacaaagaaacggccaaacaagatagttaagactacctggcatgtgacagagccattttttacaggtacaggtggaagca

SEQ ID NO: 40325 - DNA, 600 bp, Chicken  19866894275027_4
cttgtttccctatatcacctaccagtgtacaggaaatcctcaggtcaagtccaacatcagacaaatcattccatttgtttctagatatgttctggcagggatgaaggctgaaagatttgatgtaaggttttaaaattgcaacttgtcatacctgctgtttcatttgctctttttttttcttcataaaagctgtataaaaaaaagacacaaaaaaacccccaacacaaatacattcacttctgtcccttgaatagtttaatataaacaagtggctgggtcttttgttggctaaatgacaaygtgagcagagtcaagtgcctactgctgccgcctgtgaccaccatgcctccctgcaggacagctgggctcctcctggcaggggacaagtccccagctctccactccyrccatggctgtgaaacaattctgcctcctttttggctgcacacgagcttgccacagggaatttgactgattatccctaaacacgaaaatgcaattattttcacacgtgcaactaaaaycatctgttaaagaaacgtgctcaaaacttcactccaataaatgatgtgcaagtcctctccagcatgcatgagctct

SEQ ID NO: 40326 - DNA, 600 bp, Chicken  19866894275027_5
gctgaaagatttgatgtaaggttttaaaattgcaacttgtcatacctgctgtttcatttgctctttttttttcttcataaaagctgtataaaaaaaagacacaaaaaaacccccaacacaaatacattcacttctgtcccttgaatagtttaatataaacaagtggctgggtcttttgttggctaaatgacaaygtgagcagagtcaagtgcctactgctgccgcctgtgaccaccatgcctccctgcaggacagctgggctcctcctggcaggggacaagtccccagctctccactccyrccatggctgtgaaacaattctgcctcctttttggctgcacacgagcttgccacagggaatttgactgattatccctaaacacgaaaatgcaattattttcacacgtgcaactaaaaycatctgttaaagaaacgtgctcaaaacttcactccaataaatgatgtgcaagtcctctccagcatgcatgagctctacatggatggaagggctccaggctgaccaccagcagaggttcctggaagcctgaagatcaagaatattcaagaactgcacaacagacttctcaaggagcaaggatt

SEQ ID NO: 40327 - DNA, 600 bp, Chicken  19866894275027_6
ctgaaagatttgatgtaaggttttaaaattgcaacttgtcatacctgctgtttcatttgctctttttttttcttcataaaagctgtataaaaaaaagacacaaaaaaacccccaacacaaatacattcacttctgtcccttgaatagtttaatataaacaagtggctgggtcttttgttggctaaatgacaaygtgagcagagtcaagtgcctactgctgccgcctgtgaccaccatgcctccctgcaggacagctgggctcctcctggcaggggacaagtccccagctctccactccyrccatggctgtgaaacaattctgcctcctttttggctgcacacgagcttgccacagggaatttgactgattatccctaaacacgaaaatgcaattattttcacacgtgcaactaaaaycatctgttaaagaaacgtgctcaaaacttcactccaataaatgatgtgcaagtcctctccagcatgcatgagctctacatggatggaagggctccaggctgaccaccagcagaggttcctggaagcctgaagatcaagaatattcaagaactgcacaacagacttctcaaggagcaaggatta

SEQ ID NO: 40328 - DNA, 600 bp, Chicken  19866894275027_7
caaatacattcacttctgtcccttgaatagtttaatataaacaagtggctgggtcttttgttggctaaatgacaaygtgagcagagtcaagtgcctactgctgccgcctgtgaccaccatgcctccctgcaggacagctgggctcctcctggcaggggacaagtccccagctctccactccyrccatggctgtgaaacaattctgcctcctttttggctgcacacgagcttgccacagggaatttgactgattatccctaaacacgaaaatgcaattattttcacacgtgcaactaaaaycatctgttaaagaaacgtgctcaaaacttcactccaataaatgatgtgcaagtcctctccagcatgcatgagctctacatggatggaagggctccaggctgaccaccagcagaggttcctggaagcctgaagatcaagaatattcaagaactgcacaacagacttctcaaggagcaaggattacatggagcatcacccagatacaacagctacagcactcatgtgaaatacctttctgcacttgaggtgaagacacacctgtaagtacctgatgtgaaaggagatgctcctgggctgtac

SEQ ID NO: 40329 - DNA, 573 bp, Chicken  19866894275032_1
aggggatctggtgggagacagagatactctgttagtgtcactgtatgccccagagtgacttgctactgtgccaagatgttttttccacatggtcttcagcttccttttgagaaggaccagaataggtgagttttggaaaatggccttgtcaaattcagcattaatcctgcaggggacttctagtaaattcacagctagtaagtttttggcaacagtgtcacatatgttccaagtctccacaacccaatatgtgcaagagaagccagagatagctgtgtggatacagcagtggatatgtgmaaatggacgacctcctcccatctttgcagtctctgaagctggacaggtcacggcttttgtgcagaaggaagttttgcaactgccagtagcttggtcaagaagagagagactattccatacaggaaacaaatacttcagttgatcttctttgactgttttagttaatttatgggtaaatcaatgcagtaaattctaacagaaatattttatctgtaaagccagtcagtgctaaagggagaaagaagtttttcatcactttctattgaaaactga

SEQ ID NO: 40330 - DNA, 600 bp, Chicken  19866894275033_1
ttaacaggaagtaaagctgaatgactcagagactcccacttagaaaggcaagtagccatcctgcctttacaaacatccaaactataaagatgaaatgagaaaacataggttcatatgtagccattcttgtcaatactttgtgggtactgcctcttcagtgaccagtccaggcaggagatcagcagaaactagcagtctctttacatataacacagagatttcacacttccacattgactagagacattaagggccctccagaccaagaaaataagtcatactggttccagaatcaccacrtgtttgaactacatcatattagtccgctggaagaagtttttctgtccatctttttaataacgtacaaaatgagttcagaagaaaaccaaaacctagctgagscacagagtctgctttgttgagtcacacagatggcaaacccaaccacacatctgcccattaaaaataaacataaatataaaaattattcttttcagcacagatgggcaagacaacaagacaaagctgtcttgacaaagcaacaaaacttaggcaaactgtatgaaaaacatgacctgcagagagaatcctgccctgaat

SEQ ID NO: 40331 - DNA, 600 bp, Chicken  19866894275033_2
acataggttcatatgtagccattcttgtcaatactttgtgggtactgcctcttcagtgaccagtccaggcaggagatcagcagaaactagcagtctctttacatataacacagagatttcacacttccacattgactagagacattaagggccctccagaccaagaaaataagtcatactggttccagaatcaccacrtgtttgaactacatcatattagtccgctggaagaagtttttctgtccatctttttaataacgtacaaaatgagttcagaagaaaaccaaaacctagctgagscacagagtctgctttgttgagtcacacagatggcaaacccaaccacacatctgcccattaaaaataaacataaatataaaaattattcttttcagcacagatgggcaagacaacaagacaaagctgtcttgacaaagcaacaaaacttaggcaaactgtatgaaaaacatgacctgcagagagaatcctgccctgaattccctctccgttcttctgttctcaacctaaatgcttaacctgttctttcctcacctttcctccaccccagaaaggccatgttttatgagtcatcttctcagg

SEQ ID NO: 40332 - DNA, 600 bp, Chicken  19866894275034_1
cttaactgtcccacagagccactcctacaactcaagcaaacaaaaagctgattctaattattagttatataaataataaatatgcacatttatgtctatataaacagctgttttcttctgtgttcattcttctcccactaatactacagctagctagatttttctattatttttgttttcctacattgtattcttattaggttttgtattagctttattgttgtgcccatcattcagctcttagtgacctcctccccagccttcaaaccacaatgtttcatgcaacccgttaatcttgcstggwaagataaatgcaaaatagaattccacgcagattcataatgcaatttctacttcccttctgaagacaaaaagggggaaaaaaatcagtaagatagtaagaaattactttaacaaaatattatttgtaaagcaatcttccctgggaaaaatgcagtttttggagtaatatatcttagaattaaatagcagttcttttatttatttttcaatacattttctacagatctgtagatatttggtaatttactggaaaggcttgctgccactttcagcttttatcccaattttgctgttctg

SEQ ID NO: 40333 - DNA, 600 bp, Chicken  19866894275034_2
actgtcccacagagccactcctacaactcaagcaaacaaaaagctgattctaattattagttatataaataataaatatgcacatttatgtctatataaacagctgttttcttctgtgttcattcttctcccactaatactacagctagctagatttttctattatttttgttttcctacattgtattcttattaggttttgtattagctttattgttgtgcccatcattcagctcttagtgacctcctccccagccttcaaaccacaatgtttcatgcaacccgttaatcttgcstggwaagataaatgcaaaatagaattccacgcagattcataatgcaatttctacttcccttctgaagacaaaaagggggaaaaaaatcagtaagatagtaagaaattactttaacaaaatattatttgtaaagcaatcttccctgggaaaaatgcagtttttggagtaatatatcttagaattaaatagcagttcttttatttatttttcaatacattttctacagatctgtagatatttggtaatttactggaaaggcttgctgccactttcagcttttatcccaattttgctgttctgtctg

SEQ ID NO: 40334 - DNA, 486 bp, Chicken  19866894275036_1
cggcggggggacccaccgcatgcacagcacacagaggatggggtgtgggaccccccgacccccccctcgtggctctgtgtcaccacaaggcctttccttgtagggcgcacgtgggctccccggaactgccggtctgccgggcatgaagggacacagagtgagtgccacatcccccccccaatgcacccacgagatgtggggtgagctgggagcgcccccaagtcggggacacccccacggtaccccaacacccggcctacggctgctgacccccctcctctgccccccagggcttcagtygctgctggggcggcccccccccaaacccccactgcggggtccttctgctccctttttggggcagaaaagccattttttgcatcttgttgttatgattatttgtcgtcgtagggtgagcctggcagccctggagagaacggcgctcccggacagatggtgagtgctgggtgggtgctgtgggggggg

SEQ ID NO: 40335 - DNA, 600 bp, Chicken  19866894275038_1
taaagtaaccaaataatctcagtcagctgttagcagcagctagccacgtgcagaacttagccagataatcagtttcgtcgtttgcttgttcctatgcaaacattaaaaaaaaatggaaatgtttgcccttatactatcacatagctaatgttaaactcctctctttaaaaactgaaactctaccaagtcgcaaaaaaaaaaatatgcccttattatggaaaacactgaatgaaatgatatactttccttaatatattctatacttttcttcacaaatacaaaaaaagaaataataaactyatgacataactaattcacaacgcccaatttaagtattcacaacagggtaactttaaaaataagagctgcagtactaaagaaacattcaaaacactgtacaatggaaagattctgggaggggtgatatttgcctctagagatttatgcctacagcagaaatgtaacacctgcaaagcagtatttaaggccatacttgtaacaaatgtgtgcttataacacagtttacctgctttaggaaagtagtcttaaaaaagaaaagaaaaastagatgtaatttttcctggtatcacaagaactcct

SEQ ID NO: 40336 - DNA, 518 bp, Chicken  19866894275038_2
ttcttcacaaatacaaaaaaagaaataataaactyatgacataactaattcacaacgcccaatttaagtattcacaacagggtaactttaaaaataagagctgcagtactaaagaaacattcaaaacactgtacaatggaaagattctgggaggggtgatatttgcctctagagatttatgcctacagcagaaatgtaacacctgcaaagcagtatttaaggccatacttgtaacaaatgtgtgcttataacacagtttacctgctttaggaaagtagtcttaaaaaagaaaagaaaaastagatgtaatttttcctggtatcacaagaactcctgcacttcagggctttttaatagtcaatattgtagtgtgagagcatttgcctccttagggaagggtggaattacactgcattacagagtcaccattatgtggggaggcaaaaggcaaaacacaccttttgagccaaatgcagtacttcatagagctgaagctgagctgccatatgtctttataa

SEQ ID NO: 40337 - DNA, 600 bp, Chicken  19866894275059_1
actgcaagcacgccacctggctgaaaacatgcagagctaaagaaactgctccttgctgcaatctgtaacggtcctaacgaaaaatcctatttgattcattttcaaacacaccagaggaaaagtatcctgctcttgtctcacaaaaccaagtgggagggaaatacctgagggagagcatcagtgatgaactggcaggggtatgcattgggaaagctcctaaactgtgagttcaggtaacaattaacagtcattacaggtaaaattcaggtctagatgggcaggtccaacacctgcatttaycattttccctgtctccaactgccactagctacattcaacakaaaaagaggtgatgcacagacatatgaaagtacactttacctgtgtatttactatgcagcaacactagtaaatgtttttaaattacctcaaggcaatrtattagaatttctctgccatttcagcaatttcacacatctgaaaagactgaactacacctctgagaactgattttgtcacctccttgttcacataacttatgaatctaacttaccttaaggcctctttcgtaccggcgtagcttggcactctcacccaagt

SEQ ID NO: 40338 - DNA, 600 bp, Chicken  19866894275059_2
gaaactgctccttgctgcaatctgtaacggtcctaacgaaaaatcctatttgattcattttcaaacacaccagaggaaaagtatcctgctcttgtctcacaaaaccaagtgggagggaaatacctgagggagagcatcagtgatgaactggcaggggtatgcattgggaaagctcctaaactgtgagttcaggtaacaattaacagtcattacaggtaaaattcaggtctagatgggcaggtccaacacctgcatttaycattttccctgtctccaactgccactagctacattcaacakaaaaagaggtgatgcacagacatatgaaagtacactttacctgtgtatttactatgcagcaacactagtaaatgtttttaaattacctcaaggcaatrtattagaatttctctgccatttcagcaatttcacacatctgaaaagactgaactacacctctgagaactgattttgtcacctccttgttcacataacttatgaatctaacttaccttaaggcctctttcgtaccggcgtagcttggcactctcacccaagtcctttgcgttagaaattgccgtcctatagttaagaattctc

SEQ ID NO: 40339 - DNA, 600 bp, Chicken  19866894275059_3
acaaaaccaagtgggagggaaatacctgagggagagcatcagtgatgaactggcaggggtatgcattgggaaagctcctaaactgtgagttcaggtaacaattaacagtcattacaggtaaaattcaggtctagatgggcaggtccaacacctgcatttaycattttccctgtctccaactgccactagctacattcaacakaaaaagaggtgatgcacagacatatgaaagtacactttacctgtgtatttactatgcagcaacactagtaaatgtttttaaattacctcaaggcaatrtattagaatttctctgccatttcagcaatttcacacatctgaaaagactgaactacacctctgagaactgattttgtcacctccttgttcacataacttatgaatctaacttaccttaaggcctctttcgtaccggcgtagcttggcactctcacccaagtcctttgcgttagaaattgccgtcctatagttaagaattctcttctctattgtctgttgcagctcactggtaacagcaggaagtgaggtggtctcagaagaaataataagacaaatcaagaaaatttacttcatcaaact

SEQ ID NO: 40340 - DNA, 600 bp, Chicken  19866894275061_1
aagtatgtgaaacaacccagtttcctcttagcaaataaagcccgtgtgccacagttacctttgaacttacccagttagggaacggttaagaaataagtaaataaatgtgagtgggccattaaattgaactgtagatagaatcgttgaatggtttgggttggaagggacctcaaagcccacccagccccgacccctgctgtgggcagggctgtcaccaccagctcagccgcccagggctccatccaacgtggccctgagtgcctctggggatggggcacccacagcttctatgggcagccrtgccagcgcctcaccgccctcaagaaaataactggataataaataatgagaaagaactgtcacctgtcagtggatattctgagaaaaaccgctgccaaaatcccagtgcayggttgcatttgctaaataaggttgttgagtcccaataaatcataacgctcagagtgatggtgtttccaatggacaccagtaagccggcactcccatcacacttgaaagcaatctatttgtcataaagaaaccgtgccctgtagtgattctgcctgtcaagaagtacagataagggatggctttcccctc

SEQ ID NO: 40341 - DNA, 600 bp, Chicken  19866894275061_2
tgggccattaaattgaactgtagatagaatcgttgaatggtttgggttggaagggacctcaaagcccacccagccccgacccctgctgtgggcagggctgtcaccaccagctcagccgcccagggctccatccaacgtggccctgagtgcctctggggatggggcacccacagcttctatgggcagccrtgccagcgcctcaccgccctcaagaaaataactggataataaataatgagaaagaactgtcacctgtcagtggatattctgagaaaaaccgctgccaaaatcccagtgcayggttgcatttgctaaataaggttgttgagtcccaataaatcataacgctcagagtgatggtgtttccaatggacaccagtaagccggcactcccatcacacttgaaagcaatctatttgtcataaagaaaccgtgccctgtagtgattctgcctgtcaagaagtacagataagggatggctttcccctccacgggccattcctgcagaatgcatttgtcccatctctccagctgggagtcagtgtctccggtcccttctcaagccactgcttgtcaaatgggtcctgtctttctgaaata

SEQ ID NO: 40342 - DNA, 600 bp, Chicken  19866894275069_1
ttgttgctatgaccacacagcctcaggcagttgacagaggtggtcagcaattgcccctgcagtgtatgatctgctctcttcaagacaaatagacatggcagctttcagcatctgaaagtctccatggtatcttgcaacccaaacggacttgctctgagtgctttctacaccactaaatgtaaaccatttctcaaaatatgccactgtttacaaagtggtgagatagagctaacaaacccttctgggagaatgtgtttacatcttacacccatgattccctagatttaggaaaacaccacrcaaaatgtataaattattaaatgtacaaggcagtcaaaaattggataagacatattttcattctataatttttgattaggaactatggacaataatgttaaaggtgaattaaagagcaaaacaacctcacatttgtaaaataacattacctgttaaaaaatcctctcattaagaagatcacctaataatggttcctggccagaggcataagcaaatttctggaccaaactcaatttttaagctaaaagaaatatctgagctaacacattcataagtggtgaaaggtttcaaacaacatct

SEQ ID NO: 40343 - DNA, 600 bp, Chicken  19866894275069_2
ttaagaagatcacctaataatggttcctggccagaggcataagcaaatttctggaccaaactcaatttttaagctaaaagaaatatctgagctaacacattcataagtggtgaaaggtttcaaacaacatctcccaaggtgaagagcatttccaatctcttcagtgctgttgcagacttctcagagatgtctgctacccaaacaaagccaacttcataaaaccaatgtccaaattacttagatgtccttagggaatttcctcagtgcttctggatatatgcatgttatatacccctccaytactccttcactccaatctatgtaaattaggaattaggaactaggggaagttgaatgctgaaatatcctcagacttcttcttcataaagttcccattcaaaatcaaaagaagtagaaaatgaaagcaaaatgttggtatagattaaattttgttctgttgggttccttagagctcaagagaaaaggttaactcaagaaatgtactttatccatgcaatcagcttgcaaaccaacctgtggtggtttttatggttctgttagactgttgcaccacaggtaattgtcattttgagcctagta

SEQ ID NO: 40344 - DNA, 599 bp, Chicken  19866894275074_1
  misc_feature (1)..(214): n is any nucleotide
nnnnnnnnnnnnnnnnnnnnnnnnnnnnnnnnnnnnnnnnnnnnnnnnnnnnnnnnnnnnnnnnnnnnnnnnnnnnnnnnnnnnnnnnnnnnnnnnnnnnnnnnnnnnnnnnnnnnnnnnnnnnnnnnnnnnnnnnnnnnnnnnnnnnnnnnnnnnnnnnnnnnnnnnnnnnnnnnnnnnnnnnnnnnnnnnnnnnnnnnnnnnnnnnnnnnnnaagacagacattgctgaggaagcatagacacacatgaaaagttgctgatctggagaaggggttgtgtaaccctggagaaaattggygcttgcttacactggataagaaatccagtactgagcagataaaccaagctatagatgcartgttgagctctagcagctgcagaacctgttcaaataaactaaggctttaaatggtatcatattcacagcaaacaatcaatgcagataactatgaaaataagaggcagggacaaggggaaaagatgaagcccttgttcacatgcagagcaaggctcaaacagtgcaggcaattcctttatacagtcaccatttgctgggttttgtgttctttggttgagaagggcgctgtaattggtcac

SEQ ID NO: 40345 - DNA, 599 bp, Chicken  19866894275074_2
  misc_feature (1)..(154): n is any nucleotide
nnnnnnnnnnnnnnnnnnnnnnnnnnnnnnnnnnnnnnnnnnnnnnnnnnnnnnnnnnnnnnnnnnnnnnnnnnnnnnnnnnnnnnnnnnnnnnnnnnnnnnnnnnnnnnnnnnnnnnnnnnnnnnnnnnnnnnnnnnnnnnnnnnnnnnnnnnaagacagacattgctgaggaagcatagacacacatgaaaagttgctgatctggagaaggggttgtgtaaccctggagaaaattggygcttgcttacactggataagaaatccagtactgagcagataaaccaagctatagatgcartgttgagctctagcagctgcagaacctgttcaaataaactaaggctttaaatggtatcatattcacagcaaacaatcaatgcagataactatgaaaataagaggcagggacaaggggaaaagatgaagcccttgttcacatgcagagcaaggctcaaacagtgcaggcaattcctttatacagtcaccatttgctgggttttgtgttctttggttgagaagggcgctgtaattggtcactgtggtccattttctcccatcccagaaagatacagagtaaagaagccaaacctgaaaatt

SEQ ID NO: 40346 - DNA, 550 bp, Chicken  19866894275074_3
tttaaatggtatcatattcacagcaaacaatcaatgcagataactatgaaaataagaggcagggacaaggggaaaagatgaagcccttgttcacatgcagagcaaggctcaaacagtgcaggcaattcctttatacagtcaccatttgctgggttttgtgttctttggttgagaagggcgctgtaattggtcactgtggtccattttctcccatcccagaaagatacagagtaaagaagccaaacctgaaaatttttgccaaaaactctttaccaaaattaaagcggtttgtgtgacctraaatttgtcttagtcatcaggtcccaccatatccttctttccatgtaaatttgcagagataagctccaaagagatgtctgtaggggcactcattcatccttctgtctctcaacgctttctcaccacattgcttaacaggcaggggctgttactgcttcttggggaataaatattttccaagtgaaatggaaaaaacagccctgacagccttgcaaaaatagttgcatgcttccaatgggagagccatcat

SEQ ID NO: 40347 - DNA, 599 bp, Chicken  19866894275083_1
  misc_feature (1)..(139): n is any nucleotide
nnnnnnnnnnnnnnnnnnnnnnnnnnnnnnnnnnnnnnnnnnnnnnnnnnnnnnnnnnnnnnnnnnnnnnnnnnnnnnnnnnnnnnnnnnnnnnnnnnnnnnnnnnnnnnnnnnnnnnnnnnnnnnnnnnnnnnnnnnntgtccctaagtgactggagaggagtgagaggctttaacccccacattcatcaacactggctgtgaagccccatcaagtgatgcagacatagctcaggtatctgcagtcctcatcagactgggattgtgtttatcctttctacagcctccaaataggagcayaatgctatgcacgaagagatgggctagataagtcaagattttgtttagcttggagtaatgaggttggaaaaagttattgaaatcaaatgtttgggatttatccagctattcccacagccagaatcctggcccygagggccaatcctataaaacattctccctcttttcctacaggcttcctcacatcaagattacagcactcacaaggctctgtcacygtattaacctgtaccaatgtgatttgcccaaaatgccagaggggccctaatcattacccaccgaacacctgttacagcact

SEQ ID NO: 40348 - DNA, 599 bp, Chicken  19866894275083_2
  misc_feature (1)..(6): n is any nucleotide
nnnnnntgtccctaagtgactggagaggagtgagaggctttaacccccacattcatcaacactggctgtgaagccccatcaagtgatgcagacatagctcaggtatctgcagtcctcatcagactgggattgtgtttatcctttctacagcctccaaataggagcayaatgctatgcacgaagagatgggctagataagtcaagattttgtttagcttggagtaatgaggttggaaaaagttattgaaatcaaatgtttgggatttatccagctattcccacagccagaatcctggcccygagggccaatcctataaaacattctccctcttttcctacaggcttcctcacatcaagattacagcactcacaaggctctgtcacygtattaacctgtaccaatgtgatttgcccaaaatgccagaggggccctaatcattacccaccgaacacctgttacagcacttttgttatttttaattaataacactcaaagtaaaatcatctcagtcctctgtgaatctgacttgaatctgtgtcccctccgtagcagccatgcctcctgtcagcaaagcaaactgcaggaatctgctggcaga

SEQ ID NO: 40349 - DNA, 600 bp, Chicken  19866894275083_3
atgcagacatagctcaggtatctgcagtcctcatcagactgggattgtgtttatcctttctacagcctccaaataggagcayaatgctatgcacgaagagatgggctagataagtcaagattttgtttagcttggagtaatgaggttggaaaaagttattgaaatcaaatgtttgggatttatccagctattcccacagccagaatcctggcccygagggccaatcctataaaacattctccctcttttcctacaggcttcctcacatcaagattacagcactcacaaggctctgtcacygtattaacctgtaccaatgtgatttgcccaaaatgccagaggggccctaatcattacccaccgaacacctgttacagcacttttgttatttttaattaataacactcaaagtaaaatcatctcagtcctctgtgaatctgacttgaatctgtgtcccctccgtagcagccatgcctcctgtcagcaaagcaaactgcaggaatctgctggcagatagcaaggtagaaagcccccaaccgtatcaaaaaagcttcagaaggcaaaccaggttccttccccagccacagaactagggctcat

SEQ ID NO: 40350 - DNA, 385 bp, Chicken  19866894275083_4
atcattacccaccgaacacctgttacagcacttttgttatttttaattaataacactcaaagtaaaatcatctcagtcctctgtgaatctgacttgaatctgtgtcccctccgtagcagccatgcctcctgtcagcaaagcaaactgcaggaatctgctggcagatagcaaggtagaaagcccccaaccgtatcaaaaaagcttcagaaggcaaaccaggttccttccccagccacagaactagggctcattttgcaattaggaaagagaagataaagggatgagtgaatttcctgctgygatggggcatttgcaatagagcccctataactacatcttgttcctagcggtaccaatctacacagcgctgggttattatgtagtg

SEQ ID NO: 40351 - DNA, 600 bp, Chicken  19866894275088_1
ttgcaggagtatttaattgctttaaaatgagatcagtgattgaactaaagtggatgcacattccatctgctcatgcaaacatacatatgagagtttttgttatagaaattttttatttttattttttaatctagcttcataatcaagcttcacttttaaatactagcagtgataatattcttggtatgcctctagttggagataagaaggatgagcttttccaaaaacactggctaaaaattatgtatggacaaatgaagaacctacacggtctctgtttcagtgatacttcatgtcatyactcctcgtgtcagcagcagaacatttattaaaaataaatcatctgtttaattaaacatagaatgcagtagggtacaaattagcattttgtgaaaatgacaggacctctgttttaaaaaaataaaataaaataaaaaaatcaggacctttggcactgaaaccaatcctgtggtccattgggaaatatcatttaacagatttatgagtcataagtttttgatgttaccttcaggtttgttgcattggatcctgacactttgtttgttgattggttggttcttaatcactgtcctatgtctt

SEQ ID NO: 40352 - DNA, 600 bp, Chicken  19866894275091_1
ccttgtagaagaagcccaaacctgtggcaccaatggggtgcaaagcacaaaggattcccataactggaggagccgcgtgccaaatatgtgacagggcagcctgggaaagcagtatttgtttccccagtgctgtaccttctatttgatgcaggctcagcaccataaactctgatccaactgttatatcccagtggctctgaatacatctgtgacagtcaaacatcagtgagataagaaatgcagtagtgccataacagaaccaatctctttgtctttgacattggtggaaccttctaaaayaaggaaaagaaactcccaaactggataggacttacaacagacaagcaacacaactccaaggttcccaaagagaaacatctctggagaagtcaccttgcagcccccattagtcagatttctgcctcgagtcagcattttgcgtcctctggagattcagaactgaatgacagttaatcccgttcctataatttaaatgacctgcccagcaaaaatgccaagcacagcatttaaatacagctgcactacatgtaaatacagctaagcccaaactcttccagatgcctcgaggcagtgagttcc

SEQ ID NO: 40353 - DNA, 599 bp, Chicken  19866894275093_1
  misc_feature (1)..(93): n is any nucleotide
nnnnnnnnnnnnnnnnnnnnnnnnnnnnnnnnnnnnnnnnnnnnnnnnnnnnnnnnnnnnnnnnnnnnnnnnnnnnnnnnnnnnnnnnnnnnnaattgctttgttcctttctacgcagttcttggaacacagtgatggggactgggtttagtccatttcccagaaagtgcctctaccaagaagaaacgcaccaagaaaagtgtatttcatctgtataacccaatgtttcaattacaatcatataatatctaattatgttctccataaatctttatattttgttatgaagctcataataaygaaatctgataaatagattctctccgggccactaccaattgagtagaaaaaatacttatttatgaagttttattaataaaatgtgaataattcaaacagcttcttcagtgaagaaacagcagtagagtatactcttatttgcatataaatgaaatgatgctttagtgtcagagtgaagaattaaataatatgaattcttacagtgcaatcctgacagcctcataaatatcatggtcataagttkcagtttcctaaaatctcattttatcttttattacaaaaatatgaccaaagggcca

SEQ ID NO: 40354 - DNA, 600 bp, Chicken  19866894275093_2
atatctaattatgttctccataaatctttatattttgttatgaagctcataataaygaaatctgataaatagattctctccgggccactaccaattgagtagaaaaaatacttatttatgaagttttattaataaaatgtgaataattcaaacagcttcttcagtgaagaaacagcagtagagtatactcttatttgcatataaatgaaatgatgctttagtgtcagagtgaagaattaaataatatgaattcttacagtgcaatcctgacagcctcataaatatcatggtcataagttkcagtttcctaaaatctcattttatcttttattacaaaaatatgaccaaagggccaagtccttctcattttacatgtgtgagtattcccaatgacaacataattatgcagtaagtgaggttaccagattcagctttatgtcagataaaggagcaaaagcacagtgttacctgacgtatctattaggagaacagaatctctcgtttaactattaaaaaagcagcaccttatgtgctggtgaaatgtagaaaacaacaatgacaactgtaaccctacttgcaaacagatgtttcacggaacga

SEQ ID NO: 40355 - DNA, 600 bp, Chicken  19866894275093_3
aagaacattcaaattactttaaatggatagctgctgtcaaagagagctttaattttgtctaaaagttgaaaaagtctctgaagcatcactccagaccagctacattgctttgcttttggctgtagtctcagtcatttgctgaggcaaggctgttgagctgaccttgtaaaagactgcagtagcagagcatggaaggatgagatctgggtagagagagctcagctggacaaagtgcattcttctaagtggcaaataaaggtaatggctggagactctccttgaagtgctctgagagatatwgagtaatgtgggacaaaaagtgggtgcagtcatctcccctttacctacaatttttctttcccatcccacagcacagtgctgagcaagtgggacagggcagtcaaagatggaaaaggcatacaaagaaaggaaagacagatgtggggcgggtagtaagaaagaattatttattgagttcgtggagagcttgtaaatacagacatttatttattaaatatagaaaagataaagacatcaaatgccaagaaatccgccacagcccttacctgtttcttttcaagaactaattattgctagcgg

SEQ ID NO: 40356 - DNA, 600 bp, Chicken  19866894275093_4
aaagaaaggaaagacagatgtggggcgggtagtaagaaagaattatttattgagttcgtggagagcttgtaaatacagacatttatttattaaatatagaaaagataaagacatcaaatgccaagaaatccgccacagcccttacctgtttcttttcaagaactaattattgctagcggtactgaactgagtaccacgctatttgaacttgcttgattccagctaccaggcattactcccccctacaccacttcttagtagatttaaagggccctaacattcaatatttctttctgtgcrtgtatgtatacactattgtaaactcaactttcaatctttttggtagttaggatttttagttcttcaattacatagtattttctctgacaggtctttcttgtactcatttcatttttctggtatccatcttgcagagccatgtacattatgcttgaataaccttcacaatttgtatatacatgtaaaaaatgccaccattaacatctgcactctgtcaggtttgcatggatcctttttgctacatcacactgggaacttgtgttcagttacttgccagttgacttactgaccctcttcaaa

SEQ ID NO: 40357 - DNA, 369 bp, Chicken  19866894275094_1
tttttaaagctgcagacttcactttgaagcaatttttaagtactctaaagcaaagtgtaatcacatattgatttttccattaaaactacaaaaagtcttaaataccctgggggttctggcctcaattagtccccactcttacatcccttttctttttgttgcattttgccatccctcagcgtaggaggagaggaagcctgtctatttaagtcaaaagcacagccttctagtacatgagtccagtcaaaagcagcagtacataaattgctttctctacaacagggaggaaaattatgctcrtttccgcttatgttcatttttaaattagtgtgggaaaattgaaaatatccaaatatcgtgactggaaat

SEQ ID NO: 40358 - DNA, 600 bp, Chicken  19866894275104_1
tggctctcgttgctttgctttcgctttgttttcttttccataagctgctttgtgtctgatcagctttgttagcagtaatacatcaccttaaggcaaatgttgttacaaagtcatgcattccttgatattaactgcttaaaggaatatccttgccatgggtgaggataaacattttaaccgtagaagatcactgccacaactccacactaacacagacctcttcactggctgcacggcctctttggttcactttcctgttttccacacgcagggttggtgcaaaccatcagtgcccagcayagcatggacgcctcaggtacrgaatacgttacggtttcttctccatacactttccacgtgagtaacgaatgctttcctcagagccagctcacgcagccacgctttcatcctgcgagttggaaaaggtcgcctgcragtgaagggagcatcggctcagagctgcgcgactgccaggactccgattctgaaagccttgttctggaaaggcagtatcagttagaactccagcagcggattcgtgctaatgatgagctggtaggactgagtgctggagagctggagaatgacagcttagaggaa

SEQ ID NO: 40359 - DNA, 600 bp, Chicken  19866894275104_2
cgctttgttttcttttccataagctgctttgtgtctgatcagctttgttagcagtaatacatcaccttaaggcaaatgttgttacaaagtcatgcattccttgatattaactgcttaaaggaatatccttgccatgggtgaggataaacattttaaccgtagaagatcactgccacaactccacactaacacagacctcttcactggctgcacggcctctttggttcactttcctgttttccacacgcagggttggtgcaaaccatcagtgcccagcayagcatggacgcctcaggtacrgaatacgttacggtttcttctccatacactttccacgtgagtaacgaatgctttcctcagagccagctcacgcagccacgctttcatcctgcgagttggaaaaggtcgcctgcragtgaagggagcatcggctcagagctgcgcgactgccaggactccgattctgaaagccttgttctggaaaggcagtatcagttagaactccagcagcggattcgtgctaatgatgagctggtaggactgagtgctggagagctggagaatgacagcttagaggaagaagatagcttggagaagatg

SEQ ID NO: 40360 - DNA, 576 bp, Chicken  19866894275104_3
ttaaaggaatatccttgccatgggtgaggataaacattttaaccgtagaagatcactgccacaactccacactaacacagacctcttcactggctgcacggcctctttggttcactttcctgttttccacacgcagggttggtgcaaaccatcagtgcccagcayagcatggacgcctcaggtacrgaatacgttacggtttcttctccatacactttccacgtgagtaacgaatgctttcctcagagccagctcacgcagccacgctttcatcctgcgagttggaaaaggtcgcctgcragtgaagggagcatcggctcagagctgcgcgactgccaggactccgattctgaaagccttgttctggaaaggcagtatcagttagaactccagcagcggattcgtgctaatgatgagctggtaggactgagtgctggagagctggagaatgacagcttagaggaagaagatagcttggagaagatgagttcagaggagcaggaaggagctaagtatggcacagtgcagtatacacacagagtgccaaagaaagagagtgatggaaggtaaggcata

SEQ ID NO: 40361 - DNA, 599 bp, Chicken  19866894275115_1
  misc_feature (1)..(5): n is any nucleotide
nnnnnctcagttaaatatttaagtttttaaagctgcttctgttgattagtgagctaaaccctgttatgagagaacaaagaaccctcaaaaggcagcaaattaaggtcacaggtcagtgttcaggcaaaatagagctgggctaccaaatgatttcccattattaagcctataaatcagagagatgttgatagatgcaagcactggggcagtgtgtcagcctcataaaaaaattgtttaacagatttagatgatcaatgttgtcagaatcttgcttgtgaaaaataagatgacaaattaagytgtaagaccatgatgctagagaatattattatcccctacccttcaccattgccaccatcattttatatctagcctaaaaagaaaagcacaacaaataaataaataaagttatgtgtctatscatttgtgtcccttggaaagcccacaagtgaggcagaaggctaatggcttttcaaagcaaatgcaacctgctgcataagccctgattgaagagctctgaaggggaagaaaatagataaaggggttgttgaattataaatagcctctatgacagtggtctaattagagctaaagaggta

SEQ ID NO: 40362 - DNA, 600 bp, Chicken  19866894275115_2
aggcaaaatagagctgggctaccaaatgatttcccattattaagcctataaatcagagagatgttgatagatgcaagcactggggcagtgtgtcagcctcataaaaaaattgtttaacagatttagatgatcaatgttgtcagaatcttgcttgtgaaaaataagatgacaaattaagytgtaagaccatgatgctagagaatattattatcccctacccttcaccattgccaccatcattttatatctagcctaaaaagaaaagcacaacaaataaataaataaagttatgtgtctatscatttgtgtcccttggaaagcccacaagtgaggcagaaggctaatggcttttcaaagcaaatgcaacctgctgcataagccctgattgaagagctctgaaggggaagaaaatagataaaggggttgttgaattataaatagcctctatgacagtggtctaattagagctaaagaggtatcactttttactaatggcatgatgaaaacaaacgtaacccatcacaattcatcgtgcaagaaattctgttaaaatggcgtaacatttcatgacaaaagacattatactatatttacttttta

SEQ ID NO: 40363 - DNA, 484 bp, Chicken  19866894275127_1
ctagggctgccgccgcctacctgtgccattaagtatcccagcactaagaaaagcaaggtcttcgtagagacagtaatgttaactcttatgctgccttataagaatagcaccttgaatgctgtggagcagtcaagaactagccatgactcttcaccttcatggttcagtagtttgactaacctttgacagtcagagtgcatgtaacttattgcactgtaagggtgtcaaacttgttatagagaaatagctttgggtttgccatcaggaataactttcagaaagaattttggcctcatccayaagctaaaacaaaattataagaagggctttgcagtaaaaatgactttcagaaacactttggtagacaagattgaatttatttatttatttataagaaaaaaagaattwaaaaaaatttattatatgataaatataatggcaacaaactttgatagtcatgtgtagttatactttttttgataca

SEQ ID NO: 40364 - DNA, 376 bp, Chicken  19866894275127_2
accttgaatgctgtggagcagtcaagaactagccatgactcttcaccttcatggttcagtagtttgactaacctttgacagtcagagtgcatgtaacttattgcactgtaagggtgtcaaacttgttatagagaaatagctttgggtttgccatcaggaataactttcagaaagaattttggcctcatccayaagctaaaacaaaattataagaagggctttgcagtaaaaatgactttcagaaacactttggtagacaagattgaatttatttatttatttataagaaaaaaagaattwaaaaaaatttattatatgataaatataatggcaacaaactttgatagtcatgtgtagttatactttttttgataca

SEQ ID NO: 40365 - DNA, 600 bp, Chicken  19866894275128_1
tgatatagccttcggactaatcttatgaactctagctgtcttctagaagtcaataatgctacataaatggatttacacacttacaaaagcttgcaggacaaaggcctcaattaaatagatggcacaagtcttgcaattatccagttttacagaaaatgatctattcaacttgtacacggtaatgttccttctcatcattattaccgagtggatttttactgacgtgctttgtatgagtaccggtattcatccacaggggcaataaatcttctttataccacagtagaagtctgtcagagwgcagagagagacccacacagcttatccatgcaatcaaacaccaagaaaaataaataaaaaacaayrgaactagaagtttctgaaggacttgtaaatcaggcatacagacaattcaagattcagaaatctatttgagataaaatacaagagaggattgagcagaccagcaaatccaagctgctggtgaccactaacacttcctcaaaaactgagctagctcagtagttattattgtgttctcttacagcagtcaataaaagactaaccaccaaaacagtcagatggcaaacaccatctgct

SEQ ID NO: 40366 - DNA, 600 bp, Chicken  19866894275128_2
aatggatttacacacttacaaaagcttgcaggacaaaggcctcaattaaatagatggcacaagtcttgcaattatccagttttacagaaaatgatctattcaacttgtacacggtaatgttccttctcatcattattaccgagtggatttttactgacgtgctttgtatgagtaccggtattcatccacaggggcaataaatcttctttataccacagtagaagtctgtcagagwgcagagagagacccacacagcttatccatgcaatcaaacaccaagaaaaataaataaaaaacaayrgaactagaagtttctgaaggacttgtaaatcaggcatacagacaattcaagattcagaaatctatttgagataaaatacaagagaggattgagcagaccagcaaatccaagctgctggtgaccactaacacttcctcaaaaactgagctagctcagtagttattattgtgttctcttacagcagtcaataaaagactaaccaccaaaacagtcagatggcaaacaccatctgcttacatggtgatatttcaaaaaatgttaaataatatagcaacaaaacattgttaaaaattcccagt

SEQ ID NO: 40367 - DNA, 600 bp, Chicken  19866894275128_3
atggatttacacacttacaaaagcttgcaggacaaaggcctcaattaaatagatggcacaagtcttgcaattatccagttttacagaaaatgatctattcaacttgtacacggtaatgttccttctcatcattattaccgagtggatttttactgacgtgctttgtatgagtaccggtattcatccacaggggcaataaatcttctttataccacagtagaagtctgtcagagwgcagagagagacccacacagcttatccatgcaatcaaacaccaagaaaaataaataaaaaacaayrgaactagaagtttctgaaggacttgtaaatcaggcatacagacaattcaagattcagaaatctatttgagataaaatacaagagaggattgagcagaccagcaaatccaagctgctggtgaccactaacacttcctcaaaaactgagctagctcagtagttattattgtgttctcttacagcagtcaataaaagactaaccaccaaaacagtcagatggcaaacaccatctgcttacatggtgatatttcaaaaaatgttaaataatatagcaacaaaacattgttaaaaattcccagtg

SEQ ID NO: 40368 - DNA, 600 bp, Chicken  19866894275135_1
ctcttgtgcgagccctcatacagtgctagtgacattctgaagctgcacgttcccccattataagtgttcccattgtgagcccaagcaaaaactgttaccgcgttacctgttccttgggttctgcttcacatctgacccggagctgagctgtcacaggccttacacagtggggaaggttgccgtagcaagctcttgcctatcctacagaagaggaagaaaaaaaaaaaaaaaagattagcagttttacaataacgtagtggaaaatggactgaaaaatgtaatagtggtttggggatttgkcttgttttccactattttgctttggctacaaagtctgtgagaaaaatgcttgaatgacaaaggatggcagtgccaggacaaaagccttataagagaactggctctctctctcaataggaaatgctacagctaatataaaaataaatcatacaaccatagatacatgtagaggtgactatgaagatgcttagaatttagtacttaagccyattawtttttttcagatgggaagtaggtctttgatgaaaggtacttgtgaggctttttcattttttttctttaaatgcaggtgagtaaagt

SEQ ID NO: 40369 - DNA, 600 bp, Chicken  19866894275135_2
gaggaagaaaaaaaaaaaaaaaagattagcagttttacaataacgtagtggaaaatggactgaaaaatgtaatagtggtttggggatttgkcttgttttccactattttgctttggctacaaagtctgtgagaaaaatgcttgaatgacaaaggatggcagtgccaggacaaaagccttataagagaactggctctctctctcaataggaaatgctacagctaatataaaaataaatcatacaaccatagatacatgtagaggtgactatgaagatgcttagaatttagtacttaagccyattawtttttttcagatgggaagtaggtctttgatgaaaggtacttgtgaggctttttcattttttttctttaaatgcaggtgagtaaagtctcatttcccactgagctaatttttgatattttttttcttctctgagaagaaaagctggtgtatttgtgctttgtgtgcttgtaggtgattgcagtgtcatggcagcgttaaccatagaatcacataatgggctgggtyggaagggaccttaaatatcattgagttccaacccactgccatgagcagggttttcactctccagattagg

SEQ ID NO: 40370 - DNA, 600 bp, Chicken  19866894275135_3
agaaaaaaaaaaaaaaaagattagcagttttacaataacgtagtggaaaatggactgaaaaatgtaatagtggtttggggatttgkcttgttttccactattttgctttggctacaaagtctgtgagaaaaatgcttgaatgacaaaggatggcagtgccaggacaaaagccttataagagaactggctctctctctcaataggaaatgctacagctaatataaaaataaatcatacaaccatagatacatgtagaggtgactatgaagatgcttagaatttagtacttaagccyattawtttttttcagatgggaagtaggtctttgatgaaaggtacttgtgaggctttttcattttttttctttaaatgcaggtgagtaaagtctcatttcccactgagctaatttttgatattttttttcttctctgagaagaaaagctggtgtatttgtgctttgtgtgcttgtaggtgattgcagtgtcatggcagcgttaaccatagaatcacataatgggctgggtyggaagggaccttaaatatcattgagttccaacccactgccatgagcagggttttcactctccagattaggctgcc

SEQ ID NO: 40371 - DNA, 456 bp, Chicken  19866894275135_4
aataaatcatacaaccatagatacatgtagaggtgactatgaagatgcttagaatttagtacttaagccyattawtttttttcagatgggaagtaggtctttgatgaaaggtacttgtgaggctttttcattttttttctttaaatgcaggtgagtaaagtctcatttcccactgagctaatttttgatattttttttcttctctgagaagaaaagctggtgtatttgtgctttgtgtgcttgtaggtgattgcagtgtcatggcagcgttaaccatagaatcacataatgggctgggtyggaagggaccttaaatatcattgagttccaacccactgccatgagcagggttttcactctccagattaggctgcccagggtcccaaaccacacaggaagcgtcttcagaatcacttggcaagttacttgaagcagatgagtgcagtgtcacctgta

SEQ ID NO: 40372 - DNA, 600 bp, Chicken  19866894275138_1
gattactttgaacccaaattttcatctacttggagtgagtaataaactcgtaaatacatttaatatatctcagttactgcacttcacaatcaaaattcagagttgtgcatctgtttcacgcagtattgaatttgaacttgattttgacatggaaccagagaggactctgcattcttacagagtgaagcgatgcttctaaaagattcttttgtagaagggagtaatgatcacagagatgtctcacttaaccttttcacatgcaggtggacgttaaatgtgacttggggataggtagcttgrgaattgaagagtttatgctgctgagctactccatagaaccagagtaagagttatcctgatggtrtgaagcgcttgctgtcttggtgtcaattgttcttagagcagcacacttgcttcaaaatcttcttttatccatctctgcattattactgcactgcatttgcttttgcttatactgacaaaacaactgaaagccagcatatgttctctcttatgtatgaattgtgcagttaaagttattaagtaagacactaccttaatagcagagaagttaattcaatagcatgtgcttgtaaatat

SEQ ID NO: 40373 - DNA, 600 bp, Chicken  19866894275138_2
atatctcagttactgcacttcacaatcaaaattcagagttgtgcatctgtttcacgcagtattgaatttgaacttgattttgacatggaaccagagaggactctgcattcttacagagtgaagcgatgcttctaaaagattcttttgtagaagggagtaatgatcacagagatgtctcacttaaccttttcacatgcaggtggacgttaaatgtgacttggggataggtagcttgrgaattgaagagtttatgctgctgagctactccatagaaccagagtaagagttatcctgatggtrtgaagcgcttgctgtcttggtgtcaattgttcttagagcagcacacttgcttcaaaatcttcttttatccatctctgcattattactgcactgcatttgcttttgcttatactgacaaaacaactgaaagccagcatatgttctctcttatgtatgaattgtgcagttaaagttattaagtaagacactaccttaatagcagagaagttaattcaatagcatgtgcttgtaaatatgtttaatatctcctgctctagcatgtggtggagggaatatagttatattattgactgaatatat

SEQ ID NO: 40374 - DNA, 520 bp, Chicken  19866894275138_3
ttaaagttattaagtaagacactaccttaatagcagagaagttaattcaatagcatgtgcttgtaaatatgtttaatatctcctgctctagcatgtggtggagggaatatagttatattattgactgaatatatctggaggtgtcttgggcatatggtattaaatctgttttaatgtaattatctctattaactaaaaaaaaagtttaaaaaagtactctctccgagttgattgacattcttctcagtaaagcaccctcattgctgattagaggtgtggaaatagtaatttgttctagcrtttagaaatttgattagacctgtaatgaaatggagcgcccacacgctgtctaaatattctacctgacaccagttggatctcatccacgttggaagaacccttgaaatgttgctttactgcagtatgttttgtgtcttgaaatcaattgcgttcatgcaaatacccactgggtgttcaaccagcagggtgaaccttgatcctcctggaaatcagcatcagg

SEQ ID NO: 40375 - DNA, 599 bp, Chicken  19866894275143_1
  misc_feature (1)..(101): n is any nucleotide
nnnnnnnnnnnnnnnnnnnnnnnnnnnnnnnnnnnnnnnnnnnnnnnnnnnnnnnnnnnnnnnnnnnnnnnnnnnnnnnnnnnnnnnnnnnnnnnnnnnnnactccaacaatcagtctgaaaagactcatactattttttattttaaatatgaaattatcatcatctaaagcagtaggcaaaacagttatgtattccaacatatttaatacaaagagacacatattttcaatactatcacagatgtcagaaagtgcactgaactgcattttcagaagcatcaaagcaagctcaacttctygctcccaacaattttgtttttagatactgtttctgaaaatcttctcggaagccacttatraaatccccagtaaatgtctattagcagtattcattgcaaaaytggccctaacataaggacatatttctctgcctggtgcaactctaaactgatctttatgaagggaatccctgtacctccctggggccacaggggcttcacttggcatgcaaacttgtttccagggtttggggctcaaaagaacagtgaatttaacactaaaaaactaaactggggcaatttcctgcccctaacatctt

SEQ ID NO: 40376 - DNA, 599 bp, Chicken  19866894275143_2
  misc_feature (1)..(41): n is any nucleotide
nnnnnnnnnnnnnnnnnnnnnnnnnnnnnnnnnnnnnnnnnactccaacaatcagtctgaaaagactcatactattttttattttaaatatgaaattatcatcatctaaagcagtaggcaaaacagttatgtattccaacatatttaatacaaagagacacatattttcaatactatcacagatgtcagaaagtgcactgaactgcattttcagaagcatcaaagcaagctcaacttctygctcccaacaattttgtttttagatactgtttctgaaaatcttctcggaagccacttatraaatccccagtaaatgtctattagcagtattcattgcaaaaytggccctaacataaggacatatttctctgcctggtgcaactctaaactgatctttatgaagggaatccctgtacctccctggggccacaggggcttcacttggcatgcaaacttgtttccagggtttggggctcaaaagaacagtgaatttaacactaaaaaactaaactggggcaatttcctgcccctaacatcttatatgaagcatcataattggaccttcagcaaaatccatgggagtactcacaggcttaagg

SEQ ID NO: 40377 - DNA, 600 bp, Chicken  19866894275143_3
ctccaacaatcagtctgaaaagactcatactattttttattttaaatatgaaattatcatcatctaaagcagtaggcaaaacagttatgtattccaacatatttaatacaaagagacacatattttcaatactatcacagatgtcagaaagtgcactgaactgcattttcagaagcatcaaagcaagctcaacttctygctcccaacaattttgtttttagatactgtttctgaaaatcttctcggaagccacttatraaatccccagtaaatgtctattagcagtattcattgcaaaaytggccctaacataaggacatatttctctgcctggtgcaactctaaactgatctttatgaagggaatccctgtacctccctggggccacaggggcttcacttggcatgcaaacttgtttccagggtttggggctcaaaagaacagtgaatttaacactaaaaaactaaactggggcaatttcctgcccctaacatcttatatgaagcatcataattggaccttcagcaaaatccatgggagtactcacaggcttaaggttaagtgaatgcttctcagttcccacactgattattcctatca

SEQ ID NO: 40378 - DNA, 600 bp, Chicken  19866894275143_4
ctgcctggtgcaactctaaactgatctttatgaagggaatccctgtacctccctggggccacaggggcttcacttggcatgcaaacttgtttccagggtttggggctcaaaagaacagtgaatttaacactaaaaaactaaactggggcaatttcctgcccctaacatcttatatgaagcatcataattggaccttcagcaaaatccatgggagtactcacaggcttaaggttaagtgaatgcttctcagttcccacactgattattcctatcagcagtgcttactgagggcagcggtgytatctgataggatagaatgtgtttttttaaacaatagatactttgttttttgaaacctgaaacgtttcagcagtaattcagaactctgcctcccgatgayctgtttccccactttgtaattctttgcatattctctcacaatactgaataaatggtggcttttgctgcacgctgcgcaaagcagtgaatatgcagtaatatttcctcttttgtggttatccaaaccataagaaagaataatccatcttcataccttttctcctttgggtcctgggggccctgaaggccctgcagggcctt

SEQ ID NO: 40379 - DNA, 600 bp, Chicken  19866894275143_5
tggggctcaaaagaacagtgaatttaacactaaaaaactaaactggggcaatttcctgcccctaacatcttatatgaagcatcataattggaccttcagcaaaatccatgggagtactcacaggcttaaggttaagtgaatgcttctcagttcccacactgattattcctatcagcagtgcttactgagggcagcggtgytatctgataggatagaatgtgtttttttaaacaatagatactttgttttttgaaacctgaaacgtttcagcagtaattcagaactctgcctcccgatgayctgtttccccactttgtaattctttgcatattctctcacaatactgaataaatggtggcttttgctgcacgctgcgcaaagcagtgaatatgcagtaatatttcctcttttgtggttatccaaaccataagaaagaataatccatcttcataccttttctcctttgggtcctgggggccctgaaggccctgcagggccttggtgaccctaaagaatgaaagaaaacaaaaattagttccaatgcaaataattaaagaaataattaattctgaacttttgtttagctacttgttgccatta

SEQ ID NO: 40380 - DNA, 600 bp, Chicken  19866894275143_6
ggtgaccctaaagaatgaaagaaaacaaaaattagttccaatgcaaataattaaagaaataattaattctgaacttttgtttagctacttgttgccattatttttggctgctcgctagtaatgctacacagtgatgtgggacaaaactaatgggcactggcagaaaattcattgtgtgcaggaaaatctgcgcacacagtgggaagctgaaggctgatgtctaacaggggcttcatgcatgtcaagggagctgggcttgatcttcagggctagggccacagatgggactttctgtatggrgtagacatggcagtctggactgtaagaggaagatcatcagagaacagcaatttttattcagtgaatgccacaacacctttatgtccttcagctaacctcattcaatcagtggttctgctagttaaagggaaagtgcctgaccagatggtaagcagaggtagtggcttgcttaattttcttcataatgaatagctgttgtaattttataggaactttattaaaaaatagagtgggaagcactggaagaacgaaggtttcaaatctgatacaaagaaatgactgctggtgtacttgcaaaaa

SEQ ID NO: 40381 - DNA, 472 bp, Chicken  19866894275143_7
tggttctgctagttaaagggaaagtgcctgaccagatggtaagcagaggtagtggcttgcttaattttcttcataatgaatagctgttgtaattttataggaactttattaaaaaatagagtgggaagcactggaagaacgaaggtttcaaatctgatacaaagaaatgactgctggtgtacttgcaaaaaacagccaacgttgcttaatgcttacactgctgagtaggaattcaggtgtgatacaaatgtatgcatctgacacagaaaacatttgcatattctacagaaagactccacrtgatagttgaaactattcagagcaccggagttgcacagagatgtgagtgcacatgaattcagtcaaaaactcaccccatatcctggaattccaagctctcctccaggtcccattcctccctggatgtccctgataaatgcaataatcagtgataaaaaaaaagaatgagctt

SEQ ID NO: 40382 - DNA, 600 bp, Chicken  19866894275145_1
accgacataccgacgtaacttgtcctgaaagcatctctagttcattggaagtgaattgatttgatcttagggcttctttcgctgtctttggatcaggtaatgcacttttccatagcgtttcaatagagctgtatgtgtacagacagtgtcattctcacacatattgggtaaaaattcagtaagttcaacagtaggctgattccaatgcagtgtgtgtaacagtgactgatgtaccttctgattctggtaacacagaatcactgatagctcttcatgttaaaattagggaaggtcaaaaakatggtttaaacatttgaattcagatgtgccttcactaggtggaacctcagtattcattttaccattaaccttccccatccrtaccacaccatacatgtgggagagttcttagttttcttcctatacctctgtacttgaaaagttacagtgtgcttggctccaggaacagaggctgtaaagtattcctcaaagtctctggacggagcagtcaaggtatcagtggaggaggacrtgaggaagggaacttctatatcatcttagttaaaaaaagtagttgcattctcttacacattctaacta

SEQ ID NO: 40383 - DNA, 600 bp, Chicken  19866894275145_2
ctgtctttggatcaggtaatgcacttttccatagcgtttcaatagagctgtatgtgtacagacagtgtcattctcacacatattgggtaaaaattcagtaagttcaacagtaggctgattccaatgcagtgtgtgtaacagtgactgatgtaccttctgattctggtaacacagaatcactgatagctcttcatgttaaaattagggaaggtcaaaaakatggtttaaacatttgaattcagatgtgccttcactaggtggaacctcagtattcattttaccattaaccttccccatccrtaccacaccatacatgtgggagagttcttagttttcttcctatacctctgtacttgaaaagttacagtgtgcttggctccaggaacagaggctgtaaagtattcctcaaagtctctggacggagcagtcaaggtatcagtggaggaggacrtgaggaagggaacttctatatcatcttagttaaaaaaagtagttgcattctcttacacattctaactataaaatatccaacaataagcaatggcagctattcttttgattggggccactccatagttggtacatccatttgtaggttag

SEQ ID NO: 40384 - DNA, 600 bp, Chicken  19866894275145_3
accttctgattctggtaacacagaatcactgatagctcttcatgttaaaattagggaaggtcaaaaakatggtttaaacatttgaattcagatgtgccttcactaggtggaacctcagtattcattttaccattaaccttccccatccrtaccacaccatacatgtgggagagttcttagttttcttcctatacctctgtacttgaaaagttacagtgtgcttggctccaggaacagaggctgtaaagtattcctcaaagtctctggacggagcagtcaaggtatcagtggaggaggacrtgaggaagggaacttctatatcatcttagttaaaaaaagtagttgcattctcttacacattctaactataaaatatccaacaataagcaatggcagctattcttttgattggggccactccatagttggtacatccatttgtaggttaggagatgcatttaagcgatttaatttttaggtaatgctgatgctataaatttataagtgaatcagaccgaatttatatggtgaatcagaccagaatccctctggaggactattgtagcgaatgcataccgatgtcctgttttcttagtcaaa

SEQ ID NO: 40385 - DNA, 600 bp, Chicken  19866894275148_1
gtattatctcctttttttttttccagttcctttaccagtaggattgacgcaatgtttgtaatgtttatttattattgttgtttagagatatcccaacaggcaaaagaagcaaagcgtttcatgtacataccacagcattcagtgcaactccacagtctgcacttattagtcaataacgtagaggcatatttaaagcacagcaactgatgtgttcttgtggtagtcaataaacgtatttgctcattcttaaacagaatatagggtttatcttcagcgcaagagaagctaacacaaatattmgagtttttccaaacgattttaaggggaacacaaaargggaggaagtttctctccggatttgcagaggagtttgaagcccagggtgcctctaattgggatgagatgagagcatttgaaatgcagactgccggcgctctgctcagcactctccccagtcacaaagctgcattggtgagctgataacagacagagatctaaaagcctatcccaagcacaagcacatctctctgggagctgtcctggagataccagggtgaaccttcgcccactatgcatggccaaatggtcacaaagcagcaa

SEQ ID NO: 40386 - DNA, 600 bp, Chicken  19866894275148_2
agtaggattgacgcaatgtttgtaatgtttatttattattgttgtttagagatatcccaacaggcaaaagaagcaaagcgtttcatgtacataccacagcattcagtgcaactccacagtctgcacttattagtcaataacgtagaggcatatttaaagcacagcaactgatgtgttcttgtggtagtcaataaacgtatttgctcattcttaaacagaatatagggtttatcttcagcgcaagagaagctaacacaaatattmgagtttttccaaacgattttaaggggaacacaaaargggaggaagtttctctccggatttgcagaggagtttgaagcccagggtgcctctaattgggatgagatgagagcatttgaaatgcagactgccggcgctctgctcagcactctccccagtcacaaagctgcattggtgagctgataacagacagagatctaaaagcctatcccaagcacaagcacatctctctgggagctgtcctggagataccagggtgaaccttcgcccactatgcatggccaaatggtcacaaagcagcaacaagataggaactctattacctacaaagggattagg

SEQ ID NO: 40387 - DNA, 600 bp, Chicken  19866894275154_1
gcggcagtgcttatgttgcaaaatatcatgagcatgaaagggaaagttttaaagattgccggttaatccttataaatgagttattggcatcgcagagctgcagctggaggagctgcctgctggaggctgagcccactgggagccccggggctgtgatctgtggggtttggtgatggtatccctgcagcactgcatccctgcatgctgcacccatgctgttgcgtggcccacagcatccctgcactcaacacctcccagctgggcccagaaggagcaggaagggtgcacagagccagagtrctrcctcccaktgtgggattcctcctgcatcctgctggtggggaaacgcactggggagcatggagagggaatgcataaaagttggttccctccctgcactgcgctgaacttttctccccgtgtctgcgccctgatttgagacacagcactcctctcctctcccgctctcttcctttcaccaaacagatgtaactatttattccttatgtcccagttttcctgtaatttcataaagtgcaaatttgctgtcctgctcccaaatgccgagtcggtggtttgtcataacagtcatcagtaact

SEQ ID NO: 40388 - DNA, 600 bp, Chicken  19866894275154_2
gcagtgcttatgttgcaaaatatcatgagcatgaaagggaaagttttaaagattgccggttaatccttataaatgagttattggcatcgcagagctgcagctggaggagctgcctgctggaggctgagcccactgggagccccggggctgtgatctgtggggtttggtgatggtatccctgcagcactgcatccctgcatgctgcacccatgctgttgcgtggcccacagcatccctgcactcaacacctcccagctgggcccagaaggagcaggaagggtgcacagagccagagtrctrcctcccaktgtgggattcctcctgcatcctgctggtggggaaacgcactggggagcatggagagggaatgcataaaagttggttccctccctgcactgcgctgaacttttctccccgtgtctgcgccctgatttgagacacagcactcctctcctctcccgctctcttcctttcaccaaacagatgtaactatttattccttatgtcccagttttcctgtaatttcataaagtgcaaatttgctgtcctgctcccaaatgccgagtcggtggtttgtcataacagtcatcagtaactgtc

SEQ ID NO: 40389 - DNA, 600 bp, Chicken  19866894275154_3
tatgttgcaaaatatcatgagcatgaaagggaaagttttaaagattgccggttaatccttataaatgagttattggcatcgcagagctgcagctggaggagctgcctgctggaggctgagcccactgggagccccggggctgtgatctgtggggtttggtgatggtatccctgcagcactgcatccctgcatgctgcacccatgctgttgcgtggcccacagcatccctgcactcaacacctcccagctgggcccagaaggagcaggaagggtgcacagagccagagtrctrcctcccaktgtgggattcctcctgcatcctgctggtggggaaacgcactggggagcatggagagggaatgcataaaagttggttccctccctgcactgcgctgaacttttctccccgtgtctgcgccctgatttgagacacagcactcctctcctctcccgctctcttcctttcaccaaacagatgtaactatttattccttatgtcccagttttcctgtaatttcataaagtgcaaatttgctgtcctgctcccaaatgccgagtcggtggtttgtcataacagtcatcagtaactgtcgctttctg

SEQ ID NO: 40390 - DNA, 600 bp, Chicken  19866894275163_1
tgtaaataatctatgttaacttagaaaacggatcgcataaatgataatatataatatttaatatttatttatatatatatttatatataatatatatataatatatattatatatataatatataataaatatataatatttatatatatataatatatatataatagctataaaatgttaataaaagacctgattcaaaagcttttcaaagttgcagaaaatttcttcaatagaatgagcttcagcagcaaatctgtagttggcaaagaaggcagaaatttttcattctgtgtgcaacwttgatgagaaccaaaacaaatcttgatgtccatgagcacagtattgtacagagttacataaaagaagacaggcagttctctggagttcccagaggtatgcagtatctgaataaacataggcctttctcttctcaggaattactgctttctaaaatattgcttttttactttcagctctgtgaaaaatgagaaagattagatgccattgaagttttaactgtctgcacatttttttgtaaatatggaaataatattttctgctcgaatgcatgagaatgcaatccccaagttttatctata

SEQ ID NO: 40391 - DNA, 600 bp, Chicken  19866894275164_1
aaataaaaataaaaacattagggaaaaaaaaaaaatcagcagctcccgtctgcacatcgtacctgtggaaagccgcccctgttcgcatttcttaacgagtcgagcttaaagttcaaacccaccgtcccaaccttcccgaagcacgccgagtcccggctcccgctgcacgggattctctgtagcccccaacgtggggtattgcagcccgacccctccgcaccgctctcacaaaacgcagaacctggagccccaaaatgtgcgttcccggtccgcatctgatttcacaggagggagaagggstctgagaaacgcgttgccgttcacctcgaacaaaggcaacgcggccgaggaaatgctgttaggcgcgggttaagtgctctgtagcattccccattaatccctacaaattccgtgagcttctcaatgcggtttgaatttggaggatctcggtgactatcggagagggctcaacgcggcggggctcccacctcatacccaaacagcgattccagttcaatagcacgggaagagaaaaggacggggctaaaaaacagcaaaagggcaggtcgtgtaactttaggtgcgtggacaacgagcgtg

SEQ ID NO: 40392 - DNA, 599 bp, Chicken  19866894275165_1
  misc_feature (1)..(68): n is any nucleotide
nnnnnnnnnnnnnnnnnnnnnnnnnnnnnnnnnnnnnnnnnnnnnnnnnnnnnnnnnnnnnnnnnnnncccgctccgctcggcgtgcctcctcctctggtcaccggactgatgaattaatcatgatgtggctgctgttaatgcatttatgcggagcgggatgtgccgccggttcgcggcgtagcgcagcggggtgaggaagtgaggagagctccgccagccgcgcggagccgaggcagcggctgtagccgcagcgctctccatggctccggaggaggtaatgggaaccgggactcgcccsctckttccccggygctcggggaaggggcagggctgygggtgggggcacggtgctggcggggcatcttgaagccggcgggcgggggcagaaacgcgcgtggtaccgcggaggacgtttcccacgcgatgtagcgctctctcggyrtagctgcgggagccgggctcacttttgtcgccgctgacgctgtcaaaaacgctgtggcttcagcggtaacgacacggagctccctccctccggcagcccgccgggtcaccgctccgagcgagacgttaactgctggtaatccattagcttcgtgc

SEQ ID NO: 40393 - DNA, 599 bp, Chicken  19866894275165_2
  misc_feature (1)..(64): n is any nucleotide
nnnnnnnnnnnnnnnnnnnnnnnnnnnnnnnnnnnnnnnnnnnnnnnnnnnnnnnnnnnnnnnncccgctccgctcggcgtgcctcctcctctggtcaccggactgatgaattaatcatgatgtggctgctgttaatgcatttatgcggagcgggatgtgccgccggttcgcggcgtagcgcagcggggtgaggaagtgaggagagctccgccagccgcgcggagccgaggcagcggctgtagccgcagcgctctccatggctccggaggaggtaatgggaaccgggactcgcccsctckttccccggygctcggggaaggggcagggctgygggtgggggcacggtgctggcggggcatcttgaagccggcgggcgggggcagaaacgcgcgtggtaccgcggaggacgtttcccacgcgatgtagcgctctctcggyrtagctgcgggagccgggctcacttttgtcgccgctgacgctgtcaaaaacgctgtggcttcagcggtaacgacacggagctccctccctccggcagcccgccgggtcaccgctccgagcgagacgttaactgctggtaatccattagcttcgtgctccc

SEQ ID NO: 40394 - DNA, 599 bp, Chicken  19866894275165_3
  misc_feature (1)..(55): n is any nucleotide
nnnnnnnnnnnnnnnnnnnnnnnnnnnnnnnnnnnnnnnnnnnnnnnnnnnnnnncccgctccgctcggcgtgcctcctcctctggtcaccggactgatgaattaatcatgatgtggctgctgttaatgcatttatgcggagcgggatgtgccgccggttcgcggcgtagcgcagcggggtgaggaagtgaggagagctccgccagccgcgcggagccgaggcagcggctgtagccgcagcgctctccatggctccggaggaggtaatgggaaccgggactcgcccsctckttccccggygctcggggaaggggcagggctgygggtgggggcacggtgctggcggggcatcttgaagccggcgggcgggggcagaaacgcgcgtggtaccgcggaggacgtttcccacgcgatgtagcgctctctcggyrtagctgcgggagccgggctcacttttgtcgccgctgacgctgtcaaaaacgctgtggcttcagcggtaacgacacggagctccctccctccggcagcccgccgggtcaccgctccgagcgagacgttaactgctggtaatccattagcttcgtgctccccgcttgcgt

SEQ ID NO: 40395 - DNA, 599 bp, Chicken  19866894275165_4
  misc_feature (1)..(32): n is any nucleotide
nnnnnnnnnnnnnnnnnnnnnnnnnnnnnnnncccgctccgctcggcgtgcctcctcctctggtcaccggactgatgaattaatcatgatgtggctgctgttaatgcatttatgcggagcgggatgtgccgccggttcgcggcgtagcgcagcggggtgaggaagtgaggagagctccgccagccgcgcggagccgaggcagcggctgtagccgcagcgctctccatggctccggaggaggtaatgggaaccgggactcgcccsctckttccccggygctcggggaaggggcagggctgygggtgggggcacggtgctggcggggcatcttgaagccggcgggcgggggcagaaacgcgcgtggtaccgcggaggacgtttcccacgcgatgtagcgctctctcggyrtagctgcgggagccgggctcacttttgtcgccgctgacgctgtcaaaaacgctgtggcttcagcggtaacgacacggagctccctccctccggcagcccgccgggtcaccgctccgagcgagacgttaactgctggtaatccattagcttcgtgctccccgcttgcgtgagagtgatgaagactcgctaat

SEQ ID NO: 40396 - DNA, 590 bp, Chicken  19866894275165_5
atttatgcggagcgggatgtgccgccggttcgcggcgtagcgcagcggggtgaggaagtgaggagagctccgccagccgcgcggagccgaggcagcggctgtagccgcagcgctctccatggctccggaggaggtaatgggaaccgggactcgcccsctckttccccggygctcggggaaggggcagggctgygggtgggggcacggtgctggcggggcatcttgaagccggcgggcgggggcagaaacgcgcgtggtaccgcggaggacgtttcccacgcgatgtagcgctctctcggyrtagctgcgggagccgggctcacttttgtcgccgctgacgctgtcaaaaacgctgtggcttcagcggtaacgacacggagctccctccctccggcagcccgccgggtcaccgctccgagcgagacgttaactgctggtaatccattagcttcgtgctccccgcttgcgtgagagtgatgaagactcgctaattaatttacatgcgaggaaattatctctgagcgaaggaaaaataccccgttgcacctgctccgtcgagacttgccatctgaatctggaggagagctata

SEQ ID NO: 40397 - DNA, 589 bp, Chicken  19866894275165_6
tttatgcggagcgggatgtgccgccggttcgcggcgtagcgcagcggggtgaggaagtgaggagagctccgccagccgcgcggagccgaggcagcggctgtagccgcagcgctctccatggctccggaggaggtaatgggaaccgggactcgcccsctckttccccggygctcggggaaggggcagggctgygggtgggggcacggtgctggcggggcatcttgaagccggcgggcgggggcagaaacgcgcgtggtaccgcggaggacgtttcccacgcgatgtagcgctctctcggyrtagctgcgggagccgggctcacttttgtcgccgctgacgctgtcaaaaacgctgtggcttcagcggtaacgacacggagctccctccctccggcagcccgccgggtcaccgctccgagcgagacgttaactgctggtaatccattagcttcgtgctccccgcttgcgtgagagtgatgaagactcgctaattaatttacatgcgaggaaattatctctgagcgaaggaaaaataccccgttgcacctgctccgtcgagacttgccatctgaatctggaggagagctata

SEQ ID NO: 40398 - DNA, 599 bp, Chicken  19866894275167_1
  misc_feature (1)..(60): n is any nucleotide
nnnnnnnnnnnnnnnnnnnnnnnnnnnnnnnnnnnnnnnnnnnnnnnnnnnnnnnnnnnntgaatgaacaaatatgcgtgctgggcctcgagggacatttattcagaaatagtagggaacaagggagataatacttgttcccagaggcaatgggaaagagctgcacaagctaaataaaggtgatacagatcccaaaaagggagtggggggaagggaagcagttgccttgctcccgtgacagagcactgcagcaagcctccagaagccactcctgatgtaggctgagctgtaagcaggcarcgaattacttatatacatgctgagtacttcttcggtggtgagcaaatcctgcgggtgagaacagcaaaaccccgagaggtagcttccatttggagaagttctcagctgagtaactcactggtgacgcagctgaaaggatyaaataggtttggttttaaagactttgtgctcgtgcagctcttgagtgttagtgtcatgggtccgaagcagggagctgctgacccgaatgctgagtcttctgcaacccaaaggtgcaagttgcttaaagttggaagccagagaaggaaatgactgagccc

SEQ ID NO: 40399 - DNA, 600 bp, Chicken  19866894275167_2
ccagaggcaatgggaaagagctgcacaagctaaataaaggtgatacagatcccaaaaagggagtggggggaagggaagcagttgccttgctcccgtgacagagcactgcagcaagcctccagaagccactcctgatgtaggctgagctgtaagcaggcarcgaattacttatatacatgctgagtacttcttcggtggtgagcaaatcctgcgggtgagaacagcaaaaccccgagaggtagcttccatttggagaagttctcagctgagtaactcactggtgacgcagctgaaaggatyaaataggtttggttttaaagactttgtgctcgtgcagctcttgagtgttagtgtcatgggtccgaagcagggagctgctgacccgaatgctgagtcttctgcaacccaaaggtgcaagttgcttaaagttggaagccagagaaggaaatgactgagccccraaaacatgctgtcctcagcagggaagaggctcgagtttgtatagctgatgcctgagtaaacctgatcctgtagtaggaacactgatctttgcaagtgagaggacggtgggggctggtcttagatagagcatcttgatac

SEQ ID NO: 40400 - DNA, 600 bp, Chicken  19866894275167_3
gaattacttatatacatgctgagtacttcttcggtggtgagcaaatcctgcgggtgagaacagcaaaaccccgagaggtagcttccatttggagaagttctcagctgagtaactcactggtgacgcagctgaaaggatyaaataggtttggttttaaagactttgtgctcgtgcagctcttgagtgttagtgtcatgggtccgaagcagggagctgctgacccgaatgctgagtcttctgcaacccaaaggtgcaagttgcttaaagttggaagccagagaaggaaatgactgagccccraaaacatgctgtcctcagcagggaagaggctcgagtttgtatagctgatgcctgagtaaacctgatcctgtagtaggaacactgatctttgcaagtgagaggacggtgggggctggtcttagatagagcatcttgatactatttttcttgaaaccttacctggaaaaacaagctgaaggtaagttgtgcatctgcatgttgttcattgaaaccagcgctggagctcgtcgctggggacagcacctggggagggcctggctcaccccgctgcttaacagcctggcctaagcagtccatggt

SEQ ID NO: 40401 - DNA, 599 bp, Chicken  19866894275172_1
  misc_feature (1)..(1): n is any nucleotide
nctgagatattattgaggttccctgcaacttacttgcagatgaggggtgatatgaatgcttaccttgcagagcaaggaagggagaaagtgctttcaggaatgaacagggctgtcagggactttccagttgtgccctcaatattgtttcagtttggtcagtgcttattttgcttttgcctgcaatattcccagtgttgcagggctgtgttacagtttgtgccagctggactgaccattgcagcaaagttttttgctttattcaaggtgtggctgctcacgcactgtattgcagcagtggcrtctcacgtggatcacgggcagcaagcatgttctttaaggcattatttggttgtctatgttaggaaaagcgactcataagcacagttggttcttggccttctggaagccccagttttacctctcatgatggtctgggtttaggagaaacctgttcaaaatggagaaagccactctccccttcttttyttccttcactgctgctgggtggggagcagcatgatgtctgctgggacttcrctctgtgtgytccctgcatgggtcacrtcttctgatttttcaagagtgttttgccaaatttg

SEQ ID NO: 40402 - DNA, 600 bp, Chicken  19866894275172_2
tcccagtgttgcagggctgtgttacagtttgtgccagctggactgaccattgcagcaaagttttttgctttattcaaggtgtggctgctcacgcactgtattgcagcagtggcrtctcacgtggatcacgggcagcaagcatgttctttaaggcattatttggttgtctatgttaggaaaagcgactcataagcacagttggttcttggccttctggaagccccagttttacctctcatgatggtctgggtttaggagaaacctgttcaaaatggagaaagccactctccccttcttttyttccttcactgctgctgggtggggagcagcatgatgtctgctgggacttcrctctgtgtgytccctgcatgggtcacrtcttctgatttttcaagagtgttttgccaaatttgattttcaatttaaatggtatattccatcctggtaatccatcttgaaacaagctgcagacatctgaatgcaagaacaaaccacactgctgcaggtatttgtgaagctgtatctttttagccgtgtacctttagccatgggagaattgctgcagtcggagtggtggaaggatgaaacttgcctgtcaat

SEQ ID NO: 40403 - DNA, 586 bp, Chicken  19866894275172_3
gcagcaaagttttttgctttattcaaggtgtggctgctcacgcactgtattgcagcagtggcrtctcacgtggatcacgggcagcaagcatgttctttaaggcattatttggttgtctatgttaggaaaagcgactcataagcacagttggttcttggccttctggaagccccagttttacctctcatgatggtctgggtttaggagaaacctgttcaaaatggagaaagccactctccccttcttttyttccttcactgctgctgggtggggagcagcatgatgtctgctgggacttcrctctgtgtgytccctgcatgggtcacrtcttctgatttttcaagagtgttttgccaaatttgattttcaatttaaatggtatattccatcctggtaatccatcttgaaacaagctgcagacatctgaatgcaagaacaaaccacactgctgcaggtatttgtgaagctgtatctttttagccgtgtacctttagccatgggagaattgctgcagtcggagtggtggaaggatgaaacttgcctgtcaatacatcaaaaacattaatttgcttatatatatatattt

SEQ ID NO: 40404 - DNA, 576 bp, Chicken  19866894275172_4
tttttgctttattcaaggtgtggctgctcacgcactgtattgcagcagtggcrtctcacgtggatcacgggcagcaagcatgttctttaaggcattatttggttgtctatgttaggaaaagcgactcataagcacagttggttcttggccttctggaagccccagttttacctctcatgatggtctgggtttaggagaaacctgttcaaaatggagaaagccactctccccttcttttyttccttcactgctgctgggtggggagcagcatgatgtctgctgggacttcrctctgtgtgytccctgcatgggtcacrtcttctgatttttcaagagtgttttgccaaatttgattttcaatttaaatggtatattccatcctggtaatccatcttgaaacaagctgcagacatctgaatgcaagaacaaaccacactgctgcaggtatttgtgaagctgtatctttttagccgtgtacctttagccatgggagaattgctgcagtcggagtggtggaaggatgaaacttgcctgtcaatacatcaaaaacattaatttgcttatatatatatattt

SEQ ID NO: 40405 - DNA, 559 bp, Chicken  19866894275172_5
gtgtggctgctcacgcactgtattgcagcagtggcrtctcacgtggatcacgggcagcaagcatgttctttaaggcattatttggttgtctatgttaggaaaagcgactcataagcacagttggttcttggccttctggaagccccagttttacctctcatgatggtctgggtttaggagaaacctgttcaaaatggagaaagccactctccccttcttttyttccttcactgctgctgggtggggagcagcatgatgtctgctgggacttcrctctgtgtgytccctgcatgggtcacrtcttctgatttttcaagagtgttttgccaaatttgattttcaatttaaatggtatattccatcctggtaatccatcttgaaacaagctgcagacatctgaatgcaagaacaaaccacactgctgcaggtatttgtgaagctgtatctttttagccgtgtacctttagccatgggagaattgctgcagtcggagtggtggaaggatgaaacttgcctgtcaatacatcaaaaacattaatttgcttatatatatatattt

SEQ ID NO: 40406 - DNA, 600 bp, Chicken  19866894275173_1
atgactacagagcttggaggaagtctggaaagaagcatgaaagtgcttttaagtaatcatactttagtctagctaagcatttatctgccctttcatggaggtggttgtactagaaggaactggttgtatgggagtccggaatccaggaagagctcttaagtgaagacatatgtaagatgaggaaggaagcgcagtgaattagtgtgggaagagcactttgttgttaagaaacagagctttgccctaacttctaaaggtgaagatggaaatactggaaacagctaaatgaggaaaaagagrgaacagtgggagcaggtagtgtgattgacttgtcaggccaaaaagaaacccatcccttctttaaatgagttgtagggctgtggatgctgagcagaaggttgcgtatgctgccttctgatctggctcaaccttgctgaagtgatgctcttagctggattttgatcagaaggatttttttgatgtgttgatatcttccttctagggaaacacagagagaacagtctggcaatatcattttagaacttggcctgatcatggagtcccaagtgaccctggtggtgtactggactttctcgagga

SEQ ID NO: 40407 - DNA, 600 bp, Chicken  19866894275175_1
tgatataaatcagaaaaaaaaaaaaatctccacaaaccagaaatgaaacaagaaactattcactgagtcattttccattgtaattctaaattgattcaactaagcgaacaccattgaatccagaatacttaggataggatgggaaacttcatttcataaacatgaacagggagtaggcatacaaatagagggctgattgtttttatttaataatataaattcagcttacattatgttggcaaaaacagcttgtaataatcatcagctgatgatattccgagatgctgtggtttgcgagcrtctatattccagcaggattytcgagctatgataacttttgtctccagacgatgcaaatacatttcaggtgaagtgtagcagacctaacatttcaatgccattatgcctattcaggcagctgaaacacgccacagttatgtcgccagagacaaactgaacaaccactgccttcaaccccctcctgtaaataaatatctttccaagcctgcaccatccaggaggatgcagaaaacatgctgctttgcctcgattctacaaactagtgcatgaattaagtcctgcactgactgagaagtcaga

SEQ ID NO: 40408 - DNA, 600 bp, Chicken  19866894275175_2
aaaaaatctccacaaaccagaaatgaaacaagaaactattcactgagtcattttccattgtaattctaaattgattcaactaagcgaacaccattgaatccagaatacttaggataggatgggaaacttcatttcataaacatgaacagggagtaggcatacaaatagagggctgattgtttttatttaataatataaattcagcttacattatgttggcaaaaacagcttgtaataatcatcagctgatgatattccgagatgctgtggtttgcgagcrtctatattccagcaggattytcgagctatgataacttttgtctccagacgatgcaaatacatttcaggtgaagtgtagcagacctaacatttcaatgccattatgcctattcaggcagctgaaacacgccacagttatgtcgccagagacaaactgaacaaccactgccttcaaccccctcctgtaaataaatatctttccaagcctgcaccatccaggaggatgcagaaaacatgctgctttgcctcgattctacaaactagtgcatgaattaagtcctgcactgactgagaagtcagattgaaagctgtactccacaa

SEQ ID NO: 40409 - DNA, 600 bp, Chicken  19866894275183_1
accaagcacagatctcacaagcagaaagcattcacttcctactgcagaacccttgggagagaagactgcagggacacattgcagaccaccaatgcagtggaaccccagctcccagcaggtcactgagccccacttctcttaccacgttggcaggaagagagacgttggggaacagcttctggagcagctctcgtgtctccacctcggcagcttccacgtgctgctgcttctcctaaaccaagaaaagagctcgtgtgaaacagggcaacacaatcctctgggatggcaatagcctctcckacacacacagtaactcgtttaacccagaaaggtggctttcagtgaggaaggctctgtggtctctagaattgccagtaaatagcttcaaaaattgacagtaaattgcttcagaatttggccttcacgtttgtgattttaaggttttattttctcaaaggtctcctccagcctcacctgttggcaccatatttacaccatcactcacttgttcacaacacaacacaaactacactgtgctgagtgatcggttccatagatcacaccaacacttccactcaagttgagtgatctcaaaaccaa

SEQ ID NO: 40410 - DNA, 600 bp, Chicken  19866894275184_1
atttatagccttctgtggttttcagtaagcactgaatccattaatgctagcctgagaaatcgagaggcaaaaactggacagcgctgtactacgccaagtgagtgttcagccaggtagaagttccctgcagcaaattactggctccactgcttatcctccaaacacacctacttggatcactgaacctgccagcaagaaaacaaacctgttccaaaacgctgtctgtaagagtggctcgcttgacgcgtgagttcttctgcaaactataaatttgataaagctcagtattttccttggaarcccgagcttccaaggaaaccgagaagtatgggtttgcaagagctcctttttctgccaatattccaacactccttccctgaatgcagcctccccttaatggctttgactcagttccctttagtttcactctacaacctttcacgtaatctgtctgtcctcagtgccatctcacaaagctctatccatgctgccaacctatggcccaagtccttattgttgccattttaaagcccacacattattccatttcccattccattattccattccattccacttcttggtgttagccaaccaaga

SEQ ID NO: 40411 - DNA, 600 bp, Chicken  19866894275190_1
ttacatgatctaaatgttatgctgtaatagaagaaataaggtagtgtcaagaattttgttataagagcaatcaccattatgccatatgagacttcaaacaattaaaatcctcagcttcaaggaagttcttgaaagttttactgccgctcttcattttggtttttattcatacttcagtaaaatggtgagttacatttgccttaaaggagtctgatacctgtgtggttgaagcatcttgacctacctgatgacttttatgcatatcagcatctgggagaatccacactcccagatccaccyatatccctcgtggaaaccatcagatttacatgaagttgaaccagagactgtttaaatagtgccatggatcagtttaatgcgagtttgtccatgttgtgtcttacacaaatctgaggtcaccatgttgactttctcttggaactgtcttgcttttcgacttctagaagagtatgccttttgttaatggcagcattccctcgrtgaaatttgaggcatgtttaataaaggatttaatttgtttcaaaagaactaaaacttgtggaaatgtaaataatgaaaaaaaaagataatgtaaaagac

SEQ ID NO: 40412 - DNA, 600 bp, Chicken  19866894275190_2
taaaggagtctgatacctgtgtggttgaagcatcttgacctacctgatgacttttatgcatatcagcatctgggagaatccacactcccagatccaccyatatccctcgtggaaaccatcagatttacatgaagttgaaccagagactgtttaaatagtgccatggatcagtttaatgcgagtttgtccatgttgtgtcttacacaaatctgaggtcaccatgttgactttctcttggaactgtcttgcttttcgacttctagaagagtatgccttttgttaatggcagcattccctcgrtgaaatttgaggcatgtttaataaaggatttaatttgtttcaaaagaactaaaacttgtggaaatgtaaataatgaaaaaaaaagataatgtaaaagacctaaaagcctctagaactcctgaatagggagtaaagatgactaggagtagaaagacaaatggccttggaaagtagtggtctaaatagatgctacaattttatgttcaccaaaaagtcagtgctaaggttttggtagcacaagacaatttggggttaaaaagttgtccccttgctgagccttgatgctgtgtggagcttggg

SEQ ID NO: 40413 - DNA, 599 bp, Chicken  19866894275192_1
  misc_feature (1)..(57): n is any nucleotide
nnnnnnnnnnnnnnnnnnnnnnnnnnnnnnnnnnnnnnnnnnnnnnnnnnnnnnnnncaaagagatgtgaattcttgtttgtgcttcattgacagagaatgaaggcactgacagggtaagccatattaactaccaattactgagtaagccaatctccaggctctatcactggcctgagattccccttgaacctatttattgagattaatcacaagattgtctttctttccttcctagccatgcttttaaaggactgggtataggcagatcgatttgtccaagttgacaatctggtctaawgtttaagatgactaggctgaatctgcatgctttaggacaagttaggaagaccatcatttattatcctttatttgtgttgtacggcattttcgggtcccattctgccacatgattgcttgcaaatcgcttgcagatgtctctgtgtgaagaaatgacacacattctctataaaggtgtgattcatggcacagtggagatggaaagccttgctttctgcacagttctgaaatttccacactattaaatctttaagggtaagatattgctccaagaagcaagrgaagactggggtcaggtgt

SEQ ID NO: 40414 - DNA, 600 bp, Chicken  19866894275192_2
agttgacaatctggtctaawgtttaagatgactaggctgaatctgcatgctttaggacaagttaggaagaccatcatttattatcctttatttgtgttgtacggcattttcgggtcccattctgccacatgattgcttgcaaatcgcttgcagatgtctctgtgtgaagaaatgacacacattctctataaaggtgtgattcatggcacagtggagatggaaagccttgctttctgcacagttctgaaatttccacactattaaatctttaagggtaagatattgctccaagaagcaagrgaagactggggtcaggtgtgttgagaagtggtatggctttagcagaactgcaactgttctctctgtggaagacaaaataactgcataggctgtgtttgccctttttatgcttgtacagccatgcggttagtgattctacaaccagaggtggcatccagggccacaatcatgctataccaaggactccgtgtgaatgatgttccaacacagtgagttcacctgatggcaaatgcaacccaccttcagccactccagtggtattctttggagacacccccaacacagccaccacagaatttt

SEQ ID NO: 40415 - DNA, 600 bp, Chicken  19866894275197_1
atattggacctttttttgaattcaaaccattatgggttgttcagactgcctgccttccagttgctggagcccagccagatgccctggggatgcaggacctctgctcagcttgaggaatgcacatgctgctttcatgttcacaagttcaaacagtagtaaagctgagtatgtgtcccagataaggacatgaatacagccatgctctctgagcacggaagacactggtacaggtggtcacacagactgccacagacaaagcactgccttcagcagcactcacacaggattcacatgaaacawatacttagatagtgaggtccccttctcctcttgtgccagcagagagagcaggtctgtgatacaagaacatgcacacacctgcaggcttaccagtacacacacacacacagataccctgagcactcgcatggcctctctgcctgcctrgcactttgcccagatccctacccctcatcttccttatggatcccctactcgctgactgctccagcttggtgctcactgcrcacacacartactcacacactcattscacagaaacttcatgctctctggtcaatcaaaaacaagacaggagag

SEQ ID NO: 40416 - DNA, 600 bp, Chicken  19866894275197_2
aaacagtagtaaagctgagtatgtgtcccagataaggacatgaatacagccatgctctctgagcacggaagacactggtacaggtggtcacacagactgccacagacaaagcactgccttcagcagcactcacacaggattcacatgaaacawatacttagatagtgaggtccccttctcctcttgtgccagcagagagagcaggtctgtgatacaagaacatgcacacacctgcaggcttaccagtacacacacacacacagataccctgagcactcgcatggcctctctgcctgcctrgcactttgcccagatccctacccctcatcttccttatggatcccctactcgctgactgctccagcttggtgctcactgcrcacacacartactcacacactcattscacagaaacttcatgctctctggtcaatcaaaaacaagacaggagagcaagaagaaaataagaaaatgcttgggcagtggaagctgaaacaggtaacctgggaggagtgtagagatgctgctaggctctgtagatattgggtcagaaaggccaaagtctagttggaactgaacttggcaagaggtgcaaaggac

SEQ ID NO: 40417 - DNA, 600 bp, Chicken  19866894275197_3
caggtggtcacacagactgccacagacaaagcactgccttcagcagcactcacacaggattcacatgaaacawatacttagatagtgaggtccccttctcctcttgtgccagcagagagagcaggtctgtgatacaagaacatgcacacacctgcaggcttaccagtacacacacacacacagataccctgagcactcgcatggcctctctgcctgcctrgcactttgcccagatccctacccctcatcttccttatggatcccctactcgctgactgctccagcttggtgctcactgcrcacacacartactcacacactcattscacagaaacttcatgctctctggtcaatcaaaaacaagacaggagagcaagaagaaaataagaaaatgcttgggcagtggaagctgaaacaggtaacctgggaggagtgtagagatgctgctaggctctgtagatattgggtcagaaaggccaaagtctagttggaactgaacttggcaagaggtgcaaaggacagcaagaaaggcttctacaggtacaacaaccagaaaaagaaagtccaaggaggtatatccccgtagcaagcagtacaggc

SEQ ID NO: 40418 - DNA, 600 bp, Chicken  19866894275197_4
acacagactgccacagacaaagcactgccttcagcagcactcacacaggattcacatgaaacawatacttagatagtgaggtccccttctcctcttgtgccagcagagagagcaggtctgtgatacaagaacatgcacacacctgcaggcttaccagtacacacacacacacagataccctgagcactcgcatggcctctctgcctgcctrgcactttgcccagatccctacccctcatcttccttatggatcccctactcgctgactgctccagcttggtgctcactgcrcacacacartactcacacactcattscacagaaacttcatgctctctggtcaatcaaaaacaagacaggagagcaagaagaaaataagaaaatgcttgggcagtggaagctgaaacaggtaacctgggaggagtgtagagatgctgctaggctctgtagatattgggtcagaaaggccaaagtctagttggaactgaacttggcaagaggtgcaaaggacagcaagaaaggcttctacaggtacaacaaccagaaaaagaaagtccaaggaggtatatccccgtagcaagcagtacaggcaggctggga

SEQ ID NO: 40419 - DNA, 600 bp, Chicken  19866894275197_5
caaagcactgccttcagcagcactcacacaggattcacatgaaacawatacttagatagtgaggtccccttctcctcttgtgccagcagagagagcaggtctgtgatacaagaacatgcacacacctgcaggcttaccagtacacacacacacacagataccctgagcactcgcatggcctctctgcctgcctrgcactttgcccagatccctacccctcatcttccttatggatcccctactcgctgactgctccagcttggtgctcactgcrcacacacartactcacacactcattscacagaaacttcatgctctctggtcaatcaaaaacaagacaggagagcaagaagaaaataagaaaatgcttgggcagtggaagctgaaacaggtaacctgggaggagtgtagagatgctgctaggctctgtagatattgggtcagaaaggccaaagtctagttggaactgaacttggcaagaggtgcaaaggacagcaagaaaggcttctacaggtacaacaaccagaaaaagaaagtccaaggaggtatatccccgtagcaagcagtacaggcaggctgggaacagtagataaggagaa

SEQ ID NO: 40420 - DNA, 600 bp, Chicken  19866894275205_1
ggaagaggccaagcatcagcaagatcattgatctcaagtgcttgcctgtccttctgcacaaggaggaggttaatttatcaccggatgaagaaaacccgatctttaaattcctcacttgctcttaattaaataaaaacctcccatgtttgctaagccttgctctgaagaccaaattgcagtggccccaagccaaacataggcagtcagccatccacgcagagacccatccagtgggcaaaagcagcagccccttcacccccagttgctgacacccctgggacaagagctgctgggtcaggwtgtgtgcaggggctcaaatcccacagcatatcgtcttctgggcacctgcatgcagggtgtcttgtgcaccagctgcgccacaaacaccacacagctgccccagacactgtgacactcctgcccagcccggatgccagagctgatctcagcaggcagaycccttcttctggcacagaggcagcagtgaatccaaccatcatggagcatcttctgcagtccctccaggggctcatgcctgacccccaccacaggatggggcagcccccacactcaccccaccactgacccacggctgcaggt

SEQ ID NO: 40421 - DNA, 600 bp, Chicken  19866894275205_2
gctctgaagaccaaattgcagtggccccaagccaaacataggcagtcagccatccacgcagagacccatccagtgggcaaaagcagcagccccttcacccccagttgctgacacccctgggacaagagctgctgggtcaggwtgtgtgcaggggctcaaatcccacagcatatcgtcttctgggcacctgcatgcagggtgtcttgtgcaccagctgcgccacaaacaccacacagctgccccagacactgtgacactcctgcccagcccggatgccagagctgatctcagcaggcagaycccttcttctggcacagaggcagcagtgaatccaaccatcatggagcatcttctgcagtccctccaggggctcatgcctgacccccaccacaggatggggcagcccccacactcaccccaccactgacccacggctgcaggtgtggctgcactgggcactatggagagctgaggcagccacgtccatcacagccccggctgcctggagagtcccctgtcatgctccaggaagtgtgatgggaagattaatcttaataatgactgtccgcagctctcctggcccagccctggctgttcccc

SEQ ID NO: 40422 - DNA, 600 bp, Chicken  19866894275205_3
ccagcggcctccatcacacccacacccggggctgagccgccagccctcaccacctgcatgcagagcagtgctccctgcctcctgcacccaccacagcagttctcgtcctgcaggcaaagagcagctccgcagtgctggcaccaagcacggggacagtgctcctaggacacaggaggagccgtgctctctgtagcctgcaggcagcacccgggatggcatggtaacaaatgggctgaaccagtctgtttttgcctgggaggaatcacgcaacaattttcagctccacacaagcatttacgkccaagttataaactcctgtaaaatgctgacagacccttagctacagcagcgctagcaggtgcccccataatgaatgtgcagaatgacctaccaagcaaagttattgaggcaaaaagcactgcggtcattcaacaaacaattagagagcgtcctggtggggatggcatactaacgagggaaggagccaggaaaagctgagtaagcatcctgccttccccccaaattcctcctcttcccaggccaggctctgatctacagcctgactcactggagctccaataaagctgtggagattgttat

SEQ ID NO: 40423 - DNA, 599 bp, Chicken  19866894275207_1
  misc_feature (1)..(2): n is any nucleotide
nnaaaaaaatggttttggttgtggtgatgattgttacttatagatgagagctatttcactcattaagtgtagtggctgtgagctaagtatgcctttcatttctttaagtcctaaaagcctagcttagagtgtctgagacctactttgaatatcccttgtctgtggtagcaacagagcaccacatatttctagtggctttgaatcctgagtagttataaagaaaattttatcatgctgcttgttctttaatttggatattcaaacagtgacacagtcagtgcctaccattgctactccacragcaggcttgtcttttgctttgaacccagggtccctggtacagctgatgtaagtgtgggtaaagcacaggggttcccacaatatgacaggagcagcaacaggggctcaggcagagctccagagctcaacctttcaggaaagggaagaaatgtttgtgcttgcaggctgggaggagagtaatttggcaagttggaactaacagttgtagcaccaaatgattttcatagggttgtagtagagctgctaacatcttttccaaaagcgtgataggtcctggggtgattcttgtaccagtcatc

SEQ ID NO: 40424 - DNA, 600 bp, Chicken  19866894275227_1
aaagcacaagcctcgattttactgggaagtccgcgaaggggatacgggatgcgggttttgctgcaaggccagttcccgtgctcctgtccccgtgctctgcgggctcctgcagcggcctcagtgcaggcagggcacctttaatagctctgctccccgctcacctggaagggggccaagctgcttaatatagaccgagtgcaatcgtctggtaaaagtcttctgcctgcgcagatctgttttcaatttgcttttccaaacacaggatgtactgtgaggctgcagcctttccaaccgacaaaygtgctctgggggcattttttgaagctttggcacagcagtaaaacaggctgacatttctactgtagaaatggggcttgtactgctattttctcaaatctcatctccatttataatcatgcttgactagaaatkatgattggcaacagataaaattccacattcttgcaattgcactttgcaaaagcagggctggcctggatgcaggggtacaaagtcaatgccagggaaagaaggcacaactgtgatgaaacaagtgaagacaaataaaggcgtgacttgaaaaattattcctttatgtcc

SEQ ID NO: 40425 - DNA, 563 bp, Chicken  19866894275227_2
cacctttaatagctctgctccccgctcacctggaagggggccaagctgcttaatatagaccgagtgcaatcgtctggtaaaagtcttctgcctgcgcagatctgttttcaatttgcttttccaaacacaggatgtactgtgaggctgcagcctttccaaccgacaaaygtgctctgggggcattttttgaagctttggcacagcagtaaaacaggctgacatttctactgtagaaatggggcttgtactgctattttctcaaatctcatctccatttataatcatgcttgactagaaatkatgattggcaacagataaaattccacattcttgcaattgcactttgcaaaagcagggctggcctggatgcaggggtacaaagtcaatgccagggaaagaaggcacaactgtgatgaaacaagtgaagacaaataaaggcgtgacttgaaaaattattcctttatgtccttttttgctaaaataaacatacgctgtctgtgcgctccctgtcaagactgcaccaaacagtacatacacctgagttgtttggcactcactattca

SEQ ID NO: 40426 - DNA, 600 bp, Chicken  19866894275234_1
agctcccagaaagactttgacaccttgtttctttccttttttttttttttaatgaaaaagcgaggcctacaactttaattcactggtttagaaacaatctagatctccttttaattccaagacagatattgtacaaactgattagcaattaatctgaaattactaatgatctgcgtgtacttctggcacaagagtgtcccactaaattatgcagcagcctgtgatatactaattcaaaatcctaacaatagattattaattaaaaaaaaaaaagtcttatgcttaaaacaaatacctacygttatttttgcagttgcttcaggtttgtttcaaagttggatgccaaaggaagatttatcctaactgtggcatgagacattctacagcttacatttaaacaataatgtaatacagtcaagagtgtaatgatatcagcatttcctctctcaataaaaaaggctctaatgtccaaactggattgtgaactatggccgagtatagagtagctcctactgagtaagtayagcagyaagtaacctgagtgcaagaatctctccgtagaaacaaattttgttctgtgacaaaacgcaataatcagct

SEQ ID NO: 40427 - DNA, 600 bp, Chicken  19866894275234_2
tatactaattcaaaatcctaacaatagattattaattaaaaaaaaaaaagtcttatgcttaaaacaaatacctacygttatttttgcagttgcttcaggtttgtttcaaagttggatgccaaaggaagatttatcctaactgtggcatgagacattctacagcttacatttaaacaataatgtaatacagtcaagagtgtaatgatatcagcatttcctctctcaataaaaaaggctctaatgtccaaactggattgtgaactatggccgagtatagagtagctcctactgagtaagtayagcagyaagtaacctgagtgcaagaatctctccgtagaaacaaattttgttctgtgacaaaacgcaataatcagcttctggtgttgattaaacgttgaagcaaagttaaggcatttaatcaaccrcaaagcccatttaatgtaactgtactccaacactgtcgacattattgatattatatatgaagtgaaaatattcatccaatgcatctcacaaaaatacaattttctactcagaggatttggaatgcggctgtgccaatgtctgaaagcctttctattgacgtttatttaggatatg

SEQ ID NO: 40428 - DNA, 600 bp, Chicken  19866894275234_3
aattcaaaatcctaacaatagattattaattaaaaaaaaaaaagtcttatgcttaaaacaaatacctacygttatttttgcagttgcttcaggtttgtttcaaagttggatgccaaaggaagatttatcctaactgtggcatgagacattctacagcttacatttaaacaataatgtaatacagtcaagagtgtaatgatatcagcatttcctctctcaataaaaaaggctctaatgtccaaactggattgtgaactatggccgagtatagagtagctcctactgagtaagtayagcagyaagtaacctgagtgcaagaatctctccgtagaaacaaattttgttctgtgacaaaacgcaataatcagcttctggtgttgattaaacgttgaagcaaagttaaggcatttaatcaaccrcaaagcccatttaatgtaactgtactccaacactgtcgacattattgatattatatatgaagtgaaaatattcatccaatgcatctcacaaaaatacaattttctactcagaggatttggaatgcggctgtgccaatgtctgaaagcctttctattgacgtttatttaggatatgtgcttt

SEQ ID NO: 40429 - DNA, 600 bp, Chicken  19866894275234_4
aagatttatcctaactgtggcatgagacattctacagcttacatttaaacaataatgtaatacagtcaagagtgtaatgatatcagcatttcctctctcaataaaaaaggctctaatgtccaaactggattgtgaactatggccgagtatagagtagctcctactgagtaagtayagcagyaagtaacctgagtgcaagaatctctccgtagaaacaaattttgttctgtgacaaaacgcaataatcagcttctggtgttgattaaacgttgaagcaaagttaaggcatttaatcaaccrcaaagcccatttaatgtaactgtactccaacactgtcgacattattgatattatatatgaagtgaaaatattcatccaatgcatctcacaaaaatacaattttctactcagaggatttggaatgcggctgtgccaatgtctgaaagcctttctattgacgtttatttaggatatgtgctttacatgaataactaaacagtcttctacacaagtaacaacaaataattctaaaccttagcatgaacatagcagtttccatccataggctatcaagtgcttacgagacaagtaaaccttctg

SEQ ID NO: 40430 - DNA, 600 bp, Chicken  19866894275234_5
tggaatgcggctgtgccaatgtctgaaagcctttctattgacgtttatttaggatatgtgctttacatgaataactaaacagtcttctacacaagtaacaacaaataattctaaaccttagcatgaacatagcagtttccatccataggctatcaagtgcttacgagacaagtaaaccttctgattttggaagacatgcaagattgaggcacaagagatttcagctgagtattctcaaaatgaaccagtggctctgacaaatccagctgaagtttgcagaactttgtgtcttttgtataragtagagtgtcaggtaatttttttgagcatcattaactctgtcagagcaggacactctgaaacacaggaatgcagacaatgaaatacttgagaaaaacaatatttttaatgatktgttctgcactcactgagaagtttctataatgctgctggatactccaacaccagatgagccggcagttcatctggcagtgtccagacaagggtaacagttctgtggttgttacttagcaagttgcaaattctggcacagaatagattaagggtttactgcacaaactaacctacacttgcagcgat

SEQ ID NO: 40431 - DNA, 568 bp, Chicken  19866894275234_6
accttagcatgaacatagcagtttccatccataggctatcaagtgcttacgagacaagtaaaccttctgattttggaagacatgcaagattgaggcacaagagatttcagctgagtattctcaaaatgaaccagtggctctgacaaatccagctgaagtttgcagaactttgtgtcttttgtataragtagagtgtcaggtaatttttttgagcatcattaactctgtcagagcaggacactctgaaacacaggaatgcagacaatgaaatacttgagaaaaacaatatttttaatgatktgttctgcactcactgagaagtttctataatgctgctggatactccaacaccagatgagccggcagttcatctggcagtgtccagacaagggtaacagttctgtggttgttacttagcaagttgcaaattctggcacagaatagattaagggtttactgcacaaactaacctacacttgcagcgattattaacctttctttcaatctgacttctatgtacgatgacgggacacttgggagcaccatgcagagcactggtattcatcag

SEQ ID NO: 40432 - DNA, 600 bp, Chicken  19866894275238_1
atggcaatttggtcacaaaccagtgcagctcatttgacagtaaacctttaactgtggaaagctgtgatatggatttgacaggtttgcacacagctcagggaggatagtctagtaataaagcaatgcagcaattgcactggtatgcgcacctcaaagcaaagcatgatctctaatagtgaagctgtgcctcttgcttgcttttctcttcataatcagcatagaggtatacagcaatactggtataatgtttttttaatatacgaaggacagaaaaacaagcagcaattttcctgtgacaawtagagtactttgagagccatgaagtggtcattacactgctttaccttctttaccttttgctgtgctcatgtgggacaagcagggagattaccctgggtgccaaatagctctgatttgtgacttaaaaaaaaaaaaaaagatttagtaagtaaatctctttatatgatgaaaagaggtcatcttaagtttttattgcaagcttccaggaatagaactgaaagttggtgataatctgtttatgttcatcttttcttggaagaaatactttttctaaatgcaaatgaacagaattttctgttg

SEQ ID NO: 40433 - DNA, 599 bp, Chicken  19866894275242_1
  misc_feature (1)..(52): n is any nucleotide
nnnnnnnnnnnnnnnnnnnnnnnnnnnnnnnnnnnnnnnnnnnnnnnnnnnnttccccatttttcaatggcagaagaggtgatttatttgcaagacagaatcttgcctggaattccattctctccttcggttttgagaccaaggccagacggagacggatccttttgctcctccttaaggctttgggatatttggaacagagactgacctcattgaagaccgtactctgtgttggttccattcaagcagaccacagagttcttcggacaaaaggtatgcaactgcagggaccgtgtcagyggtgggaaataatggtccaggcctgcatactttcctcctgctccctttcagagatcccctcctgccagcccgcccagctcctccagtggccaggagagagcaggatagagcaggggatctgctggaagctgccaggccaggaatgcctctagggccccaggagtccaccttgggacctgcgtgtttcaacaccttcatcagtgacacagacagtggaactgaacacaccttcagcatgtctcctgatgatgctaagctgagcatacagttgacataacagaaggaagggatgccatcca

SEQ ID NO: 40434 - DNA, 600 bp, Chicken  19866894275247_1
gttgcccacaaaaacatcagccatgtttttatcctggggcagctgctgcgctccttgtgacgtgtctgctgcatctctctagggatcactgaggagtaccagctgccttactatgatgccgtgccttctgacccctcgatagaagatatgagaagggtggtttgtgagcagaagctccgaccgaatattccaaaccagtggcaaagctgtgaggtaagagcagctctttaggaagcctctttagatgcagacagagtcgctcggtgagacagagggtggtcagtatgggtctcagtgaayggcatggctgttatgctgctgtttcagagagcygtatttgatgycccagtgctgcgtggcggctcagttctcccctcttcccatggcactctgcaggcactgcgggtgatgggccggatcatgcgggagtgctggtacgccaacggggcygcacggctcactgctctgcgcatcaagaagaccatttcacagctctgtgtgcaggaagactccaaaacctaacgggtcccggcaggaggagggcactgcgttctgctgttcatctgttgacatgtgatatcatttttctttttggtctac

SEQ ID NO: 40435 - DNA, 600 bp, Chicken  19866894275247_2
ctggggcagctgctgcgctccttgtgacgtgtctgctgcatctctctagggatcactgaggagtaccagctgccttactatgatgccgtgccttctgacccctcgatagaagatatgagaagggtggtttgtgagcagaagctccgaccgaatattccaaaccagtggcaaagctgtgaggtaagagcagctctttaggaagcctctttagatgcagacagagtcgctcggtgagacagagggtggtcagtatgggtctcagtgaayggcatggctgttatgctgctgtttcagagagcygtatttgatgycccagtgctgcgtggcggctcagttctcccctcttcccatggcactctgcaggcactgcgggtgatgggccggatcatgcgggagtgctggtacgccaacggggcygcacggctcactgctctgcgcatcaagaagaccatttcacagctctgtgtgcaggaagactccaaaacctaacgggtcccggcaggaggagggcactgcgttctgctgttcatctgttgacatgtgatatcatttttctttttggtctacctcacgtgatgcaggtcggtattgaagtgcccg

SEQ ID NO: 40436 - DNA, 600 bp, Chicken  19866894275247_3
gctgcgctccttgtgacgtgtctgctgcatctctctagggatcactgaggagtaccagctgccttactatgatgccgtgccttctgacccctcgatagaagatatgagaagggtggtttgtgagcagaagctccgaccgaatattccaaaccagtggcaaagctgtgaggtaagagcagctctttaggaagcctctttagatgcagacagagtcgctcggtgagacagagggtggtcagtatgggtctcagtgaayggcatggctgttatgctgctgtttcagagagcygtatttgatgycccagtgctgcgtggcggctcagttctcccctcttcccatggcactctgcaggcactgcgggtgatgggccggatcatgcgggagtgctggtacgccaacggggcygcacggctcactgctctgcgcatcaagaagaccatttcacagctctgtgtgcaggaagactccaaaacctaacgggtcccggcaggaggagggcactgcgttctgctgttcatctgttgacatgtgatatcatttttctttttggtctacctcacgtgatgcaggtcggtattgaagtgcccggaacagagcgc

SEQ ID NO: 40437 - DNA, 529 bp, Chicken  19866894275247_4
agaagggtggtttgtgagcagaagctccgaccgaatattccaaaccagtggcaaagctgtgaggtaagagcagctctttaggaagcctctttagatgcagacagagtcgctcggtgagacagagggtggtcagtatgggtctcagtgaayggcatggctgttatgctgctgtttcagagagcygtatttgatgycccagtgctgcgtggcggctcagttctcccctcttcccatggcactctgcaggcactgcgggtgatgggccggatcatgcgggagtgctggtacgccaacggggcygcacggctcactgctctgcgcatcaagaagaccatttcacagctctgtgtgcaggaagactccaaaacctaacgggtcccggcaggaggagggcactgcgttctgctgttcatctgttgacatgtgatatcatttttctttttggtctacctcacgtgatgcaggtcggtattgaagtgcccggaacagagcgctgccatctggcttcatagctggccactggaagggg

SEQ ID NO: 40438 - DNA, 600 bp, Chicken  19866894275250_1
tatttacagtttgctcacttggttacaccacatgcattcatattttatatttaatgagatgtcaggggaaatctctagctagagatgtctcgtggataagagatactgatgtcatgcctgttttaaggcattaatttgtaactctcaggtagaaccctatccagaaaagttacagctattcagaaagcaacttgaatgtctttggttaaagaaatgggccttgtatgtgttgtgcatgaacgcagcacaagaaatttcctgaatttacaggggccccaatgcagtccttgtaacaatagrgttattttaaagtctgttctccagttgaatatttgtgacatgcattttgattatgatgttgtttagtccgtggatagatgtgagttagctagcagggttacacatggaagatgttttatgtgaaacgttgaatcgtgactcctctgcagcacatatgggaagctgaagtcacagaggcatgttcacgctgtctgccatacgtgcctgagtgcctgctgtggcagactgcctgttttagatgctctatcttcggtaacacagctacttttctcccatctacagtatatgaggtggtgtctg

SEQ ID NO: 40439 - DNA, 600 bp, Chicken  19866894275252_1
gcctgtactggcacccagcaggcagtctctacatcaacaactagtcagcagtctgtgagggctaaaaacagcaaaagatcttctagtttgtaagaaggaatttaaacagagttaagactatagcaagagctggaaaagatcctactaaaaaaaaaaaattagaaaagaaaaaaaaaagaagacctcatcaaatacatctgtaatagaagtaagacagaacaaaaatcaaaatgacatacaggaaccaaagatttattcttcccacttctgtgaagctccttgattcatactactctagaygtgtatccacattccatttactgactgggtgtgctggcaccacctcttgaaaaagcaataaatttaccaatgctcctcttcctgagctagtttctacatgtattgccatagactaccccgaagttcaaagagcagctccaagttcaggaccatgcttctgcagcttctggaacagcagggacactcagcgtgcccttgagtgacacagtccagggggttcaggtttgcagtattttaataaatatgctgtctaattgactgttccttcttgactggtgtaattgcatcacagagctgcta

SEQ ID NO: 40440 - DNA, 600 bp, Chicken  19866894275252_2
atgtgttcaatatcttttccagaaatagaaattctttgctgggggctaggagggtaggcccacagcttatctccagtgacttcaggcaaaaaacaggactgaagacactggtgtcagtaaattcacttgcttcatgctaaaagtagacactgctatgataataggtgatgcctgacactatcgtaaaaagaatttttgagtagactagaaggaaatttccagaactagaccttacgtcagtgaagaacaaaaataccacagggtgctcagtcactccctcagcttgcagtttactttttyctagtgagaatggctgtaaaacattaaacaacaacataagttctacacaaaactaaacatttctgaataggtgctaacagtctggagccctagtttagatgtttaataaataactgctggaataaaaatcatacatgatccaagccaaccagaatacatacactgatcttgatgtctccaagggagtctcaatctactgcattatgcagctcctttaccagttatcaagggtggagaacagaggtctgacggaggactggtaagagttaattgtttccaaaaaagcaaagaaaaagcaaa

SEQ ID NO: 40441 - DNA, 600 bp, Chicken  19866894275254_1
gagagtagaagatacacagatgtaggaggaggtcattgagagcacagtatgaaggagatgggaagagtctagtttttgagtggacttggagcttagcaagtaacgaaaatataaccaaaatatgcaagaaaacagtttgtgaaagtactcaccaactggtgatcctccatatttaacagtgaacataaacttcccaggagcagattttcttgtactttctttttccagatcggtcaaattcaaaattgccattgaaatatcacctttttgcattttgtttggtgctcacaggtaataacrtagcaaatattaacatctcttgtagaaactcaagttacatctgcatccctgtaaataaagatgtcaggactctgcaggaaggagatagcatagatgtggctggctggaactgcccagttgaattggcttgttcaacaacattgtaagaataaacactgaaatcatactcatgttctcccactaggacatctttgtatcattacgttcaggtagccacagtcatacaaggttacgccagaagatcaaaaaagtaatgaagtaggtatttccactatttgttattttcccataaatgtgtgt

SEQ ID NO: 40442 - DNA, 600 bp, Chicken  19866894275256_1
attatcagacaaaactgtaacttgagcccaagcaatgcaagggaaaaaatgttttgtccgctgaaccattcttcttccttcatctattgtgtctttacctggcagctttcttaagtagctctggtatgcttaaattacatgattatctccacctaattcctagtgaccatgcctaccagacaaccagagagagaactgaacaacatcttttgttgacgtctgcaacagaagaatttcccttattccttcctactccaggcttcacttctttcccttccctgggcttgcctgccattttcwgtctatccccaaccaacccctccagacagcctctccctttttattaattcccacatcacgaaatgctgctttgttgtttctctggtttgagcaatagcaggaaaacaaattctgcattgataaggaaatgttctgtataagttcatcataacagttctttcctttctgactccttgggcagactccagtcaggacaggagactgaacagccaggtacagcaaggagcatctttctccccagttctgacatttaagtagaaacacactgagcctcaacacaggaaaacattatcagttcac

SEQ ID NO: 40443 - DNA, 599 bp, Chicken  19866894275257_1
  misc_feature (1)..(90): n is any nucleotide
nnnnnnnnnnnnnnnnnnnnnnnnnnnnnnnnnnnnnnnnnnnnnnnnnnnnnnnnnnnnnnnnnnnnnnnnnnnnnnnnnnnnnnnnnncttttattttactagttttctcccagagctgttgttgtctatcagtgtatgtcatcaactaagaacctggagaacttgttgcattgtgacactcccccgaactaaggcaaaatttggtggtggtagctgagcattgctttgttattaaatctatgatacctcaggaaactgtaggagttgctttcagttcacagggctgggaatccttargcttttcaagcctgaaatggtattatccccccataagctccccttgacacttgggaataatgtctcttcctgtgagagttaggtcaaaatgaaatttgcctcctttcatcagcatggatttggcatcttctgcagcatytgttgtatttgatattgtaggaaggatctttattagaaggtaagtgcacaggctctgtttttgtatcctcatgaagagatgttgttctttcttgatcagcttttcctttggctcacctagcaagttcatcttcaagtgagaaactatttgaaaaacagtg

SEQ ID NO: 40444 - DNA, 600 bp, Chicken  19866894275257_2
tgtcatcaactaagaacctggagaacttgttgcattgtgacactcccccgaactaaggcaaaatttggtggtggtagctgagcattgctttgttattaaatctatgatacctcaggaaactgtaggagttgctttcagttcacagggctgggaatccttargcttttcaagcctgaaatggtattatccccccataagctccccttgacacttgggaataatgtctcttcctgtgagagttaggtcaaaatgaaatttgcctcctttcatcagcatggatttggcatcttctgcagcatytgttgtatttgatattgtaggaaggatctttattagaaggtaagtgcacaggctctgtttttgtatcctcatgaagagatgttgttctttcttgatcagcttttcctttggctcacctagcaagttcatcttcaagtgagaaactatttgaaaaacagtgctgtgaaataagtgtaatccattcctcggttagctgatagtctcagtaagctgtcagcattgctatagcttgtagatctcaagaatgtggaggaaggctgaagatgaagtcactactagtagcraaaagcagtgtaaatg

SEQ ID NO: 40445 - DNA, 600 bp, Chicken  19866894275257_3
catcttctgcagcatytgttgtatttgatattgtaggaaggatctttattagaaggtaagtgcacaggctctgtttttgtatcctcatgaagagatgttgttctttcttgatcagcttttcctttggctcacctagcaagttcatcttcaagtgagaaactatttgaaaaacagtgctgtgaaataagtgtaatccattcctcggttagctgatagtctcagtaagctgtcagcattgctatagcttgtagatctcaagaatgtggaggaaggctgaagatgaagtcactactagtagcraaaagcagtgtaaatgagtttatttagtcagaataaaatgatacctttgaaaaaaacctgagtgttgtgtcatgagaaacagaaaaggaggtgcactcctttctttggtgatctgtcacacattttgatggtttctgttacctgtttgcaaacttgaagattgaaaaatagggcagcagatatatcatatggactatgtttcttgagagcacccgctgccttccatctcatttaaaatgtgggcactttgactattttatgaatggctgctgcttatatacagtgaatagtgagcacctt

SEQ ID NO: 40446 - DNA, 577 bp, Chicken  19866894275258_1
  misc_feature (1)..(130): n is any nucleotide
nnnnnnnnnnnnnnnnnnnnnnnnnnnnnnnnnnnnnnnnnnnnnnnnnnnnnnnnnnnnnnnnnnnnnnnnnnnnnnnnnnnnnnnnnnnnnnnnnnnnnnnnnnnnnnnnnnnnnnnnnnnnnnnnnncatctatgagatcaaccagaggcacctggacgtgagtgggttgggggctgtaggtgatgggggtcgcactgggggacggtgcacaaaccgcactgtgtggttggtggctgggtggttctgcagctctctggggaggaactgggtgaagcaatgcaaagcccttcttgttrctgttgcccagacaggttgtggggtctccttggagaccttcatggggctgagcaccagctctgggtgtccctgccagtgcaggagttgkgccagagggacccagagctccctgccagccacagcattctgtattgctatccacagctggtggctgtttaaaatacttaaaatgcttcatggactttcaagttgacatttctttgctccttgagcactgaactcatcctgaaaaggatgaggatggcttgaaccccacggagaaggttcgtgccatca

SEQ ID NO: 40447 - DNA, 488 bp, Chicken  19866894275258_2
  misc_feature (1)..(41): n is any nucleotide
nnnnnnnnnnnnnnnnnnnnnnnnnnnnnnnnnnnnnnnnncatctatgagatcaaccagaggcacctggacgtgagtgggttgggggctgtaggtgatgggggtcgcactgggggacggtgcacaaaccgcactgtgtggttggtggctgggtggttctgcagctctctggggaggaactgggtgaagcaatgcaaagcccttcttgttrctgttgcccagacaggttgtggggtctccttggagaccttcatggggctgagcaccagctctgggtgtccctgccagtgcaggagttgkgccagagggacccagagctccctgccagccacagcattctgtattgctatccacagctggtggctgtttaaaatacttaaaatgcttcatggactttcaagttgacatttctttgctccttgagcactgaactcatcctgaaaaggatgaggatggcttgaaccccacggagaaggttcgtgccatca

SEQ ID NO: 40448 - DNA, 600 bp, Chicken  19866894275261_1
gtgtcagaggaggaggaaataaaagtctcctcaccagcaattatttgagaatgctttaagggctccgtgccacacggccaaccagcactgcaagtcctgcctggcacagaggagaaaagagccggagaggttctggatttctcctctaagcctacagcttctgcttcctttatatacactgagggtgtgaggaccaaagcaccattatacctgatgtggtggactggagccccagcagctatcagcaaaagcactggaaggctctctgggcacagccctttgcagcagggggactcacawtggtgatggccatctctatccccaggcacagcccgtgccctgctgccacaccgcccgctcccccccagcaccgccccactcactgcaggacatccctctgctccaggttgtatttccccccgttcttcatggcagcgttgtgcacrgcctcgatggcacggtcgatggactggaggaccacatcctgctccagcacctgagaaatgcaacatcccacccgttagcccattgcttcagctgtggttcgaacttatgcactgttggagcttacagcaggacggatggcagtgccacccagct

SEQ ID NO: 40449 - DNA, 600 bp, Chicken  19866894275261_2
taagcctacagcttctgcttcctttatatacactgagggtgtgaggaccaaagcaccattatacctgatgtggtggactggagccccagcagctatcagcaaaagcactggaaggctctctgggcacagccctttgcagcagggggactcacawtggtgatggccatctctatccccaggcacagcccgtgccctgctgccacaccgcccgctcccccccagcaccgccccactcactgcaggacatccctctgctccaggttgtatttccccccgttcttcatggcagcgttgtgcacrgcctcgatggcacggtcgatggactggaggaccacatcctgctccagcacctgagaaatgcaacatcccacccgttagcccattgcttcagctgtggttcgaacttatgcactgttggagcttacagcaggacggatggcagtgccacccagctcctgctgccccagggcaggcacacagccaccaacgtcgcagccctgaagtctggtgcctttcggagtcactttgttccgtgtttgcatttttgctcgttttcttcctgctgcttgttttgcaacttggtggcttttccaaatcccc

SEQ ID NO: 40450 - DNA, 600 bp, Chicken  19866894275264_1
aatataatctcgctgcctggagggagtgggaagtggggacggacactgtgagctggttgtattctgtggacttacgttcctcacccctttccaggatttattctattgctctgtacagccccatgtgaaatagggaaatacaaagcaacagagattttcagagcagctccctaacagcagccacagcacgtatgtgtgtgtctcccactaatatccatgtgaaaccaagcagctatttgctgcctgcacacagctgagcgtgtgtgtaaagcactgtgtataggtgtgtgtgcccccatsggggctgacccataagctggagggcacccagaacagcacgccgcaagtggttaacgctgctgtgcttctgcagcaggcagggggagaagaggtgacctctggaaggggctgtgctgagctggcagctctcacatgcgggtgaatgggggggtgggcaggacccagccagctccgctgctttgggaaatgaaatacccccctgtatcagcttcttttgtcagccaaaagcagtgcagaaaaatccagccctaccacccaaagtgtgcaaaatactgaagaggaggaagagaataaaacctg

SEQ ID NO: 40451 - DNA, 600 bp, Chicken  19866894275264_2
ccaaagtgtgcaaaatactgaagaggaggaagagaataaaacctggcgggtgcccgttctctcattttccaccacgttcctgtatgaattgcaatccctgcatcagccccttggaggtcctgggtggatctgagcacgacgattgggggcccctaccttgaatggattttcattgggaaatcacagagagagaacaacttggagagaatggcaccacgttgctagaacaacatgcaaagacactacaaaatccaggaattattttctaaagggcaaaagacctctctcacacattccccytygctggatgaaccatggctaactgacagtttgctcactgcacacaaacatgtagcaagcgacgtagttagcacaattgccaggcactgaccttcactctctgagggttcatccagtgctggatgtcctgcacggtctcgttcacacgcaggaggatgggctcatggctgtggtccagacacgaggtggtacactctgcgcctgcacaaagaaggagatgataaagctacaggacaaagcaygcagctccttacccttccagcatccttccagctgaaggacaggattagggctcacttt

SEQ ID NO: 40452 - DNA, 600 bp, Chicken  19866894275264_3
aaagtgtgcaaaatactgaagaggaggaagagaataaaacctggcgggtgcccgttctctcattttccaccacgttcctgtatgaattgcaatccctgcatcagccccttggaggtcctgggtggatctgagcacgacgattgggggcccctaccttgaatggattttcattgggaaatcacagagagagaacaacttggagagaatggcaccacgttgctagaacaacatgcaaagacactacaaaatccaggaattattttctaaagggcaaaagacctctctcacacattccccytygctggatgaaccatggctaactgacagtttgctcactgcacacaaacatgtagcaagcgacgtagttagcacaattgccaggcactgaccttcactctctgagggttcatccagtgctggatgtcctgcacggtctcgttcacacgcaggaggatgggctcatggctgtggtccagacacgaggtggtacactctgcgcctgcacaaagaaggagatgataaagctacaggacaaagcaygcagctccttacccttccagcatccttccagctgaaggacaggattagggctcacttttc

SEQ ID NO: 40453 - DNA, 600 bp, Chicken  19866894275264_4
ctacaaaatccaggaattattttctaaagggcaaaagacctctctcacacattccccytygctggatgaaccatggctaactgacagtttgctcactgcacacaaacatgtagcaagcgacgtagttagcacaattgccaggcactgaccttcactctctgagggttcatccagtgctggatgtcctgcacggtctcgttcacacgcaggaggatgggctcatggctgtggtccagacacgaggtggtacactctgcgcctgcacaaagaaggagatgataaagctacaggacaaagcaygcagctccttacccttccagcatccttccagctgaaggacaggattagggctcacttttcctaaattgcaattagcagtcagccgtaactatcacgtatcttctagccacaygtgaaatgctgagtacaaccctgcatctctgcaggctgtaggggtgccaaacacaccaaggcctttttgtatgagctgcatgtctaggtgcttctctggctattaactccagggaaggggtcaggttttgtcctttcagatcatcaggaaaatgtgaagtttttttttccattctgattgctctttca

SEQ ID NO: 40454 - DNA, 600 bp, Chicken  19866894275264_5
gcaagcgacgtagttagcacaattgccaggcactgaccttcactctctgagggttcatccagtgctggatgtcctgcacggtctcgttcacacgcaggaggatgggctcatggctgtggtccagacacgaggtggtacactctgcgcctgcacaaagaaggagatgataaagctacaggacaaagcaygcagctccttacccttccagcatccttccagctgaaggacaggattagggctcacttttcctaaattgcaattagcagtcagccgtaactatcacgtatcttctagccacaygtgaaatgctgagtacaaccctgcatctctgcaggctgtaggggtgccaaacacaccaaggcctttttgtatgagctgcatgtctaggtgcttctctggctattaactccagggaaggggtcaggttttgtcctttcagatcatcaggaaaatgtgaagtttttttttccattctgattgctctttcaagcaacggggccgattaaggtaaggctgccgaatccatctcacctgtgacatgacataatcccatcgcttcgtctgtcagatttatgggccttgagtaacagcactttagat

SEQ ID NO: 40455 - DNA, 600 bp, Chicken  19866894275264_6
gtctaggtgcttctctggctattaactccagggaaggggtcaggttttgtcctttcagatcatcaggaaaatgtgaagtttttttttccattctgattgctctttcaagcaacggggccgattaaggtaaggctgccgaatccatctcacctgtgacatgacataatcccatcgcttcgtctgtcagatttatgggccttgagtaacagcactttagatgtgaccaagcctaatggtactgcaggcaaactaccacctaagtcccatacttgataagaagaatgcagagaggtaacgatrgctttcttcacacataaacctgttttttctctgattaactgtcatacccagtgggaatcctgtcctttctttattaaaacatgctgcgatcctctgcagcaatatcccagagccctgtggtgacacaaccataakccgtagtgtgttggaccatttcccccctggaaaatcactcctgaatggcacagctgctgcaaacatgtcattaggatttctgcactcccatcagcactgggggaggaattaatctctgtgctggtttggatagcactggctgaacacacacctcagcctggaagg

SEQ ID NO: 40456 - DNA, 600 bp, Chicken  19866894275264_7
ccgaatccatctcacctgtgacatgacataatcccatcgcttcgtctgtcagatttatgggccttgagtaacagcactttagatgtgaccaagcctaatggtactgcaggcaaactaccacctaagtcccatacttgataagaagaatgcagagaggtaacgatrgctttcttcacacataaacctgttttttctctgattaactgtcatacccagtgggaatcctgtcctttctttattaaaacatgctgcgatcctctgcagcaatatcccagagccctgtggtgacacaaccataakccgtagtgtgttggaccatttcccccctggaaaatcactcctgaatggcacagctgctgcaaacatgtcattaggatttctgcactcccatcagcactgggggaggaattaatctctgtgctggtttggatagcactggctgaacacacacctcagcctggaagggcagattaggtgtctgaggaattaccaaaggtgtgggggattcgtagtgaccacgactggatgctattattttctccacctgcttctgccttctcacatcctctctcatgggaggagtcagtggggagtgagcag

SEQ ID NO: 40457 - DNA, 600 bp, Chicken  19866894275267_1
ttgttgcctcagaacaaaactgattgtcagtttttcattgttaatgagaagtactaggagctttttattagtccaagcttgcaattatttgtttggaagagcatggcgttgatctctgaagagcaggactttcaagtacacttaggtcacttaagaacataaattccattggctttgcactgttaggggagcagaactgaaatgaagtgaagggattaattttgaacctttggcaggctgggaagtgcaattgatgacaaataccaggcagcacgttgtgttacggaggtcttgtttttrtgtgaatctttttaagcccgaatgaacgtatgagtgtaaaattttttttgaaagcttggtcaggcatgggcrgggggaattagcacaatggggattcataactgaattaaggcaacattatatataaacgtgcttttaatcactttatagaagtcatgttgatctagtttccaggagagaataagagargtgttgtgtaactccttctcaagtctgcctttgcggtcagtgtyctctttgccagagcgctgcagcagtgcaggagcacccagaagactccaaggtccgacacgagcttta

SEQ ID NO: 40458 - DNA, 600 bp, Chicken  19866894275267_2
ccaagcttgcaattatttgtttggaagagcatggcgttgatctctgaagagcaggactttcaagtacacttaggtcacttaagaacataaattccattggctttgcactgttaggggagcagaactgaaatgaagtgaagggattaattttgaacctttggcaggctgggaagtgcaattgatgacaaataccaggcagcacgttgtgttacggaggtcttgtttttrtgtgaatctttttaagcccgaatgaacgtatgagtgtaaaattttttttgaaagcttggtcaggcatgggcrgggggaattagcacaatggggattcataactgaattaaggcaacattatatataaacgtgcttttaatcactttatagaagtcatgttgatctagtttccaggagagaataagagargtgttgtgtaactccttctcaagtctgcctttgcggtcagtgtyctctttgccagagcgctgcagcagtgcaggagcacccagaagactccaaggtccgacacgagctttaagtgaagaatttaatggttgaaattttaaaattatgtaaaaattacctacctgtccacttttgctatgaagt

SEQ ID NO: 40459 - DNA, 600 bp, Chicken  19866894275267_3
agcagaactgaaatgaagtgaagggattaattttgaacctttggcaggctgggaagtgcaattgatgacaaataccaggcagcacgttgtgttacggaggtcttgtttttrtgtgaatctttttaagcccgaatgaacgtatgagtgtaaaattttttttgaaagcttggtcaggcatgggcrgggggaattagcacaatggggattcataactgaattaaggcaacattatatataaacgtgcttttaatcactttatagaagtcatgttgatctagtttccaggagagaataagagargtgttgtgtaactccttctcaagtctgcctttgcggtcagtgtyctctttgccagagcgctgcagcagtgcaggagcacccagaagactccaaggtccgacacgagctttaagtgaagaatttaatggttgaaattttaaaattatgtaaaaattacctacctgtccacttttgctatgaagtacaatggtagtttgtttgcctcttgactgcttattgatgaatgttttatttggcagcagctcggaggactgcaaaacttgttgtttgactggtggtttcagctatcagttgtctttc

SEQ ID NO: 40460 - DNA, 600 bp, Chicken  19866894275267_4
caggctgggaagtgcaattgatgacaaataccaggcagcacgttgtgttacggaggtcttgtttttrtgtgaatctttttaagcccgaatgaacgtatgagtgtaaaattttttttgaaagcttggtcaggcatgggcrgggggaattagcacaatggggattcataactgaattaaggcaacattatatataaacgtgcttttaatcactttatagaagtcatgttgatctagtttccaggagagaataagagargtgttgtgtaactccttctcaagtctgcctttgcggtcagtgtyctctttgccagagcgctgcagcagtgcaggagcacccagaagactccaaggtccgacacgagctttaagtgaagaatttaatggttgaaattttaaaattatgtaaaaattacctacctgtccacttttgctatgaagtacaatggtagtttgtttgcctcttgactgcttattgatgaatgttttatttggcagcagctcggaggactgcaaaacttgttgtttgactggtggtttcagctatcagttgtctttctgtgccttatcagactgcttggcaaccatttaattgagaagttt

SEQ ID NO: 40461 - DNA, 600 bp, Chicken  19866894275269_1
gtaaacttattgacttgaatttaagaagagccttgaactgcagcaatattacccaatttctgttctagtttctacagtatctttcaagtgatgcaacttcttacgtttctctcgttttaaataaggttcattaaatcattatgaaatatagttgtgtagtaccaaaaagctctagacccaacataagctatgcacagtgctgttaaatattttagcttattgtcggcttacaacaaaagaattttaacctctagctgatctatgctcacacaacggtgcacgtagcaagaaggttccccygtgctctgctttctgctctaagcagcgtgcctcaggctctccctcaactccttggccgtcttcagtaagatgaatgcacgaggctgctcccaaaccctcagaagtcaacaggcagcacagaggaatacaagcctcgccactttaaggcttcagctccaacagcgttagtgtggttttcgctttaattgggcgttttggtttaaatcctactttctgactgatgaatttttcgattaatgcaactcattttcagcttggtattttgcctagttcccttcaaattgaagcaattatagaaaa

SEQ ID NO: 40462 - DNA, 600 bp, Chicken  19866894275276_1
aagtcagttcataccaataaaacaaacttaacccaggattatcaaaaatggaaagtttcctcgatcttagagtaggatctcactcctaatttataaatacattttaacatctctgcaacagaccccacattccttacacctacaaatgcaaatccattatggaattttttactgcattgctggtttctaaaacttaagaagccctaatatacatgaataaagcaaaatgaagagctccttgccttctataatattgattcttcaggtaggaggaatatattccaattcagaagatgaatkagacatttgccattttctcctatgcgctcttcctgcttctcttcatttaaaaaagatgtaacatgtacaagaccaatgctgatagctcaattagagttacattaatgcattatgaattttctagagtaacactaaaagcagcaatgaatcttgaattgaaatgctgaaaaggttcataaatttagagcatcaataacatatgcatcttagtattatacagtctacaggaggaaaaacaatagaatttatagcttttagtctgaacttaagcaatgaacctggaactataatcagatctta

SEQ ID NO: 40463 - DNA, 600 bp, Chicken  19866894275283_1
taattgccattgccatacattaaatccttaggaatgtcttttttctaatggattaaattcttttaatgtgtatataattgatattctaatgcactgcatgtcagcagtatattactaatgtatagtgtcactgatgattaagtgaactgaaatatttttcagtgcagtggcaagtaccaaaataataaaatgtattcaaggaagaacaccacagatatattaaaaaaaaaataaaaatgcatattaagcagtgtgctgtgaagcaaagagaagaatagaaaatatgcagctttacctcaygtattccaaacaatttagattaggaaatactgtctcacacttatttacatgccagcctccagcaggatgcagcttgacctcaggttgactccacagtcacaagctaaaaggaacagttatgcaactcagagtggctagaattaaccatacaaaaccccagaaggctggagtgatggtacccagaaatcattgaagtttaaggaactatatttgcttgtttcgttgaaagatctggcttgcattattgcagcatccatctttactgtgcttacagaccattatctttcaatttcttggcat

SEQ ID NO: 40464 - DNA, 600 bp, Chicken  19866894275287_1
agtatcaagtttattgttcaggtttatgcagacattcctccaaaagatgatgatggaagaagatatgccaaagatatgttttactgtacaccattgatatgttttgcaacaaaatatgacagatcaatgaaaatgtactacctgccccattaaagtctacctatttaaaatactaaaataacttctgtttttacagaactatatactatggaacttaaaattctggcacaaactgacatctatctcaagctcgggagtacaaatcaaacaactccaaacaccaacctactgtatttggtrcaacaatctgtattaataaattacacctatatactaccctatcaaacatatcttggaaataatagttcctaaaaatagcaggaacaagtaaagcacaagcwcgagctgtttrcagtgcawcaggaaacaggcacaaaaggaagaaaaagacaggggagatttacataggatataatgttatatatgagcagcagaacacagctctgaagcactgcattgatccaacttcacatataagtttcacgtaaagaaaagcaaagccaatgcctgcttccatgtattttatgaattgaggaaagt

SEQ ID NO: 40465 - DNA, 600 bp, Chicken  19866894275287_2
ttttgcaacaaaatatgacagatcaatgaaaatgtactacctgccccattaaagtctacctatttaaaatactaaaataacttctgtttttacagaactatatactatggaacttaaaattctggcacaaactgacatctatctcaagctcgggagtacaaatcaaacaactccaaacaccaacctactgtatttggtrcaacaatctgtattaataaattacacctatatactaccctatcaaacatatcttggaaataatagttcctaaaaatagcaggaacaagtaaagcacaagcwcgagctgtttrcagtgcawcaggaaacaggcacaaaaggaagaaaaagacaggggagatttacataggatataatgttatatatgagcagcagaacacagctctgaagcactgcattgatccaacttcacatataagtttcacgtaaagaaaagcaaagccaatgcctgcttccatgtattttatgaattgaggaaagtctagatttaactgttctaacacatagcataaaaatatacagggggaagttcacagcatcagcaaagagcagcagcctgcagagtagaatcttcctagtaaa

SEQ ID NO: 40466 - DNA, 600 bp, Chicken  19866894275287_3
aatatgacagatcaatgaaaatgtactacctgccccattaaagtctacctatttaaaatactaaaataacttctgtttttacagaactatatactatggaacttaaaattctggcacaaactgacatctatctcaagctcgggagtacaaatcaaacaactccaaacaccaacctactgtatttggtrcaacaatctgtattaataaattacacctatatactaccctatcaaacatatcttggaaataatagttcctaaaaatagcaggaacaagtaaagcacaagcwcgagctgtttrcagtgcawcaggaaacaggcacaaaaggaagaaaaagacaggggagatttacataggatataatgttatatatgagcagcagaacacagctctgaagcactgcattgatccaacttcacatataagtttcacgtaaagaaaagcaaagccaatgcctgcttccatgtattttatgaattgaggaaagtctagatttaactgttctaacacatagcataaaaatatacagggggaagttcacagcatcagcaaagagcagcagcctgcagagtagaatcttcctagtaaacattccaagaa

SEQ ID NO: 40467 - DNA, 600 bp, Chicken  19866894275287_4
agatcaatgaaaatgtactacctgccccattaaagtctacctatttaaaatactaaaataacttctgtttttacagaactatatactatggaacttaaaattctggcacaaactgacatctatctcaagctcgggagtacaaatcaaacaactccaaacaccaacctactgtatttggtrcaacaatctgtattaataaattacacctatatactaccctatcaaacatatcttggaaataatagttcctaaaaatagcaggaacaagtaaagcacaagcwcgagctgtttrcagtgcawcaggaaacaggcacaaaaggaagaaaaagacaggggagatttacataggatataatgttatatatgagcagcagaacacagctctgaagcactgcattgatccaacttcacatataagtttcacgtaaagaaaagcaaagccaatgcctgcttccatgtattttatgaattgaggaaagtctagatttaactgttctaacacatagcataaaaatatacagggggaagttcacagcatcagcaaagagcagcagcctgcagagtagaatcttcctagtaaacattccaagaactcaagct

SEQ ID NO: 40468 - DNA, 600 bp, Chicken  19866894275289_1
tctggtttaaggcacaaattctcatatgtcagaattttctcttgggcaaatattctatcttctaattcacccaaacgtttagatggaacctatactcaggttatgtattcttttcaagtacatttttgtggctctggatcttgtggacagtgcctgtgttcagtaaaggtttctgatagttgcagacaggaggcaggatgagtttatctgtagcagtatggcagtcagcaattgctttcaaggtgtctttcttgaaacacaagtattcactacacaaaagatgctggatgaacatagtaygcatttagaaatgtttgaatgragatttacattacgatttggctcattttattgtacyrttggctgaygctatatgggtcttcctrtttagctgtcttaatgtgattaaaaaacagaatgtgacagaagcacatcctgtctttgtatgcaggaccttttaactctgatgaataagtggatgtggctgtgagcctgcaaggaaccaggcctcatgattctcattttcatcatctgaaactagttgtacgttgcagtgatgtaagtgaaggcactgctcatacagcagtaagaagctagagc

SEQ ID NO: 40469 - DNA, 600 bp, Chicken  19866894275289_2
catatgtcagaattttctcttgggcaaatattctatcttctaattcacccaaacgtttagatggaacctatactcaggttatgtattcttttcaagtacatttttgtggctctggatcttgtggacagtgcctgtgttcagtaaaggtttctgatagttgcagacaggaggcaggatgagtttatctgtagcagtatggcagtcagcaattgctttcaaggtgtctttcttgaaacacaagtattcactacacaaaagatgctggatgaacatagtaygcatttagaaatgtttgaatgragatttacattacgatttggctcattttattgtacyrttggctgaygctatatgggtcttcctrtttagctgtcttaatgtgattaaaaaacagaatgtgacagaagcacatcctgtctttgtatgcaggaccttttaactctgatgaataagtggatgtggctgtgagcctgcaaggaaccaggcctcatgattctcattttcatcatctgaaactagttgtacgttgcagtgatgtaagtgaaggcactgctcatacagcagtaagaagctagagcagctctgtgcttgaagtgcaca

SEQ ID NO: 40470 - DNA, 600 bp, Chicken  19866894275289_3
cttctaattcacccaaacgtttagatggaacctatactcaggttatgtattcttttcaagtacatttttgtggctctggatcttgtggacagtgcctgtgttcagtaaaggtttctgatagttgcagacaggaggcaggatgagtttatctgtagcagtatggcagtcagcaattgctttcaaggtgtctttcttgaaacacaagtattcactacacaaaagatgctggatgaacatagtaygcatttagaaatgtttgaatgragatttacattacgatttggctcattttattgtacyrttggctgaygctatatgggtcttcctrtttagctgtcttaatgtgattaaaaaacagaatgtgacagaagcacatcctgtctttgtatgcaggaccttttaactctgatgaataagtggatgtggctgtgagcctgcaaggaaccaggcctcatgattctcattttcatcatctgaaactagttgtacgttgcagtgatgtaagtgaaggcactgctcatacagcagtaagaagctagagcagctctgtgcttgaagtgcacattccttgaatgcaatctgaaatgtctaacagcagaa

SEQ ID NO: 40471 - DNA, 600 bp, Chicken  19866894275289_4
ttctaattcacccaaacgtttagatggaacctatactcaggttatgtattcttttcaagtacatttttgtggctctggatcttgtggacagtgcctgtgttcagtaaaggtttctgatagttgcagacaggaggcaggatgagtttatctgtagcagtatggcagtcagcaattgctttcaaggtgtctttcttgaaacacaagtattcactacacaaaagatgctggatgaacatagtaygcatttagaaatgtttgaatgragatttacattacgatttggctcattttattgtacyrttggctgaygctatatgggtcttcctrtttagctgtcttaatgtgattaaaaaacagaatgtgacagaagcacatcctgtctttgtatgcaggaccttttaactctgatgaataagtggatgtggctgtgagcctgcaaggaaccaggcctcatgattctcattttcatcatctgaaactagttgtacgttgcagtgatgtaagtgaaggcactgctcatacagcagtaagaagctagagcagctctgtgcttgaagtgcacattccttgaatgcaatctgaaatgtctaacagcagaat

SEQ ID NO: 40472 - DNA, 600 bp, Chicken  19866894275289_5
acccaaacgtttagatggaacctatactcaggttatgtattcttttcaagtacatttttgtggctctggatcttgtggacagtgcctgtgttcagtaaaggtttctgatagttgcagacaggaggcaggatgagtttatctgtagcagtatggcagtcagcaattgctttcaaggtgtctttcttgaaacacaagtattcactacacaaaagatgctggatgaacatagtaygcatttagaaatgtttgaatgragatttacattacgatttggctcattttattgtacyrttggctgaygctatatgggtcttcctrtttagctgtcttaatgtgattaaaaaacagaatgtgacagaagcacatcctgtctttgtatgcaggaccttttaactctgatgaataagtggatgtggctgtgagcctgcaaggaaccaggcctcatgattctcattttcatcatctgaaactagttgtacgttgcagtgatgtaagtgaaggcactgctcatacagcagtaagaagctagagcagctctgtgcttgaagtgcacattccttgaatgcaatctgaaatgtctaacagcagaatgtaaaaaaa

SEQ ID NO: 40473 - DNA, 600 bp, Chicken  19866894275289_6
aacctatactcaggttatgtattcttttcaagtacatttttgtggctctggatcttgtggacagtgcctgtgttcagtaaaggtttctgatagttgcagacaggaggcaggatgagtttatctgtagcagtatggcagtcagcaattgctttcaaggtgtctttcttgaaacacaagtattcactacacaaaagatgctggatgaacatagtaygcatttagaaatgtttgaatgragatttacattacgatttggctcattttattgtacyrttggctgaygctatatgggtcttcctrtttagctgtcttaatgtgattaaaaaacagaatgtgacagaagcacatcctgtctttgtatgcaggaccttttaactctgatgaataagtggatgtggctgtgagcctgcaaggaaccaggcctcatgattctcattttcatcatctgaaactagttgtacgttgcagtgatgtaagtgaaggcactgctcatacagcagtaagaagctagagcagctctgtgcttgaagtgcacattccttgaatgcaatctgaaatgtctaacagcagaatgtaaaaaaagaatgcgaaagctttttc

SEQ ID NO: 40474 - DNA, 600 bp, Chicken  19866894275291_1
tctgaactcatctctgagtgcatctcctaaaggtgtgcacagtaaaaattgggagtgggtagctgggacttgcagccttaaagccacgaatcagaagcatcattgccccaaagagaacagagcagagctggaagtaatcctttagaaacattcagaaatgcatgaaaaattaaagactgctttaaagtacgtgcttggtgcagccctgtgctcagcacagttattgcatcttaattttcaaaccagttcagttagtgctgctcagatctgcagggctgtatcctccttcgggagagctcyggatgagcgctgggtttcttactgctactgattgtggagatggtattaaattaaaataaagccagaaaacaactccggatttcttcttcgagggatctaataaatgtcgttcaatatgttctcatctaattttccttgcctctacattgttattgtagcaaggccctgagctcctgcagagccgaggtcccatcacagataggaaccaaaggatgttttccatccttgacattttcctatctccggctgcagcgccccgtggagatggtcagaactcaacacaaaggatgcgatttttcc

SEQ ID NO: 40475 - DNA, 599 bp, Chicken  19866894275295_1
  misc_feature (1)..(86): n is any nucleotide
nnnnnnnnnnnnnnnnnnnnnnnnnnnnnnnnnnnnnnnnnnnnnnnnnnnnnnnnnnnnnnnnnnnnnnnnnnnnnnnnnnnnnntaattgtctatttaacttggcaatccagagtaattttttcctgtgaaatgagaccgagacgtcactaaagcagcggtcagattaattaatgagacataataatgctcctaataaaagctcatgagctgagtcctcttccctcccctttcctctcctcccctgctgtcctctccccactgagaatgcagcttcccaggaatccatgagtcacgcwtagtaaaagagtttcttctttagttgacgcaaacaatgcggcagagaaaaataataagtgcagaaccatctgtttgatgaagtccttgacattttatttcatttccccctattgcatattaaaggaagtaaatagaaaaacatttgctaattatatcactgtttactgattgccgggtggcttttattgtatttatcaaaagcgctatcccgtcctgcagtcctggcttcagcatcctcctgctttctgctttgtgtgagaggagcatggcagcaacctygagctttctgtaaggcttt

SEQ ID NO: 40476 - DNA, 600 bp, Chicken  19866894275295_2
aggaatccatgagtcacgcwtagtaaaagagtttcttctttagttgacgcaaacaatgcggcagagaaaaataataagtgcagaaccatctgtttgatgaagtccttgacattttatttcatttccccctattgcatattaaaggaagtaaatagaaaaacatttgctaattatatcactgtttactgattgccgggtggcttttattgtatttatcaaaagcgctatcccgtcctgcagtcctggcttcagcatcctcctgctttctgctttgtgtgagaggagcatggcagcaacctygagctttctgtaaggcttttgagccaagcagctcacacagagctggaaacgtgttccttctgtgcaagcgggagaggtgatgggacacaatggatgtggggtaacatgctgagcagatggcagagcacaaagcakgagatccagctgaagccctggccctgaggttggaagctagaagagaaatcataacatcatagaatcattaagattggaaaagaccactgaggtcagctagtccaagcatcaacccatttccaccatgaccactarggttgcctctcccttttgtggggccakgac

SEQ ID NO: 40477 - DNA, 600 bp, Chicken  19866894275295_3
atattaaaggaagtaaatagaaaaacatttgctaattatatcactgtttactgattgccgggtggcttttattgtatttatcaaaagcgctatcccgtcctgcagtcctggcttcagcatcctcctgctttctgctttgtgtgagaggagcatggcagcaacctygagctttctgtaaggcttttgagccaagcagctcacacagagctggaaacgtgttccttctgtgcaagcgggagaggtgatgggacacaatggatgtggggtaacatgctgagcagatggcagagcacaaagcakgagatccagctgaagccctggccctgaggttggaagctagaagagaaatcataacatcatagaatcattaagattggaaaagaccactgaggtcagctagtccaagcatcaacccatttccaccatgaccactarggttgcctctcccttttgtggggccakgactctgtgatcagtgtcttggctctccacttgggctcagtaaagcctacagggaggttgaatagcaatgttttactgtgactttggtagcctgagagcagcctccatttgcccttttgaaagagatttggactggcc

SEQ ID NO: 40478 - DNA, 600 bp, Chicken  19866894275295_4
tttgtgtgagaggagcatggcagcaacctygagctttctgtaaggcttttgagccaagcagctcacacagagctggaaacgtgttccttctgtgcaagcgggagaggtgatgggacacaatggatgtggggtaacatgctgagcagatggcagagcacaaagcakgagatccagctgaagccctggccctgaggttggaagctagaagagaaatcataacatcatagaatcattaagattggaaaagaccactgaggtcagctagtccaagcatcaacccatttccaccatgaccactarggttgcctctcccttttgtggggccakgactctgtgatcagtgtcttggctctccacttgggctcagtaaagcctacagggaggttgaatagcaatgttttactgtgactttggtagcctgagagcagcctccatttgcccttttgaaagagatttggactggccgctcttgctttgtccttcccaaagtcttggatagtgagtttgtttccctgtctagttccctttgtaggtatgcttttgtggctcaaaagcagtgcttggatggtatgagggatgaatatcaaaatgtagagtctc

SEQ ID NO: 40479 - DNA, 600 bp, Chicken  19866894275295_5
ctygagctttctgtaaggcttttgagccaagcagctcacacagagctggaaacgtgttccttctgtgcaagcgggagaggtgatgggacacaatggatgtggggtaacatgctgagcagatggcagagcacaaagcakgagatccagctgaagccctggccctgaggttggaagctagaagagaaatcataacatcatagaatcattaagattggaaaagaccactgaggtcagctagtccaagcatcaacccatttccaccatgaccactarggttgcctctcccttttgtggggccakgactctgtgatcagtgtcttggctctccacttgggctcagtaaagcctacagggaggttgaatagcaatgttttactgtgactttggtagcctgagagcagcctccatttgcccttttgaaagagatttggactggccgctcttgctttgtccttcccaaagtcttggatagtgagtttgtttccctgtctagttccctttgtaggtatgcttttgtggctcaaaagcagtgcttggatggtatgagggatgaatatcaaaatgtagagtctcccccctccctctgtctgggatttggat

SEQ ID NO: 40480 - DNA, 599 bp, Chicken  19866894275310_1
  misc_feature (1)..(177): n is any nucleotide
nnnnnnnnnnnnnnnnnnnnnnnnnnnnnnnnnnnnnnnnnnnnnnnnnnnnnnnnnnnnnnnnnnnnnnnnnnnnnnnnnnnnnnnnnnnnnnnnnnnnnnnnnnnnnnnnnnnnnnnnnnnnnnnnnnnnnnnnnnnnnnnnnnnnnnnnnnnnnnnnnnnnnnnnnnnnnnnnntatgtccaatatttgaatcattggtgaccattcccccactcagaagagaaggaacagcaaaagatgactgcttatgagtaaaaggtgaaaataatcaatgagattctttcagaaagttttcartgcttcattagctcacatctcacaaatgcgtatcttctgcagatcagctattcagggtctgtagcaacaggtctctaaacctgtattcattgtagacagagtcttgggagactcttatgctatattttttttgaataagttagtttaggaagttgggttacagttagggagttaaagtttgggaaactgtttcaagtgaagaatgcataaaacaggtattagaacaaacaaaaaatgactagcaacaaagcagcaatattacatgatattcaagattttcaaatctactttaggaaact

SEQ ID NO: 40481 - DNA, 600 bp, Chicken  19866894275312_1
ctgtcttaactcccctcaaggagaataagataagaaggcttccaccctaacagaggacaaactcatgcaggatgaaggaggcaggaaccttgtctctgctcaggacagaaggacaagcccataccctcttccccccaaagtctccctagccaatagatatgaagctatggggtggaaggagaagaaggtatggacagtggtttggaacaagaaaggggcaatcatgttaagaagatccaaccaagaaccagagtcacaaccagtgccactaaaaaaaaggtgaagggtcttagtaattgmataatctgtgttgagggacactgaggcactcatttgtcacacagataacttctctagaaaggtttactgcctgccagaggcctgcatttgagatataaggaaaaagataccaggtatgataaagccagaagactactatccactcctggtctttcaaactgggtgtcataaagctgtgactaggaaataaagaaatatataaatgtcgcttgggaacatgctgaaagaaatggaagtgcaggtagagttctcctcagtcctcctggctggagactgaggtgtaggcagaaggaagataac

SEQ ID NO: 40482 - DNA, 599 bp, Chicken  19866894275313_1
  misc_feature (1)..(7): n is any nucleotide
nnnnnnntggggtgcacaaaatttacagcaggaaaaaaggagtaaggaaggtatttacaatgatttggtgcaattttacaccattacaactacaggcaaagcccacattcgggcattcacctggggcagtccaagaggctaatagcaatggtcttcaaagaaatttaagctgaacaaaattaatgtaagcaagaattagagttggatactttttacagcatacgacacacttcgaaagagacttgtttccaggtctaacctagacagtcactgaaaagttttaatctttttcagcccacrgcaccatgcatttatcctgaacttgactaacattaggaactagaatttgaagcaaaatgcactactcacctcgtttgatctgaaactccttccttgcatcccatgcttccagaaygctaacacgctgtcctgtagacagactggtaacacagaacactgsaatcagttttcatacataataccaactcattcttttaaggccaaaagcatattgctgcagttttwaaatttttgtatgtacatattatggtttcaagttcacccacacagactgcaaaacatctcagaggaatcagtga

SEQ ID NO: 40483 - DNA, 560 bp, Chicken  19866894275313_2
ttcacctggggcagtccaagaggctaatagcaatggtcttcaaagaaatttaagctgaacaaaattaatgtaagcaagaattagagttggatactttttacagcatacgacacacttcgaaagagacttgtttccaggtctaacctagacagtcactgaaaagttttaatctttttcagcccacrgcaccatgcatttatcctgaacttgactaacattaggaactagaatttgaagcaaaatgcactactcacctcgtttgatctgaaactccttccttgcatcccatgcttccagaaygctaacacgctgtcctgtagacagactggtaacacagaacactgsaatcagttttcatacataataccaactcattcttttaaggccaaaagcatattgctgcagttttwaaatttttgtatgtacatattatggtttcaagttcacccacacagactgcaaaacatctcagaggaatcagtgaacctgcctccgcagtggctgcatttatgtcttcgaagaacagggtttaaaaatattctcactcaactaggaaaaca

SEQ ID NO: 40484 - DNA, 515 bp, Chicken  19866894275313_3
aaatttaagctgaacaaaattaatgtaagcaagaattagagttggatactttttacagcatacgacacacttcgaaagagacttgtttccaggtctaacctagacagtcactgaaaagttttaatctttttcagcccacrgcaccatgcatttatcctgaacttgactaacattaggaactagaatttgaagcaaaatgcactactcacctcgtttgatctgaaactccttccttgcatcccatgcttccagaaygctaacacgctgtcctgtagacagactggtaacacagaacactgsaatcagttttcatacataataccaactcattcttttaaggccaaaagcatattgctgcagttttwaaatttttgtatgtacatattatggtttcaagttcacccacacagactgcaaaacatctcagaggaatcagtgaacctgcctccgcagtggctgcatttatgtcttcgaagaacagggtttaaaaatattctcactcaactaggaaaaca

SEQ ID NO: 40485 - DNA, 450 bp, Chicken  19866894275313_4
cacacttcgaaagagacttgtttccaggtctaacctagacagtcactgaaaagttttaatctttttcagcccacrgcaccatgcatttatcctgaacttgactaacattaggaactagaatttgaagcaaaatgcactactcacctcgtttgatctgaaactccttccttgcatcccatgcttccagaaygctaacacgctgtcctgtagacagactggtaacacagaacactgsaatcagttttcatacataataccaactcattcttttaaggccaaaagcatattgctgcagttttwaaatttttgtatgtacatattatggtttcaagttcacccacacagactgcaaaacatctcagaggaatcagtgaacctgcctccgcagtggctgcatttatgtcttcgaagaacagggtttaaaaatattctcactcaactaggaaaaca

SEQ ID NO: 40486 - DNA, 600 bp, Chicken  19866894275318_1
cccagaaatggaccctttgtcccttaaaggtgggccagctgtctgcccaaagagctgagtgtcaaacctcactgttaattgggttttgcagcatcactgctgtgactgcatgccagcccctgcccagaccactgtgtgcaggaagaactctgcacacagggactgggcccctgtctaacacgtctcttcccagctcatgtgtttaacttacagagtgtggtgcactgtcagagatcaagcaaaccatcagtgaaccactgtggctccaggtcctgaggcctgacagccctgctacatagraaggaaaaatgcaaagtgcaattcatatgcaaacatgaaatcatggattttattcagtgtcagttgcgaatgcttgtctagaactgcacattgtttatagcagaagacaacatgatgctgcgttaaggacaccattaacattcagggcacagtttgacagtaggccagatctgcctaaaggccccagaaccagaataaaaggaatgtgccatgctcacggattcgtataaacatgctctgtcaattcacgtggggttagaactttgcacaagccaccaccttactcttgcaggctttcat

SEQ ID NO: 40487 - DNA, 599 bp, Chicken  19866894275333_1
  misc_feature (1)..(18): n is any nucleotide
nnnnnnnnnnnnnnnnnngtggacatttctatgccgtggagtatcttacagctggacacgcctggcacaaaactctttttcccttggaaaacatagtaggtccctcccttgctggccgcagaagcagagtgaaagccatcattgacattgcactcagctttctggacatggtgcagcattttgataatgatttctctcatcgcctacacctgtgtgacatcaagccagaaaactttgctatcaggcacgatcttacggtaagctggggctttggggttgagttgtggatatttgaggttwaattctaatctgaaagtggcagcataagaactgacagttccctcctcacgcagtttccggccaagtttttgcaatgtgggagcttcttcgctgcttttcctctaatacatgcagccacttcagagcactagatcctgctgcttgttttcaggactatttattcagttctgatttgtttcatctgctcaaacgtattgacagtgacagggtcatatcctttggatgtgatgatggacgcctcctgaaggcaaggagatctctgaagcttttaatgaagctgtaacttgagtcatggtaat

SEQ ID NO: 40488 - DNA, 575 bp, Chicken  19866894275333_2
gtggcagcataagaactgacagttccctcctcacgcagtttccggccaagtttttgcaatgtgggagcttcttcgctgcttttcctctaatacatgcagccacttcagagcactagatcctgctgcttgttttcaggactatttattcagttctgatttgtttcatctgctcaaacgtattgacagtgacagggtcatatcctttggatgtgatgatggacgcctcctgaaggcaaggagatctctgaagcttttaatgaagctgtaacttgagtcatggtaattatatctggtagcgaygctgaaaggaacrctaaggctgaatcttctggtctgacacaagggaaactccctgcatacaaacgtacacatctttctgctttagtcttcagcttattcaatacggaaatgactccaggatgggtgacatgacactccttggtactgtcactgtttgattttttcattatatgactgtaactccgaagtgaatagctgtaagttttttctaagtggtgatatagcacagcaccacgttgctgaaaatatcttgcattcattctgcaggcaggaat

SEQ ID NO: 40489 - DNA, 562 bp, Chicken  19866894275333_3
aactgacagttccctcctcacgcagtttccggccaagtttttgcaatgtgggagcttcttcgctgcttttcctctaatacatgcagccacttcagagcactagatcctgctgcttgttttcaggactatttattcagttctgatttgtttcatctgctcaaacgtattgacagtgacagggtcatatcctttggatgtgatgatggacgcctcctgaaggcaaggagatctctgaagcttttaatgaagctgtaacttgagtcatggtaattatatctggtagcgaygctgaaaggaacrctaaggctgaatcttctggtctgacacaagggaaactccctgcatacaaacgtacacatctttctgctttagtcttcagcttattcaatacggaaatgactccaggatgggtgacatgacactccttggtactgtcactgtttgattttttcattatatgactgtaactccgaagtgaatagctgtaagttttttctaagtggtgatatagcacagcaccacgttgctgaaaatatcttgcattcattctgcaggcaggaat

SEQ ID NO: 40490 - DNA, 600 bp, Chicken  19866894275334_1
cctgcttgttcctccagaactcgtgtcttagcgctacactacaacatacattatcttcttccctttaaatagttttatttttcccagttaaattatgcgaaagttacgtaaaggtcccagttgacagatgtaaagcaaagcaacagctaaaattagaagaggtaaaatcagagactggtaagctgtctgagtgatcttacccgcaacaaattcatgctgaattccaccagttaggtcttgtctgtttattaggtcatactgcagctcagagagttcaaggatatcatgaagaaaagagarggaaaatgtgttaaaaarcatgcttctttttaacttcattgaggtttctccaaagtcatcatgtctctaaagttggttgatatggtcaaggttttgggatttggtctttggcagaatggaggtccaccgtttgagccttgaggaagaaaaattatttatgaaccttgaagctttttcactaataaacttaccataagcgtgcaagtatatgatgcaattggctgttagagaatggactttttacaccatattcctacattgcaaaaaagtattttctaggaaatgtattttgggggaaat

SEQ ID NO: 40491 - DNA, 600 bp, Chicken  19866894275334_2
actcgtgtcttagcgctacactacaacatacattatcttcttccctttaaatagttttatttttcccagttaaattatgcgaaagttacgtaaaggtcccagttgacagatgtaaagcaaagcaacagctaaaattagaagaggtaaaatcagagactggtaagctgtctgagtgatcttacccgcaacaaattcatgctgaattccaccagttaggtcttgtctgtttattaggtcatactgcagctcagagagttcaaggatatcatgaagaaaagagarggaaaatgtgttaaaaarcatgcttctttttaacttcattgaggtttctccaaagtcatcatgtctctaaagttggttgatatggtcaaggttttgggatttggtctttggcagaatggaggtccaccgtttgagccttgaggaagaaaaattatttatgaaccttgaagctttttcactaataaacttaccataagcgtgcaagtatatgatgcaattggctgttagagaatggactttttacaccatattcctacattgcaaaaaagtattttctaggaaatgtattttgggggaaattctgttcggttctgtctt

SEQ ID NO: 40492 - DNA, 600 bp, Chicken  19866894275338_1
ttcttttttatggtaagaaagcaatagaattcaatagagatgtcttgttcagtacaggggtaaaggatgatgtatttgttatatgatgatggtaatacactttctattcctactgtaactaaagaggatattaatcaacagctactgtagttagacatacttaaatcagaagttctgggtaatttgcatcgaggaattacaaagcagctggctgaggagcttttttggcagctaatattgatttttcagtaacccgtgaataggggaagattccagaaagctgagagatgggtaggtccrtgtcagtgtgtttaaaagtttgggagagatggctgaaacaacagagtttgtcaggctgacatcaatatgggaaaatggtggaataactcataatttatttgtttcacagagactgaaagatgcataccatcgttaatgctaatcaacaaagcctgtgtggaagtgtttcttcttgaagtaactttaaacttcttagatgggttttaggtttcgttgacataggaaaagcattttgtgaatatatgtaggcttcaatgaagcgttgcaatattgatagcaaaatagtactatgaacttaag

SEQ ID NO: 40493 - DNA, 600 bp, Chicken  19866894275341_1
taagagaagtttcaacacaatttggaacaaactctgcatcttattccccccaaaagcccaacagtagaagatttgtccaacccaaggctgatgaccctcttactacaaaaccaaatacctattaaaaccatccagcagtaccactaacacagccctcacaccctcacctcattaagcaggctgttactttcctgctttctgtaggtatggaagaagaattgaaatgcaaaacacagcgatctcctgttgtacctccaacacaagcacgagacctgcaggacacgtttctatttccatgcycatttcatgcctctggtttcctcccacagagagtgccctgctgcaatgaaatcccaacccctgctcccagacagacagggaggctctgtgtgcagcagggcacagccagcccccagcaggctgtgtttaagcaggcactgttgtgtggatggttccacaggagcctaagatgcacatgagcaagacagatgaccgagcaaaatgcacagagcactctgaaggaaatggragctgaagggattagtttgtctctgcttcttgtggcatcagctcagctttggtctgggggtagagaggaga

SEQ ID NO: 40494 - DNA, 451 bp, Chicken  19866894275341_2
aacacagcgatctcctgttgtacctccaacacaagcacgagacctgcaggacacgtttctatttccatgcycatttcatgcctctggtttcctcccacagagagtgccctgctgcaatgaaatcccaacccctgctcccagacagacagggaggctctgtgtgcagcagggcacagccagcccccagcaggctgtgtttaagcaggcactgttgtgtggatggttccacaggagcctaagatgcacatgagcaagacagatgaccgagcaaaatgcacagagcactctgaaggaaatggragctgaagggattagtttgtctctgcttcttgtggcatcagctcagctttggtctgggggtagagaggagatgtctccaatcccactgaatggacttctgctcactcccagtgcagcctgcaggtttccagcgcgggcactcaagaggccg

SEQ ID NO: 40495 - DNA, 600 bp, Chicken  19866894275344_1
cttatatataaaaacaattccttagcatctgttaccctttgtaaaacgggaagaagttgaagagcattgtaaatcctttacaagcattgattcatttacaagcattggacttaagataatggattcccggtggaacattgaggtccatgtaaacagctttccctttcacacatctaatccaggcattgagcttcccagtgcaaagtagtggagctttcaggcactgtcctgacaaagaacatctagtacagagctgttgctgtctcagtctgtgttacagtcagtttcttttggattcakttttttcacccgtgcaataaaggattatttggggttcgtctgggaaactgaaactgacagtaaagaaaaaaatacaattgatccrtttagttctcatgattgaaattaagtgggtcataaagaaggaatcatggatgattacaaatactctttttaaaaattctgttcctttcaataaaacaacccttagtaaaaataggtcagagaactattttaataattattcaaggtatgatgtccctttttcacttatgtaatgtcttctcatctttctccctaagacatcaagagtgtgaagtg

SEQ ID NO: 40496 - DNA, 600 bp, Chicken  19866894275344_2
attgattcatttacaagcattggacttaagataatggattcccggtggaacattgaggtccatgtaaacagctttccctttcacacatctaatccaggcattgagcttcccagtgcaaagtagtggagctttcaggcactgtcctgacaaagaacatctagtacagagctgttgctgtctcagtctgtgttacagtcagtttcttttggattcakttttttcacccgtgcaataaaggattatttggggttcgtctgggaaactgaaactgacagtaaagaaaaaaatacaattgatccrtttagttctcatgattgaaattaagtgggtcataaagaaggaatcatggatgattacaaatactctttttaaaaattctgttcctttcaataaaacaacccttagtaaaaataggtcagagaactattttaataattattcaaggtatgatgtccctttttcacttatgtaatgtcttctcatctttctccctaagacatcaagagtgtgaagtgtgtgcaaatgtttacagggatttcctcttgatttcctgttcatcaggttgcagagatgcagaaagaactgaccgctcttcagcct

SEQ ID NO: 40497 - DNA, 600 bp, Chicken  19866894275346_1
gacttggacaaagaactgaataattatatcatgcgctgtagagaatggtacggttggcactttcccgagctgggtaaaatcatcacagataacctgacgtattgtaaatgcgtgcggaaagttggtgagtaataaggaggtgtgagcctggggagtgcattgtgtactaatgtgaaacgttaatacacagatttgtagaccagccgcttgctctccagcaggtcatggtgttgtgtacaactgtaccattaagaacactgtaaatagggccagtagagaattggtaagtagttgcctccrtatgctaatgcgatttgaaactctgaagcttaatataaagctagtatcatacgaccagccaattcttcatgaagaccaccagcagatctttgaatcagaattaataagcagaccagtttggatattagctgtcaaatatgatgtaaagggacccgctgcctgtttgtggccgttccctttgactacagctgctttttctttttttttcccttctcttccaattgtaggaagaattacttaggcctggttagttaaaagtgactgcttgcttcctggtattcttcctttgtaatcttgcga

SEQ ID NO: 40498 - DNA, 600 bp, Chicken  19866894275347_1
ttgataagaatacctgttcttagattactgtaataaatcggaatattttgtagcaacttgtttatccacaatcagattaactggtttattcaggatatcgattacagatttttttttacattttttttcaacagcaatgcagagttgttttctcagatgtgagataacatgtcaaaattatttgactcaagttacaggacaggattgaaaccacagtaccttataattttgcaaagcaacaatatcccacatgtcattagcaaaatgaaaggacacacctgctttgagtttagagaaaargatgcctttgggtttcttaatgagtacatctcttttggaacaaaattctttaaacaatcctaaaacagtaaaagtgcctaacatgtcattttcttycattgcctaaaattatcaatgggcaaagtcattctgtccttttatcttgtatataatgactaattccatacagcagcacaattttggttcaacagaagcttattcaaaatgtgaggatacctggttccctgacatcagtcacagaattccttagtgggtccrtcacatcactttaragcattattggctaagaacactcctact

SEQ ID NO: 40499 - DNA, 600 bp, Chicken  19866894275347_2
atcgattacagatttttttttacattttttttcaacagcaatgcagagttgttttctcagatgtgagataacatgtcaaaattatttgactcaagttacaggacaggattgaaaccacagtaccttataattttgcaaagcaacaatatcccacatgtcattagcaaaatgaaaggacacacctgctttgagtttagagaaaargatgcctttgggtttcttaatgagtacatctcttttggaacaaaattctttaaacaatcctaaaacagtaaaagtgcctaacatgtcattttcttycattgcctaaaattatcaatgggcaaagtcattctgtccttttatcttgtatataatgactaattccatacagcagcacaattttggttcaacagaagcttattcaaaatgtgaggatacctggttccctgacatcagtcacagaattccttagtgggtccrtcacatcactttaragcattattggctaagaacactcctactattcattcaacatcttaaaaccagttttgtgatagatttctatagagaataaggaatattctggtctttctttyttttttttttttttttgaagct

SEQ ID NO: 40500 - DNA, 600 bp, Chicken  19866894275347_3
agcaaaatgaaaggacacacctgctttgagtttagagaaaargatgcctttgggtttcttaatgagtacatctcttttggaacaaaattctttaaacaatcctaaaacagtaaaagtgcctaacatgtcattttcttycattgcctaaaattatcaatgggcaaagtcattctgtccttttatcttgtatataatgactaattccatacagcagcacaattttggttcaacagaagcttattcaaaatgtgaggatacctggttccctgacatcagtcacagaattccttagtgggtccrtcacatcactttaragcattattggctaagaacactcctactattcattcaacatcttaaaaccagttttgtgatagatttctatagagaataaggaatattctggtctttctttyttttttttttttttttgaagctgcagtttagtktttggggacttgtttatttcctgtacctctgcaagatatgtggagaacagatacttggcctatgtatgatcatgcacggttacaggtcagcttgcttgggtccgcttaggtgagcgtaaagaccaagaaggtttctatttcaagtgctctg

SEQ ID NO: 40501 - DNA, 600 bp, Chicken  19866894275347_4
acacacctgctttgagtttagagaaaargatgcctttgggtttcttaatgagtacatctcttttggaacaaaattctttaaacaatcctaaaacagtaaaagtgcctaacatgtcattttcttycattgcctaaaattatcaatgggcaaagtcattctgtccttttatcttgtatataatgactaattccatacagcagcacaattttggttcaacagaagcttattcaaaatgtgaggatacctggttccctgacatcagtcacagaattccttagtgggtccrtcacatcactttaragcattattggctaagaacactcctactattcattcaacatcttaaaaccagttttgtgatagatttctatagagaataaggaatattctggtctttctttyttttttttttttttttgaagctgcagtttagtktttggggacttgtttatttcctgtacctctgcaagatatgtggagaacagatacttggcctatgtatgatcatgcacggttacaggtcagcttgcttgggtccgcttaggtgagcgtaaagaccaagaaggtttctatttcaagtgctctgaggtggatagcacg

SEQ ID NO: 40502 - DNA, 600 bp, Chicken  19866894275347_5
tgcctaacatgtcattttcttycattgcctaaaattatcaatgggcaaagtcattctgtccttttatcttgtatataatgactaattccatacagcagcacaattttggttcaacagaagcttattcaaaatgtgaggatacctggttccctgacatcagtcacagaattccttagtgggtccrtcacatcactttaragcattattggctaagaacactcctactattcattcaacatcttaaaaccagttttgtgatagatttctatagagaataaggaatattctggtctttctttyttttttttttttttttgaagctgcagtttagtktttggggacttgtttatttcctgtacctctgcaagatatgtggagaacagatacttggcctatgtatgatcatgcacggttacaggtcagcttgcttgggtccgcttaggtgagcgtaaagaccaagaaggtttctatttcaagtgctctgaggtggatagcacgttctaggggggatttttaattcttttttttatctttaagagctaaattatagttggagtgattaaagtttgacagcttcatgactccagcaccacaagaaag

SEQ ID NO: 40503 - DNA, 600 bp, Chicken  19866894275347_6
attatcaatgggcaaagtcattctgtccttttatcttgtatataatgactaattccatacagcagcacaattttggttcaacagaagcttattcaaaatgtgaggatacctggttccctgacatcagtcacagaattccttagtgggtccrtcacatcactttaragcattattggctaagaacactcctactattcattcaacatcttaaaaccagttttgtgatagatttctatagagaataaggaatattctggtctttctttyttttttttttttttttgaagctgcagtttagtktttggggacttgtttatttcctgtacctctgcaagatatgtggagaacagatacttggcctatgtatgatcatgcacggttacaggtcagcttgcttgggtccgcttaggtgagcgtaaagaccaagaaggtttctatttcaagtgctctgaggtggatagcacgttctaggggggatttttaattcttttttttatctttaagagctaaattatagttggagtgattaaagtttgacagcttcatgactccagcaccacaagaaagatttctgggatgaagagcaggttattgtcttca

SEQ ID NO: 40504 - DNA, 600 bp, Chicken  19866894275347_7
ataatgggaaactggagtggaaggaaaaggttggtttggtttttttttaagctatatttatcacatatctgtttctctacccgcagggtcataaaggttttatgggactgcaagggccacggggtgagcaggtaagtaatgaaaacacagtagactgtactctttggatgagcaattgatgatggaagaatgcataatccaatataaatgctcggtactagcaatcagtgtaaattaccaactgcttaagtattcagattgtgtaattattagtgtggtgaagaatggcccagatgaaayaggaaagatcgacttatttatcttcagctaccatgctggcttggcagaaattgttgtgaaatttttgttagagctacgatctagatcctctcaatcaatctgctaattcaatgcatttttaatcttctagtatgttgcaaatgaagggcttattcagtgccttttctcacctccatgtcagttcaagaagcaacctttttgcaacaactaattgctgagtatgttgtgctagcaagagcaatgcacctagcaacagagtaagtggaaccatgagttcccttttgggcaacaatcaaaggg

SEQ ID NO: 40505 - DNA, 599 bp, Chicken  19866894275355_1
  misc_feature (1)..(79): n is any nucleotide
nnnnnnnnnnnnnnnnnnnnnnnnnnnnnnnnnnnnnnnnnnnnnnnnnnnnnnnnnnnnnnnnnnnnnnnnnnnnnnnctgaggatgcattccctgcaggaaaagcacgccgtgcatcctggtgagctttgggaaaagctgagctgattgcagaatgcttaaagcaagaggctgcacagctggaaaatctgtctttacagcggaaaattattggcagtgaccaaagtaattgtggctgtgcctccagcaggtgcagcaccctacaggagacggtggtctaaggaatccatggcactgtratccyataggccaacagtcaaagccctctgggcagcaggcagagcacagacagcagyggctgcatgggtaggacgggagttcccctacagtccctgaatgcyaaggcaaagatcacagtracagctaacgagcagctgcaaaggaaagctcctcttctggaaatgaactccaaacactgcctgcacctcagcccatcactgcttatatgggcttctgcagaagcaggagatttgctttttccagcgtccctctatgccgacaygctgcggcacagcagcccctgcatcccttcctggac

SEQ ID NO: 40506 - DNA, 599 bp, Chicken  19866894275355_2
  misc_feature (1)..(74): n is any nucleotide
nnnnnnnnnnnnnnnnnnnnnnnnnnnnnnnnnnnnnnnnnnnnnnnnnnnnnnnnnnnnnnnnnnnnnnnnnnctgaggatgcattccctgcaggaaaagcacgccgtgcatcctggtgagctttgggaaaagctgagctgattgcagaatgcttaaagcaagaggctgcacagctggaaaatctgtctttacagcggaaaattattggcagtgaccaaagtaattgtggctgtgcctccagcaggtgcagcaccctacaggagacggtggtctaaggaatccatggcactgtratccyataggccaacagtcaaagccctctgggcagcaggcagagcacagacagcagyggctgcatgggtaggacgggagttcccctacagtccctgaatgcyaaggcaaagatcacagtracagctaacgagcagctgcaaaggaaagctcctcttctggaaatgaactccaaacactgcctgcacctcagcccatcactgcttatatgggcttctgcagaagcaggagatttgctttttccagcgtccctctatgccgacaygctgcggcacagcagcccctgcatcccttcctggacaggtt

SEQ ID NO: 40507 - DNA, 599 bp, Chicken  19866894275355_3
  misc_feature (1)..(22): n is any nucleotide
nnnnnnnnnnnnnnnnnnnnnnctgaggatgcattccctgcaggaaaagcacgccgtgcatcctggtgagctttgggaaaagctgagctgattgcagaatgcttaaagcaagaggctgcacagctggaaaatctgtctttacagcggaaaattattggcagtgaccaaagtaattgtggctgtgcctccagcaggtgcagcaccctacaggagacggtggtctaaggaatccatggcactgtratccyataggccaacagtcaaagccctctgggcagcaggcagagcacagacagcagyggctgcatgggtaggacgggagttcccctacagtccctgaatgcyaaggcaaagatcacagtracagctaacgagcagctgcaaaggaaagctcctcttctggaaatgaactccaaacactgcctgcacctcagcccatcactgcttatatgggcttctgcagaagcaggagatttgctttttccagcgtccctctatgccgacaygctgcggcacagcagcccctgcatcccttcctggacaggtttggtttgtcagtgatttatctgccacagacactatgaaaacatttcactaaa

SEQ ID NO: 40508 - DNA, 600 bp, Chicken  19866894275355_4
aaagcacgccgtgcatcctggtgagctttgggaaaagctgagctgattgcagaatgcttaaagcaagaggctgcacagctggaaaatctgtctttacagcggaaaattattggcagtgaccaaagtaattgtggctgtgcctccagcaggtgcagcaccctacaggagacggtggtctaaggaatccatggcactgtratccyataggccaacagtcaaagccctctgggcagcaggcagagcacagacagcagyggctgcatgggtaggacgggagttcccctacagtccctgaatgcyaaggcaaagatcacagtracagctaacgagcagctgcaaaggaaagctcctcttctggaaatgaactccaaacactgcctgcacctcagcccatcactgcttatatgggcttctgcagaagcaggagatttgctttttccagcgtccctctatgccgacaygctgcggcacagcagcccctgcatcccttcctggacaggtttggtttgtcagtgatttatctgccacagacactatgaaaacatttcactaaacgccaggttctcctgctttatagtgagcgtgaaagcttttcaccca

SEQ ID NO: 40509 - DNA, 600 bp, Chicken  19866894275355_5
tggtgagctttgggaaaagctgagctgattgcagaatgcttaaagcaagaggctgcacagctggaaaatctgtctttacagcggaaaattattggcagtgaccaaagtaattgtggctgtgcctccagcaggtgcagcaccctacaggagacggtggtctaaggaatccatggcactgtratccyataggccaacagtcaaagccctctgggcagcaggcagagcacagacagcagyggctgcatgggtaggacgggagttcccctacagtccctgaatgcyaaggcaaagatcacagtracagctaacgagcagctgcaaaggaaagctcctcttctggaaatgaactccaaacactgcctgcacctcagcccatcactgcttatatgggcttctgcagaagcaggagatttgctttttccagcgtccctctatgccgacaygctgcggcacagcagcccctgcatcccttcctggacaggtttggtttgtcagtgatttatctgccacagacactatgaaaacatttcactaaacgccaggttctcctgctttatagtgagcgtgaaagcttttcacccaacgggaatggttcccaaa

SEQ ID NO: 40510 - DNA, 596 bp, Chicken  19866894275355_6
acaggagacggtggtctaaggaatccatggcactgtratccyataggccaacagtcaaagccctctgggcagcaggcagagcacagacagcagyggctgcatgggtaggacgggagttcccctacagtccctgaatgcyaaggcaaagatcacagtracagctaacgagcagctgcaaaggaaagctcctcttctggaaatgaactccaaacactgcctgcacctcagcccatcactgcttatatgggcttctgcagaagcaggagatttgctttttccagcgtccctctatgccgacaygctgcggcacagcagcccctgcatcccttcctggacaggtttggtttgtcagtgatttatctgccacagacactatgaaaacatttcactaaacgccaggttctcctgctttatagtgagcgtgaaagcttttcacccaacgggaatggttcccaaaacagtgtttgtattaccttcaaggctatccaagtaagcttagggagaaacagaaaatacacagttaatgttagttctacaaataaagaattggaaaaaatatatatatatttaaaaaaaataacccatcttctttcaaa

SEQ ID NO: 40511 - DNA, 600 bp, Chicken  19866894275357_1
atgaagcagggattagaagtaaatgttaagtgtgtgttctagctgcacgcagtgttgtcaagaactgtaaggttgtgtggagaatggccttcctgagataggctttggctggtcaaggagttgttgcaggacatccaaaggcaacaccgagcatgccaggaggtggctgcctttgtggctgttgtgatcacacccaatgcctgttcctgtaggtattattgcctgtgctatcaagtgttctgagagccaaaattcatttaaaaactgcaatctactacgtcattcacttcaatggtggcraatctatcactcttctgatataatcctgtctgctccacacacaaatagctcttcacaaacttcaccttgaaatccagccagggatcgtattgtcctagctaatggagacttgcacaatgtcagaggaagtcagaaggtctgataatggaaatccaccttttaatatgtcaacatcataattggtagttgccagaaggggtggggtgaaacacaatatgcattcctgaagaagagatgctgaagccagtcatggtttatgctgatatattacatgcaagtgaaagacaaaagctacttctc

SEQ ID NO: 40512 - DNA, 600 bp, Chicken  19866894275357_2
tctggctaattgaccctcaaaaccctcggagttccctgcactctttgttgtcaaacaccttgcacagtttcttttctgtgctttactctccctccttttcaaaaagaaatagattaaagcagtattaaaggcctacagttgtgctaagccttcgaacctactcgtttgttcctataatttgaaggaacatcggaagctgaagcttaagaaggtaatagagaggagctcatgtggcctctcaagtctttcatcttaattccccatccccttggtgagagggcagctgggtgactacctcamcctggctcatctgctgaagtattttacctttgcgacactgtatggaatttagtttggagggtagtggtggcttttcctttttttaggatcaggttcttcatatttcctagtaattcccttttccagcactcaagtacaaagtcatagcatgcattagcatttttaaaaggcagtaaccttttcttgtgggtgtatgcagtgcagctgggctcccaaaatcttatgcaaagacctccaaaactgcagctacctcaacttcgcatctgttcaactactatgaactcgtaatacgtgtatttg

SEQ ID NO: 40513 - DNA, 600 bp, Chicken  19866894275357_3
tagaaacctcaggctagctttattttgccaccattgctgtgaaatgcaagagcagtaacagagggttactggatgtccagatgtgatcaaagaatgtaacaggtttagagctcctttttaatctcctgtattgttctcaggattacagtactgtcaaaataatttaagattatgtgggaaacattgctgtgttcctggcttttccaatggaaggcagtatttgggtggaggctgaggctaaggaaaccaaacatcctgggtcaccgatgtaggtaatgggatttcatgtatgtgatgctwaagtaccagtgtgactgcttcaataatctgtacaggaaaaatttgccctgagtagaaaacctaaaaattattctatcaaatttgtatctcattttctagaaatgagtatttgtgtatcaagctcaataaatctgcgtttatgaggcagctctgagaaacaacaattctacattggccttcagctagacttgaggtgagtcatcacatagccaaaccttgtttttaggccagtcctgaaatccaggtttatctgaaatgtgggtctgccctgtctaggagtcccacaccttagctgatatt

SEQ ID NO: 40514 - DNA, 600 bp, Chicken  19866894275370_1
gagaagcaaatgtcttgagcagtgtttgtctttccccacaacagatacagagagatgctgcaactataatgcaaccatacttcacatccaatggccttgtaaccaaagcactcgaacatgctttcaagttggagcatattatggatctcacccgtttgcgctgtcttggttctctgttctccatgttgcatcaagcttgccgcaacgtagcccagtacaatgccaatcatccagactttccaatgcagatagatcaactggagcgctatatccaggtaaagatagtatgctgctgagtgrtttttctatttgatgtgtcagaattagtagctagacttcatttagtgtacatgaagttgtgttctattgctgtatgaacaatagcttcttttgctgcttcctacagaggtacttggtctatgcaatcctctggtctctctctggagacagccgtctgaaaatgagagcagagcttggagaatacattaggagaattactgctgttccgctgccaactgcgcccaacattcctataattgactatgaggtaaaacttctcttatgcaagcattgctgctttgtagtcttggaagcttgatt

SEQ ID NO: 40515 - DNA, 392 bp, Chicken  19866894275370_2
tatgaacaatagcttcttttgctgcttcctacagaggtacttggtctatgcaatcctctggtctctctctggagacagccgtctgaaaatgagagcagagcttggagaatacattaggagaattactgctgttccgctgccaactgcgcccaacattcctataattgactatgaggtaaaacttctcttatgcaagcattgctgctttgtagtcttggaagcttgatttagattttggagatgaagttggagaataaaacactaggttatcttcagttttacagttctggctttccagaragccatggtctaagctgcacgttcccataatgacatgaaattcaatgccacaagttattgtgtgggtcataagcacacatatatgttaacta

SEQ ID NO: 40516 - DNA, 600 bp, Chicken  19866894275378_1
ctctaattccttgatagtcctagcatggaaatggagatctctgttccctccagctagtgtcagtcattgaatcattcagcaagggttcagtcttgcagtaaagcatgtgcttttgttatatagtgttacatgaggagtcaccaaatcagagaattgtgagattgcaagggacctctgtggtccctgctcaagcagagacatttatagccacttccccagggacagagatggcttttgaagatccctaaggaggaagattccccaaactcttcggacagtctgtgccagtgctttgacacyacacagtagagtactgtccaatggagacttctttgtttctgtttgggctcactgcttcctgtcctttcactggatgcgactgaaaggagtttggctccttcccttctgcgctttcccattaggtgttgataatatcccccaagccttctcttytctaggtgtaactgatctaatatgaaagaacgttcagaagagactggcaagtacattgtgcccctgcacttcaggaaatagtgtagggagtgactggtcacagctgtagcaaagaaagctgactttacctaaggaaaaaggggacct

SEQ ID NO: 40517 - DNA, 600 bp, Chicken  19866894275378_2
ttgtgagattgcaagggacctctgtggtccctgctcaagcagagacatttatagccacttccccagggacagagatggcttttgaagatccctaaggaggaagattccccaaactcttcggacagtctgtgccagtgctttgacacyacacagtagagtactgtccaatggagacttctttgtttctgtttgggctcactgcttcctgtcctttcactggatgcgactgaaaggagtttggctccttcccttctgcgctttcccattaggtgttgataatatcccccaagccttctcttytctaggtgtaactgatctaatatgaaagaacgttcagaagagactggcaagtacattgtgcccctgcacttcaggaaatagtgtagggagtgactggtcacagctgtagcaaagaaagctgactttacctaaggaaaaaggggacctgaaagagtggcttttgttttaccgaattagctatgaaagctgagtgcaacatcatgtagtggaaatgtttttcccagagtttattagatgagtaccatccagacaagcttggaggggaaagaaggttatgtgtagttcagcccaacatagagt

SEQ ID NO: 40518 - DNA, 556 bp, Chicken  19866894275390_1
tctgctttatacttgttctctcttatatttcttacttcattctcttcctttttttctgaaaatcaacattcatgaaataatactaatgaattaaaagtagttcactcccaaataagcatacaaataattactatactttcaagctagcttctttctatcgtatcaacaaaattgatcctgttgaatgatagcagcttgtgctatagttaatataaaaattgattttcaaatcagaaacattacgcgtctattctaaatgcttcctaatttgtcatctagtttatttcattttctattacygtttccttctgacagagagtctggttgattctaatagtgatgaatcagattcagatcagtctgatgttccagagctggactctgaaattgaacaagagacacagatcacatatcgtagacaggtaaagttttttagttttaatggaagttggaatgtttcctggaacttatgaaggtcttttatcaggacctcctgaaatctgagatctgagaagagcaagtcagtagtaagtgggcaagacaacaacaacaaaat

SEQ ID NO: 40519 - DNA, 599 bp, Chicken  19866894275392_1
  misc_feature (1)..(10): n is any nucleotide
nnnnnnnnnntgctcttataaactatattctgcagtttataataccagcactttataaaatgacttggtgctttaaaaaaaaaaaagatcaggtgagctccaatttagctgtggaaaataagcatacattctaaataagaaaaactaatattaggctaaatctctcttcttactttgcactggtataaatcaggagcaagagcagacatacaaaccagggctgattctgatgtagcttaaataagtggcagctttgtttttaagttcagtgaattttggatcaatcccataattattatsattagagaggaattggatcttttttcttggcgtgtttttttttttccccagaccacaaatgatccctcagatgggatattcagtttttagcagctgtcattatttagaagttttacaagcactcttakagaaaaaaaaaactatacgagagaagttgtataaatagactaaaattaataggggaaccaaatagagccagttcctgcttcactaacctctacagctcctttacttttggtgttcttaaaatgtatttaactgcagttccatttacaagagatgtcagcggtgtttttgct

SEQ ID NO: 40520 - DNA, 600 bp, Chicken  19866894275392_2
ttctaaataagaaaaactaatattaggctaaatctctcttcttactttgcactggtataaatcaggagcaagagcagacatacaaaccagggctgattctgatgtagcttaaataagtggcagctttgtttttaagttcagtgaattttggatcaatcccataattattatsattagagaggaattggatcttttttcttggcgtgtttttttttttccccagaccacaaatgatccctcagatgggatattcagtttttagcagctgtcattatttagaagttttacaagcactcttakagaaaaaaaaaactatacgagagaagttgtataaatagactaaaattaataggggaaccaaatagagccagttcctgcttcactaacctctacagctcctttacttttggtgttcttaaaatgtatttaactgcagttccatttacaagagatgtcagcggtgtttttgctatggtggttgtgaaagccaaggtttttccatcactttacagactcacttctgaatgtaaccagtgtttggtagacatttcaagtggagtagtccaagcatttgcccttaacttgccagatggggacagt

SEQ ID NO: 40521 - DNA, 600 bp, Chicken  19866894275392_3
atcttctggagtgctaaaaggtaactaagagtgcccattccctgtttgtttgttctgtcgtttgcccattactcagcttgtgcttcattctgtgtttgctgccattgcacgctgcctgccatcctgctgctctggcacagcaccaggacatccgtgcactcttcacagccctttttgggaacaactatgtgtcaccatccgaccgctcaggaaaccacgcagctgggcaggaagagccaggaagggctcagcctccctgcacacttctagggcacaaaatgaatcaacttgccctgcccrgagccggttttccaagctcctgccagggatgaggagagaatccgtgcttctgcagacacctcagctcctgcctggcactgagagctgtgcgtggaggttcagtgcagccatcaccagatggtgctgctgcattcagccttgcagggtcactgtgtgcacgagtgttgggattcttggaagaaaatactgaactgtggatgttttcctgctgcttggatgtctggagagcaggcagggcatgctctgccttcatgtcactggccagttctctttgagaaccagacgttcgggctttggccg

SEQ ID NO: 40522 - DNA, 600 bp, Chicken  19866894275394_1
ctttaggatattctctaaagaagttactttcttttcagaaaaaatggctctactttcttatgttgaggaatctgctgacaaagtacctgatttcatgtgctcaggcatcaactttagcttgaaaaaaagaaataaataccacggggttcagtctgatgaacaaatccagcctgctgtaggtcatcagtgcttaatctgagcacagttctgaggtttccacgtagcagtgttttaggaatatcatcagtggttgttgcctgtagttcttcacctcatttagaactggaagtgaatgaaagmatttatacaaacactgtttctcagctgctgaaggagaacccttaacagtgtgtttccatatggcaaggctgtagtatttggcccatgattgttccagccaggagtagctacaaaaagggactagctcaggtccatttttccccctttctgcctgcagtgctgtgattatattctttgctgctttttaaatggctggatcagaaggagtgcattgctacccttttcttccaaggctttttcttcatctgttcttgtctaaaatcaccaagtcctgggagataaaatgcatttcatatgttg

SEQ ID NO: 40523 - DNA, 600 bp, Chicken  19866894275394_2
ccttttcttccaaggctttttcttcatctgttcttgtctaaaatcaccaagtcctgggagataaaatgcatttcatatgttggtcacttagggatgtggaaattaaaacatatcattttgttcttttgttttgctatgaatacttaaatataataaaactattacattttcttccccagcagatttgcagagaacattactgtgttcttgctctcaaaataggagtacaggctgtgtagtactctctttttgagcattctttcatgattttgggttcaaaaccaaaaacttaagttgttyggaagctctctgaaggaaaatccacacttcacttaagccagtggcaagaattcctcttgacagggattggtcagctctgagagcatggaagtgtgactagggggaaaaaaaagaaaaaaagccttgagcttggtggagaatygtgttaatattgctgaaggggtgttgtgttgtgtggtctcattggaaacgtggtcttctgacctaagagaaggagagatataatttaaggctgaagcattttctgaagaaatgcattcaaacatgtcataggccatgtattttcaaggtagaacaaca

SEQ ID NO: 40524 - DNA, 479 bp, Chicken  19866894275394_3
cttaaatataataaaactattacattttcttccccagcagatttgcagagaacattactgtgttcttgctctcaaaataggagtacaggctgtgtagtactctctttttgagcattctttcatgattttgggttcaaaaccaaaaacttaagttgttyggaagctctctgaaggaaaatccacacttcacttaagccagtggcaagaattcctcttgacagggattggtcagctctgagagcatggaagtgtgactagggggaaaaaaaagaaaaaaagccttgagcttggtggagaatygtgttaatattgctgaaggggtgttgtgttgtgtggtctcattggaaacgtggtcttctgacctaagagaaggagagatataatttaaggctgaagcattttctgaagaaatgcattcaaacatgtcataggccatgtattttcaaggtagaacaacaggagtaagaaaaactcataca

SEQ ID NO: 40525 - DNA, 408 bp, Chicken  19866894275402_1
atctcaaaggttattgacttctgagtgcttcacctcttcagtcaaacactacgcaactgaagtactgtagctggcatggggtgctgtttctgactgcactgtaaccatcccgaatgtctgaggcttatccaaaatcagagcggtgagttaaattacatgttcagcccagatctgctctagtgcagtcttgcttaggtaggctgatagcgatcttgcttacgccggttaatttggttggctccgatggagctgagtacttacttgcacctaggtaataaatacaacttggatatcaggttyggtgaggtgcccaggcaggtgaacaagagcagaagtaggagtctaattccttttccttgctaagtatgcttttacttttttttttggcatagtatcccgagaaacaaa

SEQ ID NO: 40526 - DNA, 600 bp, Chicken  19866894275403_1
tcttagacttctctaatcatttataaaacagataaatgctccgtcaagtcccagtgtagctgcactgctacaacctcctatttacagctggaaaaccactattaagcaacattatgcacagctgtgatataactacctgttaactggaacaagtgtaaaatgacaactttatgataaaaaaatctagaaagcacacctagaaacaggctgaaacagatcaacttacctcaagatctatcatgagttcaatgaatctctcacaataatgaactttgtccatagaaataggacctagacagraataaaatatttataattgatccacacaatatatttttaatatatttaattttttatacttctaatacaccagtatcagcttctaacaagatcagaaaaccaaccagcacattcttctcttttttctcaaacaatcctttccttcactgtgaaccagaaaatagttggatataagaaataaaagaaactagacatctagaagtgaatttatccactgaaaaaccaaataacatgccacacaaaaatgctcactttcacaagataccaggtctcctacatttcttaaaaacttttcatatc

SEQ ID NO: 40527 - DNA, 600 bp, Chicken  19866894275404_1
gaatataaacccaaaccaacttcaaaccatctagtaactgggtcagggagggactctggagcaaaggttcaggacataagctgtgtgacactgtgcacttaagctgaaaagcagtgcaaacattggatgttgctgaaaatcttcagtggaggataaagataggggtctgagagggcaacttatttatcaccagttccctgagagggaaggacaagaacatctgtatcactagacatcatttacagcgcagagcagctttctcagcatttgacacctgctttccttgcagaagcacacctwctctgctaggagatgttcttgtatctgcaaagtcaggagcaaaatatggacacaagatccattagcccaggaatgcatactcctttcaaatatttctgcttgtcacaacagtgccagctagcatatgaaagctggtctggaagctcagcctatgagtggaagctaagttttgcagctttatgcggtgtattatttttgaataaataaataatataagtgggtcaggacatggagcagaaaatttatctgttcattcttccttcagacctgtacacaacaccacaggccagcaggagaagg

SEQ ID NO: 40528 - DNA, 600 bp, Chicken  19866894275404_2
gtcaggagcaaaatatggacacaagatccattagcccaggaatgcatactcctttcaaatatttctgcttgtcacaacagtgccagctagcatatgaaagctggtctggaagctcagcctatgagtggaagctaagttttgcagctttatgcggtgtattatttttgaataaataaataatataagtgggtcaggacatggagcagaaaatttatctgttcattcttccttcagacctgtacacaacaccacaggccagcaggagaagggaggtaatcatccccctgtactcagccctgrtgaggcctcacctcgagtactgtgtccagttctgggcccctcactgcaagaaagacatcgaggccctcaagcgtattcaaagaagggcaacaaagctggtgaggggtctggagcacagaccttatgaggagcggctgaaggagctgggattgttcattctggagaagaggaggctcaggggagaccttattgctctctataactacctgaagggaggttgtagtgagctgggggtcagcctcttctctcgtgtgactagtgataggactagagggaatggcttcaagttgtgtcagagga

SEQ ID NO: 40529 - DNA, 600 bp, Chicken  19866894275405_1
acaatgctttgccaaagaaggcttgccaaaaattttttgaccgaagaaagagtaggcatctgtagcatctgcagatgagatcgtataaaatgtccctgcagcaagactgccctgtctccacggaaagcttcaaggtaagtggatgggatctgcagccgtgcaggagtctttctgtgttacagcattcctctgcctccagtgctcatttccaagaggaggctcaattcctcagctcgagtttttaatctgctttcaagacacctgcacattttcactctggaattctgtgcagctgcaagyagggacttgccatttctgttttacagcaytgaccagctgccaggctgcaagccacccatctggtgtcacaagaggtaagaacctgatttattcatgcttttgggtgggatttctggatggatgaacaatcacctttttcaccctgcattcaaagctggtgtgattacagtaggcaggtggtggggtgctcatggctggcaaggttttcaaatggctgtgtttgtatctccctgcctccaatggcagacgaggaaattcccattggaatgctcttcatttctgcttaactgaccaaacagg

SEQ ID NO: 40530 - DNA, 600 bp, Chicken  19866894275405_2
aaattttttgaccgaagaaagagtaggcatctgtagcatctgcagatgagatcgtataaaatgtccctgcagcaagactgccctgtctccacggaaagcttcaaggtaagtggatgggatctgcagccgtgcaggagtctttctgtgttacagcattcctctgcctccagtgctcatttccaagaggaggctcaattcctcagctcgagtttttaatctgctttcaagacacctgcacattttcactctggaattctgtgcagctgcaagyagggacttgccatttctgttttacagcaytgaccagctgccaggctgcaagccacccatctggtgtcacaagaggtaagaacctgatttattcatgcttttgggtgggatttctggatggatgaacaatcacctttttcaccctgcattcaaagctggtgtgattacagtaggcaggtggtggggtgctcatggctggcaaggttttcaaatggctgtgtttgtatctccctgcctccaatggcagacgaggaaattcccattggaatgctcttcatttctgcttaactgaccaaacagggagtgaggcgtgctggcttcacatcactg

SEQ ID NO: 40531 - DNA, 600 bp, Chicken  19866894275408_1
cttgtctgaaacagcaattgaaacagaggaggttccatctgaacaacaggaaatgtttttttattgagaagaagacagagcacaggaacaagttgctcaagagaggttgtggagtcttccctacttggagatattcaaaagtcatctggatattctagacaacctgttctgtgtgtctctgcttgagcaagggttggatcaggtgacttgcagaggtcccttccaacttcaatcattatgtgattctgtgaagaactattttgctcttttttttattgatacggtatttccaaaatttcyttttttytttttttttttttttaccaagtcttaatttgggaattatatcccattcagtctaaacaagactttcaacgagcttgatgaaaatcactctcctacgcctctatgactgaatgtaaataagactgaacaaaaaaggaaaggtttttacagtttttgattagctccaattagttagctccaattttatctgagtaaaaataaataggctgtagattttctttctttgaattgctggtacttgaccatagcacatgacttttgaaaacagatcacttattaaaggacttaggcata

SEQ ID NO: 40532 - DNA, 600 bp, Chicken  19866894275408_2
ttgtctgaaacagcaattgaaacagaggaggttccatctgaacaacaggaaatgtttttttattgagaagaagacagagcacaggaacaagttgctcaagagaggttgtggagtcttccctacttggagatattcaaaagtcatctggatattctagacaacctgttctgtgtgtctctgcttgagcaagggttggatcaggtgacttgcagaggtcccttccaacttcaatcattatgtgattctgtgaagaactattttgctcttttttttattgatacggtatttccaaaatttctytttttytttttttttttttttaccaagtcttaatttgggaattatatcccattcagtctaaacaagactttcaacgagcttgatgaaaatcactctcctacgcctctatgactgaatgtaaataagactgaacaaaaaaggaaaggtttttacagtttttgattagctccaattagttagctccaattttatctgagtaaaaataaataggctgtagattttctttctttgaattgctggtacttgaccatagcacatgacttttgaaaacagatcacttattaaaggacttaggcatat

SEQ ID NO: 40533 - DNA, 600 bp, Chicken  19866894275408_3
gaaacagcaattgaaacagaggaggttccatctgaacaacaggaaatgtttttttattgagaagaagacagagcacaggaacaagttgctcaagagaggttgtggagtcttccctacttggagatattcaaaagtcatctggatattctagacaacctgttctgtgtgtctctgcttgagcaagggttggatcaggtgacttgcagaggtcccttccaacttcaatcattatgtgattctgtgaagaactattttgctcttttttttattgatacggtatttccaaaatttctttttttytttttttttttttttaccaagtcttaatttgggaattatatcccattcagtctaaacaagactttcaacgagcttgatgaaaatcactctcctacgcctctatgactgaatgtaaataagactgaacaaaaaaggaaaggtttttacagtttttgattagctccaattagttagctccaattttatctgagtaaaaataaataggctgtagattttctttctttgaattgctggtacttgaccatagcacatgacttttgaaaacagatcacttattaaaggacttaggcatatcatcag

SEQ ID NO: 40534 - DNA, 600 bp, Chicken  19866894275410_1
gtcaccttccacgttcattgacagcacacctgctaaagcaggtctgatacgtatgctgattaatttctcacgctgttttatcagggattacagcctgtctctatggcattaactaacagacgggaaaggcagatttctcagcttcctcttaacagctcctaaatacgcctgttactctttgctgtctgctagcagttacacagcttacttctaactgtggcagtttagagctggaacgttttgctttgctttaggagtctgtaggggaaaagaacctcgttccttctgggtgtggttctrtgtgcaaaccwatctgagctgtgcctgccgcagtcctgccctgacrcagccgtcccagtatccctgctctgccgtgtccgtggggctgctcggaggagcggctgacagcgcctaaagtgcycrgtttgacttcacccgaatgcagccggaggcagccactggtctgatagggccrtggcagaacagcctttgtctggagaggttttattgttgttatatttccatggcagtacacaggttccatttcagagccgggccgctgtcatgcctcctccagacatcyacctgtttgcccatcaa

SEQ ID NO: 40535 - DNA, 600 bp, Chicken  19866894275410_2
cgttcattgacagcacacctgctaaagcaggtctgatacgtatgctgattaatttctcacgctgttttatcagggattacagcctgtctctatggcattaactaacagacgggaaaggcagatttctcagcttcctcttaacagctcctaaatacgcctgttactctttgctgtctgctagcagttacacagcttacttctaactgtggcagtttagagctggaacgttttgctttgctttaggagtctgtaggggaaaagaacctcgttccttctgggtgtggttctrtgtgcaaaccwatctgagctgtgcctgccgcagtcctgccctgacrcagccgtcccagtatccctgctctgccgtgtccgtggggctgctcggaggagcggctgacagcgcctaaagtgcycrgtttgacttcacccgaatgcagccggaggcagccactggtctgatagggccrtggcagaacagcctttgtctggagaggttttattgttgttatatttccatggcagtacacaggttccatttcagagccgggccgctgtcatgcctcctccagacatcyacctgtttgcccatcaaccctgcactta

SEQ ID NO: 40536 - DNA, 600 bp, Chicken  19866894275410_3
atacgtatgctgattaatttctcacgctgttttatcagggattacagcctgtctctatggcattaactaacagacgggaaaggcagatttctcagcttcctcttaacagctcctaaatacgcctgttactctttgctgtctgctagcagttacacagcttacttctaactgtggcagtttagagctggaacgttttgctttgctttaggagtctgtaggggaaaagaacctcgttccttctgggtgtggttctrtgtgcaaaccwatctgagctgtgcctgccgcagtcctgccctgacrcagccgtcccagtatccctgctctgccgtgtccgtggggctgctcggaggagcggctgacagcgcctaaagtgcycrgtttgacttcacccgaatgcagccggaggcagccactggtctgatagggccrtggcagaacagcctttgtctggagaggttttattgttgttatatttccatggcagtacacaggttccatttcagagccgggccgctgtcatgcctcctccagacatcyacctgtttgcccatcaaccctgcacttatcccaccctgaactatctaacagacggtgcttaca

SEQ ID NO: 40537 - DNA, 600 bp, Chicken  19866894275410_4
gggaaaggcagatttctcagcttcctcttaacagctcctaaatacgcctgttactctttgctgtctgctagcagttacacagcttacttctaactgtggcagtttagagctggaacgttttgctttgctttaggagtctgtaggggaaaagaacctcgttccttctgggtgtggttctrtgtgcaaaccwatctgagctgtgcctgccgcagtcctgccctgacrcagccgtcccagtatccctgctctgccgtgtccgtggggctgctcggaggagcggctgacagcgcctaaagtgcycrgtttgacttcacccgaatgcagccggaggcagccactggtctgatagggccrtggcagaacagcctttgtctggagaggttttattgttgttatatttccatggcagtacacaggttccatttcagagccgggccgctgtcatgcctcctccagacatcyacctgtttgcccatcaaccctgcacttatcccaccctgaactatctaacagacggtgcttacagcattaaacctgaagtggtgctgctcttatgtacaggtggccctacgaaactatggacagtaattctgattttgg

SEQ ID NO: 40538 - DNA, 600 bp, Chicken  19866894275410_5
gaaaggcagatttctcagcttcctcttaacagctcctaaatacgcctgttactctttgctgtctgctagcagttacacagcttacttctaactgtggcagtttagagctggaacgttttgctttgctttaggagtctgtaggggaaaagaacctcgttccttctgggtgtggttctrtgtgcaaaccwatctgagctgtgcctgccgcagtcctgccctgacrcagccgtcccagtatccctgctctgccgtgtccgtggggctgctcggaggagcggctgacagcgcctaaagtgcycrgtttgacttcacccgaatgcagccggaggcagccactggtctgatagggccrtggcagaacagcctttgtctggagaggttttattgttgttatatttccatggcagtacacaggttccatttcagagccgggccgctgtcatgcctcctccagacatcyacctgtttgcccatcaaccctgcacttatcccaccctgaactatctaacagacggtgcttacagcattaaacctgaagtggtgctgctcttatgtacaggtggccctacgaaactatggacagtaattctgattttggga

SEQ ID NO: 40539 - DNA, 600 bp, Chicken  19866894275410_6
tctttgctgtctgctagcagttacacagcttacttctaactgtggcagtttagagctggaacgttttgctttgctttaggagtctgtaggggaaaagaacctcgttccttctgggtgtggttctrtgtgcaaaccwatctgagctgtgcctgccgcagtcctgccctgacrcagccgtcccagtatccctgctctgccgtgtccgtggggctgctcggaggagcggctgacagcgcctaaagtgcycrgtttgacttcacccgaatgcagccggaggcagccactggtctgatagggccrtggcagaacagcctttgtctggagaggttttattgttgttatatttccatggcagtacacaggttccatttcagagccgggccgctgtcatgcctcctccagacatcyacctgtttgcccatcaaccctgcacttatcccaccctgaactatctaacagacggtgcttacagcattaaacctgaagtggtgctgctcttatgtacaggtggccctacgaaactatggacagtaattctgattttgggattctgtgccactggcagaatcacrgcacagaactgagtcagcaaagacacag

SEQ ID NO: 40540 - DNA, 600 bp, Chicken  19866894275410_7
ttctgggtgtggttctrtgtgcaaaccwatctgagctgtgcctgccgcagtcctgccctgacrcagccgtcccagtatccctgctctgccgtgtccgtggggctgctcggaggagcggctgacagcgcctaaagtgcycrgtttgacttcacccgaatgcagccggaggcagccactggtctgatagggccrtggcagaacagcctttgtctggagaggttttattgttgttatatttccatggcagtacacaggttccatttcagagccgggccgctgtcatgcctcctccagacatcyacctgtttgcccatcaaccctgcacttatcccaccctgaactatctaacagacggtgcttacagcattaaacctgaagtggtgctgctcttatgtacaggtggccctacgaaactatggacagtaattctgattttgggattctgtgccactggcagaatcacrgcacagaactgagtcagcaaagacacagcgccctataatgcctctgttccttcaggtgtaggtaaaagctcccccaaagtgcagataattgacaaattcagctaaataaaatgaacggcagaacttctcatctctt

SEQ ID NO: 40541 - DNA, 452 bp, Chicken  19866894275410_8
ggaggcagccactggtctgatagggccrtggcagaacagcctttgtctggagaggttttattgttgttatatttccatggcagtacacaggttccatttcagagccgggccgctgtcatgcctcctccagacatcyacctgtttgcccatcaaccctgcacttatcccaccctgaactatctaacagacggtgcttacagcattaaacctgaagtggtgctgctcttatgtacaggtggccctacgaaactatggacagtaattctgattttgggattctgtgccactggcagaatcacrgcacagaactgagtcagcaaagacacagcgccctataatgcctctgttccttcaggtgtaggtaaaagctcccccaaagtgcagataattgacaaattcagctaaataaaatgaacggcagaacttctcatctcttcctctctcaacatctc

SEQ ID NO: 40542 - DNA, 600 bp, Chicken  19866894275411_1
atctgaggaggagtaccagtgactccagtagagaatgtgagacagagccagggactaccaaagctctgatggtgacaattcatcaattggacttgataatcttagaggtcttttccaaccctaatgactatgattctaaaaattaggaaaaatgcagttaggtgtgataggaagcagctaagcaagcaaaatggggaaaagctattgaggcaccaatgaggtcagggcaagcgcagcctagaaatgagaatggtgtctgtgtagggagaggggtttggaggtcagaggctcaaagaactygggcactgctttacacagtgagtgcagaggaacgtggtggggctggctggaggaggctggtacaggataccaaaacgagcagaggagatggcaaagctgtcagggtgcactgacagataggtctggctcagattagagagaagcgtctggcttggagagagggaggaggtgaaggagaagggtctgtgccacccygatcttgcttctcttcagcctctccctctgtgtgaactacagtgccactttctattttaagcagaaatgggagtgcctgcaggaattaggagttcaggtcatgtt

SEQ ID NO: 40543 - DNA, 600 bp, Chicken  19866894275411_2
gaaaagctattgaggcaccaatgaggtcagggcaagcgcagcctagaaatgagaatggtgtctgtgtagggagaggggtttggaggtcagaggctcaaagaactygggcactgctttacacagtgagtgcagaggaacgtggtggggctggctggaggaggctggtacaggataccaaaacgagcagaggagatggcaaagctgtcagggtgcactgacagataggtctggctcagattagagagaagcgtctggcttggagagagggaggaggtgaaggagaagggtctgtgccacccygatcttgcttctcttcagcctctccctctgtgtgaactacagtgccactttctattttaagcagaaatgggagtgcctgcaggaattaggagttcaggtcatgttattaaccactacctcgcccagaaacagatacagatcttctgtaagaaacttggggttayttgtgtatcactttctgatctttgagcttgaatggtggtttttaacatagctataaagctgttttattatgttaatgcttattgtagcaaattaaaaagtaatcaatctattgattaatctaacctggttaaggga

SEQ ID NO: 40544 - DNA, 597 bp, Chicken  19866894275411_3
gtacaggataccaaaacgagcagaggagatggcaaagctgtcagggtgcactgacagataggtctggctcagattagagagaagcgtctggcttggagagagggaggaggtgaaggagaagggtctgtgccacccygatcttgcttctcttcagcctctccctctgtgtgaactacagtgccactttctattttaagcagaaatgggagtgcctgcaggaattaggagttcaggtcatgttattaaccactacctcgcccagaaacagatacagatcttctgtaagaaacttggggttayttgtgtatcactttctgatctttgagcttgaatggtggtttttaacatagctataaagctgttttattatgttaatgcttattgtagcaaattaaaaagtaatcaatctattgattaatctaacctggttaagggattttgggagttgttttgttaggagataatgaggaaaaattgttccttgcaagtcagctgtctggcattattttaatcttagaaaactgttggaattatacaaaaagtataattaaccaaacttgttgattaatttttagtacagtaatgaattgcatatag

SEQ ID NO: 40545 - DNA, 600 bp, Chicken  19866894275413_1
aaaacagcattttgtagctgtgaatttgctctatcaactggtgttactttactcttcctatctgttgtggtttccatggaaataaataggaggcattactttcagagcaacctatgcatataaatccaagcactactcttctgcacacatttgatccctgaagaagagttttggcatgttagttatttgtcctactggaaagggatgtgagggcagaatcttctaattttcatgttaatgaacgtgttctagaaaatttgtcttatagttggaatcttttattttacattttctggaaartgttttattayacatattattttgatacttgattttgttgctgtctgtattaccatatcaaagaacccctcactacgctgtgtacaagaaaacaatagtttcgtacatggtcttactgagcttgtattaattatttgcaatggcttgtgttctcacttaatttcatggctattttctctttgaaaaaacatatttctgaggaagtgctgaataatttacaagattcacatctaattaagtgaaacagtggtactacctcttcttttgtgttggatattagcgggacaacaattatagagt

SEQ ID NO: 40546 - DNA, 600 bp, Chicken  19866894275413_2
ttgtagctgtgaatttgctctatcaactggtgttactttactcttcctatctgttgtggtttccatggaaataaataggaggcattactttcagagcaacctatgcatataaatccaagcactactcttctgcacacatttgatccctgaagaagagttttggcatgttagttatttgtcctactggaaagggatgtgagggcagaatcttctaattttcatgttaatgaacgtgttctagaaaatttgtcttatagttggaatcttttattttacattttctggaaartgttttattayacatattattttgatacttgattttgttgctgtctgtattaccatatcaaagaacccctcactacgctgtgtacaagaaaacaatagtttcgtacatggtcttactgagcttgtattaattatttgcaatggcttgtgttctcacttaatttcatggctattttctctttgaaaaaacatatttctgaggaagtgctgaataatttacaagattcacatctaattaagtgaaacagtggtactacctcttcttttgtgttggatattagcgggacaacaattatagagtttcactggcaa

SEQ ID NO: 40547 - DNA, 600 bp, Chicken  19866894275422_1
ttatgaatttttagagagtttatttgaaactggagaccctaaagggaggaactggtaaagcctccctgtactgtgaatgtggatctgaagcaggggatacttggcagtgtggtgctgggaaggtgggaagtgagggtcataggagaacatgagatgggacccagttgtctcagctgggagataatggtatgttcttgactgcactgtctcctctaccaagtctcaggttaattgaataggaaaacataatctggctaattttattcattattattattttttttatgcttacgtttaatragaattctgacttcctggatttgtcagaagtagcaagaatatgcaccttttccttgtcatgaaggattcaaacttatcttagtctaaacatgcccaatttttgttttcttctagcaccaataccttagacatttggcctatcccaacatatgaaagatgtatttgccttggcagagaaacaatttygagcctgactgatgccagaccctaggcagtactaattatgcctctttttggtgatatgcaagagtctttcatcagaattaaggcttagggcattcaaaatctggtagattgtag

SEQ ID NO: 40548 - DNA, 600 bp, Chicken  19866894275422_2
gtatgttcttgactgcactgtctcctctaccaagtctcaggttaattgaataggaaaacataatctggctaattttattcattattattattttttttatgcttacgtttaatragaattctgacttcctggatttgtcagaagtagcaagaatatgcaccttttccttgtcatgaaggattcaaacttatcttagtctaaacatgcccaatttttgttttcttctagcaccaataccttagacatttggcctatcccaacatatgaaagatgtatttgccttggcagagaaacaatttygagcctgactgatgccagaccctaggcagtactaattatgcctctttttggtgatatgcaagagtctttcatcagaattaaggcttagggcattcaaaatctggtagattgtagctggatgagaccaaggttatgtttctagcacagtgaacagtttcygtcccaaaaatcaaatgtttgtcatggctctattttcatgttgtaccaccatttctctagtgcctaacaacagagtacatatacctatgaagctcagtatgcttaaaggtacagagagcatttcagctttctgcagattgt

SEQ ID NO: 40549 - DNA, 600 bp, Chicken  19866894275422_3
ccttttccttgtcatgaaggattcaaacttatcttagtctaaacatgcccaatttttgttttcttctagcaccaataccttagacatttggcctatcccaacatatgaaagatgtatttgccttggcagagaaacaatttygagcctgactgatgccagaccctaggcagtactaattatgcctctttttggtgatatgcaagagtctttcatcagaattaaggcttagggcattcaaaatctggtagattgtagctggatgagaccaaggttatgtttctagcacagtgaacagtttcygtcccaaaaatcaaatgtttgtcatggctctattttcatgttgtaccaccatttctctagtgcctaacaacagagtacatatacctatgaagctcagtatgcttaaaggtacagagagcatttcagctttctgcagattgttgcaaacttctgcagtccttatttcatatgcaaatgctccttgtttgattgatgagatatacccgtgaatgctggaggctggtatgtaatgaaaaacataatttaacaaaatcctaaaaaaattaatttatccaacgtaactcttctgatctcagatct

SEQ ID NO: 40550 - DNA, 600 bp, Chicken  19866894275422_4
caacaaaaagtagtgtttaagccaaactgagagtagtctacttctagagagtagtcatagcagaagggttgagtttgcattaatgggtgagtagtactaaccccctgtaaaatcttgacagggataataaaggtcctccctactgccagcagttacagcaggttctcctttttctccataaaaagagatttaagggtccagtcatgggtttcgattttcacaactgccataagaactatagttgctctcctactgctggcccagtgagagtgaatgccagcaaacccagcagcactgagyactgtagcactagactggagcaaggttgggatgaaactrggcactctgcttgctgcactaagcaggtgggcagccacatgccgcattagcctccacttccaagtgaccttcaccagcagccsagcgcacaacatactgcattaatcccttctggaggtcacaacatggtggctaagtgtgctgcagtgcagatccaagagaaacagttgcaaatgcctagccagatgcagatggaaaaaatgtgcttttcatgtagcctgttcagaagactgaataatttattagtgcatcacatgctat

SEQ ID NO: 40551 - DNA, 600 bp, Chicken  19866894275422_5
acttctagagagtagtcatagcagaagggttgagtttgcattaatgggtgagtagtactaaccccctgtaaaatcttgacagggataataaaggtcctccctactgccagcagttacagcaggttctcctttttctccataaaaagagatttaagggtccagtcatgggtttcgattttcacaactgccataagaactatagttgctctcctactgctggcccagtgagagtgaatgccagcaaacccagcagcactgagyactgtagcactagactggagcaaggttgggatgaaactrggcactctgcttgctgcactaagcaggtgggcagccacatgccgcattagcctccacttccaagtgaccttcaccagcagccsagcgcacaacatactgcattaatcccttctggaggtcacaacatggtggctaagtgtgctgcagtgcagatccaagagaaacagttgcaaatgcctagccagatgcagatggaaaaaatgtgcttttcatgtagcctgttcagaagactgaataatttattagtgcatcacatgctatttttcgaaactatgccactttgaaggaaatcgtatattt

SEQ ID NO: 40552 - DNA, 600 bp, Chicken  19866894275422_6
gataataaaggtcctccctactgccagcagttacagcaggttctcctttttctccataaaaagagatttaagggtccagtcatgggtttcgattttcacaactgccataagaactatagttgctctcctactgctggcccagtgagagtgaatgccagcaaacccagcagcactgagyactgtagcactagactggagcaaggttgggatgaaactrggcactctgcttgctgcactaagcaggtgggcagccacatgccgcattagcctccacttccaagtgaccttcaccagcagccsagcgcacaacatactgcattaatcccttctggaggtcacaacatggtggctaagtgtgctgcagtgcagatccaagagaaacagttgcaaatgcctagccagatgcagatggaaaaaatgtgcttttcatgtagcctgttcagaagactgaataatttattagtgcatcacatgctatttttcgaaactatgccactttgaaggaaatcgtatattttaaatcataagcaggtcctgctaacaaagtggatcacaaatgccaaagccgacaaaccattgcgtgtccaccaatttcatgcc

SEQ ID NO: 40553 - DNA, 600 bp, Chicken  19866894275422_7
tgcactcaaaccccagtacggagtccttgaggtgacccttctcagagtgcccccagtgcctccatgcagcctctcagtaacagactatcaaaggctgcggggtggattaattccattggcgtttatggagctgagcgaggctgacacatgaaatacaatttgcctgtctcagtgtgggtattgtgttctgcactgtaatgcagcacaggtgttacaggccaggaaggagacgcgctggcagaagtgtgataaggaaagtcgtgaaggaaaccaagccatggcatgttggggagaggaggygaggcagagggccctctgccctgcagggtacygctgggccctgacgctccccccaagtcttgcagcatatctctaggtaccatatggtttgaagatgtgcttttgaggggtggaagagaaggaggaagcatttacgtatggggagaataattgcttccctcttccactccttctcctcctgtgccctgagcatcaactttgcatcatcataagaaggacatgcaaggaggcattatagaaataacctcaactggaactcatgggagagataagagagaaaagaagacaggatagcattct

SEQ ID NO: 40554 - DNA, 600 bp, Chicken  19866894275422_8
tgacccttctcagagtgcccccagtgcctccatgcagcctctcagtaacagactatcaaaggctgcggggtggattaattccattggcgtttatggagctgagcgaggctgacacatgaaatacaatttgcctgtctcagtgtgggtattgtgttctgcactgtaatgcagcacaggtgttacaggccaggaaggagacgcgctggcagaagtgtgataaggaaagtcgtgaaggaaaccaagccatggcatgttggggagaggaggygaggcagagggccctctgccctgcagggtacygctgggccctgacgctccccccaagtcttgcagcatatctctaggtaccatatggtttgaagatgtgcttttgaggggtggaagagaaggaggaagcatttacgtatggggagaataattgcttccctcttccactccttctcctcctgtgccctgagcatcaactttgcatcatcataagaaggacatgcaaggaggcattatagaaataacctcaactggaactcatgggagagataagagagaaaagaagacaggatagcattctaacagcacatggtgtatctcacagcagcgaga

SEQ ID NO: 40555 - DNA, 600 bp, Chicken  19866894275423_1
gctgcatgggtgaactcggagatcttctcatttaaaccacttagcgcattagtttacagctttactgctgcccccagaggtgataaagggtatgggaccactcatggggtactcaaacccagatctcaggaaggcttctgtatggccagacttttgtgagcattctgcacccagctggtgaataaaactcccccctttcctacaaccctcagaaacctccccatccagctgagcctcgtaagtacctgaggaaagaccacatggagaaacagaatttattccgcttcatattgagcagcrctctgcaaatagcttcacctgtggctgcatttctgaatatactgaaacgtatggaatactgagatgatccaggagatgacagcattactggattttgctcaagagcacacacaaacaagcactcaatttttacacacagttgagttttaaagggattgaatttcaaaataggattccagaatagcagatgaagttaatgtgaatatggctgtgttcaggatttttagcagtgcacttccttaaactgtcaatgttccagttcagcacagtgagcaccctcctgcctgctccagcacaagg

SEQ ID NO: 40556 - DNA, 600 bp, Chicken  19866894275426_1
cccagtttctcaattcccaacactgccattacattaagcaaacactataattattttaaaagcaattctcctttgctttgatgaaaataaatagagccaaaatgtttccaaaattgttttaaacaagactttactacacctaggctggtttgctgaaatgttttcctgatcagttatttttcaagcagcctgatacaaataaaactgaggatatttaattagagattagtagaaaattagcattgatgtcaacactgaactgacaaagtgactatatagtaattcacactgtccagaagkgtttttaagcaagtaacacctacaattataagaaaagtgaaagaatggtgtcaccgtgcactcgctttgtatgctaaataaaagcactggcagtcactgttaattttgtcaatgcatgggacctctgtacaaaggaaattacatcttttgcatcaggtggaaggcctgcaagaccacaaaaggtaacagagacccagaactgctatcttgtatcgaactacttcatttctcctggaacccatttcatcatcgatactgttaaatgggaacacgcttcaaattttgtctatagaataggac

SEQ ID NO: 40557 - DNA, 600 bp, Chicken  19866894275429_1
aaaagaaagagctgctcaggcggatagatcaggtgaggagtcagctttggagttggggtggacaatggttggctgctagcgtgaggtattacactgttattgcactcagatcaaggtcaaggaacagtttaaaggaaaaatgttttaagaaatagcataggagcaattttggttccttggatacatcagtgtttcccaagatacaaaacaattcacatacacaagggagtaaaggggaaatgctcgtaatccctgtaaagcctgtgagaaatcagctccaggttaaaggccatttcctgytttatttccattaccctggacagggatggtcacattgattcattctgtttgaaagcttatgtgcatcccttcatgcttacacactcaatcccacgcgcagggttattcaaggtttgatatacagcttcctgccagaaaagtctgttcatctgtgaatttgccaccaaagatatagctactgtaactattcctgaagagccctgactgacagcaaataagcagtttgcaatgctaaatatttggaaggcatttctgaccttggtcacatgaattttgtgcacacctctgctatcatttgca

SEQ ID NO: 40558 - DNA, 600 bp, Chicken  19866894275437_1
tttttaaatggcttttctgtttctcactttttactaaaccaaacaaatagcaagttccatagcagccatgcttaacgcctcaataacagtggtaattccttttgcatcagttgatgcaaaaaaaaataaaaaaaaaatctttagatgttattcatttgttagttttggaaactctttaaaagagaatcttattttttccctcggaaattggagtcagtgatgaatcataccatgttcacagtgctgagtaacatgcaaattttggaatacggcacgaagattttgtaggtggacactttwcagggtggaaactggtcagctggtgaggaggggatttgtctaccggtgttcattagaagatatgtttgtaacactgtcatctaggctggactttgggaactgagctagggrcctcctgatttggaagtgccatctgaaataagggagctcagtcccatgtcttgcctggctgtgggatcctgcattgcacagctgggtgtgtgggggagctgcattgcacrctgctcagcacgagcatgctttgtttccatctcacctatgccattaagagcagcataaatgtaatagtcatttgaattt

SEQ ID NO: 40559 - DNA, 600 bp, Chicken  19866894275437_2
tgatgcaaaaaaaaataaaaaaaaaatctttagatgttattcatttgttagttttggaaactctttaaaagagaatcttattttttccctcggaaattggagtcagtgatgaatcataccatgttcacagtgctgagtaacatgcaaattttggaatacggcacgaagattttgtaggtggacactttwcagggtggaaactggtcagctggtgaggaggggatttgtctaccggtgttcattagaagatatgtttgtaacactgtcatctaggctggactttgggaactgagctagggrcctcctgatttggaagtgccatctgaaataagggagctcagtcccatgtcttgcctggctgtgggatcctgcattgcacagctgggtgtgtgggggagctgcattgcacrctgctcagcacgagcatgctttgtttccatctcacctatgccattaagagcagcataaatgtaatagtcatttgaatttgctcatgaagcagagttctcctttgcacttgtacagtctatcaaaaatgaccgggtaagggtagatgagaaatgacctggaagtttgtctcagggtaataaagagaaaaat

SEQ ID NO: 40560 - DNA, 600 bp, Chicken  19866894275437_3
gaatcataccatgttcacagtgctgagtaacatgcaaattttggaatacggcacgaagattttgtaggtggacactttwcagggtggaaactggtcagctggtgaggaggggatttgtctaccggtgttcattagaagatatgtttgtaacactgtcatctaggctggactttgggaactgagctagggrcctcctgatttggaagtgccatctgaaataagggagctcagtcccatgtcttgcctggctgtgggatcctgcattgcacagctgggtgtgtgggggagctgcattgcacrctgctcagcacgagcatgctttgtttccatctcacctatgccattaagagcagcataaatgtaatagtcatttgaatttgctcatgaagcagagttctcctttgcacttgtacagtctatcaaaaatgaccgggtaagggtagatgagaaatgacctggaagtttgtctcagggtaataaagagaaaaataggagttccttaggacaggcttgttaacataattgtaatatatgtgatggcagtgccaaaaaaagagaactcaccatagccaatggaaatattgtactatgtaaatattg

SEQ ID NO: 40561 - DNA, 599 bp, Chicken  19866894275442_1
  misc_feature (1)..(68): n is any nucleotide
nnnnnnnnnnnnnnnnnnnnnnnnnnnnnnnnnnnnnnnnnnnnnnnnnnnnnnnnnnnnnnnnnnnnggtgttgcggagggttgctcagcacgcgtcggatgtgctgagatgttagaagctgccgtgtttcacccccagtgccacatatccgtgggggcacatcaatgttttttaagactgaaggaggaaaatgcgatggaaatgcaccaggaagacgatggtcacagccacgtttaatctcctgggggcagctgcgtgcttactcagctgggaggcagtggctgatgagagctctgcrtgtcccaaagcctctggtggggagcaaaggggacagggcrggagtggagacaggcttattggaccatggggttcagctgccaaacctatttttgagcctttttgcaggaaaaaaagtgcaccaccayccctcccatacatcaccaccctggtaactgggagccaccacaaaccccagggtgacaccatagctgctcagggcagacagaagagtgagacccccggtgtctgtccaatgtccccccctcattattccctacattcctccccatgttcctccttgtctccatccagtgttcc

SEQ ID NO: 40562 - DNA, 599 bp, Chicken  19866894275442_2
  misc_feature (1)..(28): n is any nucleotide
nnnnnnnnnnnnnnnnnnnnnnnnnnnnggtgttgcggagggttgctcagcacgcgtcggatgtgctgagatgttagaagctgccgtgtttcacccccagtgccacatatccgtgggggcacatcaatgttttttaagactgaaggaggaaaatgcgatggaaatgcaccaggaagacgatggtcacagccacgtttaatctcctgggggcagctgcgtgcttactcagctgggaggcagtggctgatgagagctctgcrtgtcccaaagcctctggtggggagcaaaggggacagggcrggagtggagacaggcttattggaccatggggttcagctgccaaacctatttttgagcctttttgcaggaaaaaaagtgcaccaccayccctcccatacatcaccaccctggtaactgggagccaccacaaaccccagggtgacaccatagctgctcagggcagacagaagagtgagacccccggtgtctgtccaatgtccccccctcattattccctacattcctccccatgttcctccttgtctccatccagtgttccctaacacccttctgagtctccttgccacgtccccctgctc

SEQ ID NO: 40563 - DNA, 600 bp, Chicken  19866894275442_3
gtttcacccccagtgccacatatccgtgggggcacatcaatgttttttaagactgaaggaggaaaatgcgatggaaatgcaccaggaagacgatggtcacagccacgtttaatctcctgggggcagctgcgtgcttactcagctgggaggcagtggctgatgagagctctgcrtgtcccaaagcctctggtggggagcaaaggggacagggcrggagtggagacaggcttattggaccatggggttcagctgccaaacctatttttgagcctttttgcaggaaaaaaagtgcaccaccayccctcccatacatcaccaccctggtaactgggagccaccacaaaccccagggtgacaccatagctgctcagggcagacagaagagtgagacccccggtgtctgtccaatgtccccccctcattattccctacattcctccccatgttcctccttgtctccatccagtgttccctaacacccttctgagtctccttgccacgtccccctgctccctccctgtccccagcacgagctcctccttgccctgcacattacctccttgtctcctgatctccctcccagcacctatccttgtccta

SEQ ID NO: 40564 - DNA, 599 bp, Chicken  19866894275443_1
  misc_feature (1)..(13): n is any nucleotide
nnnnnnnnnnnnntttcctctctttccctacttaaaagttaagacatatacctatttttgaggaagtaattaggacgagtaattgttgccttgaggctgagctctccagatgacctggcgatgttgaacacttcttaagatcctattatctatttctcagtatccatccttatttttctcacattggtaaggacacaaatcttcttacagtcacagtgtgttcctgctagcgaaagacacacatgatacatgcaaatctgcagtaactctggtgcctaacagcttggaaaatggccattygcttgtcaagttcctcatggacagtggtggaaagtcttgtcaaccacacttygttctctaatgtaackaatcttgttttattgcaackttctcaaataggtaaagctcaatacgaattgtgtcttttgttgttgtcatttttgttgttgtactttctggttggttattccttttgctttcagtgccaacagatgtcacctctrtcctccttttccaaccccagcatacagtctaaggttatttggacagcatttgtggcaacagaatgatcataaataacgttagaggtacaaaacatt

SEQ ID NO: 40565 - DNA, 600 bp, Chicken  19866894275443_2
tatttttgaggaagtaattaggacgagtaattgttgccttgaggctgagctctccagatgacctggcgatgttgaacacttcttaagatcctattatctatttctcagtatccatccttatttttctcacattggtaaggacacaaatcttcttacagtcacagtgtgttcctgctagcgaaagacacacatgatacatgcaaatctgcagtaactctggtgcctaacagcttggaaaatggccattygcttgtcaagttcctcatggacagtggtggaaagtcttgtcaaccacacttygttctctaatgtaackaatcttgttttattgcaackttctcaaataggtaaagctcaatacgaattgtgtcttttgttgttgtcatttttgttgttgtactttctggttggttattccttttgctttcagtgccaacagatgtcacctctrtcctccttttccaaccccagcatacagtctaaggttatttggacagcatttgtggcaacagaatgatcataaataacgttagaggtacaaaacattttaccttgccaacagcgagctagagaggtctgaactttaaatcaggtaagtgg

SEQ ID NO: 40566 - DNA, 600 bp, Chicken  19866894275443_3
attaggacgagtaattgttgccttgaggctgagctctccagatgacctggcgatgttgaacacttcttaagatcctattatctatttctcagtatccatccttatttttctcacattggtaaggacacaaatcttcttacagtcacagtgtgttcctgctagcgaaagacacacatgatacatgcaaatctgcagtaactctggtgcctaacagcttggaaaatggccattygcttgtcaagttcctcatggacagtggtggaaagtcttgtcaaccacacttygttctctaatgtaackaatcttgttttattgcaackttctcaaataggtaaagctcaatacgaattgtgtcttttgttgttgtcatttttgttgttgtactttctggttggttattccttttgctttcagtgccaacagatgtcacctctrtcctccttttccaaccccagcatacagtctaaggttatttggacagcatttgtggcaacagaatgatcataaataacgttagaggtacaaaacattttaccttgccaacagcgagctagagaggtctgaactttaaatcaggtaagtggtggtagtatagagcat

SEQ ID NO: 40567 - DNA, 600 bp, Chicken  19866894275443_4
ccttgaggctgagctctccagatgacctggcgatgttgaacacttcttaagatcctattatctatttctcagtatccatccttatttttctcacattggtaaggacacaaatcttcttacagtcacagtgtgttcctgctagcgaaagacacacatgatacatgcaaatctgcagtaactctggtgcctaacagcttggaaaatggccattygcttgtcaagttcctcatggacagtggtggaaagtcttgtcaaccacacttygttctctaatgtaackaatcttgttttattgcaackttctcaaataggtaaagctcaatacgaattgtgtcttttgttgttgtcatttttgttgttgtactttctggttggttattccttttgctttcagtgccaacagatgtcacctctrtcctccttttccaaccccagcatacagtctaaggttatttggacagcatttgtggcaacagaatgatcataaataacgttagaggtacaaaacattttaccttgccaacagcgagctagagaggtctgaactttaaatcaggtaagtggtggtagtatagagcatgcatgctgtgcaggatgtcc

SEQ ID NO: 40568 - DNA, 600 bp, Chicken  19866894275443_5
cttacagtcacagtgtgttcctgctagcgaaagacacacatgatacatgcaaatctgcagtaactctggtgcctaacagcttggaaaatggccattygcttgtcaagttcctcatggacagtggtggaaagtcttgtcaaccacacttygttctctaatgtaackaatcttgttttattgcaackttctcaaataggtaaagctcaatacgaattgtgtcttttgttgttgtcatttttgttgttgtactttctggttggttattccttttgctttcagtgccaacagatgtcacctctrtcctccttttccaaccccagcatacagtctaaggttatttggacagcatttgtggcaacagaatgatcataaataacgttagaggtacaaaacattttaccttgccaacagcgagctagagaggtctgaactttaaatcaggtaagtggtggtagtatagagcatgcatgctgtgcaggatgtcctgagggctgtaagaccaattcagctttgctcagccgtgtcaacagcaactgtcttaagatgctgacatggctcagcttgataggttgaagaaacgcagctgctttgataaggtta

SEQ ID NO: 40569 - DNA, 600 bp, Chicken  19866894275443_6
aatgatcataaataacgttagaggtacaaaacattttaccttgccaacagcgagctagagaggtctgaactttaaatcaggtaagtggtggtagtatagagcatgcatgctgtgcaggatgtcctgagggctgtaagaccaattcagctttgctcagccgtgtcaacagcaactgtcttaagatgctgacatggctcagcttgataggttgaagaaacgcagctgctttgataaggttaaagggggaatcttggcaagaacagaaaacaaaacagaacactgcttagaaaattgactgcrcactgtagcaagccgttaatgactgacaacacaaccacatcaaattacctttccaccaggaagaaacaaaaaacaacaaaaaacaggaaaaaaaaaaaaagcagccaaaaggtaactagccttgcattaaaaagaagttggttggtctctacaaccgtccctgctctatctaatatcaggcaatgacaccaacaaaaccaattactttgctgttcttctctgtgtcatccagcctgtcagggttgtggggctgaaagcttcagaataagtgactgcccaaaatgcagaattgtattgtga

SEQ ID NO: 40570 - DNA, 600 bp, Chicken  19866894275443_7
acaaccgtccctgctctatctaatatcaggcaatgacaccaacaaaaccaattactttgctgttcttctctgtgtcatccagcctgtcagggttgtggggctgaaagcttcagaataagtgactgcccaaaatgcagaattgtattgtgaacttaaatatttctactggatggcatttcagcaagtagatgtaacaaaatacactttgttgcaaaagagttgggagagctttaggataacatatgaagttcatttaagtcagtgcaagaatctttacgctgagaccttcaataaattggwttcaaatgcttttctgtatgtacgcagttcaagacttcagtgtattaatgactttatcagttcttcaatctatcgactcttgtttcctgtaacttaaatgaaatctagttatactctgaatagcttattgctgcaatattgatcttgaaatgaattttctaatttactgtcttagccaaattaaaaacaatgaaattttttgtaagtaatcttcccccatgcaatccaacacatatataacagactggcacattaccagtgcagtacttatcaggagataagcctgtccagagtgtttta

SEQ ID NO: 40571 - DNA, 600 bp, Chicken  19866894275443_8
gacacctgattcaaactttccttctgacagatgtggtacatggagaaatgatgaccaaaagtatgttgctgagacttcttgattaagtgggaaacaaaattagatacctaattagttgataaattgaagtgcttaggggtgtgactgggagaaagaagtatggaaatgggccagtaagacctcaagataaataagaagtcatttttagggagctgtaggtaaggtcaagcacgtgtaactcagcttgctgtaactagcaaagaactgtgggcaatgggaaaccttcttgagagcaaagtrttgaaaacctgtgcttttagtactagacttaataaaattccatggggaaaaaaatattctactgtcatagatacagagatacatgctaacttacttcaaagaggtgtacaatacaaaaatccctgcaaatttagtaaccccaagtaactgaaaatacagatgattaagtcaaaacaatttgaaatgcaaggcaaaactatggactggaattaaaaggttggggatcatgcagtgctatatatcatttattaatattattactatttttagacaaaatcaattcacaaacagttcagagta

SEQ ID NO: 40572 - DNA, 600 bp, Chicken  19866894275444_1
cctattgcacctccccttgtcctcccacatcctgcaagcacagaggataaccatagggcagctacaccataacacacaaatgcatttgctttatgtgctgctgctaacttctggaaattttggctctctgccatattagttggtctgtagcaataagaaaacaatgttccaacttaaaaaggattctgttcctctcacctctgctgatggaagtaaagcatttattggaaaatagagttatggcatatagaagaaaatttgttttgttttcaatgcagaaaaagagatgtctttccaacmtggaaaaaaaaaaacacacaacaaacacattcaattataatctcaattattaagaccttctaatatgaaaaccctgagcctcaggaataaggaacatgactgagctctttacagaacattcccatactggatatgcacgtagcaccwgcagtaccctccaaattgtgtcccatcactcactgctgtccatgcaacatgagggaaagctgctctgaatgaaaatctcaaagttgttccaaggtttctgttaaaatgtagatagaaaatccagaggacattatgcaatcttactgaaatttg

SEQ ID NO: 40573 - DNA, 600 bp, Chicken  19866894275444_2
tagcaataagaaaacaatgttccaacttaaaaaggattctgttcctctcacctctgctgatggaagtaaagcatttattggaaaatagagttatggcatatagaagaaaatttgttttgttttcaatgcagaaaaagagatgtctttccaacmtggaaaaaaaaaaacacacaacaaacacattcaattataatctcaattattaagaccttctaatatgaaaaccctgagcctcaggaataaggaacatgactgagctctttacagaacattcccatactggatatgcacgtagcaccwgcagtaccctccaaattgtgtcccatcactcactgctgtccatgcaacatgagggaaagctgctctgaatgaaaatctcaaagttgttccaaggtttctgttaaaatgtagatagaaaatccagaggacattatgcaatcttactgaaatttgttaaattaatgctatatgttccaatttgtctctttctataaaaactgtaaattcattctgccatctcccattgttccctaggattttttttttttacagcagattggaaaggctgagatattaatcctgcagcgggttttgctttct

SEQ ID NO: 40574 - DNA, 600 bp, Chicken  19866894275446_1
cctctgccatggacaggccccattgaacctggccttgaatacctccagcaatggggcacccacagcttctctgggcagccagtgccagtacctcactgccctcttgagtaaagaatttctaacatctaaattaaatctcccctcatttagtttaaagtcattccccattgcctcatcactatctacccatgtaaaatgtcagtccctatcctgtttataagctccctctaagtattggaactccataacgaggtttcactggagccttgcccaagctaaatgagctcgactccctcagcrtttcttcataagaagtgtgctccagccctctgatcatctctgtggccctcctccggatctatttcagcagctccatggatgcagtactccagatggaacctcacaggggcagaatagaggaggacagtcacctcccttgccctgctggtgactcttgttttggtgcagcctaggatgcagctggccttccaggctgcaagagcactctgctggctcatgtccagcttgtcatccaccagaacccccatgtccttctccacaggacggtgccctcaattagttcttctcccagtttctgca

SEQ ID NO: 40575 - DNA, 600 bp, Chicken  19866894275447_1
acatgaaagtgttcggtgactcagtgcacacactcccactctcccctcccacgttccttctgatgcactgcgagaaattcagtgcttcgtgctggtctctgcagctcctgcccatagccgtgcctgcgaggagccctgccttccccagctcaccacagcgagctgcatccctggggtaaggactgtacatcttatggcttcacgtgaagtacccaactcacatcagctcctttaaaaagtagagagatcgtataattatcagtcccaggctctgggcagggctgggatttactgcaaacsgtacacctgatgatttggatgggcttttacagaacaaccaggggttcatttcgctgtgtgcctcccacctgtgtgcttggagccactcacacatcactcacatctgagctgcccgttgctgggtgccttgctggtggggctgcttcccaaaaagctcccccagttctcctggaagagctgagacagtgccatgagaagagctgtgccagagcagcccttcctgagggcaggagcggggggggggggagaaggggaagggctcccaagtgcttccattcctttccagttcagaatccagca

SEQ ID NO: 40576 - DNA, 600 bp, Chicken  19866894275450_1
gagtaagatattcaactctataaataactggaagaacctgcaaagaagagtgtatttcttcataggaaagactgttgtctagaggcgtggtttccttccctgggtgtctgttggataaaggagagacaaactgtatctgattgaaatttgaagtgtgtttcatagtgctatgcctttagcagagaccagctcttgggagatgggcagggatttatgcctaagacatgagcataagcttcttgatggcatgtgtctggtggggttttgtttgtttgctttcaaactttcttgcagatgagrgacatgtcaagttctygctcagtatctcccatctccagaaagtggggcatgtctcaggccaaccttcaggcatactcatgtcatcagaattacttgtttggatggtgtccaaaaaactctacttaagagttgcatctgtgtgtgctgagaaagtcctccargatttatcagtaacatcctcttccaagaaaaatacagaatgtagatactaacaagcatccagaattagacattacttctatttgtcctctggcagaggcttttgttgtggatttagcctaatccaatgagcaaacccct

SEQ ID NO: 40577 - DNA, 600 bp, Chicken  19866894275450_2
tctataaataactggaagaacctgcaaagaagagtgtatttcttcataggaaagactgttgtctagaggcgtggtttccttccctgggtgtctgttggataaaggagagacaaactgtatctgattgaaatttgaagtgtgtttcatagtgctatgcctttagcagagaccagctcttgggagatgggcagggatttatgcctaagacatgagcataagcttcttgatggcatgtgtctggtggggttttgtttgtttgctttcaaactttcttgcagatgagrgacatgtcaagttctygctcagtatctcccatctccagaaagtggggcatgtctcaggccaaccttcaggcatactcatgtcatcagaattacttgtttggatggtgtccaaaaaactctacttaagagttgcatctgtgtgtgctgagaaagtcctccargatttatcagtaacatcctcttccaagaaaaatacagaatgtagatactaacaagcatccagaattagacattacttctatttgtcctctggcagaggcttttgttgtggatttagcctaatccaatgagcaaacccctgtggatgtcagtgaga

SEQ ID NO: 40578 - DNA, 600 bp, Chicken  19866894275450_3
atagtgctatgcctttagcagagaccagctcttgggagatgggcagggatttatgcctaagacatgagcataagcttcttgatggcatgtgtctggtggggttttgtttgtttgctttcaaactttcttgcagatgagrgacatgtcaagttctygctcagtatctcccatctccagaaagtggggcatgtctcaggccaaccttcaggcatactcatgtcatcagaattacttgtttggatggtgtccaaaaaactctacttaagagttgcatctgtgtgtgctgagaaagtcctccargatttatcagtaacatcctcttccaagaaaaatacagaatgtagatactaacaagcatccagaattagacattacttctatttgtcctctggcagaggcttttgttgtggatttagcctaatccaatgagcaaacccctgtggatgtcagtgagattcagggtgtgtgcaatctcaactgttttgcttgaaacctaaaaactgcctcttctatttgtttgcttccccaccttccccaggctctcgttttccattgatctttctaccttgtgcagtgcattttgatgttttcattcttctt

SEQ ID NO: 40579 - DNA, 600 bp, Chicken  19866894275451_1
tcacatgttcccaggtgaagttctggtacaaaggctgagaggaccttcagcacccaggactctattagagacctgtgcttctcccaggtctatctgcagatcacatggatcagacagggctggagagtcaagacagcactatgtaaaaggaaaggtgaagtctcagagctttcatagcaacaaactgctgctgatctgagccttcatggcaaagtgggaggtaaatagcctcattctttatctgaaggatttctcattggacctaagcctctgtgcattcagattcgtaggtatatcaartgatggatggtacctgacactaggacccttcctgactacttcattagtgtcacagagtaaaattgcagaatgttgtagtccaaatggtgcgctaacagatatggaagaaatgttgggtgttttcttcaatgtgtatcctgaactagaagagagaaacatgagaatcttatttcaaggccactttctctratgtaaatttgaaactcatggtgtaacatagaaagccctggagactgaagcccttctgtttattcacagaaaggatatggcataagaagcccatgtccaggtttccccatt

SEQ ID NO: 40580 - DNA, 600 bp, Chicken  19866894275451_2
gctgatctgagccttcatggcaaagtgggaggtaaatagcctcattctttatctgaaggatttctcattggacctaagcctctgtgcattcagattcgtaggtatatcaartgatggatggtacctgacactaggacccttcctgactacttcattagtgtcacagagtaaaattgcagaatgttgtagtccaaatggtgcgctaacagatatggaagaaatgttgggtgttttcttcaatgtgtatcctgaactagaagagagaaacatgagaatcttatttcaaggccactttctctratgtaaatttgaaactcatggtgtaacatagaaagccctggagactgaagcccttctgtttattcacagaaaggatatggcataagaagcccatgtccaggtttccccattcttctctcccactrgcaaggaccaactgcatctctgggtgagaactgagctctacatctcccttcaagatactttcccttcygctatatcttgtctatctgggaactttgcactaggcacacttcttttaaaaaagccaatgctaatttagcttaattcagcgaggaaccagttggaggtaaaacaaag

SEQ ID NO: 40581 - DNA, 600 bp, Chicken  19866894275451_3
tgacactaggacccttcctgactacttcattagtgtcacagagtaaaattgcagaatgttgtagtccaaatggtgcgctaacagatatggaagaaatgttgggtgttttcttcaatgtgtatcctgaactagaagagagaaacatgagaatcttatttcaaggccactttctctratgtaaatttgaaactcatggtgtaacatagaaagccctggagactgaagcccttctgtttattcacagaaaggatatggcataagaagcccatgtccaggtttccccattcttctctcccactrgcaaggaccaactgcatctctgggtgagaactgagctctacatctcccttcaagatactttcccttcygctatatcttgtctatctgggaactttgcactaggcacacttcttttaaaaaagccaatgctaatttagcttaattcagcgaggaaccagttggaggtaaaacaaaggcttcagcagctgaaagggaaatggtgttggcagggaatgattcaagttaaactagtgtgatggccatcttcattagaccaggcttgagagaatgacattcatgctggagatygctgaatgttag

SEQ ID NO: 40582 - DNA, 600 bp, Chicken  19866894275451_4
aatggtgcgctaacagatatggaagaaatgttgggtgttttcttcaatgtgtatcctgaactagaagagagaaacatgagaatcttatttcaaggccactttctctratgtaaatttgaaactcatggtgtaacatagaaagccctggagactgaagcccttctgtttattcacagaaaggatatggcataagaagcccatgtccaggtttccccattcttctctcccactrgcaaggaccaactgcatctctgggtgagaactgagctctacatctcccttcaagatactttcccttcygctatatcttgtctatctgggaactttgcactaggcacacttcttttaaaaaagccaatgctaatttagcttaattcagcgaggaaccagttggaggtaaaacaaaggcttcagcagctgaaagggaaatggtgttggcagggaatgattcaagttaaactagtgtgatggccatcttcattagaccaggcttgagagaatgacattcatgctggagatygctgaatgttagtcaggaaacaaagcccaaaatgaacatagtactcaaagtacagcctcaccagtactgagtacagagga

SEQ ID NO: 40583 - DNA, 456 bp, Chicken  19866894275451_5
tctctcccactrgcaaggaccaactgcatctctgggtgagaactgagctctacatctcccttcaagatactttcccttcygctatatcttgtctatctgggaactttgcactaggcacacttcttttaaaaaagccaatgctaatttagcttaattcagcgaggaaccagttggaggtaaaacaaaggcttcagcagctgaaagggaaatggtgttggcagggaatgattcaagttaaactagtgtgatggccatcttcattagaccaggcttgagagaatgacattcatgctggagatygctgaatgttagtcaggaaacaaagcccaaaatgaacatagtactcaaagtacagcctcaccagtactgagtacagaggaacaatcacctccctggtcttgctgactggtatttctgatatgagccaggatgctgttggccttgttggccacctgg

SEQ ID NO: 40584 - DNA, 600 bp, Chicken  19866894275455_1
gctatttgcccctttttgtgacctttcaccagctttccataccctggccatgtggcacagatggtataatcctgtcaggctaaggcaggtgacagtgctcctcagtgtttagtaatcagtgactgtaattagccagactggacgcacactcagataatggggcaggcaaccagctgccagtcatgaggcttttcctgcagacaggaaaaaatataaagaggccatgcatttcccagtatattttatagagagctgctaacaatgctgcatgcggtgtttgctaatataaaaaatgttttytttctattcctgagtgactgataaagcacgtttcacatcacgttggtgtacaggagttttctgttgttaaatctgatggaggcgtttggaggatatttaactgtaccaaagcactttcctatatgaatactatcttgtcccacttcccttacacgtgcttgttcactagcacacagaaaggtgctccaggctctcaactttgacgccagtcggtttaactcaagaaagtagtcgtgctaagctcctgcctgcattcagagggcaggatttagtgaaaggaaaaacccaccctaaattaat

SEQ ID NO: 40585 - DNA, 600 bp, Chicken  19866894275465_1
tggaacgtttcagatgggaccctttatttttccatgaaatactaccaatgcaaaacagattgaccttggagcccacaggagtcaacttgatgaagagcttagttggagctggagtgacaattggaagccaaatgaatcatatcaagtgtgaccattacaggcctgaaaatgattcttaattaaccactgatcctctgtggtaacaagtttccaaaatcagtgaatccataagggaaccagcaaaaatgtgcaagtagcaatttacctaatctaatagctctgctgtgctgcctctgacartgctttatttttattttagtttgtcttgcttcgtgctgtttgttggaggagttcctcaggattctgctgggtttggtagagccatgtagaggacagttttgcctaacacacctgacaggaaatctgaacttatgcaggtccttagcccagacatttattgtgccgctacacttatttcccccccagtatttccatgtgaattgcaatacttacttattatttaaaaggtggcatgagtggcctttaactccgaccaaaaaagtggttatttctcacccagaaagtattccatcatagcgg

SEQ ID NO: 40586 - DNA, 600 bp, Chicken  19866894275489_1
tcagggaaataaggactgccatcccccagtagaattctgttgacgtctgccagagaccatagccatgtgcttcaaacaaggtgacgtgggaaactagagcactgttctaccacagaaaaagcccctttctaactgttatcattcaaaaggttggtttatgacaaatgcttatccctgttttatataactgttcctctccaatgtaacggaagatgcttttcatacctacaaaaatacctcatttgaattgtgataagttctcctaagcactcatcaacaaatggcttcccatgccagagkccttgaggagaaacaaaattctagattttcttctaaatataaattcagctttgggtcacagtgtaacatgagataagtatgaaaaaacaaygttagtgcatgatggtgacctcaacgtacaactatcacaagcagcgtatctgcgaataagatgccatggccagtagtgtacaaatatcacaagtaatgagtctactgtcaattaagaactacaccaattcaactgctggygcttcccttggctgaagcacttatgtaagcttcaagaaaacagttttctgagtagataaaaagaagata

SEQ ID NO: 40587 - DNA, 600 bp, Chicken  19866894275489_2
aactagagcactgttctaccacagaaaaagcccctttctaactgttatcattcaaaaggttggtttatgacaaatgcttatccctgttttatataactgttcctctccaatgtaacggaagatgcttttcatacctacaaaaatacctcatttgaattgtgataagttctcctaagcactcatcaacaaatggcttcccatgccagagkccttgaggagaaacaaaattctagattttcttctaaatataaattcagctttgggtcacagtgtaacatgagataagtatgaaaaaacaaygttagtgcatgatggtgacctcaacgtacaactatcacaagcagcgtatctgcgaataagatgccatggccagtagtgtacaaatatcacaagtaatgagtctactgtcaattaagaactacaccaattcaactgctggygcttcccttggctgaagcacttatgtaagcttcaagaaaacagttttctgagtagataaaaagaagataycaaatcactctctgcctcacagatcttctgagaatgtggagacaagcaggcagagttaatattccttatgatctgaaatggggaatacaa

SEQ ID NO: 40588 - DNA, 585 bp, Chicken  19866894275489_3
aaatacctcatttgaattgtgataagttctcctaagcactcatcaacaaatggcttcccatgccagagkccttgaggagaaacaaaattctagattttcttctaaatataaattcagctttgggtcacagtgtaacatgagataagtatgaaaaaacaaygttagtgcatgatggtgacctcaacgtacaactatcacaagcagcgtatctgcgaataagatgccatggccagtagtgtacaaatatcacaagtaatgagtctactgtcaattaagaactacaccaattcaactgctggygcttcccttggctgaagcacttatgtaagcttcaagaaaacagttttctgagtagataaaaagaagataycaaatcactctctgcctcacagatcttctgagaatgtggagacaagcaggcagagttaatattccttatgatctgaaatggggaatacaacaagttggaaagggcatacaccttaaaagggatccctgttcaaaatgcattgagcacaggcaccaggagggcactcagagctggtactcagaagaaactcagattacgtcactcgacaagaaaaa

SEQ ID NO: 40589 - DNA, 515 bp, Chicken  19866894275489_4
cttgaggagaaacaaaattctagattttcttctaaatataaattcagctttgggtcacagtgtaacatgagataagtatgaaaaaacaaygttagtgcatgatggtgacctcaacgtacaactatcacaagcagcgtatctgcgaataagatgccatggccagtagtgtacaaatatcacaagtaatgagtctactgtcaattaagaactacaccaattcaactgctggygcttcccttggctgaagcacttatgtaagcttcaagaaaacagttttctgagtagataaaaagaagataycaaatcactctctgcctcacagatcttctgagaatgtggagacaagcaggcagagttaatattccttatgatctgaaatggggaatacaacaagttggaaagggcatacaccttaaaagggatccctgttcaaaatgcattgagcacaggcaccaggagggcactcagagctggtactcagaagaaactcagattacgtcactcgacaagaaaaa

SEQ ID NO: 40590 - DNA, 600 bp, Chicken  19866894275490_1
gaaacgtaattgctcgaagtttgattttaggttcagtggttctgatttctctacctatacatgacaattggtctaatattgaatttttaatggagctctttaactttccttggacaaatgtcttcaagatatgcaacgttctgaaatgttttcaacagtgagcaaagaaccacttcagcttacgtcaaatcaaagtcctattgtttgcttgcatgacaactgcaactagatgaaattcccagagatttttcagaaagccaaagtattctgtatttcgtactatcaattaagcatatacayacaagcccattctgtagtttggcccagaatgtcaacaaaagcagcaagcaaaacaagaaagccttgttccaaagctagacaattagtgctcaaaaaaaacccaatttgagagtgagatgtaccagaagcttttacatttgcgccaaaagttacatatatttagtttcaaactgctttatggttgacaacaagctatgccacaggctgcccgattcctcagttgtgcatgaatatgcacacatatcgcattttgcaggtgaagtgttgcaagcctagccatctcttgtggtttgcccttgg

SEQ ID NO: 40591 - DNA, 600 bp, Chicken  19866894275490_2
cagtataaaatttaatggaagtagatttgaaacaccacagtaaaaataattaaacaatataatgcaatctgccatttctgcttatcaagtggcaaagagcaaatccctaactgagaatgtgcatccttctgaaatgggcccttcacaggagggctagacataacagacagtactggtaggaactgtgcatttcttaaaattactatcaggaagaaaaaaatatataaatttcaaatatttgactttcttttaaaagaaaattatcctttgttttacaaaaaagacaaaaataaatgccaygaagctacttgacccacaaaaatagtaatttatagccacttacaaaaatctagctttgagattaaacctattgcacacaatacaaaataggtgggttttcagaaatataactgtatatcaaacactgattttctatactgaagatcatcaatacttaaattgcctttctgaaaatttcttactttccccgagctttctcttastactctacttcttcttgatttctttccctaaatcccacactatratctgtcattgtctgcagtgttccaacatctgtttccttctttatctctgcct

SEQ ID NO: 40592 - DNA, 600 bp, Chicken  19866894275490_3
tatcaggaagaaaaaaatatataaatttcaaatatttgactttcttttaaaagaaaattatcctttgttttacaaaaaagacaaaaataaatgccaygaagctacttgacccacaaaaatagtaatttatagccacttacaaaaatctagctttgagattaaacctattgcacacaatacaaaataggtgggttttcagaaatataactgtatatcaaacactgattttctatactgaagatcatcaatacttaaattgcctttctgaaaatttcttactttccccgagctttctcttastactctacttcttcttgatttctttccctaaatcccacactatratctgtcattgtctgcagtgttccaacatctgtttccttctttatctctgccttaccctctttatcctttccactactttgtattctccatcttcactatattttctctccttcttaattctackctgtagaaaactaagattttttttctctgcaatgcaatactgtaatcttctccaccctcaaaaagagcctgaaagtgctaaatagcaagaaggtaggaagtagatgtctgggcccagatgttagcttctgc

SEQ ID NO: 40593 - DNA, 594 bp, Chicken  19866894275490_4
ttttaaaagaaaattatcctttgttttacaaaaaagacaaaaataaatgccaygaagctacttgacccacaaaaatagtaatttatagccacttacaaaaatctagctttgagattaaacctattgcacacaatacaaaataggtgggttttcagaaatataactgtatatcaaacactgattttctatactgaagatcatcaatacttaaattgcctttctgaaaatttcttactttccccgagctttctcttastactctacttcttcttgatttctttccctaaatcccacactatratctgtcattgtctgcagtgttccaacatctgtttccttctttatctctgccttaccctctttatcctttccactactttgtattctccatcttcactatattttctctccttcttaattctackctgtagaaaactaagattttttttctctgcaatgcaatactgtaatcttctccaccctcaaaaagagcctgaaagtgctaaatagcaagaaggtaggaagtagatgtctgggcccagatgttagcttctgcaccattattcctacacagtaatgaaacacatatgagca

SEQ ID NO: 40594 - DNA, 469 bp, Chicken  19866894275490_5
gcacacaatacaaaataggtgggttttcagaaatataactgtatatcaaacactgattttctatactgaagatcatcaatacttaaattgcctttctgaaaatttcttactttccccgagctttctcttastactctacttcttcttgatttctttccctaaatcccacactatratctgtcattgtctgcagtgttccaacatctgtttccttctttatctctgccttaccctctttatcctttccactactttgtattctccatcttcactatattttctctccttcttaattctackctgtagaaaactaagattttttttctctgcaatgcaatactgtaatcttctccaccctcaaaaagagcctgaaagtgctaaatagcaagaaggtaggaagtagatgtctgggcccagatgttagcttctgcaccattattcctacacagtaatgaaacacatatgagca

SEQ ID NO: 40595 - DNA, 551 bp, Chicken  19866894275497_1
ctgtccatgcgcagggctcgctgtgggttgggtttccctgtttgcccaaggccagctgtggggctctggggttctcacgcctgctctgtgctgcagatggtgctgggtccccattccagccccttgccaaaccgcatggcacccctacagcacgagcacagccggctgtccagcagcacacagcgctcagagccagcagcaggccccttggcggagcagagggtgcccatctcaggagcacagcagatgagcagaacctcctccagcagcatctctgccccgtggcagagggacgcggcrcacattcccggcctggccatgaaatcgccctccaagaggcaagcagtgctgctccccccagacgtctgctgtgggctgccggggaaggagctgggaaagcaaacactgctcatggaggtgggaaaagaccacggagatcatccgacccaaccttctcatttccatttcatttcattgacaaccccaacaacaacataaccaggtgcctccttcaatcccatctccccccccccccccccccaaaaaaaaaa

SEQ ID NO: 40596 - DNA, 600 bp, Chicken  19866894275505_1
ctcccacatacctgtcacagctcgtggcagagatcagtgctacagcagaaccgaggaacaggtcagggtgttgcgtgaggaaatcccatccgacagcctccacctctgagtgcggtagatgagctccggctgaagcctggcacccaaatctttccctccaacatgcaaaaatgggctcaaaaccaccgactcagccacttctttgctgcacttcactgaacgtgggttccgactgtgctctcagagacaagcgaccattttaccaactatttatttttacttaataacgccatcttggckagagatgcaggagccagtggggaaactacagcctaccacattccatgagtgactgctctacagttaccaccttttgtttccttatccaagaacrggaacatcttcccaacccaatcccacttgctttcaaagtggtcaggactcctgtccaccgtgctggagggagctcatacttcccttccttaaaaaaccaaaacaagcacaaatgagaaagcagcatcctccttccctggctattcctagtcaactgagaacaggagagagacagcagtgatgagcactccccctgcataaactcct

SEQ ID NO: 40597 - DNA, 600 bp, Chicken  19866894275505_2
agcctccacctctgagtgcggtagatgagctccggctgaagcctggcacccaaatctttccctccaacatgcaaaaatgggctcaaaaccaccgactcagccacttctttgctgcacttcactgaacgtgggttccgactgtgctctcagagacaagcgaccattttaccaactatttatttttacttaataacgccatcttggckagagatgcaggagccagtggggaaactacagcctaccacattccatgagtgactgctctacagttaccaccttttgtttccttatccaagaacrggaacatcttcccaacccaatcccacttgctttcaaagtggtcaggactcctgtccaccgtgctggagggagctcatacttcccttccttaaaaaaccaaaacaagcacaaatgagaaagcagcatcctccttccctggctattcctagtcaactgagaacaggagagagacagcagtgatgagcactccccctgcataaactcctggatgccaggaagccagacctgcccctactaagcactaacaaaaatcaaaagggatttgggtttttattctcaagtgcccaaagaaatttagtg

SEQ ID NO: 40598 - DNA, 600 bp, Chicken  19866894275521_1
ctgatgagaaacaggctggctcagtgctgtcagaagaagctaattactgacgtaagtcaattaaagcagtgggactgactccagtgccttactcactgacaatccttcctgcatccccgcagtgctctgcatctagatgtccttggaggggaggcagggctgcgaggagctgcaggcacggcccataccccagcaaagatggatggccacgacccaccttcccccaaaatgtccctctgttcctcagggcctgccaaggcagagatggcctctactcggacccacaccccacagccccartaggaagcatcccagggccaaacacccctccccagtccaaacggggtgccgccttctgccttcctgcttgtgctgtggggacactgcagcaggtgacagcatgggaggctccrtagtatggcaaatccattgtttttgcctttaccacccatatggtgckggctctgctgaggacgcatgccatgctccctgcctgtcgcaagcattccggaccaggccagagtgctgtggtgtgtctggagggcagaacttgccgctcagcctggcttaatgggagcrgaatggggccttgggggctgc

SEQ ID NO: 40599 - DNA, 600 bp, Chicken  19866894275521_2
tccccgcagtgctctgcatctagatgtccttggaggggaggcagggctgcgaggagctgcaggcacggcccataccccagcaaagatggatggccacgacccaccttcccccaaaatgtccctctgttcctcagggcctgccaaggcagagatggcctctactcggacccacaccccacagccccartaggaagcatcccagggccaaacacccctccccagtccaaacggggtgccgccttctgccttcctgcttgtgctgtggggacactgcagcaggtgacagcatgggaggctccrtagtatggcaaatccattgtttttgcctttaccacccatatggtgckggctctgctgaggacgcatgccatgctccctgcctgtcgcaagcattccggaccaggccagagtgctgtggtgtgtctggagggcagaacttgccgctcagcctggcttaatgggagcrgaatggggccttgggggctgcggtgyaacccccatgccctgctgggcagaaggcaccatggcggcagggcaggccagggctgcctgtggagggaaggggggctgggtaagtcctgcaggtccctgtccctccag

SEQ ID NO: 40600 - DNA, 600 bp, Chicken  19866894275521_3
tgcgaggagctgcaggcacggcccataccccagcaaagatggatggccacgacccaccttcccccaaaatgtccctctgttcctcagggcctgccaaggcagagatggcctctactcggacccacaccccacagccccartaggaagcatcccagggccaaacacccctccccagtccaaacggggtgccgccttctgccttcctgcttgtgctgtggggacactgcagcaggtgacagcatgggaggctccrtagtatggcaaatccattgtttttgcctttaccacccatatggtgckggctctgctgaggacgcatgccatgctccctgcctgtcgcaagcattccggaccaggccagagtgctgtggtgtgtctggagggcagaacttgccgctcagcctggcttaatgggagcrgaatggggccttgggggctgcggtgyaacccccatgccctgctgggcagaaggcaccatggcggcagggcaggccagggctgcctgtggagggaaggggggctgggtaagtcctgcaggtccctgtccctccaggaaggctgaaagtggagctctgagctcacactgccgcttcctgacag

SEQ ID NO: 40601 - DNA, 600 bp, Chicken  19866894275521_4
acccacaccccacagccccartaggaagcatcccagggccaaacacccctccccagtccaaacggggtgccgccttctgccttcctgcttgtgctgtggggacactgcagcaggtgacagcatgggaggctccrtagtatggcaaatccattgtttttgcctttaccacccatatggtgckggctctgctgaggacgcatgccatgctccctgcctgtcgcaagcattccggaccaggccagagtgctgtggtgtgtctggagggcagaacttgccgctcagcctggcttaatgggagcrgaatggggccttgggggctgcggtgyaacccccatgccctgctgggcagaaggcaccatggcggcagggcaggccagggctgcctgtggagggaaggggggctgggtaagtcctgcaggtccctgtccctccaggaaggctgaaagtggagctctgagctcacactgccgcttcctgacagcttttcctggcgagtcaaggacacggcctcggcgcaggcctggagtgaggagcyctgcagcrcagcggggcagcggccatgatgcctccaggagccccatctccacatctccaagccct

SEQ ID NO: 40602 - DNA, 600 bp, Chicken  19866894275521_5
agcatcccagggccaaacacccctccccagtccaaacggggtgccgccttctgccttcctgcttgtgctgtggggacactgcagcaggtgacagcatgggaggctccrtagtatggcaaatccattgtttttgcctttaccacccatatggtgckggctctgctgaggacgcatgccatgctccctgcctgtcgcaagcattccggaccaggccagagtgctgtggtgtgtctggagggcagaacttgccgctcagcctggcttaatgggagcrgaatggggccttgggggctgcggtgyaacccccatgccctgctgggcagaaggcaccatggcggcagggcaggccagggctgcctgtggagggaaggggggctgggtaagtcctgcaggtccctgtccctccaggaaggctgaaagtggagctctgagctcacactgccgcttcctgacagcttttcctggcgagtcaaggacacggcctcggcgcaggcctggagtgaggagcyctgcagcrcagcggggcagcggccatgatgcctccaggagccccatctccacatctccaagccctaccgtccctttgaggccarcaccagc

SEQ ID NO: 40603 - DNA, 600 bp, Chicken  19866894275521_6
aggccagagtgctgtggtgtgtctggagggcagaacttgccgctcagcctggcttaatgggagcrgaatggggccttgggggctgcggtgyaacccccatgccctgctgggcagaaggcaccatggcggcagggcaggccagggctgcctgtggagggaaggggggctgggtaagtcctgcaggtccctgtccctccaggaaggctgaaagtggagctctgagctcacactgccgcttcctgacagcttttcctggcgagtcaaggacacggcctcggcgcaggcctggagtgaggagcyctgcagcrcagcggggcagcggccatgatgcctccaggagccccatctccacatctccaagccctaccgtccctttgaggccarcaccagcctgtgggaagggtttgggctgcacgtcccggtgctgcccacgctcttacagccgcctgcacctcaggcacagccaccacaggcagcgggcctcgcagtggctgtgacagcaattggagacatggggcagcagcgggagggtttggctgcaaaccaggcccaggaggctgaggtgcctcgccaggcatgccgggtggcctcgaatggagc

SEQ ID NO: 40604 - DNA, 600 bp, Chicken  19866894275521_7
gtgctgtggtgtgtctggagggcagaacttgccgctcagcctggcttaatgggagcrgaatggggccttgggggctgcggtgyaacccccatgccctgctgggcagaaggcaccatggcggcagggcaggccagggctgcctgtggagggaaggggggctgggtaagtcctgcaggtccctgtccctccaggaaggctgaaagtggagctctgagctcacactgccgcttcctgacagcttttcctggcgagtcaaggacacggcctcggcgcaggcctggagtgaggagcyctgcagcrcagcggggcagcggccatgatgcctccaggagccccatctccacatctccaagccctaccgtccctttgaggccarcaccagcctgtgggaagggtttgggctgcacgtcccggtgctgcccacgctcttacagccgcctgcacctcaggcacagccaccacaggcagcgggcctcgcagtggctgtgacagcaattggagacatggggcagcagcgggagggtttggctgcaaaccaggcccaggaggctgaggtgcctcgccaggcatgccgggtggcctcgaatggagcccagtccc

SEQ ID NO: 40605 - DNA, 600 bp, Chicken  19866894275521_8
gcggtgyaacccccatgccctgctgggcagaaggcaccatggcggcagggcaggccagggctgcctgtggagggaaggggggctgggtaagtcctgcaggtccctgtccctccaggaaggctgaaagtggagctctgagctcacactgccgcttcctgacagcttttcctggcgagtcaaggacacggcctcggcgcaggcctggagtgaggagcyctgcagcrcagcggggcagcggccatgatgcctccaggagccccatctccacatctccaagccctaccgtccctttgaggccarcaccagcctgtgggaagggtttgggctgcacgtcccggtgctgcccacgctcttacagccgcctgcacctcaggcacagccaccacaggcagcgggcctcgcagtggctgtgacagcaattggagacatggggcagcagcgggagggtttggctgcaaaccaggcccaggaggctgaggtgcctcgccaggcatgccgggtggcctcgaatggagcccagtccctgttacccaggcagggagaggcacagtgctgctcccagtctccatcgtgtgccaactgtgggctgctctgccatta

SEQ ID NO: 40606 - DNA, 600 bp, Chicken  19866894275528_1
accatgctgtgataaaacaaaacactttcttctgatataaagaaagcatttattacttgcaaagatattttccatattacgaatcttaaagggccagaaactaattcccatgcattcctatgctgctattaccctaaaaagaagttccacttactcctaagaatttgacttaataagagcttgacttgagtgggaattcatgtatcagccatatctaacatttccattaacagctattgttattgaaactaattttctctttaaaggaattatgaaaaacaggtgaaaataattctgtarttgagaactaaaacccgctttagtttagtgcaaaaggatgaatgtttcaggagtgaaattcagaccctatattcccacaactgaaaggtgaagatactagctctagaactattgagattcatctctaaactgcttaagatatatgtatacttttaatctttcaggtatatagcccatctttttatcattctattccttaatatactgcttatgatcacggtctttgaaaaggtgattcagcagctatttcttgtttgttcttgctgtagcaatcatataattgggatacttctcctccag

SEQ ID NO: 40607 - DNA, 600 bp, Chicken  19866894275528_2
tgattcagcagctatttcttgtttgttcttgctgtagcaatcatataattgggatacttctcctccagagtgtaaccttctttattgttttcctagtcactgcaaatttattgaggtcaacaaggcctaggaatttaattgcattttataatgtgaaagcaatttactatgaatacagaactatgtgagcaatttaaaagcaaacacatgcttttcctggctttataaaagagttgagtaaagaatgattcggggcatttcttgtaagcttttaagtatattcttcatttcacagtagcratcgcatctttacaaaacccactagctgtaattcgggaagcatggaaaataattgctctccatgaaagagagacataattagaaattatatagwtcaataagtagaatgactacaagtctgaaaattcagaacttctgaccaacgatctgaaagcaactgtagtttgtacccatataaaataaattttatgtagaaaagtcagacaactttggaaagatgctgaagattttaacatttttaggagcatctgaaagttgctgctatatttcacaactctagactaaatagcctctataact

SEQ ID NO: 40608 - DNA, 600 bp, Chicken  19866894275528_3
agtcactgcaaatttattgaggtcaacaaggcctaggaatttaattgcattttataatgtgaaagcaatttactatgaatacagaactatgtgagcaatttaaaagcaaacacatgcttttcctggctttataaaagagttgagtaaagaatgattcggggcatttcttgtaagcttttaagtatattcttcatttcacagtagcratcgcatctttacaaaacccactagctgtaattcgggaagcatggaaaataattgctctccatgaaagagagacataattagaaattatatagwtcaataagtagaatgactacaagtctgaaaattcagaacttctgaccaacgatctgaaagcaactgtagtttgtacccatataaaataaattttatgtagaaaagtcagacaactttggaaagatgctgaagattttaacatttttaggagcatctgaaagttgctgctatatttcacaactctagactaaatagcctctataacttcttctcagaattaaatcttgtaaaacaaagcaaaacaaaacaaacaaacaagcaaaaaaacagctcatgacaagttaaaaccttaacaagaat

SEQ ID NO: 40609 - DNA, 432 bp, Chicken  19866894275528_4
tataattcctgcaaaacataaaaatgaatgtatacatagtgttttaacagcttacattcttctaacagctaaagttttccaatttacgctgataaaacctaatgacaaatttgaaagaaaattgtttctatttctacactcattctaaaagtatagttttccataaaatgtaaaatttattttgcaaacattttatttgagaatttaattgagaaaacatatgagtaataagagaataaaggaaaacttttatcttcttcccacagggatgctatatgttttatggtccttttttattcyccagcttcttaaaatttctgttcctgtcagttgcctacatttcttaattttacacatagcaagatatcagaaggactcatttaagaaactattaacagatgtgcaagagattcatatttctaaaggcagaaa

SEQ ID NO: 40610 - DNA, 599 bp, Chicken  19866894275530_1
  misc_feature (1)..(13): n is any nucleotide
nnnnnnnnnnnnnctcagaatggccagtgaagtcattgaagcctgagacaattacatcactcccttttcatctgttttgtttgattgttttgttttcttgttgttttgtttgttcattgtttttgtccctaaatgtacactgaatacaaagctgagaagctggaattcctatacctccaaaagtgctcaacaatgagccaatggatctcattaaaaataaaataaaataaaataaaataaacaaacaagcatggcacaacttattagcatacaacctggtatacttcctgctacagtctraactcataccagggaaatatctggatgaatacaagcctcctgtactctgatttccaaatcaaataagttgggaacacatcccatatgacatcagagtatcccaggaatgtggaagacagtggtaccaagattcaggacatgctctgtattactgcaagaagttaatatataaaggagtatctttcttgtctgtcttcttcagaattatctacaaggtgttggctgcatgtacctatgaaaaatgggatgcaaatcctaaattattccctaatacaaatattttacttttaatgtaagga

SEQ ID NO: 40611 - DNA, 599 bp, Chicken  19866894275536_1
  misc_feature (1)..(123): n is any nucleotide
nnnnnnnnnnnnnnnnnnnnnnnnnnnnnnnnnnnnnnnnnnnnnnnnnnnnnnnnnnnnnnnnnnnnnnnnnnnnnnnnnnnnnnnnnnnnnnnnnnnnnnnnnnnnnnnnnnnnnnnnnnngtattatataaaaaggaaggaaatgttaaattagttcatcaagtaaataacttagtgatgataattactcatttatctcttgttatggtaatcaatttatgttcaattcaagccctagtcctagatgtgtttatcttgactacaccatttagctacatctctagatgctcaataacyggatgcttttcccagtggcttyaactaaatcagatgccagcaattaggagatatcttctctacaatgcttgctgccctaagtcttgatcctctatcattgagatcagagggaattttgccactgattccaagtggtgcagaaggacatctactgtgaaaatcttcaaagatgttycacctctaatcccagcattcaattacttcacagagctttcatgcagagcttatttattaaacaaagctgaaagcaaaaacatttggcatggaggcaggacaggtagaagaatgaacaaactaca

SEQ ID NO: 40612 - DNA, 599 bp, Chicken  19866894275536_2
  misc_feature (1)..(101): n is any nucleotide
nnnnnnnnnnnnnnnnnnnnnnnnnnnnnnnnnnnnnnnnnnnnnnnnnnnnnnnnnnnnnnnnnnnnnnnnnnnnnnnnnnnnnnnnnnnnnnnnnnnnngtattatataaaaaggaaggaaatgttaaattagttcatcaagtaaataacttagtgatgataattactcatttatctcttgttatggtaatcaatttatgttcaattcaagccctagtcctagatgtgtttatcttgactacaccatttagctacatctctagatgctcaataacyggatgcttttcccagtggcttyaactaaatcagatgccagcaattaggagatatcttctctacaatgcttgctgccctaagtcttgatcctctatcattgagatcagagggaattttgccactgattccaagtggtgcagaaggacatctactgtgaaaatcttcaaagatgttycacctctaatcccagcattcaattacttcacagagctttcatgcagagcttatttattaaacaaagctgaaagcaaaaacatttggcatggaggcaggacaggtagaagaatgaacaaactacagcagtgtttttttgctgtgtta

SEQ ID NO: 40613 - DNA, 600 bp, Chicken  19866894275536_3
tagtgatgataattactcatttatctcttgttatggtaatcaatttatgttcaattcaagccctagtcctagatgtgtttatcttgactacaccatttagctacatctctagatgctcaataacyggatgcttttcccagtggcttyaactaaatcagatgccagcaattaggagatatcttctctacaatgcttgctgccctaagtcttgatcctctatcattgagatcagagggaattttgccactgattccaagtggtgcagaaggacatctactgtgaaaatcttcaaagatgttycacctctaatcccagcattcaattacttcacagagctttcatgcagagcttatttattaaacaaagctgaaagcaaaaacatttggcatggaggcaggacaggtagaagaatgaacaaactacagcagtgtttttttgctgtgttacattatgtatataattttacagacataaatacaccacctaatcaatcatctccagtcaaaaatgttggggtatcttaaatgacactgtagcatggggctgtgttcaagcaattccttttcactctattataacttttcatcttgagccaatatt

SEQ ID NO: 40614 - DNA, 600 bp, Chicken  19866894275536_4
tattaatactttggctaaaaaaccctccaactatttttcattcaactctaagcaacagagcaactgacagaagcagtggagtgatcagaagatgtatagagaggacagctgatttttcatcagtcatttatcttgtccccttttgaaactgcatgctgggacacaaggtgttcgattggtgcccaaaggattatctcagatcatcatttagaagtaatgatggtatgctattattcttgtactgcaaccgtaagaagtgttgggaagtgccaagtactataatctagctgctacagcaarggacaaggggcagctgttctttgctttatagctgcttggatgattatctgagctgagtcatcttaaaggaggcaggagtggaaytgtggtggaggtggaaaccagaacatctaattgttctttaaattgatctcatattcttcctatcagtccaacagtactgttaaaggaaatactgtcatttgatatagaagttatttgaagctttttgcacttggaacacactgtatactgctattagtgtgtcgtcttcggtaaattgctctgctcctgtatagagtacttaatggaatatgcctt

SEQ ID NO: 40615 - DNA, 600 bp, Chicken  19866894275536_5
tcagaagatgtatagagaggacagctgatttttcatcagtcatttatcttgtccccttttgaaactgcatgctgggacacaaggtgttcgattggtgcccaaaggattatctcagatcatcatttagaagtaatgatggtatgctattattcttgtactgcaaccgtaagaagtgttgggaagtgccaagtactataatctagctgctacagcaarggacaaggggcagctgttctttgctttatagctgcttggatgattatctgagctgagtcatcttaaaggaggcaggagtggaaytgtggtggaggtggaaaccagaacatctaattgttctttaaattgatctcatattcttcctatcagtccaacagtactgttaaaggaaatactgtcatttgatatagaagttatttgaagctttttgcacttggaacacactgtatactgctattagtgtgtcgtcttcggtaaattgctctgctcctgtatagagtacttaatggaatatgcctttctagtcccttccactatagtctttttagtcatgaaaaggtcctgtcacactgaacgacatctgtaatgccacagtgagaaaga

SEQ ID NO: 40616 - DNA, 599 bp, Chicken  19866894275541_1
  misc_feature (1)..(65): n is any nucleotide
nnnnnnnnnnnnnnnnnnnnnnnnnnnnnnnnnnnnnnnnnnnnnnnnnnnnnnnnnnnnnnnnnttatatatataaatcttctctgcccagagaggtggtggagtcaccgaccctggaggtgctcaaggaacgtttggacgttgtgttgagggacatggtttagtgagaaccattggtgatgggtggatggttggactggatgatcctgtgggtcttttccaaccttggtgattctatgattctgttattctatttattagttggagttcttttagtttctaaagatgattttcatgcygctgcattaagagagtacrtaattagttatctctctactactgccagcttttgaacayggaaaatgtcagagaatttaagctttaaactgatgattactgcattagtctctcagaaatttgtaagtctttgacttcagtagtgtagttggcttgaatacagttaagcataagtgtaagtctgctcacagttcagacagtttaaagaacttgtattttgtaatcaggaacacctgatcataaagccactgatgaactgtgcaagttgctaccgttctcgatttcatccaatttccagact

SEQ ID NO: 40617 - DNA, 599 bp, Chicken  19866894275541_2
  misc_feature (1)..(46): n is any nucleotide
nnnnnnnnnnnnnnnnnnnnnnnnnnnnnnnnnnnnnnnnnnnnnnttatatatataaatcttctctgcccagagaggtggtggagtcaccgaccctggaggtgctcaaggaacgtttggacgttgtgttgagggacatggtttagtgagaaccattggtgatgggtggatggttggactggatgatcctgtgggtcttttccaaccttggtgattctatgattctgttattctatttattagttggagttcttttagtttctaaagatgattttcatgcygctgcattaagagagtacrtaattagttatctctctactactgccagcttttgaacayggaaaatgtcagagaatttaagctttaaactgatgattactgcattagtctctcagaaatttgtaagtctttgacttcagtagtgtagttggcttgaatacagttaagcataagtgtaagtctgctcacagttcagacagtttaaagaacttgtattttgtaatcaggaacacctgatcataaagccactgatgaactgtgcaagttgctaccgttctcgatttcatccaatttccagactcaagaaacaggtaagtcct

SEQ ID NO: 40618 - DNA, 599 bp, Chicken  19866894275541_3
  misc_feature (1)..(7): n is any nucleotide
nnnnnnnttatatatataaatcttctctgcccagagaggtggtggagtcaccgaccctggaggtgctcaaggaacgtttggacgttgtgttgagggacatggtttagtgagaaccattggtgatgggtggatggttggactggatgatcctgtgggtcttttccaaccttggtgattctatgattctgttattctatttattagttggagttcttttagtttctaaagatgattttcatgcygctgcattaagagagtacrtaattagttatctctctactactgccagcttttgaacayggaaaatgtcagagaatttaagctttaaactgatgattactgcattagtctctcagaaatttgtaagtctttgacttcagtagtgtagttggcttgaatacagttaagcataagtgtaagtctgctcacagttcagacagtttaaagaacttgtattttgtaatcaggaacacctgatcataaagccactgatgaactgtgcaagttgctaccgttctcgatttcatccaatttccagactcaagaaacaggtaagtccttgcaactgaaagcattttagtccttaaaaatgcgagtcc

SEQ ID NO: 40619 - DNA, 599 bp, Chicken  19866894275553_1
  misc_feature (1)..(17): n is any nucleotide
nnnnnnnnnnnnnnnnntgagccgcttcagctgacagagcagtgctgacagggtctcttcattcagagagagagctgacagcctaaccttacggctttaccaaagtccaagtcacgccactgtgtcatattacaacatgctccccagaaatagaagtcatgagaaattctttagcatattgtcctcaaggtgtgcaaaatggggaagggggtaagcttctgaaagaagaaaacatttacctgagccgctgccttttactaaagctgtgaagtgaaactgagcagaactctaaacacttgytctttggtctttcttcaagttgtcatttagttcagaggcaccgatgcacgtgggacggggcagggagcaaaacaacaatgtttttttctccagcgttaacctgacagtgaatttatttcactcaagggacgtccggtgcacccacccagacaagtacactgaagttctctggctctgcggattttgccttcccttgcaggaagagaactagctgatgcccacaggtcccttgctggccttgttttctagctacaaacataaaacatggctcctcctgggtaaacatcttgtacacactg

SEQ ID NO: 40620 - DNA, 599 bp, Chicken  19866894275554_1
  misc_feature (1)..(203): n is any nucleotide
nnnnnnnnnnnnnnnnnnnnnnnnnnnnnnnnnnnnnnnnnnnnnnnnnnnnnnnnnnnnnnnnnnnnnnnnnnnnnnnnnnnnnnnnnnnnnnnnnnnnnnnnnnnnnnnnnnnnnnnnnnnnnnnnnnnnnnnnnnnnnnnnnnnnnnnnnnnnnnnnnnnnnnnnnnnnnnnnnnnnnnnnnnnnnnnnnnnnnnnnnnntccttcctgatttaaaacaagaacagctttattttaactttccttctagctcagaatagtggcctcagggtccactgctttgtcaggctcctctacygtggtcacagtatctgctaaaatacacagttatttttaatgattttagagcttgaactttattttaatatagagcayggtttggctcctgtttttcacataaatcaackgttatatgttccaggtttggttttattggagatttttaaaatkttttatttcatttttttttcaaataccagagtaaaagcagctcagatatcagaaacgtctttctgttccattaccttacaaatgccaacagtacatatggatgtcccataagtttctgtcaccaaggtgttagtttgtaatggattg

SEQ ID NO: 40621 - DNA, 599 bp, Chicken  19866894275554_2
  misc_feature (1)..(126): n is any nucleotide
nnnnnnnnnnnnnnnnnnnnnnnnnnnnnnnnnnnnnnnnnnnnnnnnnnnnnnnnnnnnnnnnnnnnnnnnnnnnnnnnnnnnnnnnnnnnnnnnnnnnnnnnnnnnnnnnnnnnnnnnnnnnnntccttcctgatttaaaacaagaacagctttattttaactttccttctagctcagaatagtggcctcagggtccactgctttgtcaggctcctctacygtggtcacagtatctgctaaaatacacagttatttttaatgattttagagcttgaactttattttaatatagagcayggtttggctcctgtttttcacataaatcaackgttatatgttccaggtttggttttattggagatttttaaaatkttttatttcatttttttttcaaataccagagtaaaagcagctcagatatcagaaacgtctttctgttccattaccttacaaatgccaacagtacatatggatgtcccataagtttctgtcaccaaggtgttagtttgtaatggattgccctgtaaacacaagttgtgtgtattttacattctgaagtcaggtgttctttcatgtcaattcagatgtgatttact

SEQ ID NO: 40622 - DNA, 599 bp, Chicken  19866894275554_3
  misc_feature (1)..(94): n is any nucleotide
nnnnnnnnnnnnnnnnnnnnnnnnnnnnnnnnnnnnnnnnnnnnnnnnnnnnnnnnnnnnnnnnnnnnnnnnnnnnnnnnnnnnnnnnnnnnnntccttcctgatttaaaacaagaacagctttattttaactttccttctagctcagaatagtggcctcagggtccactgctttgtcaggctcctctacygtggtcacagtatctgctaaaatacacagttatttttaatgattttagagcttgaactttattttaatatagagcayggtttggctcctgtttttcacataaatcaackgttatatgttccaggtttggttttattggagatttttaaaatkttttatttcatttttttttcaaataccagagtaaaagcagctcagatatcagaaacgtctttctgttccattaccttacaaatgccaacagtacatatggatgtcccataagtttctgtcaccaaggtgttagtttgtaatggattgccctgtaaacacaagttgtgtgtattttacattctgaagtcaggtgttctttcatgtcaattcagatgtgatttactgtaaataactctgatgttgctaagagacaaat

SEQ ID NO: 40623 - DNA, 599 bp, Chicken  19866894275554_4
  misc_feature (1)..(51): n is any nucleotide
nnnnnnnnnnnnnnnnnnnnnnnnnnnnnnnnnnnnnnnnnnnnnnnnnnntccttcctgatttaaaacaagaacagctttattttaactttccttctagctcagaatagtggcctcagggtccactgctttgtcaggctcctctacygtggtcacagtatctgctaaaatacacagttatttttaatgattttagagcttgaactttattttaatatagagcayggtttggctcctgtttttcacataaatcaackgttatatgttccaggtttggttttattggagatttttaaaatkttttatttcatttttttttcaaataccagagtaaaagcagctcagatatcagaaacgtctttctgttccattaccttacaaatgccaacagtacatatggatgtcccataagtttctgtcaccaaggtgttagtttgtaatggattgccctgtaaacacaagttgtgtgtattttacattctgaagtcaggtgttctttcatgtcaattcagatgtgatttactgtaaataactctgatgttgctaagagacaaatttcaaaacatgtttcaaccacaacagtattaatattaaaaaac

SEQ ID NO: 40624 - DNA, 572 bp, Chicken  19866894275554_5
tctgaagtcaggtgttctttcatgtcaattcagatgtgatttactgtaaataactctgatgttgctaagagacaaatttcaaaacatgtttcaaccacaacagtattaatattaaaaaacttaaattaagatatccataatatgcagtatacactctaacattttccaattaggccaagtaatgacgtttttcatttgagggaatgtgatttaatgacagcgggaggtcagcgagcagcaggtctgagacgtcccacagcgtacttattgccaccatacttcagtggtctctgcactcayacaagctgtttctgtgtatgtccacaagctgctgaaatcaggaaaactggtgcatctgaaagctctacagagactggaaagtatatcttctttatacataaaaatcactttgatgtattaattgtctttgaagacaaggttaatctcacagccaataaaggagatgatttgctgaagtaaagttgttcaacgggaagtatgggaattaggaactgaaaacacagtgtaatagtatgtctgtagaaggagaaaaaagagtcactaaaagttca

SEQ ID NO: 40625 - DNA, 600 bp, Chicken  19866894275556_1
tggaggtgtaatcaccaccagaaacctcagaacttcctgagtgaaaattatggactgaataaaatgaattgaaattacaaattatttttggtttatgtattgttaactggaacaggctttaattacataattattttctcaagtattgagaagattcaggttgtttaaatcttgattatttattgctctttaaatttttatgattggcttaaagtatcttatttttctggtcttttttcctccctctcattatctttacagaaaggagcagtaaacaaaatagcagaatttcaatgtttygtgttttcttttcatgctcagtaacattctagaacttttatgaaaagaagaatggaaaagaatttaaagaatagaaagactmattcatttcaattcaataataaattaagcaacaccagaatgtagttcagtacaagaaaaagcctaacactggagattgccctaggaaaatgtgaaatgccctatgaaatcatcatttctgatgaagaaccccacttttaatgctgcacatacaagcctatatatacagcagtcagtatatttcacatacatgcttggaatataactggaagtcaaagt

SEQ ID NO: 40626 - DNA, 600 bp, Chicken  19866894275556_2
tatttttggtttatgtattgttaactggaacaggctttaattacataattattttctcaagtattgagaagattcaggttgtttaaatcttgattatttattgctctttaaatttttatgattggcttaaagtatcttatttttctggtcttttttcctccctctcattatctttacagaaaggagcagtaaacaaaatagcagaatttcaatgtttygtgttttcttttcatgctcagtaacattctagaacttttatgaaaagaagaatggaaaagaatttaaagaatagaaagactmattcatttcaattcaataataaattaagcaacaccagaatgtagttcagtacaagaaaaagcctaacactggagattgccctaggaaaatgtgaaatgccctatgaaatcatcatttctgatgaagaaccccacttttaatgctgcacatacaagcctatatatacagcagtcagtatatttcacatacatgcttggaatataactggaagtcaaagttttggtgtgtaagtaataataaaataaattgaaaaataaactgaagaacagtaatctgaacaagaatacaaaagtgagcaat

SEQ ID NO: 40627 - DNA, 524 bp, Chicken  19866894275556_3
accagaatgtagttcagtacaagaaaaagcctaacactggagattgccctaggaaaatgtgaaatgccctatgaaatcatcatttctgatgaagaaccccacttttaatgctgcacatacaagcctatatatacagcagtcagtatatttcacatacatgcttggaatataactggaagtcaaagttttggtgtgtaagtaataataaaataaattgaaaaataaactgaagaacagtaatctgaacaagaatacaaaagtgagcaattctgtgaaataaaaaccgtatgcaagattcgrcttctcttatatttgtggacatttccatcttttaagaaaggaggggaagagacagtgttgaaataaatcattttggagcatattaaatagcaacagcaacaaaagaacataaaatcaaaactactgaaggatgtagaacattcctagttgtgctagggatgagtactttaggtacagaatgtacataattcacctgttatgtagggttactttatgcaaggcag

SEQ ID NO: 40628 - DNA, 600 bp, Chicken  19866894275558_1
ttttatgggaatggtacagagattcggtatgccagccactacaagacagggggggaagtaggacagaatttaaaatgttacttgtgaagttcaggcattttccttttgcacagtcaaacaggggctggcagctccctgacagaatgatttagtattttttacctactatatttcagatattctgacagcatggattacttttttataggcagaatcccctcaactctttcaaagcacattttaaagaactcctttttaaagaacattttcatagatattcaaggcacccatcaaagtagkggatattctttgctcattgatttgaggtggaatgataagactgttagtatttcatttccagcactatatttcaaagtaaaatggtaattccaattaaagtacaagctctgcaataagtgcatgagaagtctgaaactgttaatagctctgcaaagaaggctaagtggaatacatctctctggaatattttcctcatgcatatagctattactttgctctttttcagcrttttctttgtgacttctacaaaagatgtttgttaggtttggtttttcattccatttatgaaaatagatttgc

SEQ ID NO: 40629 - DNA, 469 bp, Chicken  19866894275558_2
tcaaagcacattttaaagaactcctttttaaagaacattttcatagatattcaaggcacccatcaaagtagkggatattctttgctcattgatttgaggtggaatgataagactgttagtatttcatttccagcactatatttcaaagtaaaatggtaattccaattaaagtacaagctctgcaataagtgcatgagaagtctgaaactgttaatagctctgcaaagaaggctaagtggaatacatctctctggaatattttcctcatgcatatagctattactttgctctttttcagcrttttctttgtgacttctacaaaagatgtttgttaggtttggtttttcattccatttatgaaaatagatttgctcttaggaaaaaaaaaagccattgaacactgccatacagaatctttttctgctcttaagagagagattctttgtcaagcataacaattcaggaatta

SEQ ID NO: 40630 - DNA, 600 bp, Chicken  19866894275568_1
cagagggccgtgcagtacaaaaaggtcacctttctgtgggttctcctcaccgaacccactgggcggtccgggggagctgctaccataggatcttttcagcaacagcagacataagcaaagaaccacaaaccaaggggcagggcgagaggaggagagcaggaaacaacagcagaagaacctctttgtttgaaggtttaattgtagacataggggtttccccccagagctgcagacctacctttgaaacctgctgccgccttgagaggccgagcccacgccccccacacaaggcagctcacwcacgcacagggagrgagaggagaggacatctatttacccaagctcaaggtctcctcatggatcaataattggatgmcatgtcccttcagctcggcctttgtcctgcaccgtcccgctgcggtgggtcagcacaccctgtgcactcagagatggagattttggagacttgctgagggaggagatctacaggttaggggcacctccagctgtgccaaaagcaaccccggaggctggtgcaggtagttaggctgtcctcctcaggggacagggagttgctgagcgactgttgtatgtctcaga

SEQ ID NO: 40631 - DNA, 600 bp, Chicken  19866894275568_2
gtacaaaaaggtcacctttctgtgggttctcctcaccgaacccactgggcggtccgggggagctgctaccataggatcttttcagcaacagcagacataagcaaagaaccacaaaccaaggggcagggcgagaggaggagagcaggaaacaacagcagaagaacctctttgtttgaaggtttaattgtagacataggggtttccccccagagctgcagacctacctttgaaacctgctgccgccttgagaggccgagcccacgccccccacacaaggcagctcacwcacgcacagggagrgagaggagaggacatctatttacccaagctcaaggtctcctcatggatcaataattggatgmcatgtcccttcagctcggcctttgtcctgcaccgtcccgctgcggtgggtcagcacaccctgtgcactcagagatggagattttggagacttgctgagggaggagatctacaggttaggggcacctccagctgtgccaaaagcaaccccggaggctggtgcaggtagttaggctgtcctcctcaggggacagggagttgctgagcgactgttgtatgtctcagacaacctcctyggtc

SEQ ID NO: 40632 - DNA, 600 bp, Chicken  19866894275568_3
ctgctaccataggatcttttcagcaacagcagacataagcaaagaaccacaaaccaaggggcagggcgagaggaggagagcaggaaacaacagcagaagaacctctttgtttgaaggtttaattgtagacataggggtttccccccagagctgcagacctacctttgaaacctgctgccgccttgagaggccgagcccacgccccccacacaaggcagctcacwcacgcacagggagrgagaggagaggacatctatttacccaagctcaaggtctcctcatggatcaataattggatgmcatgtcccttcagctcggcctttgtcctgcaccgtcccgctgcggtgggtcagcacaccctgtgcactcagagatggagattttggagacttgctgagggaggagatctacaggttaggggcacctccagctgtgccaaaagcaaccccggaggctggtgcaggtagttaggctgtcctcctcaggggacagggagttgctgagcgactgttgtatgtctcagacaacctcctyggtcccattgggtgttggcaagcagagctccctggctgacaggcatagaaggctcaaaggagggaa

SEQ ID NO: 40633 - DNA, 600 bp, Chicken  19866894275568_4
gagrgagaggagaggacatctatttacccaagctcaaggtctcctcatggatcaataattggatgmcatgtcccttcagctcggcctttgtcctgcaccgtcccgctgcggtgggtcagcacaccctgtgcactcagagatggagattttggagacttgctgagggaggagatctacaggttaggggcacctccagctgtgccaaaagcaaccccggaggctggtgcaggtagttaggctgtcctcctcaggggacagggagttgctgagcgactgttgtatgtctcagacaacctcctyggtcccattgggtgttggcaagcagagctccctggctgacaggcatagaaggctcaaaggagggaagcagacttcatgcagtgacagcagtggtcatgttgatgaaagcaaagcacagtgtccatcagtacagacctgaagctgtccctctggtcttcctggrctccttgctgcccattctcctgccgtggtgctccccacactcagttgcaccactactccctcttccctgcagcatctgctgccttctattcccaggtccttcttgcctgcactaccttctccctatggccccgcagc

SEQ ID NO: 40634 - DNA, 459 bp, Chicken  19866894275568_5
gggaggagatctacaggttaggggcacctccagctgtgccaaaagcaaccccggaggctggtgcaggtagttaggctgtcctcctcaggggacagggagttgctgagcgactgttgtatgtctcagacaacctcctyggtcccattgggtgttggcaagcagagctccctggctgacaggcatagaaggctcaaaggagggaagcagacttcatgcagtgacagcagtggtcatgttgatgaaagcaaagcacagtgtccatcagtacagacctgaagctgtccctctggtcttcctggrctccttgctgcccattctcctgccgtggtgctccccacactcagttgcaccactactccctcttccctgcagcatctgctgccttctattcccaggtccttcttgcctgcactaccttctccctatggccccgcagctctgctcgtgtcccttattttt

SEQ ID NO: 40635 - DNA, 571 bp, Chicken  19866894275569_1
gggcacagatgtgaacacttaatggtatttccctgtttttattacggaaagctcacacccagggctgtttgatcaataattgcaggcacaattgctgctgcaaggtataagttatttgattttgtttatgcagagaggaccagggatataaatagccttgtgcatactgttgtggaaactgagctctggctgtgggctgtgtttacgttcagagcatgggatggggctacttggggggaagcattgcaaaggtgactcccagttctcctgatgactaatggctgcaaactgatacagcakattctttgcagcgtggagcagactgagggatgttgtcagtgctcataggtgatctgagggcatttcatgccagaggggtttcagtaagtgccaactatactgtcacatggagatggagctgtttagcatctgtatcatgtgctgggaggtgaagcttgcgtgctagatgctgccacggtctcttggtatgtggggaaggtcagttagcacagtttattctgcatgaattcaccagagatatgagagagtctgtttactccatcccttttcc

SEQ ID NO: 40636 - DNA, 600 bp, Chicken  19866894275573_1
ctgttagcaaatgagttggtgatatgagggtgttctgttcatgccaaaaacacgagtgatgtatggtccaaaatgcatttgtctttcttctctctcccctttgttttccttggcttcaggatgatgaaatcagtttgtggctttgctttgaaatgagcaaaattttggtttggcacaggcaggacaaactgaagtaacactgaagctggtctttgaaaatatgcaaataatttgagaataataatatgctgttgaaatgatttgatctcagtgggactctgatgcatccagcagagcctkggtcatactaacrtgagtgtttcagcatccagttctgctcccattgaaaacattggtccctttaaattgaattttgtgggaattgaattggagatgaaagcagatagactactggggtggggggaagttcgtttaatgcttcatgtataattaygtagaccaaggagttcaagtgtctcaataatttctagatcagtaccagcaaataccagcattgctggaacatctgaacaccttgtagatctttttcctaccctgaaatagggggagctggaaagtgttgagctagatgcatggaaa

SEQ ID NO: 40637 - DNA, 600 bp, Chicken  19866894275573_2
agttggtgatatgagggtgttctgttcatgccaaaaacacgagtgatgtatggtccaaaatgcatttgtctttcttctctctcccctttgttttccttggcttcaggatgatgaaatcagtttgtggctttgctttgaaatgagcaaaattttggtttggcacaggcaggacaaactgaagtaacactgaagctggtctttgaaaatatgcaaataatttgagaataataatatgctgttgaaatgatttgatctcagtgggactctgatgcatccagcagagcctkggtcatactaacrtgagtgtttcagcatccagttctgctcccattgaaaacattggtccctttaaattgaattttgtgggaattgaattggagatgaaagcagatagactactggggtggggggaagttcgtttaatgcttcatgtataattaygtagaccaaggagttcaagtgtctcaataatttctagatcagtaccagcaaataccagcattgctggaacatctgaacaccttgtagatctttttcctaccctgaaatagggggagctggaaagtgttgagctagatgcatggaaaattccttgcaggc

SEQ ID NO: 40638 - DNA, 579 bp, Chicken  19866894275573_3
gagcaaaattttggtttggcacaggcaggacaaactgaagtaacactgaagctggtctttgaaaatatgcaaataatttgagaataataatatgctgttgaaatgatttgatctcagtgggactctgatgcatccagcagagcctkggtcatactaacrtgagtgtttcagcatccagttctgctcccattgaaaacattggtccctttaaattgaattttgtgggaattgaattggagatgaaagcagatagactactggggtggggggaagttcgtttaatgcttcatgtataattaygtagaccaaggagttcaagtgtctcaataatttctagatcagtaccagcaaataccagcattgctggaacatctgaacaccttgtagatctttttcctaccctgaaatagggggagctggaaagtgttgagctagatgcatggaaaattccttgcaggctattagaactcagactttctttaaaaacaaaaatgctgagatgaaattatgtggtttccttctcacttgggacttgaaacttcttggaataaatgagggtccaaaacaggaaacagcatt

SEQ ID NO: 40639 - DNA, 600 bp, Chicken  19866894275574_1
aggggaaaaaaatgataaaaagtccatgtcttgaccctgcccgatgtcacctgagtgacatgcagagctgactgcagagcaggagccacagcctttctcctccacgcgcagctgcaacacagtcccaaaggtagcagcagcactggaaccgctgccctgggtactgcagcagagctgggtgctgagcagggcttcccagtctggggcaaacgtttgcagtgtgcacagtggtactccgtctgctggtggcttcgaatgtgcacagcctgcactgcagtactgatagttcctgctgccctrtcctgtgccccaggccctgggcaggggccatgacaggatgtaggcccctagtccccctgccaagcctcactcgtgcagctccagggatgcctgttggcaactctggggaaagcagacaagaaagcaacaattgaccccaccttatgccttctgctgctgctttctgttcttggtgatgggtgcgggcttggggtacctgggtggcagggaggtagtgaaggactgagctagcacacagtgccaccagcccagcatagggaagactgcacagcagtgaggactgtgacaggttaaaacaca

SEQ ID NO: 40640 - DNA, 600 bp, Chicken  19866894275575_1
ccttggtggattctcaggaaatatccacattcaccactgtgtgccttgtgctcatctgcccggtagcacctatgatgggggtcattgcacattgggtggcagccgggcccagaaacactttctggtttggtgcaaattcattatgccaattgggggttgacttagtttgccccaggtgttcacagctgttaacagggctgacctggtggccccacggacacagctgggtgctgtgctgggcagaagcacctgtgtgccatctgggaggagccctgcgggtgggcacgttcagctcagttygtttgtactgctcttatactgagtatgaggtgttgataattgcgtttcagtttccttcttttaaatgatatggtcgattctactttcattacagcttcagttttagtgcaggagcctatttctttaacactatgaaaccaagtgctgaggtggcccttcagaaacaggaattatctttgcagttgcatcatatttaataagcacatataacgcagtaatcttgtaaaagctgattacctcaattattaacaattaggatttatgagttaagtaatatactgcaactgtgtcctattggca

SEQ ID NO: 40641 - DNA, 599 bp, Chicken  19866894275596_1
  misc_feature (1)..(72): n is any nucleotide
nnnnnnnnnnnnnnnnnnnnnnnnnnnnnnnnnnnnnnnnnnnnnnnnnnnnnnnnnnnnnnnnnnnnnnnnttaaaagtgcagataccagaaagaagaggaatatggtcttccttctactttcctgctgctaaaatagaaaaccttccccccccctgttctaggcaggggaagaaagtatcctggaccaaggcaaaggccacagttcctgagtggaatagaacggggtttggatgccaaaataaatgtagaccagggccattttatgtggcatgcattttaaatctactttccttgtaktagaatatcaycrttatctagtagtctgtctattcccaaagtcttatgcacccacctgcatgtgactttatctttgttttgccacagttcagtaagcattgctatagagacatcaaagaaaacaatagtaaccgaataatgttagcatttgatgttatagaaataaaataaaatatctgaagcagaatagagccacaagataaatgtcttcagagtcagaaaaaaagaatgtcatggctttaacctgtttacatgaaagtattctctctggtgggataatcaaagtttcaaagatgttg

SEQ ID NO: 40642 - DNA, 599 bp, Chicken  19866894275596_2
  misc_feature (1)..(61): n is any nucleotide
nnnnnnnnnnnnnnnnnnnnnnnnnnnnnnnnnnnnnnnnnnnnnnnnnnnnnnnnnnnnnttaaaagtgcagataccagaaagaagaggaatatggtcttccttctactttcctgctgctaaaatagaaaaccttccccccccctgttctaggcaggggaagaaagtatcctggaccaaggcaaaggccacagttcctgagtggaatagaacggggtttggatgccaaaataaatgtagaccagggccattttatgtggcatgcattttaaatctactttccttgtaktagaatatcaycrttatctagtagtctgtctattcccaaagtcttatgcacccacctgcatgtgactttatctttgttttgccacagttcagtaagcattgctatagagacatcaaagaaaacaatagtaaccgaataatgttagcatttgatgttatagaaataaaataaaatatctgaagcagaatagagccacaagataaatgtcttcagagtcagaaaaaaagaatgtcatggctttaacctgtttacatgaaagtattctctctggtgggataatcaaagtttcaaagatgttgtcctatataat

SEQ ID NO: 40643 - DNA, 599 bp, Chicken  19866894275596_3
  misc_feature (1)..(59): n is any nucleotide
nnnnnnnnnnnnnnnnnnnnnnnnnnnnnnnnnnnnnnnnnnnnnnnnnnnnnnnnnnnttaaaagtgcagataccagaaagaagaggaatatggtcttccttctactttcctgctgctaaaatagaaaaccttccccccccctgttctaggcaggggaagaaagtatcctggaccaaggcaaaggccacagttcctgagtggaatagaacggggtttggatgccaaaataaatgtagaccagggccattttatgtggcatgcattttaaatctactttccttgtaktagaatatcaycrttatctagtagtctgtctattcccaaagtcttatgcacccacctgcatgtgactttatctttgttttgccacagttcagtaagcattgctatagagacatcaaagaaaacaatagtaaccgaataatgttagcatttgatgttatagaaataaaataaaatatctgaagcagaatagagccacaagataaatgtcttcagagtcagaaaaaaagaatgtcatggctttaacctgtttacatgaaagtattctctctggtgggataatcaaagtttcaaagatgttgtcctatataatat

SEQ ID NO: 40644 - DNA, 600 bp, Chicken  19866894275608_1
tgatgatccagcactgggaaggggaacgtgattctgaagcaggcttaaattgtaaagcatgttcggatctgctaagcaacagcattgacacgtttaaataaatctgctgttgagtaatacagagtgacatattgagagcaattaaaaaaaacaacacagcacaaatttgggaaatgactggaatggaaacagagcatagaggacgttggataaaggagagggagagctactccacaaaaggagtgtgatggaggacaagaatagccatcgggaggggtgagacagtagtgggagtgtgcrttgatgctgaaattggctcttggcagtagggcccttgtggtgggacttctctgccaatgctgatggtcataaggattgaagagatcttactgcctagttcagaaaggagcacgtggagggacatcacacagagagagggactggaaggtgctgtttgcattcctgcagctttcttactgtgtgctgagtgcggtccgacttctgttgtacccatcactgcagagctgtgcaacactgcatcggtgaaggaacatgcaggtggaattcagaggttttgtatttggagctaatgagagaaat

SEQ ID NO: 40645 - DNA, 600 bp, Chicken  19866894275612_1
ctgagctgccatttggggcttaccttttacaacaagtatgtttttagtccttgctgtggctcttcttgagttaccttttcttttctttatttaatcggggagcctttacctgccagcacggctggaggaaggtcaaaagtaggagttatgcataacgagagcagcgtccgaagatcagatgagctgaggccaggttttctgcttctgtacagctcaccccccgccccctaaaaacaaacaaagtgttgactgccaaatcagaacacaacatacaagccctctttctgttgtgaaacgccrtggttctttgtcacgtatcgcagaggtaggaatcaaaaagagctctgcacaaagggctggtcaatacaagatgtcggctggctgcagttacctcttctcatctgtgcrtctkcaaatacagcgacagctccagtgttccataatttctggggggctctttctgttttcctagaagcagtgacttctgcctacgtgtaattaggcttttgatttacataaaggggaaaaaacaagcaaacaaacaaagaaaaacagcaatacaaaaacccccaaaccatttgtgagtagaagcaaagagaa

SEQ ID NO: 40646 - DNA, 600 bp, Chicken  19866894275612_2
cctgccagcacggctggaggaaggtcaaaagtaggagttatgcataacgagagcagcgtccgaagatcagatgagctgaggccaggttttctgcttctgtacagctcaccccccgccccctaaaaacaaacaaagtgttgactgccaaatcagaacacaacatacaagccctctttctgttgtgaaacgccrtggttctttgtcacgtatcgcagaggtaggaatcaaaaagagctctgcacaaagggctggtcaatacaagatgtcggctggctgcagttacctcttctcatctgtgcrtctkcaaatacagcgacagctccagtgttccataatttctggggggctctttctgttttcctagaagcagtgacttctgcctacgtgtaattaggcttttgatttacataaaggggaaaaaacaagcaaacaaacaaagaaaaacagcaatacaaaaacccccaaaccatttgtgagtagaagcaaagagaatacatgactctgagacttgaagtggtagggcattctcatgattgggccttggaggactgctttcagaggtgcttttttttttccccttcattcctttaaaagggttag

SEQ ID NO: 40647 - DNA, 600 bp, Chicken  19866894275612_3
ccagcacggctggaggaaggtcaaaagtaggagttatgcataacgagagcagcgtccgaagatcagatgagctgaggccaggttttctgcttctgtacagctcaccccccgccccctaaaaacaaacaaagtgttgactgccaaatcagaacacaacatacaagccctctttctgttgtgaaacgccrtggttctttgtcacgtatcgcagaggtaggaatcaaaaagagctctgcacaaagggctggtcaatacaagatgtcggctggctgcagttacctcttctcatctgtgcrtctkcaaatacagcgacagctccagtgttccataatttctggggggctctttctgttttcctagaagcagtgacttctgcctacgtgtaattaggcttttgatttacataaaggggaaaaaacaagcaaacaaacaaagaaaaacagcaatacaaaaacccccaaaccatttgtgagtagaagcaaagagaatacatgactctgagacttgaagtggtagggcattctcatgattgggccttggaggactgctttcagaggtgcttttttttttccccttcattcctttaaaagggttagttgg

SEQ ID NO: 40648 - DNA, 600 bp, Chicken  19866894275620_1
ataatatttccaatatgttgtttaatcactgagcaagtctgctttcaaaccgggcagcgcgcccattaccagtgagcagcattgggttagagcaacttaacaattacactagttgtgcttaaaaagcattctgactcaaatcagctgtaactgttggaaaaggtatttaaatatgccaataactttttaacatcatcagaaaaggacttttcttttattctcagtctctggaggatgtcagcactttttctcgctaatagaagtttgtttagcaccaaggaaaatttgctatctttgcamcttttccagctccagttggcttacattgcaaaaagtatagctcagygttgaacctacatttttggaagagctcaaagcagcaactaggcctatgccacgtaatttgaacatatatattgcaaagatgtattttcatgatgacactgttgttactagttctgaagaaaatattaaagcagagttgtttgtgatctattctaaaagtatttctgaaatacagaagaaacattcttccttctctatgtggataacataccagataggaagctagtatatcattctgctttctaaacagtaaat

SEQ ID NO: 40649 - DNA, 600 bp, Chicken  19866894275620_2
aaaccgggcagcgcgcccattaccagtgagcagcattgggttagagcaacttaacaattacactagttgtgcttaaaaagcattctgactcaaatcagctgtaactgttggaaaaggtatttaaatatgccaataactttttaacatcatcagaaaaggacttttcttttattctcagtctctggaggatgtcagcactttttctcgctaatagaagtttgtttagcaccaaggaaaatttgctatctttgcamcttttccagctccagttggcttacattgcaaaaagtatagctcagygttgaacctacatttttggaagagctcaaagcagcaactaggcctatgccacgtaatttgaacatatatattgcaaagatgtattttcatgatgacactgttgttactagttctgaagaaaatattaaagcagagttgtttgtgatctattctaaaagtatttctgaaatacagaagaaacattcttccttctctatgtggataacataccagataggaagctagtatatcattctgctttctaaacagtaaattaaagagctgtctctactacttgcatgatgttttggggaaatcttg

SEQ ID NO: 40650 - DNA, 600 bp, Chicken  19866894275621_1
catattgctgaaagtttaactgtggtttcctggttgttccacatctataagcctcacattccatgccaagcgtagcagcagttgcatttctttcagcagtggtaaagcacaaggctaaatattctggagcatcagtacacattaaattccctgctgctctgagagtgcttctcataaatactgtgggtaggctgtgttatgagtatcagacacagagaagaccaccaatgtgattaatcataaatggaccaaggaaaactcacgttggagttttgaggattgctattggttgttcttggrgaacttgcaagtgcaaaggtattgagaatcaaatgactayttaacctagcatgccagcatttctcctgctttggaagtctataccagagactgaaaaaagcaggatttaaatagctgtcagaaaaactgaaaaggctttgtgactccaaaggtttggagaaaataaaaacaatcactcagagtaatttttaagtcatggacaaatggcattgaataagctaaccatggtgaattttataaagcagtaaataggagtatcactcttcagcccaagatttaacaaaggaaaatgtcctttgg

SEQ ID NO: 40651 - DNA, 600 bp, Chicken  19866894275621_2
acatctataagcctcacattccatgccaagcgtagcagcagttgcatttctttcagcagtggtaaagcacaaggctaaatattctggagcatcagtacacattaaattccctgctgctctgagagtgcttctcataaatactgtgggtaggctgtgttatgagtatcagacacagagaagaccaccaatgtgattaatcataaatggaccaaggaaaactcacgttggagttttgaggattgctattggttgttcttggrgaacttgcaagtgcaaaggtattgagaatcaaatgactayttaacctagcatgccagcatttctcctgctttggaagtctataccagagactgaaaaaagcaggatttaaatagctgtcagaaaaactgaaaaggctttgtgactccaaaggtttggagaaaataaaaacaatcactcagagtaatttttaagtcatggacaaatggcattgaataagctaaccatggtgaattttataaagcagtaaataggagtatcactcttcagcccaagatttaacaaaggaaaatgtcctttggcagatcaaaaactgaatttctttccctcagtgccccatga

SEQ ID NO: 40652 - DNA, 600 bp, Chicken  19866894275623_1
cttctgatacgttagtagcagatttgaagcaactgtagctcaagggaaattgcaggactcctatagcaacccctgtaaacacagtgtcacaggggtgaggccaacagccaagttaccagctcactgcctgggaagcagcagccagcacctcttgtccagatccaggaatgccacgaagtccccactgactcctgttgcttccttcagttcacatagtttcatccatccatgcatgaacttccaagtctcgaagtagcatgggttggtgttgggaatgatcttcagatcacctctctctcyccaggcagatggagtatatctcaagagtaaaacatgggctagagccatgtcttcagatctaatctgcatcataatctggcctttctaagacttggaaactcccatctggctcattataggtatatggaggccagtatcaactttgcctgaaattcaaaggttttaggggctgaagcttcgttgtcacttcttggaatagtcctcagcaggaaggacagctgttgtggatgtcttgtgagtgatggatgcttttcagagactgcaggactggggaataaaatgtgctcctgcttaccatta

SEQ ID NO: 40653 - DNA, 600 bp, Chicken  19866894275626_1
tctcttgctacttgagatcttaaggtcatccagttcttattaaattttcatattttaattttttcatgtctcacatctttttgctttgattgccctcatcattttcaacaatatcttattttgtaatcactaaaatcaataccagcgttttcatctccttgatcctattttatataaaaagctcaattattatcaacactctgagttcaactttcatttaaatggaataactcccttacaatttgtattagaactacttagataaaaattacattgatgaaagtaatataccaagctcasctcctgacttttacaccatatctggtttagctagtgtgtctgtgaaagttcttcctttcyaaaggagctttctccatttttatttcattttattttttgtatataaggagttgcttttgctactcctgttgttttatacatcttttcatgcaagtgctatggaaaccagatgaacctaagctaaagatgcatgatggtccagtttytttaaagaaatattctattcaaagacttcatttatttttatttttattttttctttatttttatttttacttttttatttttattgtacgtatg

SEQ ID NO: 40654 - DNA, 600 bp, Chicken  19866894275626_2
ttttcatgtctcacatctttttgctttgattgccctcatcattttcaacaatatcttattttgtaatcactaaaatcaataccagcgttttcatctccttgatcctattttatataaaaagctcaattattatcaacactctgagttcaactttcatttaaatggaataactcccttacaatttgtattagaactacttagataaaaattacattgatgaaagtaatataccaagctcasctcctgacttttacaccatatctggtttagctagtgtgtctgtgaaagttcttcctttcyaaaggagctttctccatttttatttcattttattttttgtatataaggagttgcttttgctactcctgttgttttatacatcttttcatgcaagtgctatggaaaccagatgaacctaagctaaagatgcatgatggtccagtttytttaaagaaatattctattcaaagacttcatttatttttatttttattttttctttatttttatttttacttttttatttttattgtacgtatgagtgaatcygagactcattaatgtttttaaacatttttttttttgctactaagttgctcc

SEQ ID NO: 40655 - DNA, 600 bp, Chicken  19866894275626_3
tcaactttcatttaaatggaataactcccttacaatttgtattagaactacttagataaaaattacattgatgaaagtaatataccaagctcasctcctgacttttacaccatatctggtttagctagtgtgtctgtgaaagttcttcctttcyaaaggagctttctccatttttatttcattttattttttgtatataaggagttgcttttgctactcctgttgttttatacatcttttcatgcaagtgctatggaaaccagatgaacctaagctaaagatgcatgatggtccagtttytttaaagaaatattctattcaaagacttcatttatttttatttttattttttctttatttttatttttacttttttatttttattgtacgtatgagtgaatcygagactcattaatgtttttaaacatttttttttttgctactaagttgctcctgctgcatgtgtaattgtaagagttaattgtgtatttcatacttgcctaggtagagtatatacgttaaggtagagctattaaccaaagagtcactgagggaaaaaagcatttcttagctctctgccaatgtatttcttataggctt

SEQ ID NO: 40656 - DNA, 600 bp, Chicken  19866894275626_4
tttacaccatatctggtttagctagtgtgtctgtgaaagttcttcctttcyaaaggagctttctccatttttatttcattttattttttgtatataaggagttgcttttgctactcctgttgttttatacatcttttcatgcaagtgctatggaaaccagatgaacctaagctaaagatgcatgatggtccagtttytttaaagaaatattctattcaaagacttcatttatttttatttttattttttctttatttttatttttacttttttatttttattgtacgtatgagtgaatcygagactcattaatgtttttaaacatttttttttttgctactaagttgctcctgctgcatgtgtaattgtaagagttaattgtgtatttcatacttgcctaggtagagtatatacgttaaggtagagctattaaccaaagagtcactgagggaaaaaagcatttcttagctctctgccaatgtatttcttataggcttggatcccgaatgaagtagtaaggaagtatgctgacctatcatttgagaaatactttacattttgaatttgaatgactgttctaggrtcttttgaagagctggt

SEQ ID NO: 40657 - DNA, 600 bp, Chicken  19866894275626_5
tacgtatgagtgaatcygagactcattaatgtttttaaacatttttttttttgctactaagttgctcctgctgcatgtgtaattgtaagagttaattgtgtatttcatacttgcctaggtagagtatatacgttaaggtagagctattaaccaaagagtcactgagggaaaaaagcatttcttagctctctgccaatgtatttcttataggcttggatcccgaatgaagtagtaaggaagtatgctgacctatcatttgagaaatactttacattttgaatttgaatgactgttctaggrtcttttgaagagctggttaaagagttaacaccaattcacttctttatctgtggttacacaaattggtagtgaaactgtgtggaaactagtagagatttgtaacaacataattgctttgtcagggagactgaacctgagacttctcgctccaaggcccagacctctgctgctgagccaaaggactgatctgctcactgtgagcactaacagttggctcttctctttgggtcagccacagcaggagacaggaacacaatgtgttagtgttcaaaagagtttctttttgaatttttacttttg

SEQ ID NO: 40658 - DNA, 600 bp, Chicken  19866894275627_1
agcaatctatttgctacaataaatatttggggatgtagttacacagagcacagttgtgagttttccatgggggtgcatggagcatgttcagctttgactactgctattacagccctgccctcagggtaggtctcagacacccgttctgtgctaccattattctacctccaggatatctgatttgaatgcttacagcaagtttcagtgtaaaaatgagtggaaaggaagagttacagaatgagttgtaagaaatgaatgccttccattgacttagctggaggttaggtgcccccctgagtrcatttccaggcacccaagcaatctcaaataagggacctcttgaaactatggggagttgcaagaagactcgtggtgattgcrgctcrtgagcataaccctggctctccagcctgggaaattctctgaaatctttcccaaggcaggtgaagctactgcaaggctgtaggcaggtgcacatcacaccaatacaatagctgcaggctcactgctggcggttttagctttccttcctggcaaggacaaaggaagcagctctgctcagtgaactcccctgtggcagaaggaaatagctacactgca

SEQ ID NO: 40659 - DNA, 600 bp, Chicken  19866894275627_2
gcatgttcagctttgactactgctattacagccctgccctcagggtaggtctcagacacccgttctgtgctaccattattctacctccaggatatctgatttgaatgcttacagcaagtttcagtgtaaaaatgagtggaaaggaagagttacagaatgagttgtaagaaatgaatgccttccattgacttagctggaggttaggtgcccccctgagtrcatttccaggcacccaagcaatctcaaataagggacctcttgaaactatggggagttgcaagaagactcgtggtgattgcrgctcrtgagcataaccctggctctccagcctgggaaattctctgaaatctttcccaaggcaggtgaagctactgcaaggctgtaggcaggtgcacatcacaccaatacaatagctgcaggctcactgctggcggttttagctttccttcctggcaaggacaaaggaagcagctctgctcagtgaactcccctgtggcagaaggaaatagctacactgcaagggcactttgcttacatccatgcttttgcaatcatggcrtgtgtccctgttgcaaagaaaagaaatggtgggaaagctta

SEQ ID NO: 40660 - DNA, 600 bp, Chicken  19866894275627_3
ttcagctttgactactgctattacagccctgccctcagggtaggtctcagacacccgttctgtgctaccattattctacctccaggatatctgatttgaatgcttacagcaagtttcagtgtaaaaatgagtggaaaggaagagttacagaatgagttgtaagaaatgaatgccttccattgacttagctggaggttaggtgcccccctgagtrcatttccaggcacccaagcaatctcaaataagggacctcttgaaactatggggagttgcaagaagactcgtggtgattgcrgctcrtgagcataaccctggctctccagcctgggaaattctctgaaatctttcccaaggcaggtgaagctactgcaaggctgtaggcaggtgcacatcacaccaatacaatagctgcaggctcactgctggcggttttagctttccttcctggcaaggacaaaggaagcagctctgctcagtgaactcccctgtggcagaaggaaatagctacactgcaagggcactttgcttacatccatgcttttgcaatcatggcrtgtgtccctgttgcaaagaaaagaaatggtgggaaagcttagtaca

SEQ ID NO: 40661 - DNA, 600 bp, Chicken  19866894275627_4
tgaaactatggggagttgcaagaagactcgtggtgattgcrgctcrtgagcataaccctggctctccagcctgggaaattctctgaaatctttcccaaggcaggtgaagctactgcaaggctgtaggcaggtgcacatcacaccaatacaatagctgcaggctcactgctggcggttttagctttccttcctggcaaggacaaaggaagcagctctgctcagtgaactcccctgtggcagaaggaaatagctacactgcaagggcactttgcttacatccatgcttttgcaatcatggcrtgtgtccctgttgcaaagaaaagaaatggtgggaaagcttagtacaagcccttatttgcctgctggggaaggtgctgggcagcctcagcccaaaagataaaggtacaacctgacctacagatagagacccggatccaaagatatacatcaaactgaaaatgcttgatagctgctttgtccacactgtcacaatacattagctgctaatgccctttctgcatatgaaggcctctttaaaagcacatagacaacgttcagggaatttctgtatggtgttttctaggttgccttatgttatgg

SEQ ID NO: 40662 - DNA, 600 bp, Chicken  19866894275628_1
gcctgcacttcaagccagtctgtgagatgcagcccatggcacactaagccaatttcctccaaattgtttcgaagaatatgtatttttaattttcttttttactccccacttttctctataaaccagtgtaacttgatgtgaatccactgtttaaataggggttacttcaaacagcaggttgtcgtactttgcactgcacagtgtaatcgaagagaagttcttagatggaatttccccaaagcaaaggatatacattaagaggattaatattccatacagagcactataataataatctcyaaagtttttccacaacttccagttaatttattctagcaccaatagtgtaaccacaagtattctagcagaatgaaaaaaagcacatttccactaatatggctttaagatctgagtacytcractgtttctctttaaatcacatttatttcaattctgaaaaascgcattactttgatatatcttctacaatggcacttttatgccttctcaggacatcagtgattttcagacttgcgaattgatactaaaaataattaagcactaaaggtcaagaaaatttttctcctctttttttggtag

SEQ ID NO: 40663 - DNA, 600 bp, Chicken  19866894275628_2
ataaaccagtgtaacttgatgtgaatccactgtttaaataggggttacttcaaacagcaggttgtcgtactttgcactgcacagtgtaatcgaagagaagttcttagatggaatttccccaaagcaaaggatatacattaagaggattaatattccatacagagcactataataataatctcyaaagtttttccacaacttccagttaatttattctagcaccaatagtgtaaccacaagtattctagcagaatgaaaaaaagcacatttccactaatatggctttaagatctgagtacytcractgtttctctttaaatcacatttatttcaattctgaaaaascgcattactttgatatatcttctacaatggcacttttatgccttctcaggacatcagtgattttcagacttgcgaattgatactaaaaataattaagcactaaaggtcaagaaaatttttctcctctttttttggtagcacttctatctcatctttccagaagtgtcattaattgctcctttcaaccaaaaragaacaagcgtctctgttaaacatagacaaaattggacctcaaaactcaatcacaccaaccat

SEQ ID NO: 40664 - DNA, 600 bp, Chicken  19866894275628_3
aaccagtgtaacttgatgtgaatccactgtttaaataggggttacttcaaacagcaggttgtcgtactttgcactgcacagtgtaatcgaagagaagttcttagatggaatttccccaaagcaaaggatatacattaagaggattaatattccatacagagcactataataataatctcyaaagtttttccacaacttccagttaatttattctagcaccaatagtgtaaccacaagtattctagcagaatgaaaaaaagcacatttccactaatatggctttaagatctgagtacytcractgtttctctttaaatcacatttatttcaattctgaaaaascgcattactttgatatatcttctacaatggcacttttatgccttctcaggacatcagtgattttcagacttgcgaattgatactaaaaataattaagcactaaaggtcaagaaaatttttctcctctttttttggtagcacttctatctcatctttccagaagtgtcattaattgctcctttcaaccaaaaragaacaagcgtctctgttaaacatagacaaaattggacctcaaaactcaatcacaccaaccatgca

SEQ ID NO: 40665 - DNA, 600 bp, Chicken  19866894275628_4
tacttcaaacagcaggttgtcgtactttgcactgcacagtgtaatcgaagagaagttcttagatggaatttccccaaagcaaaggatatacattaagaggattaatattccatacagagcactataataataatctcyaaagtttttccacaacttccagttaatttattctagcaccaatagtgtaaccacaagtattctagcagaatgaaaaaaagcacatttccactaatatggctttaagatctgagtacytcractgtttctctttaaatcacatttatttcaattctgaaaaascgcattactttgatatatcttctacaatggcacttttatgccttctcaggacatcagtgattttcagacttgcgaattgatactaaaaataattaagcactaaaggtcaagaaaatttttctcctctttttttggtagcacttctatctcatctttccagaagtgtcattaattgctcctttcaaccaaaaragaacaagcgtctctgttaaacatagacaaaattggacctcaaaactcaatcacaccaaccatgcattagagaaaaggcttagcttctcagtacatatacagctggaa

SEQ ID NO: 40666 - DNA, 467 bp, Chicken  19866894275628_5
aagtattctagcagaatgaaaaaaagcacatttccactaatatggctttaagatctgagtacytcractgtttctctttaaatcacatttatttcaattctgaaaaascgcattactttgatatatcttctacaatggcacttttatgccttctcaggacatcagtgattttcagacttgcgaattgatactaaaaataattaagcactaaaggtcaagaaaatttttctcctctttttttggtagcacttctatctcatctttccagaagtgtcattaattgctcctttcaaccaaaaragaacaagcgtctctgttaaacatagacaaaattggacctcaaaactcaatcacaccaaccatgcattagagaaaaggcttagcttctcagtacatatacagctggaaatgctatttataattaaaaacaaggctaaacacaaaaacacagaactagtcttaggcat

SEQ ID NO: 40667 - DNA, 600 bp, Chicken  19866894275640_1
aactaactctaataaaaaacaaaactttatcccagtctcctaggaagcacagcttgtatgagcaaaacctgctgatcagtctatcctaaccacattagtacttgtaagtcactatcaaacgaataatacaaagagagaaaggacagagaagttatcatgagttgaaccaaagagaaatcaaaattagcatcttcattaactgtgggatgcagcagccagctggcccaaccagtgcagtagtgtggttcacctatttggtatgcacctggcttgcaagtacccaaagcacatacccagtcrtacaggtaatgagagggaacgggaggcacagaggtgaaagaaacagaagaaaaactcyaagaagccagccttccttagctaccctgtttacagtgaaaagatcttggtttatttcacccaacgtgaagccactgtgcacttcatcttctccaggatcaggacataactctgacacactaatatctagaacacaaatgacacgttttttcttttctgtttctccagtccagagacagagcgacatgctccctaccttttctgaattatactgggatttgcagtcaccagctgggttttcaa

SEQ ID NO: 40668 - DNA, 600 bp, Chicken  19866894275640_2
tgagcaaaacctgctgatcagtctatcctaaccacattagtacttgtaagtcactatcaaacgaataatacaaagagagaaaggacagagaagttatcatgagttgaaccaaagagaaatcaaaattagcatcttcattaactgtgggatgcagcagccagctggcccaaccagtgcagtagtgtggttcacctatttggtatgcacctggcttgcaagtacccaaagcacatacccagtcrtacaggtaatgagagggaacgggaggcacagaggtgaaagaaacagaagaaaaactcyaagaagccagccttccttagctaccctgtttacagtgaaaagatcttggtttatttcacccaacgtgaagccactgtgcacttcatcttctccaggatcaggacataactctgacacactaatatctagaacacaaatgacacgttttttcttttctgtttctccagtccagagacagagcgacatgctccctaccttttctgaattatactgggatttgcagtcaccagctgggttttcaatccaacgtccttgctgtattctctggatagaggaggaaggttgcacctgtgcacagaa

SEQ ID NO: 40669 - DNA, 600 bp, Chicken  19866894275648_1
ttatgtattttgttttgtgtgttcctcaacagaaatttgcgagggtccctgctaatggtcttggcgtaaatgtttcaaatcaagacggttttacaccattgcatatggctgcactgcatggacactctgaccttgtctctctcttgttgaaacacggagccagtatcagtgccaagaatgcagaacatgcagtgcctcttcatttagcctgccaaaaaggtcactcccaggtaatggagcctcttcataaatgcaagctatttaacacagcaaaaagctgttaaagctaatttctgtgarattagcaacaagataaaccagttaacaattaaaattaatttaatgatgcttaaggctgaggtgatggttggttggtttgtatggcctaaattatggcaaccagtgtgataagaattagtgcttttgattgtcatccgtttggcaaaactgagacttgttttcttcaatcttttttcttccctccctttttcattctgtgtttacagatttataaaggaatgtgcatgattgcagttaggtagtatcttcagttaaaaagttatttcttccaacaggtggtagaatgtctaatggattata

SEQ ID NO: 40670 - DNA, 600 bp, Chicken  19866894275650_1
gatgacatttagtttaactatggggactctgaaatccacaggcggtcttccagttctgcttttcaccttgattgcattacaacatccacattaactactcctagatcagctgtgtttttcatggaagtcacagtgcagatgccacaggaaatactctgatatttattgcaattgccgatactcctctaagtactgctggggcagtatttggaatgatgctctgtggaaggtgaccaatgacagggcagtcctggagccagcctgaccttccagctcagctgactgctttgtgtttactgyaaatgatgcagagtgagaacagttaggaaatatttcttctccaaaagagtgctcaggtgctagaacaggctgcccagggaagaggtggaaacaccatccctggcagtgttyaagaaccatggagatgtagtacacagagcatggttagggggcagtattggcagtaggtagatggttggactaggtgatcttagtggtcttctccaaccakatggcaaacaggcatataggtattggaccagagagattgctgcattacaaaggagaaatgaaataaagatcttacccatggcctgggct

SEQ ID NO: 40671 - DNA, 600 bp, Chicken  19866894275650_2
gtgtttttcatggaagtcacagtgcagatgccacaggaaatactctgatatttattgcaattgccgatactcctctaagtactgctggggcagtatttggaatgatgctctgtggaaggtgaccaatgacagggcagtcctggagccagcctgaccttccagctcagctgactgctttgtgtttactgyaaatgatgcagagtgagaacagttaggaaatatttcttctccaaaagagtgctcaggtgctagaacaggctgcccagggaagaggtggaaacaccatccctggcagtgttyaagaaccatggagatgtagtacacagagcatggttagggggcagtattggcagtaggtagatggttggactaggtgatcttagtggtcttctccaaccakatggcaaacaggcatataggtattggaccagagagattgctgcattacaaaggagaaatgaaataaagatcttacccatggcctgggctcrcagaagagctccaagaggaaggatctccacatagagatccttcttccttgagagtcagcccttaaatggcgtctaggagggctgcagccaggctccaccccttccggtc

SEQ ID NO: 40672 - DNA, 600 bp, Chicken  19866894275650_3
aatgatgctctgtggaaggtgaccaatgacagggcagtcctggagccagcctgaccttccagctcagctgactgctttgtgtttactgyaaatgatgcagagtgagaacagttaggaaatatttcttctccaaaagagtgctcaggtgctagaacaggctgcccagggaagaggtggaaacaccatccctggcagtgttyaagaaccatggagatgtagtacacagagcatggttagggggcagtattggcagtaggtagatggttggactaggtgatcttagtggtcttctccaaccakatggcaaacaggcatataggtattggaccagagagattgctgcattacaaaggagaaatgaaataaagatcttacccatggcctgggctcrcagaagagctccaagaggaaggatctccacatagagatccttcttccttgagagtcagcccttaaatggcgtctaggagggctgcagccaggctccaccccttccggtcactcaggtgaaaatgcattcacctgtgcccctgcagctgactcagcgctcacctcaggtggtcaatcagaggttcaggccgtgattcaacagttcccata

SEQ ID NO: 40673 - DNA, 551 bp, Chicken  19866894275650_4
atgatgcagagtgagaacagttaggaaatatttcttctccaaaagagtgctcaggtgctagaacaggctgcccagggaagaggtggaaacaccatccctggcagtgttyaagaaccatggagatgtagtacacagagcatggttagggggcagtattggcagtaggtagatggttggactaggtgatcttagtggtcttctccaaccakatggcaaacaggcatataggtattggaccagagagattgctgcattacaaaggagaaatgaaataaagatcttacccatggcctgggctcrcagaagagctccaagaggaaggatctccacatagagatccttcttccttgagagtcagcccttaaatggcgtctaggagggctgcagccaggctccaccccttccggtcactcaggtgaaaatgcattcacctgtgcccctgcagctgactcagcgctcacctcaggtggtcaatcagaggttcaggccgtgattcaacagttcccatacaccaaccttagtgattctgtttctagcacgcacatagatat

SEQ ID NO: 40674 - DNA, 599 bp, Chicken  19866894275654_1
  misc_feature (1)..(106): n is any nucleotide
nnnnnnnnnnnnnnnnnnnnnnnnnnnnnnnnnnnnnnnnnnnnnnnnnnnnnnnnnnnnnnnnnnnnnnnnnnnnnnnnnnnnnnnnnnnnnnnnnnnnnnnnnncccattccagtgcttaacaaccctttctgtatagaagtgtttcctgatatccaacctaaacttaccctgcactacttggggccatttccccgtatctctcatcctgtcacctgtcagcagtgagaagagatcagccccgctctctctgtaagcacctttcagatactgggagagagcaataaggtctcccctcwgcctccttttcccagaccaaacagccccagttccttcagccactcctcataggccatattctccaagcccttcacaagccttgttgcccttctttggacctgctccagcacctycatgtcctttctgtactgaggtgcccaaaactgagcgcaggactcgaggtgaggcctcaccaatgccgagtagaggggcaggatgacttccctggtgctgctcaccacaccattcctgatacaagccaggaggcygttggccttcttggccacctgggcacactgctggctcctattcagctgac

SEQ ID NO: 40675 - DNA, 600 bp, Chicken  19866894275654_2
agtgcttaacaaccctttctgtatagaagtgtttcctgatatccaacctaaacttaccctgcactacttggggccatttccccgtatctctcatcctgtcacctgtcagcagtgagaagagatcagccccgctctctctgtaagcacctttcagatactgggagagagcaataaggtctcccctcwgcctccttttcccagaccaaacagccccagttccttcagccactcctcataggccatattctccaagcccttcacaagccttgttgcccttctttggacctgctccagcacctycatgtcctttctgtactgaggtgcccaaaactgagcgcaggactcgaggtgaggcctcaccaatgccgagtagaggggcaggatgacttccctggtgctgctcaccacaccattcctgatacaagccaggaggcygttggccttcttggccacctgggcacactgctggctcctattcagctgactgtccatcagtacaccaaggaccgtttccatcaggcagctttccagctactcctccccaagcctgtagggattgcctgtggttgttgtgaccaaaatgcaggacctgacagttgg

SEQ ID NO: 40676 - DNA, 600 bp, Chicken  19866894275654_3
ctctgtaagcacctttcagatactgggagagagcaataaggtctcccctcwgcctccttttcccagaccaaacagccccagttccttcagccactcctcataggccatattctccaagcccttcacaagccttgttgcccttctttggacctgctccagcacctycatgtcctttctgtactgaggtgcccaaaactgagcgcaggactcgaggtgaggcctcaccaatgccgagtagaggggcaggatgacttccctggtgctgctcaccacaccattcctgatacaagccaggaggcygttggccttcttggccacctgggcacactgctggctcctattcagctgactgtccatcagtacaccaaggaccgtttccatcaggcagctttccagctactcctccccaagcctgtagggattgcctgtggttgttgtgaccaaaatgcaggacctgacagttggccctatggaaactcatacagtttaccttggctcattgatccagtctctccaggtccctctgtagtgcccttcttcccctcaggcagatcaacactccctcccagcttggtgtcctcagcaaacttagtgagggtg

SEQ ID NO: 40677 - DNA, 599 bp, Chicken  19866894275655_1
  misc_feature (1)..(3): n is any nucleotide
nnntcctgggctgaataaaagcagaggctgatcggtgtcttggtctagagagtaagggagggatgtgaaactggctatttcagctcatgagcagtgattcactcatgcataggaaggtattcctttaatttttatgccttgatgatggtacaagtatgatggctgtatggtctgtgaatggcacaaaagggggttctgagaaataggagcgggtctggacactgctcccagaacagagtgtgggatgttcttgcctggtttctgtgtaacaacagcagtgtgaatataaactggctgtayggtgattgtgtaagcattgcaccaagtgtatgtgygcttacttttatattaagaaatgcagaggtgaggttagtgggaagaaaagccgactgtctgcaggacgcaagcaggcctgctccttcctgtgcagctcacttgcttccccttcatcctaagaaactgtgtggtgagtatggtattaatgggtataccagcttacattacctacctgtaactttacatacctttcaatgagcacaaagtaactgcgttctttgctgttctgattttaaaaatgaaaaagtggttttctttctctt

SEQ ID NO: 40678 - DNA, 600 bp, Chicken  19866894275655_2
tgtcttggtctagagagtaagggagggatgtgaaactggctatttcagctcatgagcagtgattcactcatgcataggaaggtattcctttaatttttatgccttgatgatggtacaagtatgatggctgtatggtctgtgaatggcacaaaagggggttctgagaaataggagcgggtctggacactgctcccagaacagagtgtgggatgttcttgcctggtttctgtgtaacaacagcagtgtgaatataaactggctgtayggtgattgtgtaagcattgcaccaagtgtatgtgygcttacttttatattaagaaatgcagaggtgaggttagtgggaagaaaagccgactgtctgcaggacgcaagcaggcctgctccttcctgtgcagctcacttgcttccccttcatcctaagaaactgtgtggtgagtatggtattaatgggtataccagcttacattacctacctgtaactttacatacctttcaatgagcacaaagtaactgcgttctttgctgttctgattttaaaaatgaaaaagtggttttctttctcttgagcctagaagcaagaggytgtgtgctttgygtgtt

SEQ ID NO: 40679 - DNA, 600 bp, Chicken  19866894275655_3
gcaccaagtgtatgtgygcttacttttatattaagaaatgcagaggtgaggttagtgggaagaaaagccgactgtctgcaggacgcaagcaggcctgctccttcctgtgcagctcacttgcttccccttcatcctaagaaactgtgtggtgagtatggtattaatgggtataccagcttacattacctacctgtaactttacatacctttcaatgagcacaaagtaactgcgttctttgctgttctgattttaaaaatgaaaaagtggttttctttctcttgagcctagaagcaagaggytgtgtgctttgygtgttctgtgyrtgctgatgggtgttctcaaggtgcctgtactcagtggctgcgtacccccaggtacgttggaaaggccaacatcacttatttagcccagatttctgggcaatgcacaccatgggctgctcggccaccatctgagtacttatggggttattggctgtttcacctgatcccttctgtgctgagtgtatcttacttccaaaatgaccatggcttctgtttccactgtgatttggagccaaacttgagcatgtgttaaattctggtttttatcatgctggc

SEQ ID NO: 40680 - DNA, 600 bp, Chicken  19866894275655_4
tgtgygcttacttttatattaagaaatgcagaggtgaggttagtgggaagaaaagccgactgtctgcaggacgcaagcaggcctgctccttcctgtgcagctcacttgcttccccttcatcctaagaaactgtgtggtgagtatggtattaatgggtataccagcttacattacctacctgtaactttacatacctttcaatgagcacaaagtaactgcgttctttgctgttctgattttaaaaatgaaaaagtggttttctttctcttgagcctagaagcaagaggytgtgtgctttgygtgttctgtgyrtgctgatgggtgttctcaaggtgcctgtactcagtggctgcgtacccccaggtacgttggaaaggccaacatcacttatttagcccagatttctgggcaatgcacaccatgggctgctcggccaccatctgagtacttatggggttattggctgtttcacctgatcccttctgtgctgagtgtatcttacttccaaaatgaccatggcttctgtttccactgtgatttggagccaaacttgagcatgtgttaaattctggtttttatcatgctggcttattgccactt

SEQ ID NO: 40681 - DNA, 600 bp, Chicken  19866894275655_5
ttttatattaagaaatgcagaggtgaggttagtgggaagaaaagccgactgtctgcaggacgcaagcaggcctgctccttcctgtgcagctcacttgcttccccttcatcctaagaaactgtgtggtgagtatggtattaatgggtataccagcttacattacctacctgtaactttacatacctttcaatgagcacaaagtaactgcgttctttgctgttctgattttaaaaatgaaaaagtggttttctttctcttgagcctagaagcaagaggytgtgtgctttgygtgttctgtgyrtgctgatgggtgttctcaaggtgcctgtactcagtggctgcgtacccccaggtacgttggaaaggccaacatcacttatttagcccagatttctgggcaatgcacaccatgggctgctcggccaccatctgagtacttatggggttattggctgtttcacctgatcccttctgtgctgagtgtatcttacttccaaaatgaccatggcttctgtttccactgtgatttggagccaaacttgagcatgtgttaaattctggtttttatcatgctggcttattgccacttgtaatctctca

SEQ ID NO: 40682 - DNA, 600 bp, Chicken  19866894275655_6
tttatattaagaaatgcagaggtgaggttagtgggaagaaaagccgactgtctgcaggacgcaagcaggcctgctccttcctgtgcagctcacttgcttccccttcatcctaagaaactgtgtggtgagtatggtattaatgggtataccagcttacattacctacctgtaactttacatacctttcaatgagcacaaagtaactgcgttctttgctgttctgattttaaaaatgaaaaagtggttttctttctcttgagcctagaagcaagaggytgtgtgctttgygtgttctgtgyrtgctgatgggtgttctcaaggtgcctgtactcagtggctgcgtacccccaggtacgttggaaaggccaacatcacttatttagcccagatttctgggcaatgcacaccatgggctgctcggccaccatctgagtacttatggggttattggctgtttcacctgatcccttctgtgctgagtgtatcttacttccaaaatgaccatggcttctgtttccactgtgatttggagccaaacttgagcatgtgttaaattctggtttttatcatgctggcttattgccacttgtaatctctcag

SEQ ID NO: 40683 - DNA, 600 bp, Chicken  19866894275659_1
acacagaacagcacaggtggttccaacaaaagcagaaaaactaatgcaaaggatcgactggagaactgtaaggagttgctgtattagcagactttaaacttctcacttgtgagaaaagcatcggcaccaggaaggtgtggggccataaaaaatagattatgtgcaacttacatctctctaaatagactttaaactcatcccagtgggtctctcccacggaaacaagtttcaccagtttgattagaaaaccagacatgcagctacaggagtaagcagaaaagcactgagatctacacatcmatacagctggttacctttgttcgagcaaacagcagcatggcaaacatggtaaagagagacagatgaacagcgagtagtagaacaacactagtggaaagaacacatcayrtgcattaatatcarygtcatccttaatgtcctttgctaaagacacacaaatagccaaggatatttttaactactattttaaacgtgactacatggagctaacagaacaccatctaagctttgattcctaagaatcacacttcttcacaactccttagcatgagcttaggcagttttaaggccgaggagatt

SEQ ID NO: 40684 - DNA, 600 bp, Chicken  19866894275659_2
gtgagaaaagcatcggcaccaggaaggtgtggggccataaaaaatagattatgtgcaacttacatctctctaaatagactttaaactcatcccagtgggtctctcccacggaaacaagtttcaccagtttgattagaaaaccagacatgcagctacaggagtaagcagaaaagcactgagatctacacatcmatacagctggttacctttgttcgagcaaacagcagcatggcaaacatggtaaagagagacagatgaacagcgagtagtagaacaacactagtggaaagaacacatcayrtgcattaatatcarygtcatccttaatgtcctttgctaaagacacacaaatagccaaggatatttttaactactattttaaacgtgactacatggagctaacagaacaccatctaagctttgattcctaagaatcacacttcttcacaactccttagcatgagcttaggcagttttaaggccgaggagattctagcatctacttttctaaatccatttagaaatgaaaagcctgaagtaaagcatcctaaaaagtacacaaagtacctggctctgtggtactggtggggagaaggggca

SEQ ID NO: 40685 - DNA, 600 bp, Chicken  19866894275659_3
tgagaaaagcatcggcaccaggaaggtgtggggccataaaaaatagattatgtgcaacttacatctctctaaatagactttaaactcatcccagtgggtctctcccacggaaacaagtttcaccagtttgattagaaaaccagacatgcagctacaggagtaagcagaaaagcactgagatctacacatcmatacagctggttacctttgttcgagcaaacagcagcatggcaaacatggtaaagagagacagatgaacagcgagtagtagaacaacactagtggaaagaacacatcayrtgcattaatatcarygtcatccttaatgtcctttgctaaagacacacaaatagccaaggatatttttaactactattttaaacgtgactacatggagctaacagaacaccatctaagctttgattcctaagaatcacacttcttcacaactccttagcatgagcttaggcagttttaaggccgaggagattctagcatctacttttctaaatccatttagaaatgaaaagcctgaagtaaagcatcctaaaaagtacacaaagtacctggctctgtggtactggtggggagaaggggcac

SEQ ID NO: 40686 - DNA, 600 bp, Chicken  19866894275659_4
gcaccaggaaggtgtggggccataaaaaatagattatgtgcaacttacatctctctaaatagactttaaactcatcccagtgggtctctcccacggaaacaagtttcaccagtttgattagaaaaccagacatgcagctacaggagtaagcagaaaagcactgagatctacacatcmatacagctggttacctttgttcgagcaaacagcagcatggcaaacatggtaaagagagacagatgaacagcgagtagtagaacaacactagtggaaagaacacatcayrtgcattaatatcarygtcatccttaatgtcctttgctaaagacacacaaatagccaaggatatttttaactactattttaaacgtgactacatggagctaacagaacaccatctaagctttgattcctaagaatcacacttcttcacaactccttagcatgagcttaggcagttttaaggccgaggagattctagcatctacttttctaaatccatttagaaatgaaaagcctgaagtaaagcatcctaaaaagtacacaaagtacctggctctgtggtactggtggggagaaggggcacctttgtgccctacc

SEQ ID NO: 40687 - DNA, 600 bp, Chicken  19866894275659_5
caccaggaaggtgtggggccataaaaaatagattatgtgcaacttacatctctctaaatagactttaaactcatcccagtgggtctctcccacggaaacaagtttcaccagtttgattagaaaaccagacatgcagctacaggagtaagcagaaaagcactgagatctacacatcmatacagctggttacctttgttcgagcaaacagcagcatggcaaacatggtaaagagagacagatgaacagcgagtagtagaacaacactagtggaaagaacacatcayrtgcattaatatcarygtcatccttaatgtcctttgctaaagacacacaaatagccaaggatatttttaactactattttaaacgtgactacatggagctaacagaacaccatctaagctttgattcctaagaatcacacttcttcacaactccttagcatgagcttaggcagttttaaggccgaggagattctagcatctacttttctaaatccatttagaaatgaaaagcctgaagtaaagcatcctaaaaagtacacaaagtacctggctctgtggtactggtggggagaaggggcacctttgtgccctaccc

SEQ ID NO: 40688 - DNA, 599 bp, Chicken  19866894275663_1
  misc_feature (1)..(110): n is any nucleotide
nnnnnnnnnnnnnnnnnnnnnnnnnnnnnnnnnnnnnnnnnnnnnnnnnnnnnnnnnnnnnnnnnnnnnnnnnnnnnnnnnnnnnnnnnnnnnnnnnnnnnnnnnnnnnngcagttgtagtattatatgatccaaaactgaaataatacagttaactgagggaagggatttttctcagctgcttaaaattctgcgccttatttgtttcttctgttgcttttatctgaggcctgaatgaactcttggagaaggaaagaaaagtgttttgagaaaagtgcaaaagacagactctttcagttsaggatagcacaggcttgcaaaaacaacttttgctaaaaaagatttgacactgaagatgatagtgtgtaagtatcagcaggaaaagaaagcccacttatttagaaatattccrtgccgtcagaagctgtagattccaacccagagttgcaagcttgcacagtttgtgtctttacttctctctgcttttctcagtggccctgctcctgaaaaaaaaggtgtctcgcaatgaygcrtaaagctttgaaaatgagctggacagtaaaagtaataccaaacaaacaacttcttttatcatctca

SEQ ID NO: 40689 - DNA, 600 bp, Chicken  19866894275663_2
agttgtagtattatatgatccaaaactgaaataatacagttaactgagggaagggatttttctcagctgcttaaaattctgcgccttatttgtttcttctgttgcttttatctgaggcctgaatgaactcttggagaaggaaagaaaagtgttttgagaaaagtgcaaaagacagactctttcagttsaggatagcacaggcttgcaaaaacaacttttgctaaaaaagatttgacactgaagatgatagtgtgtaagtatcagcaggaaaagaaagcccacttatttagaaatattccrtgccgtcagaagctgtagattccaacccagagttgcaagcttgcacagtttgtgtctttacttctctctgcttttctcagtggccctgctcctgaaaaaaaaggtgtctcgcaatgaygcrtaaagctttgaaaatgagctggacagtaaaagtaataccaaacaaacaacttcttttatcatctcattttgtttgaaccagattctcttttcatgagaaggaacagactcatgaattttaaatatttatgacagaaaatcagactacctaaactccttttatcacagcagaaaaatctt

SEQ ID NO: 40690 - DNA, 600 bp, Chicken  19866894275663_3
ctgaatgaactcttggagaaggaaagaaaagtgttttgagaaaagtgcaaaagacagactctttcagttsaggatagcacaggcttgcaaaaacaacttttgctaaaaaagatttgacactgaagatgatagtgtgtaagtatcagcaggaaaagaaagcccacttatttagaaatattccrtgccgtcagaagctgtagattccaacccagagttgcaagcttgcacagtttgtgtctttacttctctctgcttttctcagtggccctgctcctgaaaaaaaaggtgtctcgcaatgaygcrtaaagctttgaaaatgagctggacagtaaaagtaataccaaacaaacaacttcttttatcatctcattttgtttgaaccagattctcttttcatgagaaggaacagactcatgaattttaaatatttatgacagaaaatcagactacctaaactccttttatcacagcagaaaaatctttgttatttctaacttgttccatgcagcagtcaagtaccaaagctgagattgtcactcagaagctgtgtgtcatacatttatgtaacagcttgttctttaacatttaatcttaattgtc

SEQ ID NO: 40691 - DNA, 600 bp, Chicken  19866894275663_4
aatgaactcttggagaaggaaagaaaagtgttttgagaaaagtgcaaaagacagactctttcagttsaggatagcacaggcttgcaaaaacaacttttgctaaaaaagatttgacactgaagatgatagtgtgtaagtatcagcaggaaaagaaagcccacttatttagaaatattccrtgccgtcagaagctgtagattccaacccagagttgcaagcttgcacagtttgtgtctttacttctctctgcttttctcagtggccctgctcctgaaaaaaaaggtgtctcgcaatgaygcrtaaagctttgaaaatgagctggacagtaaaagtaataccaaacaaacaacttcttttatcatctcattttgtttgaaccagattctcttttcatgagaaggaacagactcatgaattttaaatatttatgacagaaaatcagactacctaaactccttttatcacagcagaaaaatctttgttatttctaacttgttccatgcagcagtcaagtaccaaagctgagattgtcactcagaagctgtgtgtcatacatttatgtaacagcttgttctttaacatttaatcttaattgtcatc

SEQ ID NO: 40692 - DNA, 581 bp, Chicken  19866894275665_1
tatttcaacatctctgccccacaatggatgccctgctgaaaaccgactgcatttctgcacactcggcttctcacaacatcagctcttgcgcattaaccgtcacttacggggattcattatcaaagtactgcatgagggtttaagctgcacaacaccaagagatttgtctggactttggaagagattttatgacgtctaggatttaaaagcaacgctcatttttaaaacgtgtcactttctcggtgccctgagcctcgacaaagctgctcctaccaaagcagcacatcccagtggctgctytggcyccgttggctccgacctccggcctctcccacgcacccactccacgctgtgcgtytcccttttcagccgggcccwctccggcgtgcaacgggggtaaatgtcatcgctttttcccttttctatctctgtgccacaaacggagcggccgtgcttcctccacacccactcccctcgccagcagcctctgctgcagcttcctgtcagccccgcacaccacgccgcttcctctggcaaaagtttatctgcgcgccccgcgttaactctttgcttcccgcacg

SEQ ID NO: 40693 - DNA, 576 bp, Chicken  19866894275665_2
caacatctctgccccacaatggatgccctgctgaaaaccgactgcatttctgcacactcggcttctcacaacatcagctcttgcgcattaaccgtcacttacggggattcattatcaaagtactgcatgagggtttaagctgcacaacaccaagagatttgtctggactttggaagagattttatgacgtctaggatttaaaagcaacgctcatttttaaaacgtgtcactttctcggtgccctgagcctcgacaaagctgctcctaccaaagcagcacatcccagtggctgctytggcyccgttggctccgacctccggcctctcccacgcacccactccacgctgtgcgtytcccttttcagccgggcccwctccggcgtgcaacgggggtaaatgtcatcgctttttcccttttctatctctgtgccacaaacggagcggccgtgcttcctccacacccactcccctcgccagcagcctctgctgcagcttcctgtcagccccgcacaccacgccgcttcctctggcaaaagtttatctgcgcgccccgcgttaactctttgcttcccgcacg

SEQ ID NO: 40694 - DNA, 523 bp, Chicken  19866894275665_3
acactcggcttctcacaacatcagctcttgcgcattaaccgtcacttacggggattcattatcaaagtactgcatgagggtttaagctgcacaacaccaagagatttgtctggactttggaagagattttatgacgtctaggatttaaaagcaacgctcatttttaaaacgtgtcactttctcggtgccctgagcctcgacaaagctgctcctaccaaagcagcacatcccagtggctgctytggcyccgttggctccgacctccggcctctcccacgcacccactccacgctgtgcgtytcccttttcagccgggcccwctccggcgtgcaacgggggtaaatgtcatcgctttttcccttttctatctctgtgccacaaacggagcggccgtgcttcctccacacccactcccctcgccagcagcctctgctgcagcttcctgtcagccccgcacaccacgccgcttcctctggcaaaagtttatctgcgcgccccgcgttaactctttgcttcccgcacg

SEQ ID NO: 40695 - DNA, 503 bp, Chicken  19866894275665_4
tcagctcttgcgcattaaccgtcacttacggggattcattatcaaagtactgcatgagggtttaagctgcacaacaccaagagatttgtctggactttggaagagattttatgacgtctaggatttaaaagcaacgctcatttttaaaacgtgtcactttctcggtgccctgagcctcgacaaagctgctcctaccaaagcagcacatcccagtggctgctytggcyccgttggctccgacctccggcctctcccacgcacccactccacgctgtgcgtytcccttttcagccgggcccwctccggcgtgcaacgggggtaaatgtcatcgctttttcccttttctatctctgtgccacaaacggagcggccgtgcttcctccacacccactcccctcgccagcagcctctgctgcagcttcctgtcagccccgcacaccacgccgcttcctctggcaaaagtttatctgcgcgccccgcgttaactctttgcttcccgcacg

SEQ ID NO: 40696 - DNA, 600 bp, Chicken  19866894275670_1
aagaggtaaaagcactgtgtaactacagcctcacctcccagaacacagtgatttcatacactacttaacagcagcttccaagtgacccaacccccctcagatcaatagcttatttctacttgtacctaacactgttctcccactactttctgtcattaaataattacgtgttggagtaatgaagtaccagaccctaactggaagactgctcaacagttgaggacaccaaggtagtgacccatgctatactgcatgtgatgccatgctgaattaagactgccagttctgttcaaggcaacrtgtctatcgtgctaagaaatctacaaaaccaaaaaacagctaactgtaacacatttggatgtcgctggctttaagcaagtagtwtmttaattaactctttacatgattgactttaccaaccctcagcaagggcaggtgaggaccagaccgtgacccagcctcaatctaggcatcacagacactccagctcccatctgaaacttctccctttgcatttcacctgacaagaacacacattctatcgagaaaagagcatacctactatattcaaatcttgcacaacttaatattcatgaatac

SEQ ID NO: 40697 - DNA, 600 bp, Chicken  19866894275670_2
acccaacccccctcagatcaatagcttatttctacttgtacctaacactgttctcccactactttctgtcattaaataattacgtgttggagtaatgaagtaccagaccctaactggaagactgctcaacagttgaggacaccaaggtagtgacccatgctatactgcatgtgatgccatgctgaattaagactgccagttctgttcaaggcaacrtgtctatcgtgctaagaaatctacaaaaccaaaaaacagctaactgtaacacatttggatgtcgctggctttaagcaagtagtwtmttaattaactctttacatgattgactttaccaaccctcagcaagggcaggtgaggaccagaccgtgacccagcctcaatctaggcatcacagacactccagctcccatctgaaacttctccctttgcatttcacctgacaagaacacacattctatcgagaaaagagcatacctactatattcaaatcttgcacaacttaatattcatgaataccgggggagaagctaaaaaaacttcagaaaataatttaacagtgaataagtgtttggatcagtatcagtccaaatgacagcactg

SEQ ID NO: 40698 - DNA, 600 bp, Chicken  19866894275670_3
ccaacccccctcagatcaatagcttatttctacttgtacctaacactgttctcccactactttctgtcattaaataattacgtgttggagtaatgaagtaccagaccctaactggaagactgctcaacagttgaggacaccaaggtagtgacccatgctatactgcatgtgatgccatgctgaattaagactgccagttctgttcaaggcaacrtgtctatcgtgctaagaaatctacaaaaccaaaaaacagctaactgtaacacatttggatgtcgctggctttaagcaagtagtwtmttaattaactctttacatgattgactttaccaaccctcagcaagggcaggtgaggaccagaccgtgacccagcctcaatctaggcatcacagacactccagctcccatctgaaacttctccctttgcatttcacctgacaagaacacacattctatcgagaaaagagcatacctactatattcaaatcttgcacaacttaatattcatgaataccgggggagaagctaaaaaaacttcagaaaataatttaacagtgaataagtgtttggatcagtatcagtccaaatgacagcactgct

SEQ ID NO: 40699 - DNA, 540 bp, Chicken  19866894275670_4
ttacgtgttggagtaatgaagtaccagaccctaactggaagactgctcaacagttgaggacaccaaggtagtgacccatgctatactgcatgtgatgccatgctgaattaagactgccagttctgttcaaggcaacrtgtctatcgtgctaagaaatctacaaaaccaaaaaacagctaactgtaacacatttggatgtcgctggctttaagcaagtagtwtmttaattaactctttacatgattgactttaccaaccctcagcaagggcaggtgaggaccagaccgtgacccagcctcmatctaggcatcacagacactccagctcccatctgaaacttctccctttgcatttcacctgacaagaacacacattctatcgagaaaagagcatacctactatattcaaatcttgcacaacttaatattcatgaataccgggggagaagctaaaaaaacttcagaaaataatttaacagtgaataagtgtttggatcagtatcagtccaaatgacagcactgctacagggatcgcttctgg

SEQ ID NO: 40700 - DNA, 599 bp, Chicken  19866894275672_1
  misc_feature (1)..(28): n is any nucleotide
nnnnnnnnnnnnnnnnnnnnnnnnnnnntgagatttaagtggcctgaaaatctgctgaaactggtttggaaagcgcttaaccatggagctgctttaatcacctttcaaagcacttgggtagttggtgattctggaaaggtctgacagtttgagctctatttacagccaagacagaggtctagatgtgggactgcattaatgttgatcctatctcagcacacgaggcttttttctttctttaagctgttatagattcattaaaaaaaaaaaaacaaggaagctaaaaaagaaagacttcaygagccacattttcaaataagccttcaccttaatcttggtccagttcaaggctccgtggagtcagtcaaraaatcccacaatgtaaatagaaaacgcacgtggctctgttcacagacacttccttgtaagcaacccccacttcgagcagtgatgtgcactaattgcacaagaagaatagaacctaaactcacatacacagagcccatttcttctacagttcacatgcacagatcattttcttacatatcaaaactaattgaaatggcaaagcactcctcacagtaggaggatgcacaagt

SEQ ID NO: 40701 - DNA, 600 bp, Chicken  19866894275672_2
aaagcgcttaaccatggagctgctttaatcacctttcaaagcacttgggtagttggtgattctggaaaggtctgacagtttgagctctatttacagccaagacagaggtctagatgtgggactgcattaatgttgatcctatctcagcacacgaggcttttttctttctttaagctgttatagattcattaaaaaaaaaaaaacaaggaagctaaaaaagaaagacttcaygagccacattttcaaataagccttcaccttaatcttggtccagttcaaggctccgtggagtcagtcaaraaatcccacaatgtaaatagaaaacgcacgtggctctgttcacagacacttccttgtaagcaacccccacttcgagcagtgatgtgcactaattgcacaagaagaatagaacctaaactcacatacacagagcccatttcttctacagttcacatgcacagatcattttcttacatatcaaaactaattgaaatggcaaagcactcctcacagtaggaggatgcacaagtttcctgcatatccaacgatagatgccagcagaaggaaaatgtgtttctgagatgtagttcattagctctc

SEQ ID NO: 40702 - DNA, 600 bp, Chicken  19866894275672_3
cctcagcgtgccagtcactaagcagcaaaattaaaataaactgcatgatgcaaacccttagaactacacattagttccagttttaaaccaaccctcaccacaaactttctctagtttcaatcccaagcaagtattcaggtacatccatccacacagaaaagaaattcctcagcaaagccgtgcagcacacccaacacagtcccagcactcacacatctgcaacaaatctgtacacctcacatgaaacattttcaacttcctgatggtaaggagcagtcccagacacacggataccctaaygggarcaaagcagtgcctgcagtctcatgggtcccccaagacatgcatccaacaccccaaagcagtcccactgtccccacccagctcagctccaagaagggattcagtacctttgtgagcaggtgcctgcggggctgtgtaggagagacagggttcaaaaaggagggaaacaaatctcacgtcgcagcagagagctgctgtgtgcaccgatgtgctggggctatgaatagagttgggctcctggctggaatatggcactgctcaggtgtcaggcatggggctgcgtcaggacagctggca

SEQ ID NO: 40703 - DNA, 600 bp, Chicken  19866894275672_4
gcgtgccagtcactaagcagcaaaattaaaataaactgcatgatgcaaacccttagaactacacattagttccagttttaaaccaaccctcaccacaaactttctctagtttcaatcccaagcaagtattcaggtacatccatccacacagaaaagaaattcctcagcaaagccgtgcagcacacccaacacagtcccagcactcacacatctgcaacaaatctgtacacctcacatgaaacattttcaacttcctgatggtaaggagcagtcccagacacacggataccctaaygggarcaaagcagtgcctgcagtctcatgggtcccccaagacatgcatccaacaccccaaagcagtcccactgtccccacccagctcagctccaagaagggattcagtacctttgtgagcaggtgcctgcggggctgtgtaggagagacagggttcaaaaaggagggaaacaaatctcacgtcgcagcagagagctgctgtgtgcaccgatgtgctggggctatgaatagagttgggctcctggctggaatatggcactgctcaggtgtcaggcatggggctgcgtcaggacagctggcaccggg

SEQ ID NO: 40704 - DNA, 600 bp, Chicken  19866894275675_1
tgcagggaaaacaaacaaacaaacaaaaaaataacaacagaacatggatcctaaatatagatcacctttctcaagggaagattaataaacattttcattgagttgcattaatgatttttaagcagctttcttctgttagtaattattcttcataatctcatctcttctaacagccactatcacggtaaatgatgtattggagattttctgtgtagggtaaaaataaatcaagcaaacgcacacaggaaaagccttcatatagatgaaatacctggagcaattccatggaatgactacaaytgaggcttgtcagagtgggcttgaaagatgtagtagctgactgcaatgaagatttataagaggtgaacttggtgtactacgtgcaatgcaacactcttgaaagacaagacatgagccccagtgcttacatcctcctgtccaaatgatgtgcatgacagataaatagggataaaaaagtagaaagagttatgaatgtattttagagaaacatttgttgatgcttcagattgattttttttttgtgtgtgtgtgtgtgtgtgtgtgtgtaatgaaatagagaatatacacatacaaaatata

SEQ ID NO: 40705 - DNA, 600 bp, Chicken  19866894275676_1
agccccatccacgctgtattctaagcagtgttttgctccagcagtagaggttggcagtggagctgtcagtcaacatattaggctttagttgtgcttcaagtggtatgaaaaggaccttcccatgcaatggccatgagtaaggtctccactgctgatctgagcatcaggcttcctgcaaggcatgacggagctacagagagcctgggagcagcagtaagtgtcaccagggctcttgaagttacgattgatgaggaaagatggaaggatgttgtgttgagggacatggtttagcgagaaccrttagtgaagggtgaatggttggactggatgatcctgtgggtcttttccaaccttagcaattctatgattctatgaattatgattatacgacctaaagattgtaagaaaaagtaataacattctgcaaataagtaaagcctaatagaaagagaaagggaattcaagatgctagatgtcaacgtagagaagaaagatgtatttaataaccacagtttcaaatcagtcattgtaaaacctttctggtgacctggtcaggggttctgagggcaggtctccatctgccgggccatggggtaattt

SEQ ID NO: 40706 - DNA, 600 bp, Chicken  19866894275685_1
aaggtgagatggcttctgacacgcttctgctatcacagtgaatgcgtactagcagtgtgttcctggatgtctgaaacatgaggtgagtttcaaaatatcgtctaatttcagaaatatttagcttttaaatacaaagttacgttctgacatccaccaaaagccaacagtaaggttgcactttatgctcaacccactctgaagtatgcagcggccttcattttgaggcaaggtctgccccagtgctccgaatgaccttggcaaaattcttaaaacaaaataaaaccaaaacccacacacaaraaaaacaggacctcaagctctaaagctattttagaatcagctttgaataattgtcccacaataggagttttcttgattaattgcataagataaggcctatttttccttgctggcctccagtgagtccctctacttcccataatcacttttgtctcagtcttctgttctctgggaacctctaagagaaaaatcagagatacaccaactccattacctgaggattagccaagagataaccctatgtattccattactgaccattatttgagtaattattcaatcaagtttaggccatgtgaa

SEQ ID NO: 40707 - DNA, 599 bp, Chicken  19866894275687_1
  misc_feature (1)..(41): n is any nucleotide
nnnnnnnnnnnnnnnnnnnnnnnnnnnnnnnnnnnnnnnnntgtcctctaaatcctacaatggttgtttaggaaggcaaagtgaaacctgtagtagacatcaactcaaaagagatcttctagtagctaattcctatggcttttagtgcagttttgtccaacctttagctgaagcctccccctattcaatgattttttattgctccttccctggatgttacgttagatggaatggcttcgttttacagcagttgtgaaaagtataagtgattaggagtggaaatcaaagatattgatctgyataacctcatatacaaacaattacaaactaataggctaaatacagttttagttactagtcatcatattttacagcccaataaacaatatttaggttgattaaatttcttcaccaattttcttgcctttcctttttcttttacacwatgcctttccatgttcttggatctggtcttgaaatatttcaacttatgatttattaaaaaaaaatttggacctttgatatctagtataccaatgaaacttctgatgatggtgcattcagctcatatttgaaaatgaacaattgtcacctcaatg

SEQ ID NO: 40708 - DNA, 600 bp, Chicken  19866894275687_2
tgcagttttgtccaacctttagctgaagcctccccctattcaatgattttttattgctccttccctggatgttacgttagatggaatggcttcgttttacagcagttgtgaaaagtataagtgattaggagtggaaatcaaagatattgatctgyataacctcatatacaaacaattacaaactaataggctaaatacagttttagttactagtcatcatattttacagcccaataaacaatatttaggttgattaaatttcttcaccaattttcttgcctttcctttttcttttacacwatgcctttccatgttcttggatctggtcttgaaatatttcaacttatgatttattaaaaaaaaatttggacctttgatatctagtataccaatgaaacttctgatgatggtgcattcagctcatatttgaaaatgaacaattgtcacctcaatgtttttagcagaattctccatagaatgtaaaatgactgctcagctacctagagaaagccagactcacaaacacaaaaatacaatacattattaaaattccaaaaaaaatgtcagaaactctggcaatgcacacagaaggaataacta

SEQ ID NO: 40709 - DNA, 600 bp, Chicken  19866894275688_1
caccaggtggccccgtggctagcacagaccatgggctgcagcaccatgggcaccgatgtcccaggctgtgcgccatggccctctgtggctgtcaaggatggttcagcacaatctgtagcttttgtcatgacggtctctatggggatgctggaggcgttggggccttttgcaggagtttgcaggaggaggaggcactgcctggcgccaggtgtgccatgagagggacgtgctggcacacctctggggtgctgccaatgagaccaacaccgtcctcattctgcacaacaaaacatttggccycttgctcatgtccagtaaccgtggtgtgcacacagggtgacgctgagacaggctgtcccctctgctgacatcrcagcttatccccagacgtgcggcttcgggtctgtaacggacagccagcagcttctgcagccatcactgcgcagatgtatgagaagcctgatgccatctgataaaarctgcatcgtttgcaagctctttctgctttggtgctgaagtccaaaggggctactggaaatgctctcagtttagcatcttttgcagatcgtagatcgatacagttttaattgtcaattctat

SEQ ID NO: 40710 - DNA, 600 bp, Chicken  19866894275688_2
catggccctctgtggctgtcaaggatggttcagcacaatctgtagcttttgtcatgacggtctctatggggatgctggaggcgttggggccttttgcaggagtttgcaggaggaggaggcactgcctggcgccaggtgtgccatgagagggacgtgctggcacacctctggggtgctgccaatgagaccaacaccgtcctcattctgcacaacaaaacatttggccycttgctcatgtccagtaaccgtggtgtgcacacagggtgacgctgagacaggctgtcccctctgctgacatcrcagcttatccccagacgtgcggcttcgggtctgtaacggacagccagcagcttctgcagccatcactgcgcagatgtatgagaagcctgatgccatctgataaaarctgcatcgtttgcaagctctttctgctttggtgctgaagtccaaaggggctactggaaatgctctcagtttagcatcttttgcagatcgtagatcgatacagttttaattgtcaattctatccaggaatggcttctgccaccctgctaattgttcgctcatcccttcagaaacccggggactcgtcagatgggc

SEQ ID NO: 40711 - DNA, 600 bp, Chicken  19866894275688_3
caggaggaggaggcactgcctggcgccaggtgtgccatgagagggacgtgctggcacacctctggggtgctgccaatgagaccaacaccgtcctcattctgcacaacaaaacatttggccycttgctcatgtccagtaaccgtggtgtgcacacagggtgacgctgagacaggctgtcccctctgctgacatcrcagcttatccccagacgtgcggcttcgggtctgtaacggacagccagcagcttctgcagccatcactgcgcagatgtatgagaagcctgatgccatctgataaaarctgcatcgtttgcaagctctttctgctttggtgctgaagtccaaaggggctactggaaatgctctcagtttagcatcttttgcagatcgtagatcgatacagttttaattgtcaattctatccaggaatggcttctgccaccctgctaattgttcgctcatcccttcagaaacccggggactcgtcagatgggctgtgactacgtatgaggcgtcactgtgtgcagcgtggcttcagatgctgcgtgcagcgctgtgagcaccgcaggatgacagatgagcggagcttcccaggcagcgg

SEQ ID NO: 40712 - DNA, 600 bp, Chicken  19866894275690_1
tagtcattcactttaaaacattttggtgaatttcacaatgaattacatctcgacctttaggaaagtgggagatttaaagactgaaaacctctttttctagttaaaacaatcaaggcttgggtttgttttgtcttattagttatgttatttttattctttttattattgttcttattgttattatttaaaatcatagcataaacacaaagtttttttcacttggatgcaaaaattattagttctcattaacattaattatggctaatattttacacataaccgtgcatttttctttacatrctgctcatctgtttctccttgtctttagaacagcttgaatgtagctacccaaatcatccttccctcagaaaattttcttaacttaattccaagtggtgacgataaaaatgaaaagtgagaacatgtcagtgatattcccctccaaatttttgaaagcattagatgaaaggttgttcacaactccacccagcctggccttgaatacttccaaggagggggcattcacaacctctctgggcaacctgttccattctctcaccaccctcacagtaaagaatttcttcctaatagccagtctaa

SEQ ID NO: 40713 - DNA, 600 bp, Chicken  19866894275692_1
aaactgtagaaaccaactttcaaagctggaggatgactgcttaccaggcattttcgaccatctgggactggaagcaccaagttgttatgcaggtatcatccaacagaacaaaggggcataaactgtgcaagaatgaattaacctagaatttagagatgagtttcaaaccacttaatcaatgagaatctgaaatagttatcatagaatcatagaatggcttgggttggaagggacctcaaggatcatcaagctccagcccctctctcttatctgagaaagcaaaggaaatctgactagtartagggtsaatcttgttttagtgtagaaakaatttttcagacagattgctggtgagaatttgggagattgtgtccagtctagtccagtgtttgctgaagttaaagacacaacagattctgtaagctcagaaaaattttagttacatgaacacatggataatgcagcatcttaacaaagcaatgtaaataacactttgtgagacttagatgtagcctgaattgaaataggggagagcatggaggatgtaggggctcatgcacagagaggaattcatttcctataaggaaaagaaatggaaga

SEQ ID NO: 40714 - DNA, 600 bp, Chicken  19866894275692_2
agaaaccaactttcaaagctggaggatgactgcttaccaggcattttcgaccatctgggactggaagcaccaagttgttatgcaggtatcatccaacagaacaaaggggcataaactgtgcaagaatgaattaacctagaatttagagatgagtttcaaaccacttaatcaatgagaatctgaaatagttatcatagaatcatagaatggcttgggttggaagggacctcaaggatcatcaagctccagcccctctctcttatctgagaaagcaaaggaaatctgactagtartagggtsaatcttgttttagtgtagaaakaatttttcagacagattgctggtgagaatttgggagattgtgtccagtctagtccagtgtttgctgaagttaaagacacaacagattctgtaagctcagaaaaattttagttacatgaacacatggataatgcagcatcttaacaaagcaatgtaaataacactttgtgagacttagatgtagcctgaattgaaataggggagagcatggaggatgtaggggctcatgcacagagaggaattcatttcctataaggaaaagaaatggaagagaagtrg

SEQ ID NO: 40715 - DNA, 600 bp, Chicken  19866894275692_3
aggatgactgcttaccaggcattttcgaccatctgggactggaagcaccaagttgttatgcaggtatcatccaacagaacaaaggggcataaactgtgcaagaatgaattaacctagaatttagagatgagtttcaaaccacttaatcaatgagaatctgaaatagttatcatagaatcatagaatggcttgggttggaagggacctcaaggatcatcaagctccagcccctctctcttatctgagaaagcaaaggaaatctgactagtartagggtsaatcttgttttagtgtagaaakaatttttcagacagattgctggtgagaatttgggagattgtgtccagtctagtccagtgtttgctgaagttaaagacacaacagattctgtaagctcagaaaaattttagttacatgaacacatggataatgcagcatcttaacaaagcaatgtaaataacactttgtgagacttagatgtagcctgaattgaaataggggagagcatggaggatgtaggggctcatgcacagagaggaattcatttcctataaggaaaagaaatggaagagaagtrgacgacctgagtggaaaacaaag

SEQ ID NO: 40716 - DNA, 600 bp, Chicken  19866894275692_4
saatcttgttttagtgtagaaakaatttttcagacagattgctggtgagaatttgggagattgtgtccagtctagtccagtgtttgctgaagttaaagacacaacagattctgtaagctcagaaaaattttagttacatgaacacatggataatgcagcatcttaacaaagcaatgtaaataacactttgtgagacttagatgtagcctgaattgaaataggggagagcatggaggatgtaggggctcatgcacagagaggaattcatttcctataaggaaaagaaatggaagagaagtrgacgacctgagtggaaaacaaagacttctgctttayccctgctgagttgaaactccagattcaaatgttaatttaggaccattgcacctaagtgtgtctaaatttctctctgacactggtgaagcctggcagtttcattctttcccaggaaagtgtacctgcagcaagaaagcactgctcaaggaaagaatttgccatagtagatctagtctgraagtttgtgtagggaaaagcgagaaggcttgttgaagcattcctrtgctattaaattactttaagtatttcctatgttgatttgtt

SEQ ID NO: 40717 - DNA, 600 bp, Chicken  19866894275692_5
gattgctggtgagaatttgggagattgtgtccagtctagtccagtgtttgctgaagttaaagacacaacagattctgtaagctcagaaaaattttagttacatgaacacatggataatgcagcatcttaacaaagcaatgtaaataacactttgtgagacttagatgtagcctgaattgaaataggggagagcatggaggatgtaggggctcatgcacagagaggaattcatttcctataaggaaaagaaatggaagagaagtrgacgacctgagtggaaaacaaagacttctgctttayccctgctgagttgaaactccagattcaaatgttaatttaggaccattgcacctaagtgtgtctaaatttctctctgacactggtgaagcctggcagtttcattctttcccaggaaagtgtacctgcagcaagaaagcactgctcaaggaaagaatttgccatagtagatctagtctgraagtttgtgtagggaaaagcgagaaggcttgttgaagcattcctrtgctattaaattactttaagtatttcctatgttgatttgttgttcactttcagcctcattcaaatcgtacatcattg

SEQ ID NO: 40718 - DNA, 600 bp, Chicken  19866894275692_6
gaaataggggagagcatggaggatgtaggggctcatgcacagagaggaattcatttcctataaggaaaagaaatggaagagaagtrgacgacctgagtggaaaacaaagacttctgctttayccctgctgagttgaaactccagattcaaatgttaatttaggaccattgcacctaagtgtgtctaaatttctctctgacactggtgaagcctggcagtttcattctttcccaggaaagtgtacctgcagcaagaaagcactgctcaaggaaagaatttgccatagtagatctagtctgraagtttgtgtagggaaaagcgagaaggcttgttgaagcattcctrtgctattaaattactttaagtatttcctatgttgatttgttgttcactttcagcctcattcaaatcgtacatcattgctgtgatctaagaaatgacattgtttagaaactaggtggagctatttgtttagtacaggcggtggttttaatgtgttgcactctgcagaatagagtgcatggtgtatgtacacagatgatgcatgtaacatctctatttcatcatgcacatatttgataagtttaagtggatacaatg

SEQ ID NO: 40719 - DNA, 600 bp, Chicken  19866894275692_7
ggaattcatttcctataaggaaaagaaatggaagagaagtrgacgacctgagtggaaaacaaagacttctgctttayccctgctgagttgaaactccagattcaaatgttaatttaggaccattgcacctaagtgtgtctaaatttctctctgacactggtgaagcctggcagtttcattctttcccaggaaagtgtacctgcagcaagaaagcactgctcaaggaaagaatttgccatagtagatctagtctgraagtttgtgtagggaaaagcgagaaggcttgttgaagcattcctrtgctattaaattactttaagtatttcctatgttgatttgttgttcactttcagcctcattcaaatcgtacatcattgctgtgatctaagaaatgacattgtttagaaactaggtggagctatttgtttagtacaggcggtggttttaatgtgttgcactctgcagaatagagtgcatggtgtatgtacacagatgatgcatgtaacatctctatttcatcatgcacatatttgataagtttaagtggatacaatgatatatttaatgatgtatctgagaactgtcatgctgcacacgtag

SEQ ID NO: 40720 - DNA, 599 bp, Chicken  19866894275694_1
  misc_feature (1)..(206): n is any nucleotide
nnnnnnnnnnnnnnnnnnnnnnnnnnnnnnnnnnnnnnnnnnnnnnnnnnnnnnnnnnnnnnnnnnnnnnnnnnnnnnnnnnnnnnnnnnnnnnnnnnnnnnnnnnnnnnnnnnnnnnnnnnnnnnnnnnnnnnnnnnnnnnnnnnnnnnnnnnnnnnnnnnnnnnnnnnnnnnnnnnnnnnnnnnnnnnnnnnnnnnnnnnnnnncagcgttgtctgtgattccatcaccctccctcctgcctccctttggagctcactcaggagccaagctgcagagccaagcgctggtggctgagckctctgtttgtttgcctgcattatggtaatgcaacagggctttctgcctagctgggagtgactgagcttgtggctgccgccccagtgccccatcagtgctcttttccaaaggttcaaagcaagataatgaagagagagggagaatgtaatgagctaccaggaagcatttagcgctgataatgcgtattccatcaagcagcttcaaggggataatttcagaattatatctcaattggcttcgctcacacttgaagcaatttttcagccgtggaattgggttttacatcattcaggagctca

SEQ ID NO: 40721 - DNA, 419 bp, Chicken  19866894275694_2
gcagcttcaaggggataatttcagaattatatctcaattggcttcgctcacacttgaagcaatttttcagccgtggaattgggttttacatcattcaggagctcattgctgcctggcagtgtttgcagacacagcagccgtcccctccccaggctcctggtttggcaccgaccgcggctggcgttatcccacgggaactcaccgtgttcaggatgttgctgatggaaatgaagaggtgcagcatcagggtctcgttgtgcctgttggctttgaactggaaggggagaagggatgtgttayggcctcagggtgccaataggaaaccccacgggtccccctgatgcttcccagctgtccagatgtgcacgggccgggtgcaaggacgcattaaatgcagtgggaagagactcagtgggatg

SEQ ID NO: 40722 - DNA, 600 bp, Chicken  19866894275699_1
gccctgaagatatgcagatctgcctctgaaaaagaggcagaacttttctcccaagatcacatgaatgcaatcaccacactttacttgaaattcaggaatgaaatgtctgaagctcagtgtcagatctagcctggtgaaaacataactaagattggaacaagttccaggagaggtatgtacactgccccagtgaatttcatgtgggagctccacagcatgctttgctctttgtcaatttccacatccctctgcctggcactgcatcagatctaatgggccttggtggatggtgttggcttrtgcaagtcattcacaagtagacaaagggatatgactatggctcagtggtctgatgccttttaaagacttcatgcttgggtgcaaggcactatgctggagtgctgacccctcaccagcctacacatcacccatgtgctgcattgctgcacccttatctactacttttgttcttgcattttcaaggcctagaacctaaaaaacaggagcatgttgtagctctccagtcagctctgaggatgattggcctgtaaatgttatgaattagcctcatttcagagcacagtgtatttcatattccca

SEQ ID NO: 40723 - DNA, 600 bp, Chicken  19866894275706_1
atacattcaggaggcgactgaacactgtgcaggagcgtggtgattctaagttggtgactggagtggaaagattgtagtcccagagcaaatggttacctgatatatatagatatacaaagacagttgttgagttgcactcacaaattgcggttggtttgaccaaacggtgcttgtgttttgtgctggactaaatctagcccttcataacttttgaatgagactgttgttcgtcagggatgcacatacttgttggttttgcctagagctaaaataaaataaataaataaataaaaacccccmccaacccagaactgttgctgtggagaaccaaatagccaaagagctggacgtgccaagaagcccgttggccaaggtctaagatcgacagtttgcacacaatgcaacttttgtttcaaaaaataagtttatcacagttttgctggaagttggaaggttggctttttcattctctcttacgtactactcagaaattgacacctgggaacaaacgatgaggactgatctgtataacagttttatttgccagttctacttaccagtatataatctggcttctgatagctcctagtaaatgtagct

SEQ ID NO: 40724 - DNA, 600 bp, Chicken  19866894275712_1
ataaaaccctgttttgggtaccacataattcacacctagagaagtaaacaccacaaaataaactaagagaactactctacatcatttctttaatgtcatatgtcatttcaagctaaatcttaaaccataatccactttacattaaaagctgctttgtctttaggagtctttggtttagtttactcaagccaggggcctacagtaacagctaaatatgtgcagacttttttttaaatcaacctttcagtttaagggtccattttattgattccttcaaaagaactaatagcgttgagaccratttgtgcgttttgagcagttagtatgaatctaggctaatatcactactgtgatttgtgctattaattgaattagtgttgctaaaacatacctcttccaatttaatttctgcctaaggaaagtgttatggaaaactgtatgaaaatgaggggraaaaaaaaaagagaatactagaggtaggggaggagtgaagaagagaagaatggagagccctaaaatgaaaggctcagaggcaacacgctgccagaaataaaagccaaatgaaatgagaaatgctactgcaatgcatagagacagatt

SEQ ID NO: 40725 - DNA, 600 bp, Chicken  19866894275712_2
ttgtctttaggagtctttggtttagtttactcaagccaggggcctacagtaacagctaaatatgtgcagacttttttttaaatcaacctttcagtttaagggtccattttattgattccttcaaaagaactaatagcgttgagaccratttgtgcgttttgagcagttagtatgaatctaggctaatatcactactgtgatttgtgctattaattgaattagtgttgctaaaacatacctcttccaatttaatttctgcctaaggaaagtgttatggaaaactgtatgaaaatgaggggraaaaaaaaaagagaatactagaggtaggggaggagtgaagaagagaagaatggagagccctaaaatgaaaggctcagaggcaacacgctgccagaaataaaagccaaatgaaatgagaaatgctactgcaatgcatagagacagatttgaaaagaaatgaaaacagccttaccaacaggaacatttggctggtatggcccaatcctaaattcatctggaataagagctttctcttggacactctttgtttcctgttcatcctgggtgtctatattttcatgggcatttttctcaggatct

SEQ ID NO: 40726 - DNA, 600 bp, Chicken  19866894275713_1
gctataaaagaagagaaacgagagctgacacttgcgtcaatataaaacaacagtttttgcctcatttagacttagtgccacgagtgtttttgcttgctgctttttaaaaaggaaacaaaacaacatttgacactgagcactaggtatctctttctttcaggaatctgctctgcggcaaatcttcctgttcccagacacaaaagtgacttaggtgggatgggaaaacctcagttccaatcaccctgctgaaacaagggccaggtgagctttgcttagactttatttgtggattaaaaaatraaaaaaaatcaattttgaatgcaaaaaaaattacaaagaggatttctctttgtggggtcttacaggcagaaattkttcttttttgctttctgtcttcggaagcatcccaactgtttccaagcacccagaagccagccaagtgagggttttcattagcaaacacggcgctgttcatggacttaccagttcatatggttgattgcattgcactgaaatcacacttagagtttgctaaggattatttagcaaaggacctgtgtttgcagcctgatcccccagtaacattttctgtgcttctca

SEQ ID NO: 40727 - DNA, 600 bp, Chicken  19866894275713_2
tgccacgagtgtttttgcttgctgctttttaaaaaggaaacaaaacaacatttgacactgagcactaggtatctctttctttcaggaatctgctctgcggcaaatcttcctgttcccagacacaaaagtgacttaggtgggatgggaaaacctcagttccaatcaccctgctgaaacaagggccaggtgagctttgcttagactttatttgtggattaaaaaataaaaaaaaatcaattttgaatgcaaaaaaaattacaaagaggatttctctttgtggggtcttacaggcagaaattkttcttttttgctttctgtcttcggaagcatcccaactgtttccaagcacccagaagccagccaagtgagggttttcattagcaaacacggcgctgttcatggacttaccagttcatatggttgattgcattgcactgaaatcacacttagagtttgctaaggattatttagcaaaggacctgtgtttgcagcctgatcccccagtaacattttctgtgcttctcaccgcacagggaggcagtggatgtgcattaagtgcttgcacactgtgtgtttacaaacacatccgaccactgcggg

SEQ ID NO: 40728 - DNA, 599 bp, Chicken  19866894275715_1
  misc_feature (1)..(30): n is any nucleotide
nnnnnnnnnnnnnnnnnnnnnnnnnnnnnncctgcccctcccaataagttattcgttaacgtaccaaaacatgcagagcaatgaggaattcatggagattccctgaataccaaaattctgagcataatggcaagcagagctagctgaacgccctcctccagctccacaccctgccccgggtggatcgctgctataaagcttcacttgtatttacagcagcaaagtcctccacgaaccccttcaccaccagcgccttccatgcacacagaacatccctgaaccaagcagcaaccgacaatrctgcaactttaaatccatccccgtttcctcttccaagtttctgtttgagccgttacagctccctcaggaccccactgactcactgcattttcgggatgacgcaagcatgctcttctgcacagcttcaaaacaggctccaagcgtttccagtcacaaactggccactaaagatccctgtaaatcaggtgctctcactgcacagccaccatccctgtggagcagggagaaagcttcagtttcttttctgattggaaatgtattaatcaccagtactgtcattcctaggcaatacttctagg

SEQ ID NO: 40729 - DNA, 600 bp, Chicken  19866894275715_2
agggctggcccgcctctcctgcagcccggccagctcagcactgcctgtgtcaccttgctgtcccctcgtgccactgggtatccatctccaccctcgggctgcagcctcttggaagaaccctgtcaacacaacatctgccccagcttctccacattggttcccagttccttggttctacctgcagcaaatctgggaagttaaagaggaaagatattctgggcgcgctcgtgccaacggatggatactgcacaaagagctgagcagtcactgagcggaaagccatgtgtgaaaacatgagastgggaaggtttcttccatgtctagagattaaattccctattccttatgaatcctttcactcatcttttcttgctcctccaatggctgcacacaacacagaccttgtactgtactagcatctgtatctaatactgtttactgtatcatcagtataccgtactgtatctgtgctccttacaaggatggtaacaacagcaaaacaaacgctgggctcctgacttggctttgctgtctgatatcaaaggcagctgaaacattttttctgcttgcagcttcccacatctgtctgctctgtgagat

SEQ ID NO: 40730 - DNA, 407 bp, Chicken  19866894275715_3
tatcaaaggcagctgaaacattttttctgcttgcagcttcccacatctgtctgctctgtgagatgtcactgcaacaagagagctggaagtgacaagaagatgtaaaactgaacagtgaagtggaaaataaaaaaaaaaatcagagaaagatgagtatgcctcattttatcagcagcactaacactgctaatgaaaacttccagaaggtgtccttcctacacagccttcttaccctcttcaagccaggttaactaagatgaacgcctgacacaaacctgcttgtacttcactccttacagmaagcaacagaggaargcttcactcatttgtgaaccaagaggtcacactgatgactgaagggttatctgcaaaacaagctttaatccttactgtcagtcatacaaaaa

SEQ ID NO: 40731 - DNA, 392 bp, Chicken  19866894275715_4
aaacattttttctgcttgcagcttcccacatctgtctgctctgtgagatgtcactgcaacaagagagctggaagtgacaagaagatgtaaaactgaacagtgaagtggaaaataaaaaaaaaaatcagagaaagatgagtatgcctcattttatcagcagcactaacactgctaatgaaaacttccagaaggtgtccttcctacacagccttcttaccctcttcaagccaggttaactaagatgaacgcctgacacaaacctgcttgtacttcactccttacagmaagcaacagaggaargcttcactcatttgtgaaccaagaggtcacactgatgactgaagggttatctgcaaaacaagctttaatccttactgtcagtcatacaaaaa

SEQ ID NO: 40732 - DNA, 600 bp, Chicken  19866894275718_1
cagttttatccataataaggtacatcctgtacagggctcctcacactacaaaatcatctttccagacagatttcaatttcacacagaaaatattttccgtgaatcattttgtttaaatataaaagagaactaacttcagctgttttcatgttcttttgtgtttgctgtctaagaacgtttatgtgataaaacgtctgcagaaagtgaattttaaaagcaagcctcatgttctgctctgtgttgtacattaaacttctcagtactctatgctcacctagttagtgcgtgaaagattaatasgatgctcaggaatcatacggtaaagaaacaaagaaacagaagaaacaaacagcaattgcagagctccagacccgccttctctgcctcctaaaatccatacccatcgtatgttcttcagcttttgcaattcaaattcttctttctgttttttctttttctgttgagaattaaaggatctccttccttgccacattcaaaacaaaaaataaggttatcattcactacccctgtattcggtaagacaactgaacaaggagcatctgagcctctcatagtacttcatgacaaaaattactttga

SEQ ID NO: 40733 - DNA, 599 bp, Chicken  19866894275719_1
  misc_feature (1)..(107): n is any nucleotide
nnnnnnnnnnnnnnnnnnnnnnnnnnnnnnnnnnnnnnnnnnnnnnnnnnnnnnnnnnnnnnnnnnnnnnnnnnnnnnnnnnnnnnnnnnnnnnnnnnnnnnnnnnnccagcgctgctccccgggccgcccggccctcctgcacctgcctgcacgtggagctgcggctgggcgttgaggaagtcgaagatgcgctggtagttgaggaattgagcgtcccactcctgtggtttgtcatagcggaaatcgtctcccaggggcaccagcagcactttgctgcggtacagcttggatttcttgyggtactggtccagcaggagctgagctctgccgtggggtcagggcatgaggccggctgccggcaggcggtgctgctcagcgctgctcagccctgcactcacagcactcaccgctcccgccacgttggcctcagtgatggcgcggggcggcaccttccagggacagttgatgcggccgcccggcaggcgcttaaagtcgaactggcagcagattttggggtctggcccgcaggtgtggggcacatcgtagctgtagaagggcatcatgtggcagaagatgtccgtgctggattcagggtct

SEQ ID NO: 40734 - DNA, 600 bp, Chicken  19866894275724_1
ggaaggcggaggtaataaaccagattattcatgatctggtcataaatctgatccttcctaatcccttgtacttgtgggattgctcacacacatcatgcactgaaccagacaggaggctgatgcattatcttctatgttattaggttagcattgaattaaataggttcctagattttgttggtgtcctgggttcaggtgggacagagttgattttcttcatagcatccggtatgatgctatgttgtcactttaggagaaaagccacattgactacgactgatgttttagctgctgctgagsagtgctgcacagtatcaaggacatttcagtttctcagcttctcatgcggtcctgttagcaagggagactgaggcaacacaaggagctgggaggggacagaaccagggacagctgaactaaactagccaaagcccataccacatgacatcatgtgaaaaccattcaattgagggcagttggtcagggggcagctgctgcctggggactggctaggtatgtatcagtgggcagtgagtaactgcatcgtgcatcacctgtttcgcgtgtgtgtataattaagattactgttacttttctcct

SEQ ID NO: 40735 - DNA, 599 bp, Chicken  19866894275739_1
  misc_feature (1)..(183): n is any nucleotide
nnnnnnnnnnnnnnnnnnnnnnnnnnnnnnnnnnnnnnnnnnnnnnnnnnnnnnnnnnnnnnnnnnnnnnnnnnnnnnnnnnnnnnnnnnnnnnnnnnnnnnnnnnnnnnnnnnnnnnnnnnnnnnnnnnnnnnnnnnnnnnnnnnnnnnnnnnnnnnnnnnnnnnnnnnnnnnnnnnnnnnnaaccaattcctcttccagcggcgcaggatggaacctgggggatggcggggtgtgagtgaccctaaacccgctgcggggtcccgctgtccccagcgcaacccgtggggtgcctggctyggggatgaaccacagcagcgtggcgtgaatgaarcccttggatccatccctgaaaaagccgttggggcatctcccagtccttataagggggggagcaggagggtcctcatagagyatccgtggctgagctccgtgaccccaaactgcgtcctgggtgtgggcgcccggtgcggagctcaggaacagaacccccgttgagatcgggatcgggattggcactcactctgcctccagagccatccgctcttcaccagtgccatggccatgggaggccttccggaccttctgctgcagggagg

SEQ ID NO: 40736 - DNA, 599 bp, Chicken  19866894275739_2
  misc_feature (1)..(149): n is any nucleotide
nnnnnnnnnnnnnnnnnnnnnnnnnnnnnnnnnnnnnnnnnnnnnnnnnnnnnnnnnnnnnnnnnnnnnnnnnnnnnnnnnnnnnnnnnnnnnnnnnnnnnnnnnnnnnnnnnnnnnnnnnnnnnnnnnnnnnnnnnnnnnnnnnnnnnaaccaattcctcttccagcggcgcaggatggaacctgggggatggcggggtgtgagtgaccctaaacccgctgcggggtcccgctgtccccagcgcaacccgtggggtgcctggctyggggatgaaccacagcagcgtggcgtgaatgaarcccttggatccatccctgaaaaagccgttggggcatctcccagtccttataagggggggagcaggagggtcctcatagagyatccgtggctgagctccgtgaccccaaactgcgtcctgggtgtgggcgcccggtgcggagctcaggaacagaacccccgttgagatcgggatcgggattggcactcactctgcctccagagccatccgctcttcaccagtgccatggccatgggaggccttccggaccttctgctgcagggagggaaagaaacagaaggacagaaagaacggggttag

SEQ ID NO: 40737 - DNA, 599 bp, Chicken  19866894275739_3
  misc_feature (1)..(68): n is any nucleotide
nnnnnnnnnnnnnnnnnnnnnnnnnnnnnnnnnnnnnnnnnnnnnnnnnnnnnnnnnnnnnnnnnnnnaaccaattcctcttccagcggcgcaggatggaacctgggggatggcggggtgtgagtgaccctaaacccgctgcggggtcccgctgtccccagcgcaacccgtggggtgcctggctyggggatgaaccacagcagcgtggcgtgaatgaarcccttggatccatccctgaaaaagccgttggggcatctcccagtccttataagggggggagcaggagggtcctcatagagyatccgtggctgagctccgtgaccccaaactgcgtcctgggtgtgggcgcccggtgcggagctcaggaacagaacccccgttgagatcgggatcgggattggcactcactctgcctccagagccatccgctcttcaccagtgccatggccatgggaggccttccggaccttctgctgcagggagggaaagaaacagaaggacagaaagaacggggttagaagagcagctcctgctgcccccgctccctccycgtggggctgcgggagggatatgggaaatgcccgggtgaatcggggccg

SEQ ID NO: 40738 - DNA, 600 bp, Chicken  19866894275739_4
ggcatctcccagtccttataagggggggagcaggagggtcctcatagagyatccgtggctgagctccgtgaccccaaactgcgtcctgggtgtgggcgcccggtgcggagctcaggaacagaacccccgttgagatcgggatcgggattggcactcactctgcctccagagccatccgctcttcaccagtgccatggccatgggaggccttccggaccttctgctgcagggagggaaagaaacagaaggacagaaagaacggggttagaagagcagctcctgctgcccccgctccctccycgtggggctgcgggagggatatgggaaatgcccgggtgaatcggggccgagcagacgtagggtttcataaccagggaaacactgaggtggggaggggctgtgccacctttcttggtgcctttaatctcgttgggatttagggattatcgtcccgtggaggtaaatggagaaatccgggaggcggatgaaagcaggcgctccctccccacggcccccggtaactttccacgccgagcggcggccgcacttgttttgttttcctgcctagatggaaattaatccttaatgaggccatgaagt

SEQ ID NO: 40739 - DNA, 599 bp, Chicken  19866894275741_1
  misc_feature (1)..(131): n is any nucleotide
nnnnnnnnnnnnnnnnnnnnnnnnnnnnnnnnnnnnnnnnnnnnnnnnnnnnnnnnnnnnnnnnnnnnnnnnnnnnnnnnnnnnnnnnnnnnnnnnnnnnnnnnnnnnnnnnnnnnnnnnnnnnnnnnnnntcgctgataatttgaacgtcaagctgcttgacaccttgtggattttttaatctcttaaaataggttttaaggtgctaccttttcccactgatcagcgcacaaactggtgctgcattaacataataaaataatgttcttcagctcatacgagggagctacaatatttggscaatgcctggtgctatggttttastaaatggaagttttgtgtcctcatgcagcctggggaggctggaacttgttgtcttgatgacctctagacgtcccctccaagccctacaattctgtgatttcagccaaattccatgctttccccaggccttaggrgaatggcagcaatgctctgcactgagggtccctagggaggagcaggctcctagcctggattcaccctttcttatcttccagcgagttcagatattcacaaaaacagagaaaataagatttcagtkagtttgctgctcatgg

SEQ ID NO: 40740 - DNA, 599 bp, Chicken  19866894275741_2
  misc_feature (1)..(107): n is any nucleotide
nnnnnnnnnnnnnnnnnnnnnnnnnnnnnnnnnnnnnnnnnnnnnnnnnnnnnnnnnnnnnnnnnnnnnnnnnnnnnnnnnnnnnnnnnnnnnnnnnnnnnnnnnnntcgctgataatttgaacgtcaagctgcttgacaccttgtggattttttaatctcttaaaataggttttaaggtgctaccttttcccactgatcagcgcacaaactggtgctgcattaacataataaaataatgttcttcagctcatacgagggagctacaatatttggscaatgcctggtgctatggttttastaaatggaagttttgtgtcctcatgcagcctggggaggctggaacttgttgtcttgatgacctctagacgtcccctccaagccctacaattctgtgatttcagccaaattccatgctttccccaggccttaggrgaatggcagcaatgctctgcactgagggtccctagggaggagcaggctcctagcctggattcaccctttcttatcttccagcgagttcagatattcacaaaaacagagaaaataagatttcagtkagtttgctgctcatgggacagactcctcactgcagttgct

SEQ ID NO: 40741 - DNA, 600 bp, Chicken  19866894275741_3
ttgacaccttgtggattttttaatctcttaaaataggttttaaggtgctaccttttcccactgatcagcgcacaaactggtgctgcattaacataataaaataatgttcttcagctcatacgagggagctacaatatttggscaatgcctggtgctatggttttastaaatggaagttttgtgtcctcatgcagcctggggaggctggaacttgttgtcttgatgacctctagacgtcccctccaagccctacaattctgtgatttcagccaaattccatgctttccccaggccttaggrgaatggcagcaatgctctgcactgagggtccctagggaggagcaggctcctagcctggattcaccctttcttatcttccagcgagttcagatattcacaaaaacagagaaaataagatttcagtkagtttgctgctcatgggacagactcctcactgcagttgctgaactatgtaactatacaagaggagtaagcccgctggaaacctctcagtgctaattgcctcctatacaaggatcttgatgayccctcctgtgaaaagctctgacacctctgccctgcagccaacctgtgatgctc

SEQ ID NO: 40742 - DNA, 600 bp, Chicken  19866894275741_4
gagctacaatatttggscaatgcctggtgctatggttttastaaatggaagttttgtgtcctcatgcagcctggggaggctggaacttgttgtcttgatgacctctagacgtcccctccaagccctacaattctgtgatttcagccaaattccatgctttccccaggccttaggrgaatggcagcaatgctctgcactgagggtccctagggaggagcaggctcctagcctggattcaccctttcttatcttccagcgagttcagatattcacaaaaacagagaaaataagatttcagtkagtttgctgctcatgggacagactcctcactgcagttgctgaactatgtaactatacaagaggagtaagcccgctggaaacctctcagtgctaattgcctcctatacaaggatcttgatgayccctcctgtgaaaagctctgacacctctgccctgcagccaacctgtgatgctcagcaaatggggagtcctcgggctactctagggcctttccttcaccttctgcacagcttgtgctgactcacatgactgatggacactgcctcctcccacctcctgcttccccaggacattcctttg

SEQ ID NO: 40743 - DNA, 552 bp, Chicken  19866894275741_5
ccctacaattctgtgatttcagccaaattccatgctttccccaggccttaggrgaatggcagcaatgctctgcactgagggtccctagggaggagcaggctcctagcctggattcaccctttcttatcttccagcgagttcagatattcacaaaaacagagaaaataagatttcagtkagtttgctgctcatgggacagactcctcactgcagttgctgaactatgtaactatacaagaggagtaagcccgctggaaacctctcagtgctaattgcctcctatacaaggatcttgatgayccctcctgtgaaaagctctgacacctctgccctgcagccaacctgtgatgctcagcaaatggggagtcctcgggctactctagggcctttccttcaccttctgcacagcttgtgctgactcacatgactgatggacactgcctcctcccacctcctgcttccccaggacattcctttgctcaaatgcaaaggcatttctgcatgcttaagacgtatcaaatgttcagaccctcctgtctccaactactcacg

SEQ ID NO: 40744 - DNA, 599 bp, Chicken  19866894275743_1
  misc_feature (1)..(132): n is any nucleotide
nnnnnnnnnnnnnnnnnnnnnnnnnnnnnnnnnnnnnnnnnnnnnnnnnnnnnnnnnnnnnnnnnnnnnnnnnnnnnnnnnnnnnnnnnnnnnnnnnnnnnnnnnnnnnnnnnnnnnnnnnnnnnnnnnnnnttgggaagagaaatctgtttgcctgtcaaaacagtggccatcaattagaactgtaaacgtgattcttctaagtgtcttggatggtagcagaggattctggtgatgtattagggggctggagtcactttcataccatgcgaggaagctttcagaggaacagctgtccaygtgaaacaaattcactgttacctttgagctcaagctgagaagaacctgtctggcctgccaaaattctcagctattttcccagaaatcccagatttaaaacattctatgtggcaagctgacaaaactgatactagattattctgtggtttgcttaggaaattttggcttaggataactatagcaacaggagaaaaacaatgaagttgctgaaagacgacgcaccagaaaagaatcagtggaacgatgcaattccactgtttattgatttaggatacaaccctggcacacaaatagcaatt

SEQ ID NO: 40745 - DNA, 533 bp, Chicken  19866894275743_2
aagaacctgtctggcctgccaaaattctcagctattttcccagaaatcccagatttaaaacattctatgtggcaagctgacaaaactgatactagattattctgtggtttgcttaggaaattttggcttaggataactatagcaacaggagaaaaacaatgaagttgctgaaagacgacgcaccagaaaagaatcagtggaacgatgcaattccactgtttattgatttaggatacaaccctggcacacaaatagcaatttcccctttgatacgggcacccagctctcattaacatcaakaagagctgtgtggacacgctgatgggaatatgctccccagtatttttcaggaaattaacaccactcacttggggactgaagaaggctctgtctgtcactcagccagccttctctacagttaattaagcaaaaaaacctgtgccatgagtctctagaggaagcccttccctgttctcctcagtacaacaaaactgacacaaagcaaaatgtcagaagcgggagctgggaagtgg

SEQ ID NO: 40746 - DNA, 599 bp, Chicken  19866894275746_1
  misc_feature (1)..(41): n is any nucleotide
nnnnnnnnnnnnnnnnnnnnnnnnnnnnnnnnnnnnnnnnnatgaaagtagtcactaaaagacacgcagaatagtaaaaaaaaaaagccatgtgtaaatctaccaatacatgttaaaaaagtattttcattggtcttaatagaaacagtgcttatacgtgagtacaaagataagctacagtcaaggatgttgctagaatgatcagcttacaatgcatagtatatcatgagacaaaatcatacttttagctcgctacctaatctgccaatcttcatccaaggaaaaatgctttaaataagygacacagtagcaagaatcccacttatgctgaaatcgcagacaaagcttccccctcattccaacagcatcggatttttgttattgttttttaatcagcgttatgttatcggttcatgaaatcactaacagtagcyctcaaaaaccagcaggaggtctgataatagattaattagtgtgaaaatgcctttttatatataaaaaaagaatgagacrattagttgtgaagacacaagtctagagttctccctattgtttagctcccacagtactcaaatggaataaaatttgacctccagata

SEQ ID NO: 40747 - DNA, 517 bp, Chicken  19866894275746_2
cttaatagaaacagtgcttatacgtgagtacaaagataagctacagtcaaggatgttgctagaatgatcagcttacaatgcatagtatatcatgagacaaaatcatacttttagctcgctacctaatctgccaatcttcatccaaggaaaaatgctttaaataagygacacagtagcaagaatcccacttatgctgaaatcgcagacaaagcttccccctcattccaacagcatcggatttttgttattgttttttaatcagcgttatgttatcggttcatgaaatcactaacagtagcyctcaaaaaccagcaggaggtctgataatagattaattagtgtgaaaatgcctttttatatataaaaaaagaatgagacrattagttgtgaagacacaagtctagagttctccctattgtttagctcccacagtactcaaatggaataaaatttgacctccagatacaaaacagacaacgtattctcatctgccttaatatttaaatgctattttgta

SEQ ID NO: 40748 - DNA, 438 bp, Chicken  19866894275746_3
gcatagtatatcatgagacaaaatcatacttttagctcgctacctaatctgccaatcttcatccaaggaaaaatgctttaaataagygacacagtagcaagaatcccacttatgctgaaatcgcagacaaagcttccccctcattccaacagcatcggatttttgttattgttttttaatcagcgttatgttatcggttcatgaaatcactaacagtagcyctcaaaaaccagcaggaggtctgataatagattaattagtgtgaaaatgcctttttatatataaaaaaagaatgagacrattagttgtgaagacacaagtctagagttctccctattgtttagctcccacagtactcaaatggaataaaatttgacctccagatacaaaacagacaacgtattctcatctgccttaatatttaaatgctattttgta

SEQ ID NO: 40749 - DNA, 600 bp, Chicken  19866894275750_1
agtgttgagaacagaacaccaataggcttactgcagcttacactaagcttgtctacttacagcagcaatttcccccatttcagtgggtcccctccttctcttcccccacgatacaccctcagaaacacctcaatgagatagcattatgcaaaagagctgtcgctgcaaagcattttattatgctttgcctgattatgctaattctaactctatgaagtcactttgcttcctctcttcccttctcccctcagttctctgtgctgctagcagagagtttgtattgaaatggggaacatgaaygcagttatgaaacagaacaaattaaacagaacagttgcgattacttgtctttcataaggcatcgcatatgttgcagtaccaaagctacagaaagtggcagctttaccttatgcactatctgctcttatttttcaactattaacatcgtatgtgaaggaatatggtgactgccattctaaggggttggatttccatgaagtccagaagcctgaggccatgtgccactgtgcctactgtggggtgtgcagcaggcctcgagtctgcactgctgacctgggtccaacaaagcatgtgggccca

SEQ ID NO: 40750 - DNA, 600 bp, Chicken  19866894275752_1
tctgcactgtgtcctttcctgcctctccatactgatactttagggacaggctttgctggggttaaaggtgactgaaaccattgatcatagtcttaacagcaggctgatctgtgtgattggctgcctaatggggagtcattattatgaatgctttctaaaatgcttgaagtgtacaagacatggatttgttgttctggtagggtttcagtctgctttcaggtgcctgtcagtcccccccaggcccttgctggaaaacaggtgtttgatgccactggcccacagtctaagtatttacttagmgtgagtatttacttagactgtaagttctctaggactggggctgttttccatcctgtttctacaagtgggatcctggcctgactggagtgttcaggtactaaggcaatctaaagatcaagattttatgacctccagcttgctggaagaaccctccttggggcttaaggatgtcctgttgcaaccttcagttctgcaagacctaaatgattcagtacttcaatatagatttgttcttatatacttagttgtcttttgtgaagcacttcgaacacaacggaagtgcatagcattgccttgtca

SEQ ID NO: 40751 - DNA, 600 bp, Chicken  19866894275754_1
aagccggatcggtgtttggagaaataaggtcagcaaagcactgctggggggatgcagccctctgaggtgccatgggcacttagcatcctgctggcctacctatggcccatcatatgcaagactggtttagattgcaatattaacacttcaggtgggcaggtgggattttaggtagtgttttgttcttcaaaaacgaggcttggaaaacttcactgcgggtaataataactaggccctgagtcctccaaaagggagaactggaggcatatgatgggataagggaggttttatagtaagggwgctgtgctgagcccaytggaatggcttaggttggaggagcccacccagccccaagccctgctatgggcggggggccccccagctcaggctgcccagagcccatccgtggccyggggcacctccagggatgggcgcccacagctccctgggctttggctgcagcagctgaaggcggtacaggagcagtgctcaagtctcttggtgttccactcagcttgctggcagctggaggagggaatcgccgaacggctaacgtcgtggctcatgggtttgccaatcttttcattctggacaagaagg

SEQ ID NO: 40752 - DNA, 600 bp, Chicken  19866894275754_2
tggagaaataaggtcagcaaagcactgctggggggatgcagccctctgaggtgccatgggcacttagcatcctgctggcctacctatggcccatcatatgcaagactggtttagattgcaatattaacacttcaggtgggcaggtgggattttaggtagtgttttgttcttcaaaaacgaggcttggaaaacttcactgcgggtaataataactaggccctgagtcctccaaaagggagaactggaggcatatgatgggataagggaggttttatagtaagggwgctgtgctgagcccaytggaatggcttaggttggaggagcccacccagccccaagccctgctatgggcggggggccccccagctcaggctgcccagagcccatccgtggccyggggcacctccagggatgggcgcccacagctccctgggctttggctgcagcagctgaaggcggtacaggagcagtgctcaagtctcttggtgttccactcagcttgctggcagctggaggagggaatcgccgaacggctaacgtcgtggctcatgggtttgccaatcttttcattctggacaagaaggatttgaacgagattct

SEQ ID NO: 40753 - DNA, 600 bp, Chicken  19866894275754_3
tatgcaagactggtttagattgcaatattaacacttcaggtgggcaggtgggattttaggtagtgttttgttcttcaaaaacgaggcttggaaaacttcactgcgggtaataataactaggccctgagtcctccaaaagggagaactggaggcatatgatgggataagggaggttttatagtaagggwgctgtgctgagcccaytggaatggcttaggttggaggagcccacccagccccaagccctgctatgggcggggggccccccagctcaggctgcccagagcccatccgtggccyggggcacctccagggatgggcgcccacagctccctgggctttggctgcagcagctgaaggcggtacaggagcagtgctcaagtctcttggtgttccactcagcttgctggcagctggaggagggaatcgccgaacggctaacgtcgtggctcatgggtttgccaatcttttcattctggacaagaaggatttgaacgagattctggtgcactaccccgagtctcagaagctgctgcgtaaaaaggccaagtgagtgygggctgcaggatggagcgctggtctgaaagccaccggggaggt

SEQ ID NO: 40754 - DNA, 600 bp, Chicken  19866894275754_4
gggggccccccagctcaggctgcccagagcccatccgtggccyggggcacctccagggatgggcgcccacagctccctgggctttggctgcagcagctgaaggcggtacaggagcagtgctcaagtctcttggtgttccactcagcttgctggcagctggaggagggaatcgccgaacggctaacgtcgtggctcatgggtttgccaatcttttcattctggacaagaaggatttgaacgagattctggtgcactaccccgagtctcagaagctgctgcgtaaaaaggccaagtgagtgygggctgcaggatggagcgctggtctgaaagccaccggggaggtttctcaattccagctggtctaaccctgtgctgacatcatctcttgttctctttgctgcaggaaaatgctgaaaagcaataataaacccaaagatgagaaaggagggcctggagacccgctgatcattccccccaaagccgatacccccaagctcttccaggctgctctggctgccgtggggaaggcaggaggcagagggcacctggcacagctgcgctggaagctgcggcaactgaaggcgatgcaggaggcacagg

SEQ ID NO: 40755 - DNA, 554 bp, Chicken  19866894275762_1
gccaggtcatctaatccacacagtccaatacactctattatccctttccccctcctggcggggggcagggcacctctatttgttacctctgttgttcttatggctatttctgtgtcctgcagcaactggagcaatcacctgtttggataagttcaccttggtggttgatctgtcttgtaattcttttacccatacttgaagtgcaggagtgggttttttatgccacttcttcatatcttctccatggtcacataggtaatgccacaaggccatatgtgatgcagtcttactgttgtcacytgctcaagcaggaggacgtcttcttttgatagctgagatattggatgatgcaggttgggaggaaaccagtttgatcagcccctccagtaggctgtattgggaatcctggtccccatcagatatatctgataccaccatgcatccatcagcattaagcatgatagacagttcatctgttatatcttcttgtttgctctccattctgaccactttttcagctacttttgtaatggctgaaacacaagctcatagag

SEQ ID NO: 40756 - DNA, 600 bp, Chicken  19866894275763_1
atcataatgatgaaaaaatttaacacccagacctattcagttttaattaggatagcaatattatagactgtaataataacccattgttggcatcgaataacaacaacaacaacaaaaaatcaattcatttgtcttctgtcttcctctgttttaactcaggtaaggcaaaaggacagctgtgctgttgttactcttcaacatttgatggaatgttttaaacaatctaacttcaattcacacagttgttttcttgaaatcctggaatgacctaaaacttcattctcacagtaggaaaccatrtcttttgttttgttgaagcataagtgcattttttgttctaatgctttctgtgactatgtacatgcatttttagtaatttcatttttctaagttttcactgcagtggtggtttcaatccaattttttcaggacagcttctttctacagtatttcttgctttcactcaaacatctgacattctagaagcatgtcctacatgtatattaccaggatatatttttgactgaagtatagtgacctattcacttttttctcttctgagaaaaagtgtccgttcttttgcagatccacaaattacaa

SEQ ID NO: 40757 - DNA, 600 bp, Chicken  19866894275776_1
aaacgatcaacaccctcttacacatcaatatccctgcagctggcaacattttcaaataaatatgtgcttaaacccattttcaagctcagacctgaatatcatttgtatatcttaactgctaatcgcagctttagatcaaatttcagaccgctcttaagaaggtccaatattattgacttatatgagttgttttttcatatttttttttttaaacaagcaactttgatcctatattacctaatagagatctcaagccagaaaatcccatgcagaacttccccaaaattttaatggtgttawtggaatttctgagctcagaggaatgcaagttttgtccacattaactcacagggttagaatgatgtctataagcatgaacttttacatgatcacagctcaaatccatatcaaagctccctgaaagcaggtggatctggatgtctggtcaaaaggtcggccatttccttttcaactgcaataaaagaaataaaccaaaaccagtttcctacttggcccttggttgttttcctattttctccacttctttgggtgactttgcagtacaaatcctgttcatgggttgtttctttttccaccagt

SEQ ID NO: 40758 - DNA, 600 bp, Chicken  19866894275780_1
tgcctggtgtttaccaggtacctaacatccattttgggttaccttagttccctgagctgccagctaaagctcttcggatcccattaaacgaacagccaaagatgccctgtccggagggcaggaatacctaaaagaagaatgcatttgttggctgaggttggaaattactgcaaatgtccaaaacgatcaagtgctgcctgtgaaccagactgcaaaacgcttgtccctaggactgctctttccttcagctctgtcagtgcaactatcggattgagcaagtcatgcagtctgtgagaaagytgctaataccatttagcagtgattgatttcataatattttatagtgttttgaaacaccagtgagtaaatacagctgataacaaggcttaaagagacaagataatgacttcattgataattcttcctgtccctttgttattttcttaatgtctattaaatagccaatttgttaagcttttcaaaaaggacaattggtaaagaactttcttgcaaagaacataatatcctgcccagggcatagctccaggcattgctatcttctccatctgaagttgtcttttctgagataattcataggaa

SEQ ID NO: 40759 - DNA, 584 bp, Chicken  19866894275780_2
tccatttcccccaccccaaaacagtcctgagcatcttcctctgtctactaacgtgcctcagagtaaaattattcagaggactctccccggtatgacttgctttgtgaaaagatcaatcagtgttacaggaggacagtttgatccaagcttcttaccatgctggacaggacaaatgtttttcctcattgcttcatcagtgaatcactaaggagacaaagtcatcttcccaagtctgctctaacttgtgtcacaaatgagcttttcagcacaaaataattgtacagcaagccaaacataacrcactgtgcccctgatcacactcttgggtctcccctaccctttgcaaaagttgcagactgcagaggctggtgtacagctgtaagttgctgttggagatattttctgcctcctagctgagggggaaggcatgtgtcttttgatttccctggagcctgaagaacttagacccagagtagatgatggatttgagttctctgcctctaactgctccttgtcctctctgaagacaaccgatccacagctcatagcttcttaggtgcaaatgtacagattacatgttcttg

SEQ ID NO: 40760 - DNA, 600 bp, Chicken  19866894275799_1
aagtattttaaacaggtgtttttaggctgagtctaggaaggagagtaaactttgatggtttttattttgtctttctggaaagctaatgtgtttcctatggctcgtgaccacaatttatttccaagtgattttctcttggccaattttcatttatcatttaaataatccagcaacaaagaggatgaggtattctgcaagaaggtgtatgactcagtaatcattctaccttcatatcccctttggggggaattattagagatgaaatgaccttcctggctatcaagcattaccattgtaacrcagatggataatatgacacccttgacacagagccaaaggcaggtcgagctgagtgtgctgtacccgatcctgcaaatgacagagacatgattaaaatgaatgtgagaaaggagaccaagagtgatgggagccctctgctagctcacaggagattggggaatctagctgtgatgtatcacctttacagtacttctcatttgggctgtgatgagcggaatttgctgtctttactgtcttctcaagggaccttgatctctttgtggtctttaggaggaagcaatgcctagtgtataaagcctt

SEQ ID NO: 40761 - DNA, 600 bp, Chicken  19866894275799_2
gatggataatatgacacccttgacacagagccaaaggcaggtcgagctgagtgtgctgtacccgatcctgcaaatgacagagacatgattaaaatgaatgtgagaaaggagaccaagagtgatgggagccctctgctagctcacaggagattggggaatctagctgtgatgtatcacctttacagtacttctcatttgggctgtgatgagcggaatttgctgtctttactgtcttctcaagggaccttgatctctttgtggtctttaggaggaagcaatgcctagtgtataaagccttgmtagtgaaaccctgtacaacaaacaccatttcacaatggtgaaactcagtttcctcatttgtgtgttggtgaatatcttacatcttttatataagctgctgaaagtggtgtctggtgaactcgctcacacagaactacatggaaaagtaaacgttgctatcttgcataacatttttttttttactccagagggtgcttgggcagtcaacaggatacttcagcacttattgcctcaacttttgggctgagaaacttgtgtaagatttttgctttttatagtcccatgagctctcttcacgtt

SEQ ID NO: 40762 - DNA, 600 bp, Chicken  19866894275799_3
agaatggatttcataagatgcaggaaaggaaggccagaaggaaggcacagctcttgacatgagtcaagcgagcctgtgaactcaagagcttctactccatagcacgtcgtgtctgcgcctttgggacgcttttgccactcagtattctgctgatggagcagagaggttctaaagttctctaacttcattttctggttcatcctcaggaaaagttgtgcaaagagcatgatttatcatgactgttatggtgatctaccatgatttagtgatgaaattacaatgatagatcatagttaattrtgatcattaaaagacatcaaaaatgtaatcggctgttcatcatataccttttaaaagaaaaaaatacctcaggtttttaaagactgggattctaggtgttgataaaattagaacatgttttattcatgctgtgatacagcgttctttcttcactgagctcgttgtctgggcatttcgcttcagaggcactggggaaggatttgaatgagaatttagtgcattgtaaacaactatgggtcctagttctaccctgggctccatggggtgcagatcttgcccatgtggggcacgttaaggaat

SEQ ID NO: 40763 - DNA, 600 bp, Chicken  19866894275804_1
taggcaagacactttagagacaggtgggtgaggactcaagctcactcccccttgttcttgtggggtatttcaaagtcccagacatcggctggatttataatacagcagatagggaacagtcctggaggttcctcgagtgtgtgggagatcacttcctgacacagctggtgagggagccaatgaggggaagcaaaattctggacctgctgtttgtgaactgagaaggtcttgagggggatgtaaaggttggagcaaagtgatcacgagatgctagatttctcaatccttgttgaaccacaraggggagtcagcagaactgccaccttggacttccagagggcagactttcacctctttatgaccatggttgagagggtccctcgggatgtagttttggagactgtgggagcccaggaaggttgggaatactttgaggaagttattttaaaggtgcaggagctgactgtccccaagtcacggaagacgagctgacgggcgaggaggctggactggctgcacagagacctttggctggatctcaagaacaaaaggaaagtttatggtctctggaagagtgggcaagctacttatgatgattac

SEQ ID NO: 40764 - DNA, 600 bp, Chicken  19866894275804_2
agttttggagactgtgggagcccaggaaggttgggaatactttgaggaagttattttaaaggtgcaggagctgactgtccccaagtcacggaagacgagctgacgggcgaggaggctggactggctgcacagagacctttggctggatctcaagaacaaaaggaaagtttatggtctctggaagagtgggcaagctacttatgatgattacaggtatgtagtgaagctgcgcagggagaaaattagaaaagccaaagcccagcaagaactgaacttggccactaaagtaaaggacaacartaaatatttctgtaaatacatctacagcaagaggagggctagggagaatctccatcccttcttggatgccgagggcaacttggtgaccaaggatcaggataaggctgaggtacttaatgccttctttgcctcagtctttaatagtaagacttgtaactccccgggaacacagccccctgcgctggtagatacggatggggaacggaacatgccctgcatgatccatgatgagatggttttggacctgctccgaaagctggacgctcacaagtccgtggggccagatggactgcaccctgg

SEQ ID NO: 40765 - DNA, 599 bp, Chicken  19866894275809_1
  misc_feature (1)..(9): n is any nucleotide
nnnnnnnnnagtctctacagcttatgggcaattggatgttaattttctatgtgaagtgctttttcttattaattccatgagctgtgaagctgataaagcacctctttctcatggctttgccttgctgcagtgctgtgagtgttggtaaccatacagccgttgctcaagggaaatatgagtagaatagagttcctctgtcggctgcttgttatcatagagattaatagcaaccctgtacgtctgagctctgtgcttctttggaagcattacttttgatctgaaaccatggtttgacttcasaytctcacctgsgggaaggtgaaggagcaggagaagatcccttggcttgactgtagctaagaaccgtgtagtttttatttcacttacctgcagttcagtgatcaatcacataatcatagaatggcttgggttggaaggggcttcaaagataatccacttccagccctgtgtggggcagggttgccaaccactaaatcagtcactagatcaggctgcccagggccccatccaacctgaccttgagcacctccggggacggagcatccatagctgttgggtccagagacccattcattcta

SEQ ID NO: 40766 - DNA, 599 bp, Chicken  19866894275809_2
  misc_feature (1)..(7): n is any nucleotide
nnnnnnnagtctctacagcttatgggcaattggatgttaattttctatgtgaagtgctttttcttattaattccatgagctgtgaagctgataaagcacctctttctcatggctttgccttgctgcagtgctgtgagtgttggtaaccatacagccgttgctcaagggaaatatgagtagaatagagttcctctgtcggctgcttgttatcatagagattaatagcaaccctgtacgtctgagctctgtgcttctttggaagcattacttttgatctgaaaccatggtttgacttcasaytctcacctgsgggaaggtgaaggagcaggagaagatcccttggcttgactgtagctaagaaccgtgtagtttttatttcacttacctgcagttcagtgatcaatcacataatcatagaatggcttgggttggaaggggcttcaaagataatccacttccagccctgtgtggggcagggttgccaaccactaaatcagtcactagatcaggctgcccagggccccatccaacctgaccttgagcacctccggggacggagcatccatagctgttgggtccagagacccattcattctaaa

SEQ ID NO: 40767 - DNA, 600 bp, Chicken  19866894275809_3
ctctacagcttatgggcaattggatgttaattttctatgtgaagtgctttttcttattaattccatgagctgtgaagctgataaagcacctctttctcatggctttgccttgctgcagtgctgtgagtgttggtaaccatacagccgttgctcaagggaaatatgagtagaatagagttcctctgtcggctgcttgttatcatagagattaatagcaaccctgtacgtctgagctctgtgcttctttggaagcattacttttgatctgaaaccatggtttgacttcasaytctcacctgsgggaaggtgaaggagcaggagaagatcccttggcttgactgtagctaagaaccgtgtagtttttatttcacttacctgcagttcagtgatcaatcacataatcatagaatggcttgggttggaaggggcttcaaagataatccacttccagccctgtgtggggcagggttgccaaccactaaatcagtcactagatcaggctgcccagggccccatccaacctgaccttgagcacctccggggacggagcatccatagctgttgggtccagagacccattcattctaaactggttgctca

SEQ ID NO: 40768 - DNA, 600 bp, Chicken  19866894275811_1
tgtgggtttaggtagatgtggacagctggtgggttccagcacatcactgattcacagatcatctcctttccccagtctgccagggtctgtttcccaatagaagtacactatttcgattcttgtctttcaaaaaagttacttgagggtttctctgtaaaaaagaaataaatcagattgccaatttatcttaaattggtgtggtcctgccttgtttaagtgtggcacaaatcactttttggagatgagaatgttctccatctcatccaagctctgcttccaaagttgtagttacaaataacrcaacatctgtcattatttgcagctggagagagtaagaaaagggaggcagcagccrggtgatgttcgtccctgtagagcacacagcagaaatggrkagttcccattacaatctgcacattaccatgcccaaatgctcagagaaagctattgcttccttgtgcagaatgagaaaaaaaaagggttccttttccctaaatttaattcccaaacaggtttcctagttccccccggatgagctcggtttctctcgaagccccgggacctcagcgacccgagttttgcacttccctttccctgcgc

SEQ ID NO: 40769 - DNA, 600 bp, Chicken  19866894275811_2
agatcatctcctttccccagtctgccagggtctgtttcccaatagaagtacactatttcgattcttgtctttcaaaaaagttacttgagggtttctctgtaaaaaagaaataaatcagattgccaatttatcttaaattggtgtggtcctgccttgtttaagtgtggcacaaatcactttttggagatgagaatgttctccatctcatccaagctctgcttccaaagttgtagttacaaataacrcaacatctgtcattatttgcagctggagagagtaagaaaagggaggcagcagccrggtgatgttcgtccctgtagagcacacagcagaaatggrkagttcccattacaatctgcacattaccatgcccaaatgctcagagaaagctattgcttccttgtgcagaatgagaaaaaaaaagggttccttttccctaaatttaattcccaaacaggtttcctagttccccccggatgagctcggtttctctcgaagccccgggacctcagcgacccgagttttgcacttccctttccctgcgctgtgttagcacaaggagcagcaggagaaacttggctgttcccgtcctgccggagc

SEQ ID NO: 40770 - DNA, 600 bp, Chicken  19866894275811_3
caatagaagtacactatttcgattcttgtctttcaaaaaagttacttgagggtttctctgtaaaaaagaaataaatcagattgccaatttatcttaaattggtgtggtcctgccttgtttaagtgtggcacaaatcactttttggagatgagaatgttctccatctcatccaagctctgcttccaaagttgtagttacaaataacrcaacatctgtcattatttgcagctggagagagtaagaaaagggaggcagcagccrggtgatgttcgtccctgtagagcacacagcagaaatggrkagttcccattacaatctgcacattaccatgcccaaatgctcagagaaagctattgcttccttgtgcagaatgagaaaaaaaaagggttccttttccctaaatttaattcccaaacaggtttcctagttccccccggatgagctcggtttctctcgaagccccgggacctcagcgacccgagttttgcacttccctttccctgcgctgtgttagcacaaggagcagcaggagaaacttggctgttcccgtcctgccggagctgctccggctgctctgtgtctttaaggggctgacccgat

SEQ ID NO: 40771 - DNA, 600 bp, Chicken  19866894275811_4
aatagaagtacactatttcgattcttgtctttcaaaaaagttacttgagggtttctctgtaaaaaagaaataaatcagattgccaatttatcttaaattggtgtggtcctgccttgtttaagtgtggcacaaatcactttttggagatgagaatgttctccatctcatccaagctctgcttccaaagttgtagttacaaataacrcaacatctgtcattatttgcagctggagagagtaagaaaagggaggcagcagccrggtgatgttcgtccctgtagagcacacagcagaaatggrkagttcccattacaatctgcacattaccatgcccaaatgctcagagaaagctattgcttccttgtgcagaatgagaaaaaaaaagggttccttttccctaaatttaattcccaaacaggtttcctagttccccccggatgagctcggtttctctcgaagccccgggacctcagcgacccgagttttgcacttccctttccctgcgctgtgttagcacaaggagcagcaggagaaacttggctgttcccgtcctgccggagctgctccggctgctctgtgtctttaaggggctgacccgatc

SEQ ID NO: 40772 - DNA, 573 bp, Chicken  19866894275816_1
taaaggatataaacaatgggaaaaaagcttgcctaggtgtggaaggtgtttccatcacagaacaacagaaaaacaaacaaacaagcaaacaaataacaaatctatcaccatgttttcttgctaacagaacagtgcatcaggacaggagaaaagaaaccaagacaggactgtcctaccattaaagcactgccaagaaagcatggatgaagatctcaactctgccactgattttgcgggcagcatgctacaaaacatcatttatttattctagttatccgattaaagaactatttatatcamctttccttttttctttttaactgtttgtatgttctgcctacttagatcgcactttcctttgctcagaaacctttgctcaaaagaaataactgtagcttctcaggatgaagmagcagcagctagcgcacgggattacatcctgcaagtaatrgaacattagctaaatccttctcataaaacaacagaaaaaccaccttgaaccattagtagccaaacattctgctatgccacacagttggctgctctaagcattaggcctccaattcaccaatg

SEQ ID NO: 40773 - DNA, 462 bp, Chicken  19866894275816_2
gttttcttgctaacagaacagtgcatcaggacaggagaaaagaaaccaagacaggactgtcctaccattaaagcactgccaagaaagcatggatgaagatctcaactctgccactgattttgcgggcagcatgctacaaaacatcatttatttattctagttatccgattaaagaactatttatatcamctttccttttttctttttaactgtttgtatgttctgcctacttagatcgcactttcctttgctcagaaacctttgctcaaaagaaataactgtagcttctcaggatgaagmagcagcagctagcgcacgggattacatcctgcaagtaatrgaacattagctaaatccttctcataaaacaacagaaaaaccaccttgaaccattagtagccaaacattctgctatgccacacagttggctgctctaagcattaggcctccaattcaccaatg

SEQ ID NO: 40774 - DNA, 422 bp, Chicken  19866894275816_3
agaaaccaagacaggactgtcctaccattaaagcactgccaagaaagcatggatgaagatctcaactctgccactgattttgcgggcagcatgctacaaaacatcatttatttattctagttatccgattaaagaactatttatatcamctttccttttttctttttaactgtttgtatgttctgcctacttagatcgcactttcctttgctcagaaacctttgctcaaaagaaataactgtagcttctcaggatgaagmagcagcagctagcgcacgggattacatcctgcaagtaatrgaacattagctaaatccttctcataaaacaacagaaaaaccaccttgaaccattagtagccaaacattctgctatgccacacagttggctgctctaagcattaggcctccaattcaccaatg

SEQ ID NO: 40775 - DNA, 385 bp, Chicken  19866894275821_1
aagccataaaatcacagcttctggaaaaatgaaaagcatggtcaatattacttgcaaaaatgtgcatgtattaataattcctatggacccatccatcacctacttccctttctagcaaatggtatttcatgaaaaaaggaagatcttcccaagattcactgtgtggaaggacacagaaggataccagtagcaggtcgtggtatttgttggaagcagtttgtctttccccattttccaagtttacaaaactgagattccatttcagagacaggaaaaccaatttctcctcccagtcttctyttagaaacccaaggcagtgtaaaaaaacccacaatgttacctggttaatcatgcatgattccagttcctcttttgtgacattatt

SEQ ID NO: 40776 - DNA, 600 bp, Chicken  19866894275822_1
agaattttttccaaatttacccattctgcagtcaaactcttccagctttcactgacttacatcttttctagaaacaaacactctggacatgtaagtataaactctatttaagacccatggagatcagataaggttttgtaacttcagctagcagtttgaatcattacatgtacatgccacccgtttgcatgtcccctcattgtgcttgaatagaaacagcaggatctgcacattgatagaaaatcttttctactgagtttattatctatttgagtggtttcactaatcatccatctggaycttgaatgcttcccaacactcacccacccacttctatttcacaatctgaagtgaaaagttaaattaaaaaaaaattgaagactactagaagtaatatcaccttatttctcaagagttttcagcagtttatatggtaacaatatttgaataaataaaatgcaaaaaagtttttcacccacatcatataacttttctatttcacaatctgatatacttattcagggaaaacatccctcatctaaaagtttcagggaaccttttccttaagtaattttctaaatagtaacaagtttatttcag

SEQ ID NO: 40777 - DNA, 600 bp, Chicken  19866894275829_1
gctcagataaagaaaggcctgtggcactcctctctctgtggttggagagaattcaagcagagtaattaacaccgagtgaccttattccatggctgctggaaactcctgggaggaaatagtgtccagcccctcgtcagcagatggaagaccgtaggtgaatgtccgtgcttatcaacagcttgccctttcagtcttcacttggataagggctagagacaaaaagaagataaaggcttttgtgtagggtgtgtctcactatgagagccaggttgaaggaggtacacagaatctgaatgtggyaaaaaaaaacagaattatccgtatcatcatgtatttggcaggacagttccctgaggaaagctgtgcaagcttattccaaggggtggcattaggccttttcagccagtgcaaagcccatcatagcctcttttgttatcctaaaaaaaaaaaaaamaaawwatttttagtgcatgtttttctcttaacaaagtgaagaagtgggaaaggatgggttcctgccccaaggggaccagtcttggtgtctatagaaagagctgttccaccatctagagaatacagctttaarggcacttaacaggg

SEQ ID NO: 40778 - DNA, 600 bp, Chicken  19866894275829_2
gtgaatgtccgtgcttatcaacagcttgccctttcagtcttcacttggataagggctagagacaaaaagaagataaaggcttttgtgtagggtgtgtctcactatgagagccaggttgaaggaggtacacagaatctgaatgtggaaaaaaaaaacagaattatccgtatcatcatgtatttggcaggacagttccctgaggaaagctgtgcaagcttattccaaggggtggcattaggccttttcagccagtgcaaagcccatcatagcctcttttgttatcctaaaaaaaaaaaaaamaaawwatttttagtgcatgtttttctcttaacaaagtgaagaagtgggaaaggatgggttcctgccccaaggggaccagtcttggtgtctatagaaagagctgttccaccatctagagaatacagctttaarggcacttaacaggggtttcagttttgaatggtatgacagcagaaaaggggctacttggaagggttagagctaggcctttccaacccaatcgactttggagaaaccccagccttccagggaggatttacccaagcagacaccgagtctgttggtctttgcaaccaatgg

SEQ ID NO: 40779 - DNA, 600 bp, Chicken  19866894275829_3
atgtccgtgcttatcaacagcttgccctttcagtcttcacttggataagggctagagacaaaaagaagataaaggcttttgtgtagggtgtgtctcactatgagagccaggttgaaggaggtacacagaatctgaatgtggaaaaaaaaaacagaattatccgtatcatcatgtatttggcaggacagttccctgaggaaagctgtgcaagcttattccaaggggtggcattaggccttttcagccagtgcaaagcccatcatagcctcttttgttatcctaaaaaaaaaaaaaamaaawwatttttagtgcatgtttttctcttaacaaagtgaagaagtgggaaaggatgggttcctgccccaaggggaccagtcttggtgtctatagaaagagctgttccaccatctagagaatacagctttaarggcacttaacaggggtttcagttttgaatggtatgacagcagaaaaggggctacttggaagggttagagctaggcctttccaacccaatcgactttggagaaaccccagccttccagggaggatttacccaagcagacaccgagtctgttggtctttgcaaccaatggtttc

SEQ ID NO: 40780 - DNA, 600 bp, Chicken  19866894275829_4
tgtccgtgcttatcaacagcttgccctttcagtcttcacttggataagggctagagacaaaaagaagataaaggcttttgtgtagggtgtgtctcactatgagagccaggttgaaggaggtacacagaatctgaatgtggaaaaaaaaaacagaattatccgtatcatcatgtatttggcaggacagttccctgaggaaagctgtgcaagcttattccaaggggtggcattaggccttttcagccagtgcaaagcccatcatagcctcttttgttatcctaaaaaaaaaaaaaamaaawwatttttagtgcatgtttttctcttaacaaagtgaagaagtgggaaaggatgggttcctgccccaaggggaccagtcttggtgtctatagaaagagctgttccaccatctagagaatacagctttaarggcacttaacaggggtttcagttttgaatggtatgacagcagaaaaggggctacttggaagggttagagctaggcctttccaacccaatcgactttggagaaaccccagccttccagggaggatttacccaagcagacaccgagtctgttggtctttgcaaccaatggtttcc

SEQ ID NO: 40781 - DNA, 505 bp, Chicken  19866894275829_5
aatctgaatgtggaaaaaaaaaacagaattatccgtatcatcatgtatttggcaggacagttccctgaggaaagctgtgcaagcttattccaaggggtggcattaggccttttcagccagtgcaaagcccatcatagcctcttttgttatcctaaaaaaaaaaaaaamaaawwatttttagtgcatgtttttctcttaacaaagtgaagaagtgggaaaggatgggttcctgccccaaggggaccagtcttggtgtctatagaaagagctgttccaccatctagagaatacagctttaarggcacttaacaggggtttcagttttgaatggtatgacagcagaaaaggggctacttggaagggttagagctaggcctttccaacccaatcgactttggagaaaccccagccttccagggaggatttacccaagcagacaccgagtctgttggtctttgcaaccaatggtttcctgatggggatgtcaatctcttctcaggtgttg

SEQ ID NO: 40782 - DNA, 581 bp, Chicken  19866894275833_1
atctggggtcccaccttcggcttggaggaacttggaggaggtccttctgtggccccggccccggatcagccaggcatggggatctgggcactgctgtcaaacctgcttcagagctggggaagtgtaacaaacacaaagcagggtcaggacttctaattagtccttatttctagcctgctaaaatacccatctgtcactccacttcaataatgggatttgagaagattaactggatactgcttaggctcctaaacatgacagctaaataagcgtgctgctattcagcctcaagccttgctygcagcaattatagcttgagcgggttcacatctgattagtgcttgcatgggagttgcccaagaagggtctgctgcaggcagggagcggtgattcagaagatggcaagcttagccttactcagcatcttctatggaaaagctgccatttgggcacagagtaaaacaagggcagcagtcctttgctttttaaaaacttcaagttcatcttttgtttctaggggagagggactttttcacacacgtacatactgtactgcctccttcctttcccaaaagcaattt

SEQ ID NO: 40783 - DNA, 535 bp, Chicken  19866894275834_1
ttcttactcaattcccattgacagtttgattgcattgtcatttctggtgctcagcaagaaggcatggcagacaaaatgaggtataagcaatatatgccaaagagtctgcatttttcttatacagttgagatatggcaggaaaaagaggatgcttttctttcttaagaggatgtggaaaagcgtattctagtgttaaaagaactatgcaatcaacaaaaactcctgaaatgagatcttccatttatgttcacttaaatgccattcagccagatggactctgtctccatgcaatcctttagraagatgtgcaaaaggtctgtgcagctctggcagcacagctatgcagggggagctcccagtgagcgagcgccatttcccctcacacagcaccaattctgggggggctgcaacaggcagagccatgttgaattgcagtcatggcagagtgtggaagtactcagggctgtttgtaagatatcaaccttccatagttatggtttctctaaaagatgttaacgttagtgatggatatttg

SEQ ID NO: 40784 - DNA, 600 bp, Chicken  19866894275836_1
ccatagttatggtttctctaaaagatgtcaacgttagtgatggatatttgactgccatagttttgtccatttgcaagcacaggaactgaaaagaaacatctactccatgattaggaaaatagggtcccatccctaattgctgtgcaaataaaactaattgtagtacaaaaaaggcagtgcccaaaagaaaacatacaatttcctgtatgatttcttctccatgtgaagaaattaggactgaaacttaatgcggttattgctgaaactgctttgatgattggaacttccgcccatggcaaygcaagcaggtcagaggctgacttaaaataaacattcctgagctgaagaaaaggaagactaattatcttctgcttgcagtgcttgtgtaatcctgtgaggcatggggacagaaatctggagaaccaaaaatatagaaatatttctggattttattaatggaagcattraaatttacattttctgccctttttatttggtgtgatgactgcatgcaatgcatgaaggaagatcagmataaatagctagacaaagatatctcagttcactgtagaagagacactacaggcaaatagtatgaca

SEQ ID NO: 40785 - DNA, 600 bp, Chicken  19866894275836_2
aaaaaggcagtgcccaaaagaaaacatacaatttcctgtatgatttcttctccatgtgaagaaattaggactgaaacttaatgcggttattgctgaaactgctttgatgattggaacttccgcccatggcaaygcaagcaggtcagaggctgacttaaaataaacattcctgagctgaagaaaaggaagactaattatcttctgcttgcagtgcttgtgtaatcctgtgaggcatggggacagaaatctggagaaccaaaaatatagaaatatttctggattttattaatggaagcattraaatttacattttctgccctttttatttggtgtgatgactgcatgcaatgcatgaaggaagatcagmataaatagctagacaaagatatctcagttcactgtagaagagacactacaggcaaatagtatgacactggtgatgctgcatttgaattcccaagactaatcttacattacttcatgctgaagaaataatacattattatagatgtgttttctttatcctcctaaacttatttcttacgtagttggctcataagtgcgtggaaggaatgctttacccatattaaaaatattacc

SEQ ID NO: 40786 - DNA, 600 bp, Chicken  19866894275836_3
ggactgaaacttaatgcggttattgctgaaactgctttgatgattggaacttccgcccatggcaaygcaagcaggtcagaggctgacttaaaataaacattcctgagctgaagaaaaggaagactaattatcttctgcttgcagtgcttgtgtaatcctgtgaggcatggggacagaaatctggagaaccaaaaatatagaaatatttctggattttattaatggaagcattraaatttacattttctgccctttttatttggtgtgatgactgcatgcaatgcatgaaggaagatcagmataaatagctagacaaagatatctcagttcactgtagaagagacactacaggcaaatagtatgacactggtgatgctgcatttgaattcccaagactaatcttacattacttcatgctgaagaaataatacattattatagatgtgttttctttatcctcctaaacttatttcttacgtagttggctcataagtgcgtggaaggaatgctttacccatattaaaaatattaccttacttattaaaacttgttagttttcataatttcccttttcaattatcttttattttttatttctta

SEQ ID NO: 40787 - DNA, 600 bp, Chicken  19866894275842_1
atgtccgtcggacaagagaaggaacagaactcccagctcctgggtgtgttaactacctcaaggttacctgggggggagcactcattgccttcctgtgcctgatagagagggaggaagtgctgccaacaatccatgtgcacagcctggcctggggtgagctggcagtcagggcaacggcagaacacagatgcgcagaaacacacagcaggtcaattttaaacatggactgaagaagaccaaaaatggaacatgggttagcagaaatggtgccctatggataaccacaggaacagtgtttckccagtcaggatgtgcacaacacaccagcttttaggactatggctaaaatgcctcacaggtagaagcttgataaaagcagcatagccaatgtttcctccccccctctctttgtggttaaatatatttgtgactgaacaagatcccccactaaggttaaactaaatctaatattgctgcatcttccccagactaaaaatgctacaagcaaatgtcagaaagatgaggagaaacagagaaatctccaaaatgagatctcatgtatggctattatttcatagagagcagtaagcatgctgccac

SEQ ID NO: 40788 - DNA, 600 bp, Chicken  19866894275842_2
attctctctttcattcagaagactaaatattgtcaattgctggaatgttttcaaaattgaaatacagaaaaaaagtggcaaaagcttttgatatgaaattctgaacagttcagctgtgctaaaggttccgtgctgcagagcagacatggaacaagcacagttggaaagaactcaagtccacagataaggatgctgtcaaacactaggaggaggcaaaacagcagcatacaagaacgttagagaggaaaaataagaaagttctctgtcctattcctttcctagcaatttttaaacccatcyaagtcactgtacaaatccctggtatgcatgtagacatgaatggaaacaggtgagaaccaaaaaggtgcagaagaattgyratgtgatctatttcatgaagtatcttacacagaaggagataytaaacagatagaaatctagacctttgacagacctaaggcatgacgtatcagaaacctatagarattaaaaaagaaataaacagattatttgtttttaccccttcactrtacaagttcttgtgtactgcaacacagctgggttcaactacaaggatggttttctcctatacaccccata

SEQ ID NO: 40789 - DNA, 600 bp, Chicken  19866894275842_3
aaaagcttttgatatgaaattctgaacagttcagctgtgctaaaggttccgtgctgcagagcagacatggaacaagcacagttggaaagaactcaagtccacagataaggatgctgtcaaacactaggaggaggcaaaacagcagcatacaagaacgttagagaggaaaaataagaaagttctctgtcctattcctttcctagcaatttttaaacccatcyaagtcactgtacaaatccctggtatgcatgtagacatgaatggaaacaggtgagaaccaaaaaggtgcagaagaattgyratgtgatctatttcatgaagtatcttacacagaaggagataytaaacagatagaaatctagacctttgacagacctaaggcatgacgtatcagaaacctatagarattaaaaaagaaataaacagattatttgtttttaccccttcactrtacaagttcttgtgtactgcaacacagctgggttcaactacaaggatggttttctcctatacaccccataatgagactaactcagttccaggggatgctggccagaagtataaatggactcaaagaccaaccgagataattttacagag

SEQ ID NO: 40790 - DNA, 600 bp, Chicken  19866894275842_4
aaagcttttgatatgaaattctgaacagttcagctgtgctaaaggttccgtgctgcagagcagacatggaacaagcacagttggaaagaactcaagtccacagataaggatgctgtcaaacactaggaggaggcaaaacagcagcatacaagaacgttagagaggaaaaataagaaagttctctgtcctattcctttcctagcaatttttaaacccatcyaagtcactgtacaaatccctggtatgcatgtagacatgaatggaaacaggtgagaaccaaaaaggtgcagaagaattgyratgtgatctatttcatgaagtatcttacacagaaggagataytaaacagatagaaatctagacctttgacagacctaaggcatgacgtatcagaaacctatagarattaaaaaagaaataaacagattatttgtttttaccccttcactrtacaagttcttgtgtactgcaacacagctgggttcaactacaaggatggttttctcctatacaccccataatgagactaactcagttccaggggatgctggccagaagtataaatggactcaaagaccaaccgagataattttacagagg

SEQ ID NO: 40791 - DNA, 600 bp, Chicken  19866894275842_5
aggttccgtgctgcagagcagacatggaacaagcacagttggaaagaactcaagtccacagataaggatgctgtcaaacactaggaggaggcaaaacagcagcatacaagaacgttagagaggaaaaataagaaagttctctgtcctattcctttcctagcaatttttaaacccatcyaagtcactgtacaaatccctggtatgcatgtagacatgaatggaaacaggtgagaaccaaaaaggtgcagaagaattgyratgtgatctatttcatgaagtatcttacacagaaggagataytaaacagatagaaatctagacctttgacagacctaaggcatgacgtatcagaaacctatagarattaaaaaagaaataaacagattatttgtttttaccccttcactrtacaagttcttgtgtactgcaacacagctgggttcaactacaaggatggttttctcctatacaccccataatgagactaactcagttccaggggatgctggccagaagtataaatggactcaaagaccaaccgagataattttacagaggaaargccccaagaggactatttgattacattccagatgcaac

SEQ ID NO: 40792 - DNA, 600 bp, Chicken  19866894275842_6
aaggatgctgtcaaacactaggaggaggcaaaacagcagcatacaagaacgttagagaggaaaaataagaaagttctctgtcctattcctttcctagcaatttttaaacccatcyaagtcactgtacaaatccctggtatgcatgtagacatgaatggaaacaggtgagaaccaaaaaggtgcagaagaattgyratgtgatctatttcatgaagtatcttacacagaaggagataytaaacagatagaaatctagacctttgacagacctaaggcatgacgtatcagaaacctatagarattaaaaaagaaataaacagattatttgtttttaccccttcactrtacaagttcttgtgtactgcaacacagctgggttcaactacaaggatggttttctcctatacaccccataatgagactaactcagttccaggggatgctggccagaagtataaatggactcaaagaccaaccgagataattttacagaggaaargccccaagaggactatttgattacattccagatgcaactcctggctcaagaagtttccaaaaccaaaggctggtagggaagcccacagcaccacattgccc

SEQ ID NO: 40793 - DNA, 600 bp, Chicken  19866894275842_7
agaacgttagagaggaaaaataagaaagttctctgtcctattcctttcctagcaatttttaaacccatcyaagtcactgtacaaatccctggtatgcatgtagacatgaatggaaacaggtgagaaccaaaaaggtgcagaagaattgyratgtgatctatttcatgaagtatcttacacagaaggagataytaaacagatagaaatctagacctttgacagacctaaggcatgacgtatcagaaacctatagarattaaaaaagaaataaacagattatttgtttttaccccttcactrtacaagttcttgtgtactgcaacacagctgggttcaactacaaggatggttttctcctatacaccccataatgagactaactcagttccaggggatgctggccagaagtataaatggactcaaagaccaaccgagataattttacagaggaaargccccaagaggactatttgattacattccagatgcaactcctggctcaagaagtttccaaaaccaaaggctggtagggaagcccacagcaccacattgccctgtccgtgtacccaattgtttgtgtctgagacagaactccaaagc

SEQ ID NO: 40794 - DNA, 447 bp, Chicken  19866894275842_8
gatctatttcatgaagtatcttacacagaaggagataytaaacagatagaaatctagacctttgacagacctaaggcatgacgtatcagaaacctatagarattaaaaaagaaataaacagattatttgtttttaccccttcactrtacaagttcttgtgtactgcaacacagctgggttcaactacaaggatggttttctcctatacaccccataatgagactaactcagttccaggggatgctggccagaagtataaatggactcaaagaccaaccgagataattttacagaggaaargccccaagaggactatttgattacattccagatgcaactcctggctcaagaagtttccaaaaccaaaggctggtagggaagcccacagcaccacattgccctgtccgtgtacccaattgtttgtgtctgagacagaactccaaagca

SEQ ID NO: 40795 - DNA, 600 bp, Chicken  19866894275843_1
atgataatcgactttcaacccccctgctatcttcaggatcaccaaccactagaccaggctgcccagagccacatccagcctggccttgaaaaagccttgcggtaacaagactagcatcctttgcttaaggaaacctgtgacaaccgatttatctctccatttggttttctttggccaaaactgcattatcctggtaataatccttcctaataattacctagctactgaagaaacaaaccagctagttgccgtcttaatttctctgatatatcataatttattaacataataaattatgtwaataaatagatacgtaaatagataagtaaacaagtaaatagataagtaaataggtaataaatataaataataaatatatataatataaataataaatacatagtaaatagataataaattagtttgctatcaaaattacttggtcatactgttgagttaaataataaggggaaagacctgctgcagagtgatctggccataagtgacagtagcttttgaagacatgatctttatctcctgtcaacaattaaaggtgacatttttatttaatcttcttttgttgctgttgctgtttyttca

SEQ ID NO: 40796 - DNA, 531 bp, Chicken  19866894275843_2
tgtwaataaatagatacgtaaatagataagtaaacaagtaaatagataagtaaataggtaataaatataaataataaatatatataatataaataataaatacatagtaaatagataataaattagtttgctatcaaaattacttggtcatactgttgagttaaataataaggggaaagacctgctgcagagtgatctggccataagtgacagtagcttttgaagacatgatctttatctcctgtcaacaattaaaggtgacatttttatttaatcttcttttgttgctgttgctgtttyttcatagatgcttcgacatatattaacaaagttgcccatggaagtgaattttcatatatgcagtgtgattgctgaatagctatgtaggtatatttaattagtgctggatttacagtaatttcttgcctgctatttaaaaaaaaagtagacttatagcatcaaaatcagcctaagcaacaaaccctattattatcctgcatgatcacatctgtataaatgtagattacacac

SEQ ID NO: 40797 - DNA, 600 bp, Chicken  19866894275847_1
acagttaatgacagactgaataatcctggtgaattcacagcctactgaattgctgctgccctttatctatggcttataaagggaacatgtggctctgatttacctttccccacacaaattactgcatgggggagtagcaagggaaatagaaggctagacataaaaattaccaagcagtctttgctatgtctaaagaagccctctaagggaaaaattataagaaaggcaaaaattgagcaagaaggttgcagtgttatgttctgtatatgcaaaagcaagaaaacttcagggcaggccctkggctgytgtaagcagcagtagcttcattgcataaatggagccgggttgatttatactataggtgaactgttacggtgttcagcaccattataatttctaatgagtggttttctaatggttttcactgttattaattcagctggtattgctaatattgcttttggactggccagaataagctattttagtcattaagaataagattccatgttattatctgaagttgtcttttgagcctctgaaaggtgcttttgaggactacccttgcacaatgcctccaggcagatctgaatgtctgct

SEQ ID NO: 40798 - DNA, 600 bp, Chicken  19866894275847_2
aatgacagactgaataatcctggtgaattcacagcctactgaattgctgctgccctttatctatggcttataaagggaacatgtggctctgatttacctttccccacacaaattactgcatgggggagtagcaagggaaatagaaggctagacataaaaattaccaagcagtctttgctatgtctaaagaagccctctaagggaaaaattataagaaaggcaaaaattgagcaagaaggttgcagtgttatgttctgtatatgcaaaagcaagaaaacttcagggcaggccctkggctgytgtaagcagcagtagcttcattgcataaatggagccgggttgatttatactataggtgaactgttacggtgttcagcaccattataatttctaatgagtggttttctaatggttttcactgttattaattcagctggtattgctaatattgcttttggactggccagaataagctattttagtcattaagaataagattccatgttattatctgaagttgtcttttgagcctctgaaaggtgcttttgaggactacccttgcacaatgcctccaggcagatctgaatgtctgcttgaaat

SEQ ID NO: 40799 - DNA, 590 bp, Chicken  19866894275847_3
caccattataatttctaatgagtggttttctaatggttttcactgttattaattcagctggtattgctaatattgcttttggactggccagaataagctattttagtcattaagaataagattccatgttattatctgaagttgtcttttgagcctctgaaaggtgcttttgaggactacccttgcacaatgcctccaggcagatctgaatgtctgcttgaaatccccgtctagactgggaaaatgagcagcccttacaatgtgctaatgggtacacataggttggcacgttttaaaacwcaggagaaaaggaagatgcttgctcaggatgtagttccttgtacagctgagccatgttaatgccttaccgctgacaagggggagaaatcctatccctctcccttcacccctgctctgcagtgctcagctgcctggcctactcactgcactaaagcccggtgttttctggccactttctatgaagccagtagaaaactgatgataaaaaagaagtggatacaactgtggtggtggagtgagctggctctgctgatgacagggggtgggacgtgcttgggccaagtacatgg

SEQ ID NO: 40800 - DNA, 599 bp, Chicken  19866894275851_1
  misc_feature (1)..(105): n is any nucleotide
nnnnnnnnnnnnnnnnnnnnnnnnnnnnnnnnnnnnnnnnnnnnnnnnnnnnnnnnnnnnnnnnnnnnnnnnnnnnnnnnnnnnnnnnnnnnnnnnnnnnnnnnnactctgcaaagtaaggacacagggcaagcccaggacataagttgttcactgcgcagtcatgcctggagcttggaatgactttcctttgctaggagtgctttcattcatagtgcagtcccaagcaagcttgagttacctatggaattttttgtccagtcagcacagggataataattagtcctagtctaggagatrgagaagttctacccataatccctcctaggtgtcactttcatggtcattacagtaacgttttcttaattagagcacaacatgatgtgacaattcccaaaaagaaagcagtactgtaggcacatggctcctgctacttgctgagtatctccaaagaaacattcagtgccctttactcctcctgaaattgagtacactgagtggggcaggatcaggctgcccacatagtcccctggatatataccaccactgggatggcaggattgctcatttgtgaatgaacttgtagttccaatgaattc

SEQ ID NO: 40801 - DNA, 599 bp, Chicken  19866894275856_1
  misc_feature (1)..(29): n is any nucleotide
nnnnnnnnnnnnnnnnnnnnnnnnnnnnngaaattgaaggggcttttgtagcatttccccttcctccctccctcccggctcctttttcttttgctgtgcgcaaattgttcaattgctctggcgggggggttcctgacaagctcattactggaaggggccagacccctcctctccctctccccgaagtctttgaagaagttaaaacgcgctgatcgccgctctcggcgagctttgttcagtctttaatagccgaacccgctttgagcgcacgggagcggagggaagaaagcggtgcgcgcygcggggctgggggctgctctgtgtctggaagggagggatggaggagatctctgaatataaagtaacgatttaaatatatatatccgttgttttcttgttgccgttgctttgctaagcgagcgcggaagatgagccgacagggagaggatgggataggaaacggcagccggagcccgtgcgcactgaacgccgcgtctcgccctgcagcccccgctgggcttctccaggccggtggtcccccgcgctgctgggagcgggggggggaatctctgcggggaagcgctgtttccccggaggga

SEQ ID NO: 40802 - DNA, 600 bp, Chicken  19866894275877_1
aaacacttggattcctaactcataaatactgattgagtgacgtgttatttaccatacgtgactcaattatttacttcagctgaccagtaaagagaagcatacttaacaacttacacaaagtccagcccacagtgagatcatcagttgtaaagaatcatgtgtaaacctcattttttgaacctttctcaacaactactcaaccacataagcaagtctagagtatcaaagtagttcttctttgttttaatgttcatattaattttacgtaccatttttttatcctcaatgccaacactggarctcaataactgcatgttaaaaaaggccaagataccaagcaatttaggctgcagataatcagcctgtagagagaggggaaaaaaaagtgaaaaagtgaaaaccaagtaaaattactgttaacacattgctaaattgctaagtttaagtaaagacatggcaagtatgaaatggtaattctgacaaatggaaagattcccaaacatttatagtgttccttaagaagtagcagcgttcatgaaagacatccctgttacactgtggggttttttttaattttttttttttttacttaatgcattc

SEQ ID NO: 40803 - DNA, 600 bp, Chicken  19866894275879_1
tacaaacacaaacagaaaaaaccaccctactttgtttccactctgccaaagacctaaagaaaaaccagagaaaggatgaatcaggctcctcaagacaaaggtctctgatttgcaaaggccagactttaacaagccgcagatctctgctcttcaccgatgctgggtaataagagtctctattttcttaaaagaattggatcagcagcttctgaactcctcactcagctcagcagaggcaaaatctttcttgctatgttccttagagaggcatggggaaggtacctattgtatatttacgartaagtttagacaatgtacagtacagggcaaaatcctttgttcaaaagcagccttcattttcttttgaatgttgtccctcttaagaaataccaggagtcattttcaattagaatggctcagagaagttggcagggactggagtctatttctcaagtagcttttcttcctttgtgatctctcaagattggttctttccttttgtcctaacagtagaaatgaatggagacagatttctagtcagtacataaatatcagatcagcagttctccctatgcactacagtgcagtgtgcatgctgta

SEQ ID NO: 40804 - DNA, 599 bp, Chicken  19866894275894_1
  misc_feature (1)..(79): n is any nucleotide
nnnnnnnnnnnnnnnnnnnnnnnnnnnnnnnnnnnnnnnnnnnnnnnnnnnnnnnnnnnnnnnnnnnnnnnnnnnnnnnaatcaatcccagataaacacagtccagttaattataattttaacagcttcagatgccattttaggagcgggggagaggagagggaaaaaaactgggtctctgcttacaatgataaacacaggaccataaatgtcagacaaaggccacgagcatcacagaggacagattgacggagacccaaccgaagtgggaggaaggctttcctttcaggaaacatgggrggaagtgtaaaatgcaatgctaacatacaaaatacctttgccctcataaaaaggcctaagctccaccactgtattattaggctctgatmtgtatcctgtatttctaaccctgttaccttggaagaagcgtatttccatgcaagaagagtcagatgagcacctaattctatgcaaatgctgcaaaatttaaagagatgtcctctgaaggtgccccagtctcatttatcccttttcaagctccccattgcactccttcaccacgtccatctcaatgttatccccaaggcattgtattgcct

SEQ ID NO: 40805 - DNA, 600 bp, Chicken  19866894275894_2
agataaacacagtccagttaattataattttaacagcttcagatgccattttaggagcgggggagaggagagggaaaaaaactgggtctctgcttacaatgataaacacaggaccataaatgtcagacaaaggccacgagcatcacagaggacagattgacggagacccaaccgaagtgggaggaaggctttcctttcaggaaacatgggrggaagtgtaaaatgcaatgctaacatacaaaatacctttgccctcataaaaaggcctaagctccaccactgtattattaggctctgatmtgtatcctgtatttctaaccctgttaccttggaagaagcgtatttccatgcaagaagagtcagatgagcacctaattctatgcaaatgctgcaaaatttaaagagatgtcctctgaaggtgccccagtctcatttatcccttttcaagctccccattgcactccttcaccacgtccatctcaatgttatccccaaggcattgtattgcctatgcattccaggaaaaaataaacacagcgcccttttagcacctatttctcccccccaaaaaatgtgctaaggtaaccttccgctgatatt

SEQ ID NO: 40806 - DNA, 599 bp, Chicken  19866894275896_1
  misc_feature (1)..(42): n is any nucleotide
nnnnnnnnnnnnnnnnnnnnnnnnnnnnnnnnnnnnnnnnnntaacaccggtgagtctgttaggtgaaaggtagtattcttcatggagacaaatataattacaaacactctgtacaactaaatacataaactttgtgaaaactttcactcagaattagagatgtaaatggttttttagttctttccattgacagaatgtgactaaacaagtttctttgcataagtcagatatattctgacagagaaacttcagaggagtaatgaattgttttatatgatacgttaaatacaagtaatggktctgataaactggtaaatggtatgtcatgaaacaaaaaagaagccaatcatgccagttccatcgagcaaagtactgcatatgatcttgttaaaatatcttgtttctttaaactcccttcctattttctatattatttgttttgtagctatcatgcacagaagtgaaaaagtaattcagaccaagtctacaataatcataagaataatcttaacttagaagcctcagctgtgtctatgcctgaagttaggtgagataaatataataatgttttgacataaattgaaaattgcatgagaaa

SEQ ID NO: 40807 - DNA, 600 bp, Chicken  19866894275908_1
tcagctccaagctcctgtgtctattttgcagcacattcagacagaactagtctagcaataacacgctacaaatactcccagaggttcacgagcgtggtgcttggtctgtcttggttttattttttccttttttgaacatgcaagtttaaggttgcttcagttgtcctctgcaaacccctttattttcaaaggttgtatagctggatttacagtgcctggttattgcaaggagaaggagagggaggagggtataatcctacaagcctaggaaaattgcaagaataaatcatgatggagacyttttcttttattacatttacttttggaaaaacagtataaataaaagactgcaaacaagaacgaaccagaaatcagaaaacacgaataatcctttcctctattcctctcttagtccttttcctgtctttattctagagacacagcagtccaaaaatctattaatattcttcattttccctagctaactgtcattattacagaaagtgagaaatggctgtcaagctcaaaagcaaaaccaagtatgttctaaatcccctacagccacacttgttccatataaggacattgctgctattatag

SEQ ID NO: 40808 - DNA, 600 bp, Chicken  19866894275908_2
gagacacagcagtccaaaaatctattaatattcttcattttccctagctaactgtcattattacagaaagtgagaaatggctgtcaagctcaaaagcaaaaccaagtatgttctaaatcccctacagccacacttgttccatataaggacattgctgctattatagcagtgagcagagtaaataattttaaaaaataatttaaaatgttaataattaacaatcccaaagctccatatttttttcacacagcttattctctaagcggaagcagggctctttaattccacatagcacttacygatgcccaaatcaccagagaccagcaaatatagatcacatagcatgtattgtattagtggaaatatacatttaaacaagataaacatctatacccccacagaaggatcagcatggattcatcaaaatggaaggttgcactctgaaagatgtctatgtgcgcccttcccaagcactcagaggasaaagcacagcccatcaaggctcaagaacttcagccttcctgggtccagagatcaactgcggaagaagaaatatgaacgtcttctcctgagaggcaggcttaaataccgtctggaatt

SEQ ID NO: 40809 - DNA, 600 bp, Chicken  19866894275908_3
aattttaaaaaataatttaaaatgttaataattaacaatcccaaagctccatatttttttcacacagcttattctctaagcggaagcagggctctttaattccacatagcacttacygatgcccaaatcaccagagaccagcaaatatagatcacatagcatgtattgtattagtggaaatatacatttaaacaagataaacatctatacccccacagaaggatcagcatggattcatcaaaatggaaggttgcactctgaaagatgtctatgtgcgcccttcccaagcactcagaggasaaagcacagcccatcaaggctcaagaacttcagccttcctgggtccagagatcaactgcggaagaagaaatatgaacgtcttctcctgagaggcaggcttaaataccgtctggaattagttcattagttcatattccaacaatcgggtcagactgtaatgacaaggcccagtaacttccagtcataatcacaaattcagtgccacgcagacatggctagaaataaaacaggctgttttgctactcagctttctgggaaatgtacttctaatctgcccagcagaaagtcatttcaagccac

SEQ ID NO: 40810 - DNA, 600 bp, Chicken  19866894275909_1
tgcccacttcaacagtctgaagtacacttcagattagttctcagctcgacacaaaacctttgcaaacttaagtggacaatgcgagactgcagcaatcaagatttcataggaaaatcaataagattgactacttaaaagtagaacggatagctcataaaatgaaaaccacatctgtcatttttttttgtaattaagaaaatattttatctgttttgttttgcatgtatgctaattaaaaatgaatatcctgattgatagcttatattatgaatccatctatttgactacgctgtcaagccragcaatcagaattttatactgctatgtgaattcagtttacggaaggaatcatactgcctttaaacatcttcacacatatgcaagttccctcatggtttatatcatcactcttcccaattcaatcacaatagatgcaatttatttgaagatgaggagaaagtaccacgctgacttttaaagacaaggtagaagcccaaactgctaaagcaacataagcacatctccaaatgctaaaaatgcttcagtacttttactatacctttaacatctggatcatctatatggggttccaaattttct

SEQ ID NO: 40811 - DNA, 600 bp, Chicken  19866894275926_1
atatcaaacagcacaactgagagctcaaagggaacgcttccaaaatatacgtctgctttggagagggggtctttggattttgatttgcctcatgtctacactcaaagtcctccacgtgtctgtatggaaaacaaaacggctctgaacgcaccgcgggtcgcagagtggaagaaagtggcctcttcagtaaaaccaggcatggaaatgccacgcattggagcagatggcccttcgctgcccatagatttgattgtgtttctccttctctgataaccacaacatcagctttgctgtgaactyaggcctgcgtgtggaaatcccaccacatcaccacccasactgaaatggcttcagttgttgctgctgtttgatggygtgcacaacaccgactcgcgttacggcttggttttaagtgagctctcaattcatcactcattcagttctgccwaacaaatacagatacgcatcctaaaaagaaagcaatcaaagcatctttctgcctaagtctcttctttgttttgaagctgactgcaaaacagtcagagaaaacacggagcaaagcaactccgtgacagatgctgctccagatctctacacaca

SEQ ID NO: 40812 - DNA, 600 bp, Chicken  19866894275926_2
tccaaaatatacgtctgctttggagagggggtctttggattttgatttgcctcatgtctacactcaaagtcctccacgtgtctgtatggaaaacaaaacggctctgaacgcaccgcgggtcgcagagtggaagaaagtggcctcttcagtaaaaccaggcatggaaatgccacgcattggagcagatggcccttcgctgcccatagatttgattgtgtttctccttctctgataaccacaacatcagctttgctgtgaactyaggcctgcgtgtggaaatcccaccacatcaccacccasactgaaatggcttcagttgttgctgctgtttgatggygtgcacaacaccgactcgcgttacggcttggttttaagtgagctctcaattcatcactcattcagttctgccwaacaaatacagatacgcatcctaaaaagaaagcaatcaaagcatctttctgcctaagtctcttctttgttttgaagctgactgcaaaacagtcagagaaaacacggagcaaagcaactccgtgacagatgctgctccagatctctacacacacctccatacatccatttcctcatgagccgcattgaaat

SEQ ID NO: 40813 - DNA, 600 bp, Chicken  19866894275926_3
gattttgatttgcctcatgtctacactcaaagtcctccacgtgtctgtatggaaaacaaaacggctctgaacgcaccgcgggtcgcagagtggaagaaagtggcctcttcagtaaaaccaggcatggaaatgccacgcattggagcagatggcccttcgctgcccatagatttgattgtgtttctccttctctgataaccacaacatcagctttgctgtgaactyaggcctgcgtgtggaaatcccaccacatcaccacccasactgaaatggcttcagttgttgctgctgtttgatggygtgcacaacaccgactcgcgttacggcttggttttaagtgagctctcaattcatcactcattcagttctgccwaacaaatacagatacgcatcctaaaaagaaagcaatcaaagcatctttctgcctaagtctcttctttgttttgaagctgactgcaaaacagtcagagaaaacacggagcaaagcaactccgtgacagatgctgctccagatctctacacacacctccatacatccatttcctcatgagccgcattgaaatatgaaaggctgaggtgaacaggactccctttggggga

SEQ ID NO: 40814 - DNA, 600 bp, Chicken  19866894275926_4
caccgcgggtcgcagagtggaagaaagtggcctcttcagtaaaaccaggcatggaaatgccacgcattggagcagatggcccttcgctgcccatagatttgattgtgtttctccttctctgataaccacaacatcagctttgctgtgaactyaggcctgcgtgtggaaatcccaccacatcaccacccasactgaaatggcttcagttgttgctgctgtttgatggygtgcacaacaccgactcgcgttacggcttggttttaagtgagctctcaattcatcactcattcagttctgccwaacaaatacagatacgcatcctaaaaagaaagcaatcaaagcatctttctgcctaagtctcttctttgttttgaagctgactgcaaaacagtcagagaaaacacggagcaaagcaactccgtgacagatgctgctccagatctctacacacacctccatacatccatttcctcatgagccgcattgaaatatgaaaggctgaggtgaacaggactccctttgggggagctcagtgcctttttgttttgatccacaactccaggcatctccgacacgcattagggaaagaagaaaggaatc

SEQ ID NO: 40815 - DNA, 600 bp, Chicken  19866894275926_5
acacgcattagggaaagaagaaaggaatccagccagctccagcagttcctttcctggcaagcccttaaaaaccagcctggtttgcagagacattcagcaccttcagctgtccttgagacgaatggttaacgtgagtgtgaaacaacattggaaatcagaccgctcctttgccagcatacatctaaatataagctaagtgcctatctccaggctgccaggctggattatttttggctggtacgcacaacatacagtccgatgaatcacagcatgtaacactatgggaccccagtattacaktggcacggctttacagaaagggaagaaaaacaccaacacagagtggtgagtgaggggggcacgctggggaaggggattactgggggtagcatcacctgtagggctgctctccggtgtgcgtccgcagatgcctcgtcaggttggctgagcgagggaagatcttcccacagtacctgggatggcaagagcaaagtcagtgcatgaacagcacctcctctgaggggaggcccagcgctgcccactcgtgttgccaatcacctgagattttaatagacctctcctccgttccctgttggtcac

SEQ ID NO: 40816 - DNA, 600 bp, Chicken  19866894275930_1
tggggtttcaacagtactatatgtgtaacgttcttatcagtgtattacctaaatggaagtgggaagtggaaataagcagaggccacatttttccatttcacccacacgtgcatacatacacaaacactcaccacacgcccacatccatctgccttgcaccaaacagaaggtaaacactcctccaccttccagccattgcaacaagcgctggttagctaaggactgctgtaaagatgaactctggcacaagagcagagtattttgctcctgcgttggcacaaatacttcttcctcctctcyccctgcttaatactactagtattttaacttctggttggcagtagttttttctcctagaatcctgcttctgtctctactgaaaaataaactatattccatttgtgcctctatagcaagataagtggtactgaaataaaatacaatcatcctggcaatgttgtatgtcaacttgattaaaaacattttctggaactttttagggatatatacaataactatcagctgccaactatcagccctggttaaaggtacaggtaatgcctgcgataaaacagtctgcctttaaactgagggctgcga

SEQ ID NO: 40817 - DNA, 600 bp, Chicken  19866894275935_1
gcttctataaaaggcatgtaaattataaaaaaaaaacctgtttttatcaaaacattaacttattttatgttaatcaaagtgcgcataaggtgtttgcattgctattacagtaagtgccttgctttcaaaaaataagctataacgtgggcatagtacaacagtattatgcctcaaaatgacaatgccataatgcttaaactttgtgtattattccaagtgggcttaagcagcctagggctaaacacattactgctggaggccctggagaattgtgcataatagactcgaacgaattgacargtcttaataaaattgttacatcgttttttctctcttttttaatcaacagtgttataaaaattgtacagtatgttttgtcaaagtgacaatgagattgttatgcatgtttcttacctgtatatgcagtatattaaaataccaaaatcattcctttgaaaagtgcaatactctagaacacacaaatttaggaaataagttaattgttcagattattttgaacttacacatatgttcccagacatgttgcttgttaaagatttctagttgagaaggttctagtcagactagctgtaaagtcca

SEQ ID NO: 40818 - DNA, 600 bp, Chicken  19866894275943_1
tcttacagaatggaaaaggacttacttcttctaagaactgtaacgttaactggaattagttgttttgttgttgttgttctgaattagtagatttccatttgcatattagcagttatttagagggggcaggagttttttgttgttgttgttgtttgcttgtttgttttttttgagggtttttttacttgctattacaaaaatttgtattagttgggtacctattattctgcttggcttgcttcagttaccttctgagctgctgaatgccaacagccaaataggtttccacattccatatayatatgtatttttgaaaggatgtagttgtatgcacaatatttgatttcaaggcatgatcttacaacctgtgttgactgtttccagtctaggctgtattcatcaactgcggtacagaactgtgaatagctgatgactcatgtctcagttgatttaaaaaatcatcctaatgctgtacaaatttttctctctcctgaagtccaggcaccagtttgcctcttacttctacagcactgcttccagacaagatgctaagtttaaaagtctgttcctccatccattgcgaagatttctctgccagcc

SEQ ID NO: 40819 - DNA, 600 bp, Chicken  19866894275943_2
atcctaatgctgtacaaatttttctctctcctgaagtccaggcaccagtttgcctcttacttctacagcactgcttccagacaagatgctaagtttaaaagtctgttcctccatccattgcgaagatttctctgccagccacggggtcacttacactgagtgttttatccaagttgcagaaagctctcttcctctttgcccttttcttttattgtttcccacgatgatatattcacttcaacggcattcccatctggcttcagagtagaggaggaaaactgatcagctcccaggaaattyttctggtaacttctgggctcggtctgtgatattgagatattaatagatgctttttagaaacttcttgaacttctgctattcttgtatcttctttgctgatcattgctgaaaatttgtatggattgggcttgacaatgtttttttccttgatgtgattggtaggaaagaatctgccttgtataaatttctttgtaattttgcaatgaaactctcactcacaataggagttttgggatggaggatattttttcttctttcatgaaatttttgaagataaaaaatgaaaggtgtgcattgtca

SEQ ID NO: 40820 - DNA, 600 bp, Chicken  19866894275955_1
aacaccacagactcgttacaagaacctgccgaaacatttctggaggaatcctcatttctgttccaacccttctgagggaatcttgatgtgattgatttgtagggctgtgacaccaccaagcacactgccctgtggcacactgtccctccctgacacgcttcacaaacccatctgcctggagaagtgctgctccctgccctttacctccactgctctggccagaagagaagggctgcgtgacccccgcatggtgcacagctaactcagcatgaactgccatatagtatatggagaaaagcraggctgctcccagcctgcctcctgtccccagtgcttttaccttgggtggttcataaaagcttaatgtgcctaaaccaagcttctgtgcttgcagatcccacggctactaaaaagtgctacttcaaatggaggcattttcactgctagtttgtgctgcgttctgggagttactaaatgcaaatgaagacacagacagaaattactgttttgtttggactaaataaatttcataatctcttgcttttcttttaactgtgtgttcctgttcctgtgtgttcccaattaaagcctgttggatct

SEQ ID NO: 40821 - DNA, 600 bp, Chicken  19866894275960_1
caaggtactgtgtttattctctcgagcatcctgtggctccacttaggcagttcctgctcacatttctcttgaagaggaagaaaagagcagttgtttaactttattcaccttctcaatgaggctgatgatagtgataccatggactggtgcaaacaggggagcacagccatatgctgcaagtgtgagttgcctccagccttcactgctgctgctccaggactcgccagcagtgttaaaaggttgtcacctggaattattcttcctgtccttgaagttatgcccaggagcctttggacaacrtgatgtcatgatcaaagagaaaatatcacagaatcagaatcacagaatggttgggctggaggagaccttaaagsccactctgccccayctcttgccagacccacagtgcagatggaaggaaagacatcatgatgtgctccaaccacagtgggcccaccatcgccatgtctcaccatggtctttccagcagagctagacttgtgggtggggtttgcatccaagaccggcttaggcctgccaggcacgtgccataacccaacacatgtttatctaaaacgtattccaagttggaccagtctg

SEQ ID NO: 40822 - DNA, 600 bp, Chicken  19866894275960_2
aggaagaaaagagcagttgtttaactttattcaccttctcaatgaggctgatgatagtgataccatggactggtgcaaacaggggagcacagccatatgctgcaagtgtgagttgcctccagccttcactgctgctgctccaggactcgccagcagtgttaaaaggttgtcacctggaattattcttcctgtccttgaagttatgcccaggagcctttggacaacrtgatgtcatgatcaaagagaaaatatcacagaatcagaatcacagaatggttgggctggaggagaccttaaagsccactctgccccayctcttgccagacccacagtgcagatggaaggaaagacatcatgatgtgctccaaccacagtgggcccaccatcgccatgtctcaccatggtctttccagcagagctagacttgtgggtggggtttgcatccaagaccggcttaggcctgccaggcacgtgccataacccaacacatgtttatctaaaacgtattccaagttggaccagtctgctctagagagactgtgaccacagccaacatggaagcagcgaagaggccccgttgggaatttggctcaaacagag

SEQ ID NO: 40823 - DNA, 600 bp, Chicken  19866894275960_3
agttgtttaactttattcaccttctcaatgaggctgatgatagtgataccatggactggtgcaaacaggggagcacagccatatgctgcaagtgtgagttgcctccagccttcactgctgctgctccaggactcgccagcagtgttaaaaggttgtcacctggaattattcttcctgtccttgaagttatgcccaggagcctttggacaacrtgatgtcatgatcaaagagaaaatatcacagaatcagaatcacagaatggttgggctggaggagaccttaaagsccactctgccccayctcttgccagacccacagtgcagatggaaggaaagacatcatgatgtgctccaaccacagtgggcccaccatcgccatgtctcaccatggtctttccagcagagctagacttgtgggtggggtttgcatccaagaccggcttaggcctgccaggcacgtgccataacccaacacatgtttatctaaaacgtattccaagttggaccagtctgctctagagagactgtgaccacagccaacatggaagcagcgaagaggccccgttgggaatttggctcaaacagagtcaaagccgttggg

SEQ ID NO: 40824 - DNA, 599 bp, Chicken  19866894275963_1
  misc_feature (1)..(102): n is any nucleotide
nnnnnnnnnnnnnnnnnnnnnnnnnnnnnnnnnnnnnnnnnnnnnnnnnnnnnnnnnnnnnnnnnnnnnnnnnnnnnnnnnnnnnnnnnnnnnnnnnnnnnncacaaaactgagcagcaagttcagagtagagagaaaacagctaagtcttgaagaacacattacagtgcacagtggttttcgctttcaggcattttcctccctcttgcattagcatacattagatttgtgcacacttaatgtgtagcagcagtcaggttggagcagcagattctgcttggaaagtctgcattgtggagyataaagcaggaatctggatagcatgaacgtgagcataactgagcacaactcctttgaacagtaaaggtttattttatgtggcacccctgattacacagcagatcaatgggcaaaccagagcacagccctcagggcatattgcatgcaatcagaygcaggagtaattgaagaggcttaaaagtagcattacatcaacttaaggtatggctagagaagggcataaggaggctcagtgatttgctgaaagggaaaagagtcaagagcagagctggcrtttggcctgagcagtttatttcatc

SEQ ID NO: 40825 - DNA, 600 bp, Chicken  19866894275963_2
gaacacattacagtgcacagtggttttcgctttcaggcattttcctccctcttgcattagcatacattagatttgtgcacacttaatgtgtagcagcagtcaggttggagcagcagattctgcttggaaagtctgcattgtggagyataaagcaggaatctggatagcatgaacgtgagcataactgagcacaactcctttgaacagtaaaggtttattttatgtggcacccctgattacacagcagatcaatgggcaaaccagagcacagccctcagggcatattgcatgcaatcagaygcaggagtaattgaagaggcttaaaagtagcattacatcaacttaaggtatggctagagaagggcataaggaggctcagtgatttgctgaaagggaaaagagtcaagagcagagctggcrtttggcctgagcagtttatttcatcaccytggtaacccagcactgcaaaggctgctacyaacttaaactgtaaaacttctggtttcggtgtcatccttttcactgtccactaatggaaatactaacrctctgaactcaaagaacacctcgcactgagcatcactgctttgatacaagaca

SEQ ID NO: 40826 - DNA, 600 bp, Chicken  19866894275963_3
tgcttggaaagtctgcattgtggagyataaagcaggaatctggatagcatgaacgtgagcataactgagcacaactcctttgaacagtaaaggtttattttatgtggcacccctgattacacagcagatcaatgggcaaaccagagcacagccctcagggcatattgcatgcaatcagaygcaggagtaattgaagaggcttaaaagtagcattacatcaacttaaggtatggctagagaagggcataaggaggctcagtgatttgctgaaagggaaaagagtcaagagcagagctggcrtttggcctgagcagtttatttcatcaccytggtaacccagcactgcaaaggctgctacyaacttaaactgtaaaacttctggtttcggtgtcatccttttcactgtccactaatggaaatactaacrctctgaactcaaagaacacctcgcactgagcatcactgctttgatacaagacacccagtgccctggcttggacctcacagcagcacagggctgacagcagctgctgggcaagctgtccctgtgtgcagcgtgagaaccagagctgagagctgccagcccagcagggcactcac

SEQ ID NO: 40827 - DNA, 600 bp, Chicken  19866894275963_4
aagcaggaatctggatagcatgaacgtgagcataactgagcacaactcctttgaacagtaaaggtttattttatgtggcacccctgattacacagcagatcaatgggcaaaccagagcacagccctcagggcatattgcatgcaatcagaygcaggagtaattgaagaggcttaaaagtagcattacatcaacttaaggtatggctagagaagggcataaggaggctcagtgatttgctgaaagggaaaagagtcaagagcagagctggcrtttggcctgagcagtttatttcatcaccytggtaacccagcactgcaaaggctgctacyaacttaaactgtaaaacttctggtttcggtgtcatccttttcactgtccactaatggaaatactaacrctctgaactcaaagaacacctcgcactgagcatcactgctttgatacaagacacccagtgccctggcttggacctcacagcagcacagggctgacagcagctgctgggcaagctgtccctgtgtgcagcgtgagaaccagagctgagagctgccagcccagcagggcactcaccagccctacctgacatcttgcttcccatt

SEQ ID NO: 40828 - DNA, 600 bp, Chicken  19866894275963_5
cataactgagcacaactcctttgaacagtaaaggtttattttatgtggcacccctgattacacagcagatcaatgggcaaaccagagcacagccctcagggcatattgcatgcaatcagaygcaggagtaattgaagaggcttaaaagtagcattacatcaacttaaggtatggctagagaagggcataaggaggctcagtgatttgctgaaagggaaaagagtcaagagcagagctggcrtttggcctgagcagtttatttcatcaccytggtaacccagcactgcaaaggctgctacyaacttaaactgtaaaacttctggtttcggtgtcatccttttcactgtccactaatggaaatactaacrctctgaactcaaagaacacctcgcactgagcatcactgctttgatacaagacacccagtgccctggcttggacctcacagcagcacagggctgacagcagctgctgggcaagctgtccctgtgtgcagcgtgagaaccagagctgagagctgccagcccagcagggcactcaccagccctacctgacatcttgcttcccatttcagctgccaaaactgcatctacagttttg

SEQ ID NO: 40829 - DNA, 600 bp, Chicken  19866894275963_6
atcaatgggcaaaccagagcacagccctcagggcatattgcatgcaatcagaygcaggagtaattgaagaggcttaaaagtagcattacatcaacttaaggtatggctagagaagggcataaggaggctcagtgatttgctgaaagggaaaagagtcaagagcagagctggcrtttggcctgagcagtttatttcatcaccytggtaacccagcactgcaaaggctgctacyaacttaaactgtaaaacttctggtttcggtgtcatccttttcactgtccactaatggaaatactaacrctctgaactcaaagaacacctcgcactgagcatcactgctttgatacaagacacccagtgccctggcttggacctcacagcagcacagggctgacagcagctgctgggcaagctgtccctgtgtgcagcgtgagaaccagagctgagagctgccagcccagcagggcactcaccagccctacctgacatcttgcttcccatttcagctgccaaaactgcatctacagttttgaagtatttcctgtttcctaatttaaatgggtctctcagtcatttttccactcagatgctcaagcattt

SEQ ID NO: 40830 - DNA, 600 bp, Chicken  19866894275968_1
ttcttctatctatgagctttgttagttttctgtcccccaacttatctaatttatttactactgctaaatatgtattgccagctttgcttctctatctgcatctccactatgacccaaggcagacacaacccaagccagggaattgaaatattgattattaacatatatatgtgataaagaaaatattttcttaaactctggggtctgtctgctgctttgaactgcaaactgtcacaggaataatagaatcattgaggttagaaaagaccactaagatcatctagtccaaccatgaaggawagcatggctggagattactctccttctaaatgcaaatgttgagtgtttgcccatctaaaatctggatcctcaaagaaacagtagtaatttctgcatgcacatttaggcatcagtgttgcagtttccaaattgctgaatgaattgaatggatctcartgaatgaaattgaatgaattgrctcatgagcatgtcttcacccacttccagtgaggcatgagttcctagtgagagttgtgcttgtaaatcactccaacatttcaggaaatgctgccttagatgactaaatagtaatctaccaac

SEQ ID NO: 40831 - DNA, 600 bp, Chicken  19866894275968_2
attaacatatatatgtgataaagaaaatattttcttaaactctggggtctgtctgctgctttgaactgcaaactgtcacaggaataatagaatcattgaggttagaaaagaccactaagatcatctagtccaaccatgaaggawagcatggctggagattactctccttctaaatgcaaatgttgagtgtttgcccatctaaaatctggatcctcaaagaaacagtagtaatttctgcatgcacatttaggcatcagtgttgcagtttccaaattgctgaatgaattgaatggatctcartgaatgaaattgaatgaattgrctcatgagcatgtcttcacccacttccagtgaggcatgagttcctagtgagagttgtgcttgtaaatcactccaacatttcaggaaatgctgccttagatgactaaatagtaatctaccaacttctgccaggatgaaatatccaatataataatgacagcaattgcacttccttaattcactttgaaaagtagtggaaagattttggtagktggcgaaatacactgagatgtctgctatgcaagtggcactgtgatgtagcctgggaattccataata

SEQ ID NO: 40832 - DNA, 600 bp, Chicken  19866894275968_3
gaaaatattttcttaaactctggggtctgtctgctgctttgaactgcaaactgtcacaggaataatagaatcattgaggttagaaaagaccactaagatcatctagtccaaccatgaaggawagcatggctggagattactctccttctaaatgcaaatgttgagtgtttgcccatctaaaatctggatcctcaaagaaacagtagtaatttctgcatgcacatttaggcatcagtgttgcagtttccaaattgctgaatgaattgaatggatctcartgaatgaaattgaatgaattgrctcatgagcatgtcttcacccacttccagtgaggcatgagttcctagtgagagttgtgcttgtaaatcactccaacatttcaggaaatgctgccttagatgactaaatagtaatctaccaacttctgccaggatgaaatatccaatataataatgacagcaattgcacttccttaattcactttgaaaagtagtggaaagattttggtagktggcgaaatacactgagatgtctgctatgcaagtggcactgtgatgtagcctgggaattccataatagttttggtcttctgccagactc

SEQ ID NO: 40833 - DNA, 600 bp, Chicken  19866894275968_4
tctgcatgcacatttaggcatcagtgttgcagtttccaaattgctgaatgaattgaatggatctcartgaatgaaattgaatgaattgrctcatgagcatgtcttcacccacttccagtgaggcatgagttcctagtgagagttgtgcttgtaaatcactccaacatttcaggaaatgctgccttagatgactaaatagtaatctaccaacttctgccaggatgaaatatccaatataataatgacagcaattgcacttccttaattcactttgaaaagtagtggaaagattttggtagktggcgaaatacactgagatgtctgctatgcaagtggcactgtgatgtagcctgggaattccataatagttttggtcttctgccagactcagcagaagaaataggaggtctctttccttgccatatgttcatcctcaacataaattggaggaactggtctccatttgctcttgttttcaaaaactttttttatgtagagctactgaagaatgagaatgactttttgttactgtcttctcttcaacccagctctgtagtgagaaagggtacattcaggctcaagatggacagttaaatattt

SEQ ID NO: 40834 - DNA, 600 bp, Chicken  19866894275972_1
ctgtaaatctaatatcataagcctttaaggatctaacttcattatcagatagtatgcagattttcatcttaactctcatacacatgtctgggaaaactaatgtagtattgtgaatattgtttgttgtttagctactgctaccttccacatcaagaaatatctgctcttcatttgcaagtgaaatgacagtagcatgcacagtcttgggagaaaactcttattcttggtgcctgaatagtatgaatatactgctatttggatgggggtcctgctggatgaagtagtcaagctccaatccamagcactgcccaggccacaggcagtttgagagaccttttatgcaattacaacattttttcccctcagtattaatgatagttgtggttaatgggtttttttgtttgttcgtttttttgcttgttagttttttgaaataggaaagactggttgcatgtgagctctaccactttagctccacctggattttaggttgatgtgatactatgaacttgtgaaaagatgagacatttggaagtatagctgtaaaggaaaatttaaattacatccagacagagctttgaattattactatcacaggaa

SEQ ID NO: 40835 - DNA, 600 bp, Chicken  19866894275978_1
ataaggagactttgctgatactggtgaaatacggggcgtggaaggagcaaaggtatcctgcagataacaatttgtgagcgttcagaaagaatatctgtattgatcttgggctccagttcacaaatgtgaacagatatagaaagctaaaaatcattttttctctgttattttctccagcaagccaaagcagttttaggtgttaatgtcttctctgccaagtctcccgcactccatcttctctgacccaatttgaagcactggtggttatccagggaggaaggggcttttcctgttcttcawmcacaggacaccctgacagggtgcaactaatggtgtacaacagaatgtgattctatagtattcctccagaggttttttagaaagactgagtaaatgccattaggaattttcaccagttttaaaatttcccttcccttcccttccgttcccttccattcctttcccttcttccccatgggattggatggtgctttgcattttgcaggcagttcttaggggacaacatctcaaggccaaggtgcatcccaacaccccaacctcctcctcagagactacagaggcacacattaaaactgaact

SEQ ID NO: 40836 - DNA, 600 bp, Chicken  19866894275978_2
taaggagactttgctgatactggtgaaatacggggcgtggaaggagcaaaggtatcctgcagataacaatttgtgagcgttcagaaagaatatctgtattgatcttgggctccagttcacaaatgtgaacagatatagaaagctaaaaatcattttttctctgttattttctccagcaagccaaagcagttttaggtgttaatgtcttctctgccaagtctcccgcactccatcttctctgacccaatttgaagcactggtggttatccagggaggaaggggcttttcctgttcttcawmcacaggacaccctgacagggtgcaactaatggtgtacaacagaatgtgattctatagtattcctccagaggttttttagaaagactgagtaaatgccattaggaattttcaccagttttaaaatttcccttcccttcccttccgttcccttccattcctttcccttcttccccatgggattggatggtgctttgcattttgcaggcagttcttaggggacaacatctcaaggccaaggtgcatcccaacaccccaacctcctcctcagagactacagaggcacacattaaaactgaactc

SEQ ID NO: 40837 - DNA, 600 bp, Chicken  19866894275978_3
tgacagggtgcaactaatggtgtacaacagaatgtgattctatagtattcctccagaggttttttagaaagactgagtaaatgccattaggaattttcaccagttttaaaatttcccttcccttcccttccgttcccttccattcctttcccttcttccccatgggattggatggtgctttgcattttgcaggcagttcttaggggacaacatctcaaggccaaggtgcatcccaacaccccaacctcctcctcagagactacagaggcacacattaaaactgaactctgagctgacccrtgtcccatccacatcttttgcacttccttaatgacaaacttagcaaggcagatgtgagattcacctctgcagacccagatccacttgtttaagtagaatatttttttgtttatgctgcaggctaaacaactaggtttacctagggtctcttgttaaaatgagccatctgtggcagctgtggtaattatacccacactactgtacctttcatgcagagctctyagatttgtgttgagactttgaaaacaagaggaacagcggcacaaagggaaagaaaatatctccttagtggaaactgtc

SEQ ID NO: 40838 - DNA, 600 bp, Chicken  19866894275978_4
aaggtgcatcccaacaccccaacctcctcctcagagactacagaggcacacattaaaactgaactctgagctgacccrtgtcccatccacatcttttgcacttccttaatgacaaacttagcaaggcagatgtgagattcacctctgcagacccagatccacttgtttaagtagaatatttttttgtttatgctgcaggctaaacaactaggtttacctagggtctcttgttaaaatgagccatctgtggcagctgtggtaattatacccacactactgtacctttcatgcagagctctyagatttgtgttgagactttgaaaacaagaggaacagcggcacaaagggaaagaaaatatctccttagtggaaactgtcatgagatcctcccttccttcatttgcaacttttccctggattaaccacaatccccaagttgcttgacagtaagtaattccctgcaacgaagggctatctgagggcatgaccagatgccagtccgatgcaggtattcctcatcagtaaatggttgcccacrctgtgctttggtgagacgagtaaattcagtatttgcacttccctcagtgccacaaagctctc

SEQ ID NO: 40839 - DNA, 600 bp, Chicken  19866894275978_5
agccatctgtggcagctgtggtaattatacccacactactgtacctttcatgcagagctctyagatttgtgttgagactttgaaaacaagaggaacagcggcacaaagggaaagaaaatatctccttagtggaaactgtcatgagatcctcccttccttcatttgcaacttttccctggattaaccacaatccccaagttgcttgacagtaagtaattccctgcaacgaagggctatctgagggcatgaccagatgccagtccgatgcaggtattcctcatcagtaaatggttgcccacrctgtgctttggtgagacgagtaaattcagtatttgcacttccctcagtgccacaaagctctcccargagtcagtcccttcctcggtttggattcccgcacccattccaaatgactctgccagcgcaactgctgcactagctgcagggagttttgctccccatgtccccagagccatcggcctgctgtgaaagttaagcagcaggaatccctccygagcaatgccgggtatttcctcctctccggtgggctgagcaaacctccttggggaggatgagaccttcaaaatctgttaacattcc

SEQ ID NO: 40840 - DNA, 600 bp, Chicken  19866894275978_6
ttgtgttgagactttgaaaacaagaggaacagcggcacaaagggaaagaaaatatctccttagtggaaactgtcatgagatcctcccttccttcatttgcaacttttccctggattaaccacaatccccaagttgcttgacagtaagtaattccctgcaacgaagggctatctgagggcatgaccagatgccagtccgatgcaggtattcctcatcagtaaatggttgcccacrctgtgctttggtgagacgagtaaattcagtatttgcacttccctcagtgccacaaagctctcccargagtcagtcccttcctcggtttggattcccgcacccattccaaatgactctgccagcgcaactgctgcactagctgcagggagttttgctccccatgtccccagagccatcggcctgctgtgaaagttaagcagcaggaatccctccygagcaatgccgggtatttcctcctctccggtgggctgagcaaacctccttggggaggatgagaccttcaaaatctgttaacattcctgtaccggcagtgagatggtagcactgaaaggcagtcaaacttctgcatggcatgtgataaatctc

SEQ ID NO: 40841 - DNA, 600 bp, Chicken  19866894275978_7
aattccctgcaacgaagggctatctgagggcatgaccagatgccagtccgatgcaggtattcctcatcagtaaatggttgcccacrctgtgctttggtgagacgagtaaattcagtatttgcacttccctcagtgccacaaagctctcccargagtcagtcccttcctcggtttggattcccgcacccattccaaatgactctgccagcgcaactgctgcactagctgcagggagttttgctccccatgtccccagagccatcggcctgctgtgaaagttaagcagcaggaatccctccygagcaatgccgggtatttcctcctctccggtgggctgagcaaacctccttggggaggatgagaccttcaaaatctgttaacattcctgtaccggcagtgagatggtagcactgaaaggcagtcaaacttctgcatggcatgtgataaatctctccgctttcccttctttaagagttctccatttaaaccacwcacagttttcacgcagtagtgactgaacggtgaagtatttgaaagcccacgatagtggctgatgccttgctgagacctttaaaattccaagctgttgyaaacgctgcc

SEQ ID NO: 40842 - DNA, 600 bp, Chicken  19866894275978_8
caaatgactctgccagcgcaactgctgcactagctgcagggagttttgctccccatgtccccagagccatcggcctgctgtgaaagttaagcagcaggaatccctccygagcaatgccgggtatttcctcctctccggtgggctgagcaaacctccttggggaggatgagaccttcaaaatctgttaacattcctgtaccggcagtgagatggtagcactgaaaggcagtcaaacttctgcatggcatgtgataaatctctccgctttcccttctttaagagttctccatttaaaccacwcacagttttcacgcagtagtgactgaacggtgaagtatttgaaagcccacgatagtggctgatgccttgctgagacctttaaaattccaagctgttgyaaacgctgccaagtataatgattttcatctctaatcttgtctttacctgaacataaatttgaacaggtggaaataagaaaagaaagactgtgggaataaatgttgttatcacctggaactgacagtggcaaaagcagccattttagcatcacgtgttatatttctcctattttatatttttcgctgtggattttcataggct

SEQ ID NO: 40843 - DNA, 600 bp, Chicken  19866894275978_9
aatccctccygagcaatgccgggtatttcctcctctccggtgggctgagcaaacctccttggggaggatgagaccttcaaaatctgttaacattcctgtaccggcagtgagatggtagcactgaaaggcagtcaaacttctgcatggcatgtgataaatctctccgctttcccttctttaagagttctccatttaaaccacwcacagttttcacgcagtagtgactgaacggtgaagtatttgaaagcccacgatagtggctgatgccttgctgagacctttaaaattccaagctgttgyaaacgctgccaagtataatgattttcatctctaatcttgtctttacctgaacataaatttgaacaggtggaaataagaaaagaaagactgtgggaataaatgttgttatcacctggaactgacagtggcaaaagcagccattttagcatcacgtgttatatttctcctattttatatttttcgctgtggattttcataggctgtaggaacagttcagccataagagtaagtcaagttagcgtggccaggaaagaacagtaggtttgattcacgtctgctctttgtggcactgctgcagca

SEQ ID NO: 40844 - DNA, 600 bp, Chicken  19866894275979_1
gataactatttactgaacaaccaaggactaatgacagagacagaagaagttctgctctaacattctggcttttttattattgtcatctgtggttaaatttaatattgctaactatgaagcccttgaaggtcagttgtatccaagcagtttgtgaaaacaaggcaagtttcttactgcagccctgcagcagcccttctagagcatgcttggccaaaacttgcctttgcaaacacagcaacgctaaattggaattaggcaaagtgtccaaaagagactaaagtcatcaccagcagtgacatraaatgaagatgaaagtttagaggagtccttaatgcatgaacacaattcacctgcagaggagactgatatgagacaatgcactttatccatagggtgcttttcacccaaatttatttccttatacagttcaactgttagctgaacaagttcaactgtatcaacccaataagtcaggagacagtgaactatttcttcagcatctgacattcccagaacttatccttgcttccatccgtctgcactacttgcacttgggaaaaaaaacacaaagtttggggagttttgttttagcatttttgt

SEQ ID NO: 40845 - DNA, 600 bp, Chicken  19866894275984_1
gagcaaagggattaagagctgagtgaacacagagacccaattgccggtgccgttctaggaaggcaggtaggtaggagctgcaattgtggctctttgtgctgccctgccctggcttcagggagggttttgccagtcctcttaagctcaacacctgaggactagtttgatgcttttacccaaatagccaaataccgtcgtcttgaaagaaattccttgtatcacaacctggtaatacatattaccgaatactcttcaggtgttaatcatctggtacacttcattaagcccagtcagttctastgttttgcactttgtaaatcatcttttgttggccaaaattcttatctgaggtgcaaaggcacaaaacagctttggaggatgagactgagtgacgggcatgttgtgagtgtattgcagtgaatttgaaagtaagcagagcctctgttgatgctttcacatggagctctgatatatttagttaataactcaagcgtgatctgtggacagctaaacaatttcctttctgaatgctataccttcaatgtactacaaagtatggtgccatttcccttttgcctttcttctttcagggtatgtttg

SEQ ID NO: 40846 - DNA, 600 bp, Chicken  19866894275984_2
tatctgaggtgcaaaggcacaaaacagctttggaggatgagactgagtgacgggcatgttgtgagtgtattgcagtgaatttgaaagtaagcagagcctctgttgatgctttcacatggagctctgatatatttagttaataactcaagcgtgatctgtggacagctaaacaatttcctttctgaatgctataccttcaatgtactacaaagtatggtgccatttcccttttgcctttcttctttcagggtatgtttgtacaaccaatccaatgttcagttaaaaattacattgcagctscatgggctgaatgtttcctgtctattttcggaggctgatgtgtagggggctttaattgcccctcacctctccrtaagattggtcttttttctatgcttgtatagtatgacagaccaaaaaattctgagtagctgatttgctaagattctgttgcattgataaatcagctattaattataawtaataataaaaaatggaaatccccttagatttaaagcaaaaactgaataagagttgtgtcagcagtatcactgttgcctaagcttaccagtcttggcttaataagtcattgtatttttt

SEQ ID NO: 40847 - DNA, 600 bp, Chicken  19866894275984_3
agtgaatttgaaagtaagcagagcctctgttgatgctttcacatggagctctgatatatttagttaataactcaagcgtgatctgtggacagctaaacaatttcctttctgaatgctataccttcaatgtactacaaagtatggtgccatttcccttttgcctttcttctttcagggtatgtttgtacaaccaatccaatgttcagttaaaaattacattgcagctscatgggctgaatgtttcctgtctattttcggaggctgatgtgtagggggctttaattgcccctcacctctccrtaagattggtcttttttctatgcttgtatagtatgacagaccaaaaaattctgagtagctgatttgctaagattctgttgcattgataaatcagctattaattataawtaataataaaaaatggaaatccccttagatttaaagcaaaaactgaataagagttgtgtcagcagtatcactgttgcctaagcttaccagtcttggcttaataagtcattgtattttttgacatcactcaatactttgccaaatgcaccaggtgaacgcaggaacttagatatctacattttgaagacagtc

SEQ ID NO: 40848 - DNA, 600 bp, Chicken  19866894275984_4
ctgaatgctataccttcaatgtactacaaagtatggtgccatttcccttttgcctttcttctttcagggtatgtttgtacaaccaatccaatgttcagttaaaaattacattgcagctscatgggctgaatgtttcctgtctattttcggaggctgatgtgtagggggctttaattgcccctcacctctccrtaagattggtcttttttctatgcttgtatagtatgacagaccaaaaaattctgagtagctgatttgctaagattctgttgcattgataaatcagctattaattataawtaataataaaaaatggaaatccccttagatttaaagcaaaaactgaataagagttgtgtcagcagtatcactgttgcctaagcttaccagtcttggcttaataagtcattgtattttttgacatcactcaatactttgccaaatgcaccaggtgaacgcaggaacttagatatctacattttgaagacagtcgtgaaatggttgctttgcatcttattcactcaatgtaggtatatgaatatatttaattgagggttctaccgaggaacagctctgctcctgtataatgtagtagctggt

SEQ ID NO: 40849 - DNA, 600 bp, Chicken  19866894275986_1
gaactgcagaaactactgaaggagaaggtaaattgagacaatttgcagaagtgaaagtcatccagctggctttagatgttattgaacaagagaagtggtcagtgctctgcctctgtactgactcatggatggtggcaaatggaagcaaaacaactggcagtgcaggggcaaaactattacttttgctcaagtagcttggtgtgtgtggtgggcaatgtggaaggatgaggatgtccagtgtgtatctcaaggggatttaatattgggagagaataaccaatgatttgaattgtacgacaytaattactatataattatagaatcatagaaaagcttaggttggagaagaccttaaggatcatctagttccaactccctgcgatgggcaggattgccaaccactagatcaagctgcccaggatcccattaaagctggccttgaatgtctccagagatggggcacccacaacctctggacaacttattccagtgcctcaccactctctgaataaaaaatgtattcctaacatcttacctaaatcgattctcttttagtttaaagtgattaccccttgtcctaccactgtcagaccatgtaaa

SEQ ID NO: 40850 - DNA, 599 bp, Chicken  19866894275989_1
ttaagttgatctgtgtcaatagcctaccctttgtaaacagtgtgcactggactgggaatgcattccagtgggaaagaaacattctggaggaaattcaagagtactagcatcttatttataactttataactgatgttttagtaatacttctattttaaatgtatactaaactgactgttgaagattattaaatcagttggatttgctgaaatttggtgggtttaaaaataacattatgaatgagaacagctctaaaaattaataagaccaattttttagtttgtgttttataacagcaasaggaacatcagcagagggtgtttcctcaggattaatatgctgatgtcactggtgtatgcttctctccttggatttccattaagagcagttatgttgtgtggcacttcatgatgtttaatgccactgtagttggaagctcaaatatccagttgagatcccaattttaaatatgtagtggaaaagtcacactagattaattacttctccaaagagatttgtttttaacatttgtcatagataaatttctttcttgtttatatttgtctacactggactgtatcacctgaacaatctgtcag

SEQ ID NO: 40851 - DNA, 600 bp, Chicken  19866894275996_1
tataataaactttttgaaagtagttattaattatgtgggtaccattatacaaggattcactaacctccaagacatccaaaccagagaccacagtctagacactggtatccattttacacaggagagttgaaaggaacttgaagcttttagatgtcaaactcccacctgctctggttgtcttacattcttgctctagcaaagagcaactgctgccccagacgagcagtcataatcatcaactcatctttttgggagaaaagaactttcaaagccactcatattgtaccacaaatataaaaygagggaacaaaccctttagcaaacaaartaagagtagaagagtggtacttcagacattrgaactttatatatactttcattaacttctcaagttgaaaaactsggctgcttccaaccttggctactgtatactttgtgtgggctcggaatcaggcgtgtgaggaaaggaatccttgtcacaatgtattaaccaaaaggtaatgttgtaaaatgcacatttcaaaaataaaaggcaacaactgtactggatatccacccgttctcaagtactggaagctacaagcattagtacgcagtgtg

SEQ ID NO: 40852 - DNA, 600 bp, Chicken  19866894275996_2
aattatgtgggtaccattatacaaggattcactaacctccaagacatccaaaccagagaccacagtctagacactggtatccattttacacaggagagttgaaaggaacttgaagcttttagatgtcaaactcccacctgctctggttgtcttacattcttgctctagcaaagagcaactgctgccccagacgagcagtcataatcatcaactcatctttttgggagaaaagaactttcaaagccactcatattgtaccacaaatataaaaygagggaacaaaccctttagcaaacaaartaagagtagaagagtggtacttcagacattrgaactttatatatactttcattaacttctcaagttgaaaaactsggctgcttccaaccttggctactgtatactttgtgtgggctcggaatcaggcgtgtgaggaaaggaatccttgtcacaatgtattaaccaaaaggtaatgttgtaaaatgcacatttcaaaaataaaaggcaacaactgtactggatatccacccgttctcaagtactggaagctacaagcattagtacgcagtgtgtcgttgtaacatcagaaacatttctcaa

SEQ ID NO: 40853 - DNA, 600 bp, Chicken  19866894275996_3
ctaacctccaagacatccaaaccagagaccacagtctagacactggtatccattttacacaggagagttgaaaggaacttgaagcttttagatgtcaaactcccacctgctctggttgtcttacattcttgctctagcaaagagcaactgctgccccagacgagcagtcataatcatcaactcatctttttgggagaaaagaactttcaaagccactcatattgtaccacaaatataaaaygagggaacaaaccctttagcaaacaaartaagagtagaagagtggtacttcagacattrgaactttatatatactttcattaacttctcaagttgaaaaactsggctgcttccaaccttggctactgtatactttgtgtgggctcggaatcaggcgtgtgaggaaaggaatccttgtcacaatgtattaaccaaaaggtaatgttgtaaaatgcacatttcaaaaataaaaggcaacaactgtactggatatccacccgttctcaagtactggaagctacaagcattagtacgcagtgtgtcgttgtaacatcagaaacatttctcaaatggagtcatttcctccctcctcctcactta

SEQ ID NO: 40854 - DNA, 600 bp, Chicken  19866894275996_4
ggtatccattttacacaggagagttgaaaggaacttgaagcttttagatgtcaaactcccacctgctctggttgtcttacattcttgctctagcaaagagcaactgctgccccagacgagcagtcataatcatcaactcatctttttgggagaaaagaactttcaaagccactcatattgtaccacaaatataaaaygagggaacaaaccctttagcaaacaaartaagagtagaagagtggtacttcagacattrgaactttatatatactttcattaacttctcaagttgaaaaactsggctgcttccaaccttggctactgtatactttgtgtgggctcggaatcaggcgtgtgaggaaaggaatccttgtcacaatgtattaaccaaaaggtaatgttgtaaaatgcacatttcaaaaataaaaggcaacaactgtactggatatccacccgttctcaagtactggaagctacaagcattagtacgcagtgtgtcgttgtaacatcagaaacatttctcaaatggagtcatttcctccctcctcctcacttacccctccttcctttgataaagagtagaaaactggtaatgagtaa

SEQ ID NO: 40855 - DNA, 600 bp, Chicken  19866894275997_1
tcatggtgaagctggacggcgactgtactgcactctgtatctgttcacagggactccatggacattcactgtctcacaagttgttttacagggcaccatctcctcatcttcatctcccattagccaatcttgaacgacatctactgcctccatggtcacattctcttctagccatctgttgtgccactcttcaaactgctggtggtgctttagcagcaccattggctgtacctgaaagcagaaaggtaaaaaaattactgagaggtttctgggcaagaagtcaaaactttcacctctttstatgtccaagacaggcatgctctgcaacacaaacagaaaagccacacagctacctttagagatctctatttcttaatgtttgccactcccctttaaaatttgccaagtaaaaactgctgaactaaactaaagcacagaacatttcccatctctcttccttgtttcatccaacacagaggagtaacttctgggtgtagaaattctggtttgcagaaattcagccacaagacttcttatcaatacctgtgttctggctgagatcttctatctctgctacagcctaagctactgagagtaaca

SEQ ID NO: 40856 - DNA, 599 bp, Chicken  19866894275999_1
  misc_feature (1)..(156): n is any nucleotide
nnnnnnnnnnnnnnnnnnnnnnnnnnnnnnnnnnnnnnnnnnnnnnnnnnnnnnnnnnnnnnnnnnnnnnnnnnnnnnnnnnnnnnnnnnnnnnnnnnnnnnnnnnnnnnnnnnnnnnnnnnnnnnnnnnnnnnnnnnnnnnnnnnnnnnnnnnnnaattgacatgttcaattattttttctagagaaatcttaaaacacggtaggaaattgttagaaatttggtaggtcttttccatgagtagtactgaatagcgaccaagccacagagatacattcagcacttcatatatacctccaycttcttttgggaaccaaagaggcccygtaaaaatggaaggtgccacgaggtacaactgtgtctgctctgctggatagtcttgataaaacacttcaagtagctatgatgtttatttagatttgtttctattatatrattaacagakattagaaaagtaagcgcaarggaggaaggaaaagaaggaagaaggacaatgggaggacaagagataaaggattattcctatatacaaataaaatccatagaaattggagtttttaagggatctatttgggaaatggcacatttttaatactaga

SEQ ID NO: 40857 - DNA, 599 bp, Chicken  19866894275999_2
  misc_feature (1)..(130): n is any nucleotide
nnnnnnnnnnnnnnnnnnnnnnnnnnnnnnnnnnnnnnnnnnnnnnnnnnnnnnnnnnnnnnnnnnnnnnnnnnnnnnnnnnnnnnnnnnnnnnnnnnnnnnnnnnnnnnnnnnnnnnnnnnnnnnnnnnaattgacatgttcaattattttttctagagaaatcttaaaacacggtaggaaattgttagaaatttggtaggtcttttccatgagtagtactgaatagcgaccaagccacagagatacattcagcacttcatatatacctccaycttcttttgggaaccaaagaggcccygtaaaaatggaaggtgccacgaggtacaactgtgtctgctctgctggatagtcttgataaaacacttcaagtagctatgatgtttatttagatttgtttctattatatrattaacagakattagaaaagtaagcgcaarggaggaaggaaaagaaggaagaaggacaatgggaggacaagagataaaggattattcctatatacaaataaaatccatagaaattggagtttttaagggatctatttgggaaatggcacatttttaatactagaagaaaakaatttgatgaattactcaa

SEQ ID NO: 40858 - DNA, 599 bp, Chicken  19866894275999_3
  misc_feature (1)..(21): n is any nucleotide
nnnnnnnnnnnnnnnnnnnnnaattgacatgttcaattattttttctagagaaatcttaaaacacggtaggaaattgttagaaatttggtaggtcttttccatgagtagtactgaatagcgaccaagccacagagatacattcagcacttcatatatacctccaycttcttttgggaaccaaagaggcccygtaaaaatggaaggtgccacgaggtacaactgtgtctgctctgctggatagtcttgataaaacacttcaagtagctatgatgtttatttagatttgtttctattatatrattaacagakattagaaaagtaagcgcaarggaggaaggaaaagaaggaagaaggacaatgggaggacaagagataaaggattattcctatatacaaataaaatccatagaaattggagtttttaagggatctatttgggaaatggcacatttttaatactagaagaaaakaatttgatgaattactcaaggaattttaactactgactattgattcattccctctaaagayctctctaacagtagatgggtgttatataggagctgtgcataacagtgataactgtgttacacgctac

SEQ ID NO: 40859 - DNA, 599 bp, Chicken  19866894275999_4
  misc_feature (1)..(11): n is any nucleotide
nnnnnnnnnnnaattgacatgttcaattattttttctagagaaatcttaaaacacggtaggaaattgttagaaatttggtaggtcttttccatgagtagtactgaatagcgaccaagccacagagatacattcagcacttcatatatacctccaycttcttttgggaaccaaagaggcccygtaaaaatggaaggtgccacgaggtacaactgtgtctgctctgctggatagtcttgataaaacacttcaagtagctatgatgtttatttagatttgtttctattatatrattaacagakattagaaaagtaagcgcaarggaggaaggaaaagaaggaagaaggacaatgggaggacaagagataaaggattattcctatatacaaataaaatccatagaaattggagtttttaagggatctatttgggaaatggcacatttttaatactagaagaaaakaatttgatgaattactcaaggaattttaactactgactattgattcattccctctaaagayctctctaacagtagatgggtgttatataggagctgtgcataacagtgataactgtgttacacgctacacgtgttaga

SEQ ID NO: 40860 - DNA, 600 bp, Chicken  19866894275999_5
gttcaattattttttctagagaaatcttaaaacacggtaggaaattgttagaaatttggtaggtcttttccatgagtagtactgaatagcgaccaagccacagagatacattcagcacttcatatatacctccaycttcttttgggaaccaaagaggcccygtaaaaatggaaggtgccacgaggtacaactgtgtctgctctgctggatagtcttgataaaacacttcaagtagctatgatgtttatttagatttgtttctattatatrattaacagakattagaaaagtaagcgcaarggaggaaggaaaagaaggaagaaggacaatgggaggacaagagataaaggattattcctatatacaaataaaatccatagaaattggagtttttaagggatctatttgggaaatggcacatttttaatactagaagaaaakaatttgatgaattactcaaggaattttaactactgactattgattcattccctctaaagayctctctaacagtagatgggtgttatataggagctgtgcataacagtgataactgtgttacacgctacacgtgttagacctctcacaacagaatgcatt

SEQ ID NO: 40861 - DNA, 600 bp, Chicken  19866894275999_6
ttgggaaccaaagaggcccygtaaaaatggaaggtgccacgaggtacaactgtgtctgctctgctggatagtcttgataaaacacttcaagtagctatgatgtttatttagatttgtttctattatatrattaacagakattagaaaagtaagcgcaarggaggaaggaaaagaaggaagaaggacaatgggaggacaagagataaaggattattcctatatacaaataaaatccatagaaattggagtttttaagggatctatttgggaaatggcacatttttaatactagaagaaaakaatttgatgaattactcaaggaattttaactactgactattgattcattccctctaaagayctctctaacagtagatgggtgttatataggagctgtgcataacagtgataactgtgttacacgctacacgtgttagacctctcacaacagaatgcattgcaagaggcactaattcatgaagagaatggcaaccagtgcattttgcttcacttcctgctccataatcaaactacaatttcctataatgttttcattatcagaaattgctcaattaattctttcaactttacaaacaaagt

SEQ ID NO: 40862 - DNA, 600 bp, Chicken  19866894275999_7
tgctggatagtcttgataaaacacttcaagtagctatgatgtttatttagatttgtttctattatatrattaacagakattagaaaagtaagcgcaarggaggaaggaaaagaaggaagaaggacaatgggaggacaagagataaaggattattcctatatacaaataaaatccatagaaattggagtttttaagggatctatttgggaaatggcacatttttaatactagaagaaaakaatttgatgaattactcaaggaattttaactactgactattgattcattccctctaaagayctctctaacagtagatgggtgttatataggagctgtgcataacagtgataactgtgttacacgctacacgtgttagacctctcacaacagaatgcattgcaagaggcactaattcatgaagagaatggcaaccagtgcattttgcttcacttcctgctccataatcaaactacaatttcctataatgttttcattatcagaaattgctcaattaattctttcaactttacaaacaaagtgtgaattctttcctcaagtatacacttgttgaggtgtatcgattagttcacattagttgga

SEQ ID NO: 40863 - DNA, 600 bp, Chicken  19866894276001_1
agctccctgtcaccgagagaggcctgggggtgagatgaacaggggtagtttcttttaaatatggaacgaagaatttataagtttgaggaaatgaaatggctgctcttacgttgctgatttgtcacatggtttcataggattttatttatttttttatttaatagtataatttactttttacagccaatgctgaacaaccctaataactattggagtgggttcattcagcttgaaggctgcacttacacttgggaagcatgtgtaaaaccataaagagttccaaagaaccattagccatamacaaaagctttgttttctgaagcatttgagaaaacataagacagggtccatctcatatgtctgtatctgtgggcattgtggaagacggaagagtgctgagaaggatgtaaattaagagagggcagtaacattcaaggaagagaacattccctaggatagagctgcaagcttttaagagcataagcagtgcgccrggaagtgcaaactagtctaacgagcactcagtagtactgaacaggacagaaagaagagaaacagtattgtaaagcatagagggacctcagataggcaggatgtgat

SEQ ID NO: 40864 - DNA, 600 bp, Chicken  19866894276001_2
caaccctaataactattggagtgggttcattcagcttgaaggctgcacttacacttgggaagcatgtgtaaaaccataaagagttccaaagaaccattagccatamacaaaagctttgttttctgaagcatttgagaaaacataagacagggtccatctcatatgtctgtatctgtgggcattgtggaagacggaagagtgctgagaaggatgtaaattaagagagggcagtaacattcaaggaagagaacattccctaggatagagctgcaagcttttaagagcataagcagtgcgccrggaagtgcaaactagtctaacgagcactcagtagtactgaacaggacagaaagaagagaaacagtattgtaaagcatagagggacctcagataggcaggatgtgattatctttgcacaattcatagtccactagagcggttaccaattaaaataattgcagctgtccttttttactgggacattgccattttctgctttaaatgcataacacacacttaatatatctgcagtaagtccatatttacgccactctatttaagagcttgtggatatttttccttccttaacagtgactcatt

SEQ ID NO: 40865 - DNA, 600 bp, Chicken  19866894276003_1
tgaccctgaggtctttcacagctggctgtccattcagggaggtctgggagctctgactgagccccaaagcccgtgggttaatctgatctgcctctagaatttctttgaagagccttacagccccagctgccccagtggagggagaggttaggacctgaaggaagctcttttcctccaggaaatgcaaatatgtctcaaccactgcttgttgactgccctggtactcattagagtcattgaatcatcctgattggaagagacctttgaggtcaccaagtccaaacatcaacctactaagtrccatcattgaaccatgtcycttagtgccatatccctcagctctcttcactctccactgtattcagcctctgtccctctttccttgcccaagacctggtagctgttgaggaagaccagagtggtagtgggtgccccatccttggrgccagcaggtggggctggatggggctctgagcacctgatggagctgtgggtgtccctgttcattgcaggggagttggaccagatggcctctaaaggtccyttccaactcaaatgattccatgattttaagatgaaggaacactgcacattgcagct

SEQ ID NO: 40866 - DNA, 600 bp, Chicken  19866894276003_2
agctggctgtccattcagggaggtctgggagctctgactgagccccaaagcccgtgggttaatctgatctgcctctagaatttctttgaagagccttacagccccagctgccccagtggagggagaggttaggacctgaaggaagctcttttcctccaggaaatgcaaatatgtctcaaccactgcttgttgactgccctggtactcattagagtcattgaatcatcctgattggaagagacctttgaggtcaccaagtccaaacatcaacctactaagtcccatcattgaaccatgtcycttagtgccatatccctcagctctcttcactctccactgtattcagcctctgtccctctttccttgcccaagacctggtagctgttgaggaagaccagagtggtagtgggtgccccatccttggrgccagcaggtggggctggatggggctctgagcacctgatggagctgtgggtgtccctgttcattgcaggggagttggaccagatggcctctaaaggtccyttccaactcaaatgattccatgattttaagatgaaggaacactgcacattgcagctgagttgtggtaggccatag

SEQ ID NO: 40867 - DNA, 600 bp, Chicken  19866894276003_3
aggttaggacctgaaggaagctcttttcctccaggaaatgcaaatatgtctcaaccactgcttgttgactgccctggtactcattagagtcattgaatcatcctgattggaagagacctttgaggtcaccaagtccaaacatcaacctactaagtcccatcattgaaccatgtcycttagtgccatatccctcagctctcttcactctccactgtattcagcctctgtccctctttccttgcccaagacctggtagctgttgaggaagaccagagtggtagtgggtgccccatccttggrgccagcaggtggggctggatggggctctgagcacctgatggagctgtgggtgtccctgttcattgcaggggagttggaccagatggcctctaaaggtccyttccaactcaaatgattccatgattttaagatgaaggaacactgcacattgcagctgagttgtggtaggccatagcaggaatggacacagtttcctttccttgcttcatgctgcaatgcagctttgctggttttcattctctgctctcatgcgatcacgtcctctgaacctcatgggatagccttgctcatctcagggca

SEQ ID NO: 40868 - DNA, 600 bp, Chicken  19866894276003_4
tcctgattggaagagacctttgaggtcaccaagtccaaacatcaacctactaagtcccatcattgaaccatgtcycttagtgccatatccctcagctctcttcactctccactgtattcagcctctgtccctctttccttgcccaagacctggtagctgttgaggaagaccagagtggtagtgggtgccccatccttggrgccagcaggtggggctggatggggctctgagcacctgatggagctgtgggtgtccctgttcattgcaggggagttggaccagatggcctctaaaggtccyttccaactcaaatgattccatgattttaagatgaaggaacactgcacattgcagctgagttgtggtaggccatagcaggaatggacacagtttcctttccttgcttcatgctgcaatgcagctttgctggttttcattctctgctctcatgcgatcacgtcctctgaacctcatgggatagccttgctcatctcagggcaaatttgctgtgcagatttccacctgaaccacacaccttcttctttgccctgctcacccacggcaccaacccttgcaagcaggtacaaaataattgcttta

SEQ ID NO: 40869 - DNA, 600 bp, Chicken  19866894276008_1
ggttttatgttggcagttacatgccaaaaaccaataaaatgtttaagctaggaaaacaacccaggatttgctgattgcagggttgttagagttagggtagtatggctaggttgcagttggacttactgatctttaacgtcttttccaacctgagcaattccatgatcctatgactcaaactagggtttaacaagaaactaaggatgaaaatctgcactataactaatttgatttagtactcagaagagttagaatactcacagtattcacaatatcaacagtgagtccatcagctccgtsgccaacacactgtaggtccaagcaagccatstatgcatgcccatggcatgctttcatagaagcaggggcaccagcactggcagttacacagctttgaagggatctcatcactttttatacatatttaaagtgcaggagtcaaatggatggggccaggcttttttctgtggtgtacagcaatagaacaaggggcaacgggcacaaactgcaacacagaaagttccatacgaacatgagaaaaaacttctttgaaggtgtcagagccctggaagaggctgcacagagaggctgtggagtctc

SEQ ID NO: 40870 - DNA, 600 bp, Chicken  19866894276008_2
caataaaatgtttaagctaggaaaacaacccaggatttgctgattgcagggttgttagagttagggtagtatggctaggttgcagttggacttactgatctttaacgtcttttccaacctgagcaattccatgatcctatgactcaaactagggtttaacaagaaactaaggatgaaaatctgcactataactaatttgatttagtactcagaagagttagaatactcacagtattcacaatatcaacagtgagtccatcagctccgtsgccaacacactgtaggtccaagcaagccatstatgcatgcccatggcatgctttcatagaagcaggggcaccagcactggcagttacacagctttgaagggatctcatcactttttatacatatttaaagtgcaggagtcaaatggatggggccaggcttttttctgtggtgtacagcaatagaacaaggggcaacgggcacaaactgcaacacagaaagttccatacgaacatgagaaaaaacttctttgaaggtgtcagagccctggaagaggctgcacagagaggctgtggagtctcattctctagagatattcaaaacccacctggg

SEQ ID NO: 40871 - DNA, 599 bp, Chicken  19866894276009_1
  misc_feature (1)..(107): n is any nucleotide
nnnnnnnnnnnnnnnnnnnnnnnnnnnnnnnnnnnnnnnnnnnnnnnnnnnnnnnnnnnnnnnnnnnnnnnnnnnnnnnnnnnnnnnnnnnnnnnnnnnnnnnnnnntggaagagttgaaaatacattgatttattggagctgcattttagaaggattttccagtcttctcagtgggagtttcttttacttactactatccagaaacattaagatttcaagaatttaatagaaggaaggccttttctccttgttagagatttatcatagaatcatctaggttggaaaagatgttcaagaycataaaatccaacaatcaacctgacttattgaatcccatcactaaatcatkcccgctgaggtctaaaaagattgaggctcttcatgttcaaatattgtctgctttgtggcttrcattgagtgcttgaggacttggagaaatagtcacacctatggggacaactgaaaggtcaagtatctctttgttacttgaagacaggtatttccttagaaagaaaggtcatctttttctttcacctactgcaaaacttaggtggttttcactttgattctttgagctactcctgccatacacattgt

SEQ ID NO: 40872 - DNA, 599 bp, Chicken  19866894276009_2
  misc_feature (1)..(56): n is any nucleotide
nnnnnnnnnnnnnnnnnnnnnnnnnnnnnnnnnnnnnnnnnnnnnnnnnnnnnnnntggaagagttgaaaatacattgatttattggagctgcattttagaaggattttccagtcttctcagtgggagtttcttttacttactactatccagaaacattaagatttcaagaatttaatagaaggaaggccttttctccttgttagagatttatcatagaatcatctaggttggaaaagatgttcaagaycataaaatccaacaatcaacctgacttattgaatcccatcactaaatcatkcccgctgaggtctaaaaagattgaggctcttcatgttcaaatattgtctgctttgtggcttrcattgagtgcttgaggacttggagaaatagtcacacctatggggacaactgaaaggtcaagtatctctttgttacttgaagacaggtatttccttagaaagaaaggtcatctttttctttcacctactgcaaaacttaggtggttttcactttgattctttgagctactcctgccatacacattgtgacaaataagcacttccatgctcaaggactgcagaacagagctgaacaaaa

SEQ ID NO: 40873 - DNA, 600 bp, Chicken  19866894276009_3
agttgaaaatacattgatttattggagctgcattttagaaggattttccagtcttctcagtgggagtttcttttacttactactatccagaaacattaagatttcaagaatttaatagaaggaaggccttttctccttgttagagatttatcatagaatcatctaggttggaaaagatgttcaagaycataaaatccaacaatcaacctgacttattgaatcccatcactaaatcatkcccgctgaggtctaaaaagattgaggctcttcatgttcaaatattgtctgctttgtggcttrcattgagtgcttgaggacttggagaaatagtcacacctatggggacaactgaaaggtcaagtatctctttgttacttgaagacaggtatttccttagaaagaaaggtcatctttttctttcacctactgcaaaacttaggtggttttcactttgattctttgagctactcctgccatacacattgtgacaaataagcacttccatgctcaaggactgcagaacagagctgaacaaaaaacctgccaatttgtcatttccagtcagagtcagattccatttacatgaaagataatgtctta

SEQ ID NO: 40874 - DNA, 599 bp, Chicken  19866894276011_1
  misc_feature (1)..(220): n is any nucleotide
nnnnnnnnnnnnnnnnnnnnnnnnnnnnnnnnnnnnnnnnnnnnnnnnnnnnnnnnnnnnnnnnnnnnnnnnnnnnnnnnnnnnnnnnnnnnnnnnnnnnnnnnnnnnnnnnnnnnnnnnnnnnnnnnnnnnnnnnnnnnnnnnnnnnnnnnnnnnnnnnnnnnnnnnnnnnnnnnnnnnnnnnnnnnnnnnnnnnnnnnnnnnnnnnnnnnnnnnnnnnctatgtttaaaattatatatatatgtttacagtcagcaagcctgacatgcacaaattcaactttaatgcaacttgacatwgaaagtcagaaggtgtagatatagctacaattcttatcactgtaatactraataaactaaatttcaggtgcaggtaaaaggcctagtataactcttctacagcttctttctcacaaaacaaacaaacaagcaaacaagaaagaccccataaattctaattagaatgtattacagaaaactgtcaaaacagcttggctaagactttgcatgcatgatttgagtgcatacggtgaggcttaagaaagttatatgccactgaaaaaaatgcagaggataaaatcttggtttagtctgtaaat

SEQ ID NO: 40875 - DNA, 599 bp, Chicken  19866894276011_2
  misc_feature (1)..(170): n is any nucleotide
nnnnnnnnnnnnnnnnnnnnnnnnnnnnnnnnnnnnnnnnnnnnnnnnnnnnnnnnnnnnnnnnnnnnnnnnnnnnnnnnnnnnnnnnnnnnnnnnnnnnnnnnnnnnnnnnnnnnnnnnnnnnnnnnnnnnnnnnnnnnnnnnnnnnnnnnnnnnnnnnnnnnnnnnnnctatgtttaaaattatatatatatgtttacagtcagcaagcctgacatgcacaaattcaactttaatgcaacttgacatwgaaagtcagaaggtgtagatatagctacaattcttatcactgtaatactraataaactaaatttcaggtgcaggtaaaaggcctagtataactcttctacagcttctttctcacaaaacaaacaaacaagcaaacaagaaagaccccataaattctaattagaatgtattacagaaaactgtcaaaacagcttggctaagactttgcatgcatgatttgagtgcatacggtgaggcttaagaaagttatatgccactgaaaaaaatgcagaggataaaatcttggtttagtctgtaaatatcaaatgcatcacatttaacattaaaygaagcacatctgaatatgaaag

SEQ ID NO: 40876 - DNA, 600 bp, Chicken  19866894276011_3
caattcttatcactgtaatactraataaactaaatttcaggtgcaggtaaaaggcctagtataactcttctacagcttctttctcacaaaacaaacaaacaagcaaacaagaaagaccccataaattctaattagaatgtattacagaaaactgtcaaaacagcttggctaagactttgcatgcatgatttgagtgcatacggtgaggcttaagaaagttatatgccactgaaaaaaatgcagaggataaaatcttggtttagtctgtaaatatcaaatgcatcacatttaacattaaaygaagcacatctgaatatgaaagcaagagaatacaatgcaccctcygaatgtgtgggctgatatgaaatgaaagagaaggtttataacccagttctgcagagtacaatcatgatttgctttagttgtataaatggtcccacaggttgttttttttttttttttaatttctctgtatctacttcatataacatatgcaaagactttatagttcagagattgggtttttaaattcactctaaatgcttaaaatgtgccttcattctctaaacttctcatctactcagcagcatgggaacgagg

SEQ ID NO: 40877 - DNA, 600 bp, Chicken  19866894276011_4
ggtaaaaggcctagtataactcttctacagcttctttctcacaaaacaaacaaacaagcaaacaagaaagaccccataaattctaattagaatgtattacagaaaactgtcaaaacagcttggctaagactttgcatgcatgatttgagtgcatacggtgaggcttaagaaagttatatgccactgaaaaaaatgcagaggataaaatcttggtttagtctgtaaatatcaaatgcatcacatttaacattaaaygaagcacatctgaatatgaaagcaagagaatacaatgcaccctcygaatgtgtgggctgatatgaaatgaaagagaaggtttataacccagttctgcagagtacaatcatgatttgctttagttgtataaatggtcccacaggttgttttttttttttttttaatttctctgtatctacttcatataacatatgcaaagactttatagttcagagattgggtttttaaattcactctaaatgcttaaaatgtgccttcattctctaaacttctcatctactcagcagcatgggaacgaggtcacttttagaatgccttccttcacagtttgattctgctttttgc

SEQ ID NO: 40878 - DNA, 599 bp, Chicken  19866894276014_1
  misc_feature (1)..(71): n is any nucleotide
nnnnnnnnnnnnnnnnnnnnnnnnnnnnnnnnnnnnnnnnnnnnnnnnnnnnnnnnnnnnnnnnnnnnnnngcagtttacttttatttctcgttttatttatgtctttattccattattatttgaaatctcctgattctcttcaactttttctagaatgaaatatatatatatattaattaaacttacactagtttttattttcctctaatagcaagaaattggtctttgggtgagtcagatacagatcctcaaactgcaattctattaattatataaaattaatcttatcctatgagayattccaaatccaaaacacaaattccacggtcataagtcttggtcaagatacataataaagtaatactttttctttcctttctcttttccatctcacaagttcagctccacaaggaatttgctttagttaagttcatccctccaaacttcacatggaatcatagaatcaccaagagtggaaaagacttccaagatcatccagtccagctgtccacctaccacaaatatttcccactataccttgtccctcattagaacatccaaatgtttcttggatgccttcagggacattgactccac

SEQ ID NO: 40879 - DNA, 585 bp, Chicken  19866894276014_2
ttgctttagttaagttcatccctccaaacttcacatggaatcatagaatcaccaagagtggaaaagacttccaagatcatccagtccagctgtccacctaccacaaatatttcccactataccttgtccctcattagaacatccaaatgtttcttggatgccttcagggacattgactccaccacttccctgggtgtcctgttccagtgtctgaccactctttgaaagaagtttttcctaacactcagtctgaatctcccctggcatgacttgaggccattctctctagtcatagaatcrtatcatagaatcatrgaatggcctaggttgaaagagaccagggagatcatctagtttcaacccccctgctatgtgcaggatcaccaaccactaaaaaaccactagaccaggctgcccagggcctcatccagcctgaccttgaatgcctccaagggtagggcatccacaacctccttgggcaacctgttccagtgtgtcaccaccctctcagtgaaaaacttcctcttaatatctaacctatatctcccctgtctcagtttaaaaccattccccctcatcctatca

SEQ ID NO: 40880 - DNA, 570 bp, Chicken  19866894276014_3
tcatccctccaaacttcacatggaatcatagaatcaccaagagtggaaaagacttccaagatcatccagtccagctgtccacctaccacaaatatttcccactataccttgtccctcattagaacatccaaatgtttcttggatgccttcagggacattgactccaccacttccctgggtgtcctgttccagtgtctgaccactctttgaaagaagtttttcctaacactcagtctgaatctcccctggcatgacttgaggccattctctctagtcatagaatcrtatcatagaatcatrgaatggcctaggttgaaagagaccagggagatcatctagtttcaacccccctgctatgtgcaggatcaccaaccactaaaaaaccactagaccaggctgcccagggcctcatccagcctgaccttgaatgcctccaagggtagggcatccacaacctccttgggcaacctgttccagtgtgtcaccaccctctcagtgaaaaacttcctcttaatatctaacctatatctcccctgtctcagtttaaaaccattccccctcatcctatca

SEQ ID NO: 40881 - DNA, 600 bp, Chicken  19866894276019_1
caccactgcgtgttggtgtgagatcagaggaaagcttagtatctctcaccttgtctgacagactctttgacccatttcactcttttttactctgtcagcgttccaaggtcaaagaccatgcccaaatctaaagcagatcataactcggatgctgtattttaaagacataggctcccttttttaaaataagaagatttaaaatatactttcctttgtgttagcttttttaccacattcaaatgatcttgacttgggctagggggcacacatgtttccgggaggagggatcccatttccttyacaccagtttccgtggcatcatcatcatcatcatccgcttgtttctgcccttgatcacatcctctgaaaagctggcagatgtgaaacctgagctacccatgggcctccgaacatcccatagcagtaggtatccaaaatggttcagatcatctgtaatttctctgtggatcacgtgcctccttcagaaaaagggtggggagcagatgtgcaaaacagagagacagagactatggtaatcatatttctccttcacggaagggaggggtgggagggagaaagagatattacatgcagaaggac

SEQ ID NO: 40882 - DNA, 442 bp, Chicken  19866894276023_1
agaccattaaggaagaagtaaattaaaactggaaacatcacttatttttacagctccaaactgagcgcttcttccaatccatcatctttctttccttatagctttttgcttagttctttagttcatttaaaattcatgtaaatctttcaaccaagataatttagattaattttcagtgcaggattttacaaaacgctgcattaaatgatttacattatatttgtggtatttccttcattcactaatcttgaatatttttctattccaagaatagtatttgtctacgcaaacgttcagctytcatacttgcagtttatgctaagttcattttcttttttcctgtccttcccactaaccctaattataatttcattgccttcctttggccaacccttccttttggtttccattctctttcagtcttaaactgatgacaattcat

SEQ ID NO: 40883 - DNA, 600 bp, Chicken  19866894276025_1
gtaccacatggccaataaacaggccaagagcaaccataaggaatgtgaaccatgtaggggctgccctggttttgccccatggatggagatgcgagcctggaggacacagcatgccaggatagtcagaagcactggcacacacagctcctgggaacataagaacagctgatggaagcacacaccagaccagctggaatcttaatgtcgggtgcatgggtgttctgcaataagacgtgaagtactggttcagagaggccccttacctgcaacagctggcctgcatcctgacagcaccaccgyaggagttgggacattccaaccacaccacatcaggtaaaggaagrgggatggatctctggagattaactttcctcctgactgtgagagccttcagtgtgaagagtgaatcctgtgatctaakgcaccagtatgcccactatagcacttgggttattctgttgcagaattttatataaagtaaaagtgtatccaagtctttgggtaagagattgcttctaacaagcaatattcctttatggcacacaggatccaggtacccagcaataattcccctttaaaaatgagaggttcagcaaatag

SEQ ID NO: 40884 - DNA, 600 bp, Chicken  19866894276025_2
gtgaaccatgtaggggctgccctggttttgccccatggatggagatgcgagcctggaggacacagcatgccaggatagtcagaagcactggcacacacagctcctgggaacataagaacagctgatggaagcacacaccagaccagctggaatcttaatgtcgggtgcatgggtgttctgcaataagacgtgaagtactggttcagagaggccccttacctgcaacagctggcctgcatcctgacagcaccaccgyaggagttgggacattccaaccacaccacatcaggtaaaggaagrgggatggatctctggagattaactttcctcctgactgtgagagccttcagtgtgaagagtgaatcctgtgatctaakgcaccagtatgcccactatagcacttgggttattctgttgcagaattttatataaagtaaaagtgtatccaagtctttgggtaagagattgcttctaacaagcaatattcctttatggcacacaggatccaggtacccagcaataattcccctttaaaaatgagaggttcagcaaatagttttctttcatcttgccagccaagaaaaatcttactgaatgggt

SEQ ID NO: 40885 - DNA, 600 bp, Chicken  19866894276025_3
gtcagaagcactggcacacacagctcctgggaacataagaacagctgatggaagcacacaccagaccagctggaatcttaatgtcgggtgcatgggtgttctgcaataagacgtgaagtactggttcagagaggccccttacctgcaacagctggcctgcatcctgacagcaccaccgyaggagttgggacattccaaccacaccacatcaggtaaaggaagrgggatggatctctggagattaactttcctcctgactgtgagagccttcagtgtgaagagtgaatcctgtgatctaakgcaccagtatgcccactatagcacttgggttattctgttgcagaattttatataaagtaaaagtgtatccaagtctttgggtaagagattgcttctaacaagcaatattcctttatggcacacaggatccaggtacccagcaataattcccctttaaaaatgagaggttcagcaaatagttttctttcatcttgccagccaagaaaaatcttactgaatgggtgcttgagaaactcaaatatattctaaaatgtaattacacatccaaaaattccagacaaacccttttaaaagatagta

SEQ ID NO: 40886 - DNA, 600 bp, Chicken  19866894276025_4
agtgtatccaagtctttgggtaagagattgcttctaacaagcaatattcctttatggcacacaggatccaggtacccagcaataattcccctttaaaaatgagaggttcagcaaatagttttctttcatcttgccagccaagaaaaatcttactgaatgggtgcttgagaaactcaaatatattctaaaatgtaattacacatccaaaaattccagacaaacccttttaaaagatagtatcccttatataaatacttcaccagctttctaaacataaacttcctgtgctggccaacacasttaccaaaggcaacatatattggaaaaatataactgtacaaactacatcacaaaaaaaagccccaaacagatcaaaatgcagtaatgatcgcagcggaaacagaggagcgatgggtctgaattctctcaagaagtttttctgccacaggcttgaactccatttcccagtatagtttggggggggtcccctctgtcgagtccgtagcccagtgctagctcttcatctgtaaccaaggaaaacatcatcatcagttttgaactcattcaatgatgtattttatgaccacagcacatacaact

SEQ ID NO: 40887 - DNA, 600 bp, Chicken  19866894276025_5
ttgatggcttcccttactcataaactggataggtaaaataattgggcagtcttaatggagacaagtgatgttaggaatgaaaggaagacatcacatgttctttcccctctgttttgcctgcatgtggcaaagtaacaaatccttgcagaaaaaaaaagaggtcagcctgcagccagtagaatactcctgcaacaggaatctacaaacacaaacgataacactgaacaaacgtttccatccaggagttcagcacagtttaacagaaaggatacttgacagcacttaggccacaaatgggcyaaaaatgaagatggaatcctccaactaatgggcagcatgataaatccatagtctacagactatgaaagcagcagactcacaatctcttaaacctatggagcgcttactgcactctcacagcagtgaaaagacagctcggagctggaaagaaactttggttacccacactgagttaacacttaaacagcaactactcacgtgtaaaagagagacagggcgctggtgcagagcagataccctgagatgcaacagctataagcaactgtgttactcatgcatggggatggctctctttcacag

SEQ ID NO: 40888 - DNA, 600 bp, Chicken  19866894276025_6
cacactgagttaacacttaaacagcaactactcacgtgtaaaagagagacagggcgctggtgcagagcagataccctgagatgcaacagctataagcaactgtgttactcatgcatggggatggctctctttcacagaaaattaccagtaacagcaaacaatattacatttccaagccactacagtgtttctcaatgatcaaaattaaaagagatgctgactgttgaaggagatgttagtctaacgtgacattctacacagaaggaagatgccacttaagagacttcaatgtaagaaaaygaggaaaaaaaacccattatttcaagaaggaaaacatcacatctacgcaagaagaaaccctgtaatcagagataaaatccagcctaagacatcagatctatatttggtggaaccatgagatgatttaaggtactagactaagtgaagaagaagagagtagcatcaggctctcaggaggacacctgggccaagccattcccataccagagcagcttagatcaagttgttctggtctagctactgctgagtttggagaacctccaagaatggaatctccacagtctttatgagcaacctgtt

SEQ ID NO: 40889 - DNA, 600 bp, Chicken  19866894276025_7; identical to SEQ ID NO: 40888

SEQ ID NO: 40890 - DNA, 600 bp, Chicken  19866894276025_8; identical to SEQ ID NO: 40888

SEQ ID NO: 40891 - DNA, 600 bp, Chicken  19866894276032_1
cgcgctgttctgagtcccaaaccaacccgaactgatgtcagctatcaccagagagaaacagtgagccagtctgggcttcaaactaaggctcacttactgcaaggtaaaaacctgaagttttaattgagaagaaagccctcatgaaaccctcttgcagagatgagtttgcgcaggctgcaggtagaacacaggctgccaaggctgggagcagctgcgtgccccacaaagcagggcctccccatcaaggagagcctcagtagaggaccacaaggacaacaaggaccacagtttaagtcttaytggtgtattctgagattaacaaaattgcacagagctacaatgcactgcacgcttgttattttaacggcactcrttgcctgttttgttgtaagaaaacatttggtactgttttgtcaataaagcaaaagtattgtgtcagacactgtcattacgtacgtcggaaacatcaaaatcattaaacactccattttaaaaatcccatcaagataacagcttatgttgtatgcttttcacgagcagaacagattatcatttctcaagttcaatacactgacatttctttttcctcagatgctggaa

SEQ ID NO: 40892 - DNA, 600 bp, Chicken  19866894276032_2
ggcttcaaactaaggctcacttactgcaaggtaaaaacctgaagttttaattgagaagaaagccctcatgaaaccctcttgcagagatgagtttgcgcaggctgcaggtagaacacaggctgccaaggctgggagcagctgcgtgccccacaaagcagggcctccccatcaaggagagcctcagtagaggaccacaaggacaacaaggaccacagtttaagtcttaytggtgtattctgagattaacaaaattgcacagagctacaatgcactgcacgcttgttattttaacggcactcrttgcctgttttgttgtaagaaaacatttggtactgttttgtcaataaagcaaaagtattgtgtcagacactgtcattacgtacgtcggaaacatcaaaatcattaaacactccattttaaaaatcccatcaagataacagcttatgttgtatgcttttcacgagcagaacagattatcatttctcaagttcaatacactgacatttctttttcctcagatgctggaaacccattctgcttttttggcagacgccgcctctcgctgtgtttactgcagttgcctaggggaaatcctaacac

SEQ ID NO: 40893 - DNA, 600 bp, Chicken  19866894276039_1
aaatcaaacaaacaccttaaaagggcagttttgcctatgtaacatctgtagctggggtgttctggtgacaaaatggaatgtttggagatcagggggcagtctgcagatatgataaagtaattagcattataaccccagcaagtatttctagactggaacaggcatctgaatttcttttctgtaccctaagaaggatagattcgtacaaacagcataaacagagagggctgtgaatatatcccaactagcttccatcaaaattgttgaaaaccagaaaggagcttagctgtggcagccaaracctcagtaaaaatagtttatcaagataaagatgcaaaaactgtctttctggacaaactttgtaccaatccagccatgaaaaagagctgaggtcctcaagacggatcctcagatccatagacactactcaataaataccttygctctctggcttattcagctaacacattctctgggcagttggaatacagtttgaatacagagtctttgtccccaggatagctttcactgctgcagattgcaagttgaagaaatgcatgtctttgtaaactgcagatttctagctttctcgacttttgg

SEQ ID NO: 40894 - DNA, 600 bp, Chicken  19866894276039_2
tatttctagactggaacaggcatctgaatttcttttctgtaccctaagaaggatagattcgtacaaacagcataaacagagagggctgtgaatatatcccaactagcttccatcaaaattgttgaaaaccagaaaggagcttagctgtggcagccaaracctcagtaaaaatagtttatcaagataaagatgcaaaaactgtctttctggacaaactttgtaccaatccagccatgaaaaagagctgaggtcctcaagacggatcctcagatccatagacactactcaataaataccttygctctctggcttattcagctaacacattctctgggcagttggaatacagtttgaatacagagtctttgtccccaggatagctttcactgctgcagattgcaagttgaagaaatgcatgtctttgtaaactgcagatttctagctttctcgacttttggctcactcatcaagtttgtcttaatactcctgaaggcttactgcccgcctctaccataaaatcagtaattcccagcagtacatcagagagggaagctgcctagacagcaaaccgaacttttaacaaacaggcccatactaacg

SEQ ID NO: 40895 - DNA, 600 bp, Chicken  19866894276039_3
atcattattactatgctcctttctagtaggaatctatactgaatgcattatggaaatgaaacatgaaaatacttccaatttctttaaggtgtttgtaagaaaatgtattggcatggcctagagtaccttaagcccctgacattggcttctaaaatggtcaaagacttgaaatgatgaaattgtaattgagagcagcagaggaagataaaataacatgggaaacagttacccaaaagtgtggtttgttttctttcatatgggtctcaagatgaagatattcctgatgccagttaaaaaaawaataataatactgtattttcactgttgctgcacacacagtaaaatcaggaatggaaatggctcttcttrttgcagctacagctgcaaaatattttgcccccagttttctcgctcatcatattccaaaatgttctccagatgagaagaactttccagcgcttgcttctggaccatcaggagcaaaggatttattttgcttgttttaggtgtgagaagaggctcaccggttagttttcatttatattggcagaaataaggtgaaacgcacatagctttgctgaaagactttttgccacggtc

SEQ ID NO: 40896 - DNA, 600 bp, Chicken  19866894276039_4
tacttccaatttctttaaggtgtttgtaagaaaatgtattggcatggcctagagtaccttaagcccctgacattggcttctaaaatggtcaaagacttgaaatgatgaaattgtaattgagagcagcagaggaagataaaataacatgggaaacagttacccaaaagtgtggtttgttttctttcatatgggtctcaagatgaagatattcctgatgccagttaaaaaaawaataataatactgtattttcactgttgctgcacacacagtaaaatcaggaatggaaatggctcttcttrttgcagctacagctgcaaaatattttgcccccagttttctcgctcatcatattccaaaatgttctccagatgagaagaactttccagcgcttgcttctggaccatcaggagcaaaggatttattttgcttgttttaggtgtgagaagaggctcaccggttagttttcatttatattggcagaaataaggtgaaacgcacatagctttgctgaaagactttttgccacggtcgaaagaatccagccagaaatggtttatttagatttagacaggcataattcccaccaggaactctctgct

SEQ ID NO: 40897 - DNA, 502 bp, Chicken  19866894276047_1
gcaccttgtgcctcttccttgggaataggctgccttccctctgacagtttgcccctaggcctgacctcagtggatcgtacttactagttttgtgggcttaatgtgagaccaatagaacaaaaagcagacagctgactacagccagcatccaagcagatgggcagagaaacatctgctgtcatccaaagccaagcagagaggagaagctggccctggcagacaggcagctgagtcagaagcagacccatgctctggtctgacttaaccacctgtatccctacagcactgtcaggccagcarctttgataaagattagccatycacagccagagtatgcaatggctgagtgcatggccacctgtgctggaaccggtggagcacatcttctgctttgtggtcataggcacgggtgcagatcgggacagctttgtccgtgtcccaaatgcggtttaacctgaaaacacctggggagatatcaaaaagtctgctaataatgtttccg

SEQ ID NO: 40898 - DNA, 481 bp, Chicken  19866894276047_2
ggaataggctgccttccctctgacagtttgcccctaggcctgacctcagtggatcgtacttactagttttgtgggcttaatgtgagaccaatagaacaaaaagcagacagctgactacagccagcatccaagcagatgggcagagaaacatctgctgtcatccaaagccaagcagagaggagaagctggccctggcagacaggcagctgagtcagaagcagacccatgctctggtctgacttaaccacctgtatccctacagcactgtcaggccagcarctttgataaagattagccatycacagccagagtatgcaatggctgagtgcatggccacctgtgctggaaccggtggagcacatcttctgctttgtggtcataggcacgggtgcagatcgggacagctttgtccgtgtcccaaatgcggtttaacctgaaaacacctggggagatatcaaaaagtctgctaataatgtttccg

SEQ ID NO: 40899 - DNA, 600 bp, Chicken  19866894276053_1
taactttttaaatttagattttaatttcatgtctgatttcaggcgcagtagaaactttaccttaaaataacatttcttctatagccagctccttttgtgctacaggaagaaataataatgagaaagtattccagcaggaggagctggtttagaagcaaatggattccatggcaactcctgactctacatgacacctaataactagcatttatgttggaaattgtctgtgctatcttgcaccccagttctggtcttcttatagggttttcccctcattttaaagaaaaaaaaaaaagaaakaaaaaaacaaaacctcatttttttttttttttttcttttttttctctctttagatccaggaataagcatgaagtgagatgacagyttgtctgcctcaaatgtatgcttaagcaagctgctttcaactgaacataattcagttttttgaattatttcagagataaaatatttgctgagaaatgtgttgatctgtcaaggggcagagttgtgtaggactggaaaactgaaacgatgtattttttaaygtcatgaaatgtccatattcagcagtctgaaatactgataacccaggaagatctt

SEQ ID NO: 40900 - DNA, 600 bp, Chicken  19866894276053_2
taatttcatgtctgatttcaggcgcagtagaaactttaccttaaaataacatttcttctatagccagctccttttgtgctacaggaagaaataataatgagaaagtattccagcaggaggagctggtttagaagcaaatggattccatggcaactcctgactctacatgacacctaataactagcatttatgttggaaattgtctgtgctatcttgcaccccagttctggtcttcttatagggttttcccctcattttaaagaaaaaaaaaaaagaaakaaaaaaacaaaacctcatttktttttttttttttcttttttttctctctttagatccaggaataagcatgaagtgagatgacagyttgtctgcctcaaatgtatgcttaagcaagctgctttcaactgaacataattcagttttttgaattatttcagagataaaatatttgctgagaaatgtgttgatctgtcaaggggcagagttgtgtaggactggaaaactgaaacgatgtattttttaaygtcatgaaatgtccatattcagcagtctgaaatactgataacccaggaagatcttatcaaatcagagcagtgcctt

SEQ ID NO: 40901 - DNA, 600 bp, Chicken  19866894276053_3
aatttcatgtctgatttcaggcgcagtagaaactttaccttaaaataacatttcttctatagccagctccttttgtgctacaggaagaaataataatgagaaagtattccagcaggaggagctggtttagaagcaaatggattccatggcaactcctgactctacatgacacctaataactagcatttatgttggaaattgtctgtgctatcttgcaccccagttctggtcttcttatagggttttcccctcattttaaagaaaaaaaaaaaagaaakaaaaaaacaaaacctcattttkttttttttttttcttttttttctctctttagatccaggaataagcatgaagtgagatgacagyttgtctgcctcaaatgtatgcttaagcaagctgctttcaactgaacataattcagttttttgaattatttcagagataaaatatttgctgagaaatgtgttgatctgtcaaggggcagagttgtgtaggactggaaaactgaaacgatgtattttttaaygtcatgaaatgtccatattcagcagtctgaaatactgataacccaggaagatcttatcaaatcagagcagtgccttg

SEQ ID NO: 40902 - DNA, 600 bp, Chicken  19866894276053_4
atttcatgtctgatttcaggcgcagtagaaactttaccttaaaataacatttcttctatagccagctccttttgtgctacaggaagaaataataatgagaaagtattccagcaggaggagctggtttagaagcaaatggattccatggcaactcctgactctacatgacacctaataactagcatttatgttggaaattgtctgtgctatcttgcaccccagttctggtcttcttatagggttttcccctcattttaaagaaaaaaaaaaaagaaakaaaaaaacaaaacctcatttttktttttttttttcttttttttctctctttagatccaggaataagcatgaagtgagatgacagyttgtctgcctcaaatgtatgcttaagcaagctgctttcaactgaacataattcagttttttgaattatttcagagataaaatatttgctgagaaatgtgttgatctgtcaaggggcagagttgtgtaggactggaaaactgaaacgatgtattttttaaygtcatgaaatgtccatattcagcagtctgaaatactgataacccaggaagatcttatcaaatcagagcagtgccttgg

SEQ ID NO: 40903 - DNA, 600 bp, Chicken  19866894276053_5; identical to SEQ ID NO: 40902

SEQ ID NO: 40904 - DNA, 600 bp, Chicken  19866894276053_6
cagctccttttgtgctacaggaagaaataataatgagaaagtattccagcaggaggagctggtttagaagcaaatggattccatggcaactcctgactctacatgacacctaataactagcatttatgttggaaattgtctgtgctatcttgcaccccagttctggtcttcttatagggttttcccctcattttaaagaaaaaaaaaaaagaaakaaaaaaacaaaacctcatttttttttttttttttcttttttttctctctttagatccaggaataagcatgaagtgagatgacagyttgtctgcctcaaatgtatgcttaagcaagctgctttcaactgaacataattcagttttttgaattatttcagagataaaatatttgctgagaaatgtgttgatctgtcaaggggcagagttgtgtaggactggaaaactgaaacgatgtattttttaaygtcatgaaatgtccatattcagcagtctgaaatactgataacccaggaagatcttatcaaatcagagcagtgccttggttcttatggtgctgggtgcacgaggggaaccttgtaatgatcagttggaggataaccagtcc

SEQ ID NO: 40905 - DNA, 600 bp, Chicken  19866894276053_7
ttctggtcttcttatagggttttcccctcattttaaagaaaaaaaaaaaagaaakaaaaaaacaaaacctcatttttttttttttttttcttttttttctctctttagatccaggaataagcatgaagtgagatgacagyttgtctgcctcaaatgtatgcttaagcaagctgctttcaactgaacataattcagttttttgaattatttcagagataaaatatttgctgagaaatgtgttgatctgtcaaggggcagagttgtgtaggactggaaaactgaaacgatgtattttttaaygtcatgaaatgtccatattcagcagtctgaaatactgataacccaggaagatcttatcaaatcagagcagtgccttggttcttatggtgctgggtgcacgaggggaaccttgtaatgatcagttggaggataaccagtcctatgggcattctgtctgcagtcagccatttggccaatttatcacctgacaaatgtagatttaaatcctcctgtgccatctttcagtataatgcatatgtggggcttgacagctgttgctgtttgagtgtggcacattagaacttgttattttatatctaa

SEQ ID NO: 40906 - DNA, 599 bp, Chicken  19866894276061_1
  misc_feature (1)..(228): n is any nucleotide
nnnnnnnnnnnnnnnnnnnnnnnnnnnnnnnnnnnnnnnnnnnnnnnnnnnnnnnnnnnnnnnnnnnnnnnnnnnnnnnnnnnnnnnnnnnnnnnnnnnnnnnnnnnnnnnnnnnnnnnnnnnnnnnnnnnnnnnnnnnnnnnnnnnnnnnnnnnnnnnnnnnnnnnnnnnnnnnnnnnnnnnnnnnnnnnnnnnnnnnnnnnnnnnnnnnnnnnnnnnnnnnnnnnnttaacaatagatttaatgcaatttttgttgcttttgatcatctctgagaaattgctgccttccaagttgttytggaaaaatgaggttaagttgttgtcaaattggagaatttctacactgaacccttgtgattgctgttcctgatgcctactgctgcctctctcaaatgttaatcgacttgataatatctgcaaagcatccggagatcctaatgttgataattccaaaaatcagtgtgctattccattaaatacctgcctggyttttccgaagggcagtttccagatctactcttcatagaagtgtttcttctgtctcaggttctttaaatgaatgttttcttaaccttcagatctcggtcctgcttatgt

SEQ ID NO: 40907 - DNA, 473 bp, Chicken  19866894276061_2
  misc_feature (1)..(37): n is any nucleotide
nnnnnnnnnnnnnnnnnnnnnnnnnnnnnnnnnnnnnttaacaatagatttaatgcaatttttgttgcttttgatcatctctgagaaattgctgccttccaagttgttytggaaaaatgaggttaagttgttgtcaaattggagaatttctacactgaacccttgtgattgctgttcctgatgcctactgctgcctctctcaaatgttaatcgacttgataatatctgcaaagcatccggagatcctaatgttgataattccaaaaatcagtgtgctattccattaaatacctgcctggyttttccgaagggcagtttccagatctactcttcatagaagtgtttcttctgtctcaggttctttaaatgaatgttttcttaaccttcagatctcggtcctgcttatgtagaaaataattactttttttggtataattgtttaatggtgaagattctttttttttttttttttt

SEQ ID NO: 40908 - DNA, 600 bp, Chicken  19866894276067_1
atgtgaacatcacttaaacagggatcgctgattcaacagagtgctaacagcccctggcagcaaagtgagtgcactttcagaggctgcaaaagcatacgaggagccagtcctccagctgggcaagagatgccacttttctctcactacaaaagcctgtacaaacatgaaactgccttcacagtgctgaagataagcaaactggattgctcgaagtcatacgatgcctcgctttgatcatgaatgcaactcatcttcggaagagagtgcacacctctctggatttgcttttctcctgctgtyacacaccaggcaatgctctgcagtctgacacgygtcacttacaaaaatgtagtgtttgtgttgataagaaagctcacgccagagaaagagttcagtttaggcggctcgtgcaccatgccatatacacaccagctcagagcaccattcggatggcagcagctctatctgcacgcaccgatgcagccacacctgcaggtacaccggtctcagtcgctcctccactggaaggggaacagtgggacatgagagctcagctcacagcttggaagcgtcaccggaacaccaccgttacaaagagca

SEQ ID NO: 40909 - DNA, 600 bp, Chicken  19866894276067_2
caacagagtgctaacagcccctggcagcaaagtgagtgcactttcagaggctgcaaaagcatacgaggagccagtcctccagctgggcaagagatgccacttttctctcactacaaaagcctgtacaaacatgaaactgccttcacagtgctgaagataagcaaactggattgctcgaagtcatacgatgcctcgctttgatcatgaatgcaactcatcttcggaagagagtgcacacctctctggatttgcttttctcctgctgtyacacaccaggcaatgctctgcagtctgacacgygtcacttacaaaaatgtagtgtttgtgttgataagaaagctcacgccagagaaagagttcagtttaggcggctcgtgcaccatgccatatacacaccagctcagagcaccattcggatggcagcagctctatctgcacgcaccgatgcagccacacctgcaggtacaccggtctcagtcgctcctccactggaaggggaacagtgggacatgagagctcagctcacagcttggaagcgtcaccggaacaccaccgttacaaagagcattcagaagcccaccacctgtgcccaggacatca

SEQ ID NO: 40910 - DNA, 600 bp, Chicken  19866894276069_1
ctttcaggcgtatgcaaatgtaattaataagttctaaatgaatcctcagcaaacatgggagcaaaaagacagcaccttcccccacatctccccaggtccctgctccacctaatgatggtgcagaataatagggctgtgaggaagcatttggagtcccgccgtgccattaggagggcgtgcagcagctccccatgtgccaggataattgcagtgctggctgctctcggccatcacagtgggagcagtacctgcaagcaccctcctggcttgcttgggctttagaaaatgtcactgctgtgycactggggagctgagtgtccctccagccctttccctgctgggatttctcagtggtggctggtggggggggttgtcaaagtgctgaaggtcccagctggggttgtgtgccacgaaaccaaaggatgggatcgtatttttcttaaaaaagaaaaccatttgatgggctgatgcaatcccttctcatcctgagccatggccacctcttctggcaggtgtgctataggtgtgttcagctccatgccctgctccctggtcctgctgcattttggctccctgctcctgacactgctgtgcctggag

SEQ ID NO: 40911 - DNA, 599 bp, Chicken  19866894276086_1
  misc_feature (1)..(74): n is any nucleotide
nnnnnnnnnnnnnnnnnnnnnnnnnnnnnnnnnnnnnnnnnnnnnnnnnnnnnnnnnnnnnnnnnnnnnnnnnnaaaaccggggtgaactggaagcgcggagcaggttaaccctgcctgggtgccagcggagcgcggccgcacggcccgtagccattgtcttccctccccagagagacccagggggaggatgctgagtgcaagcaggaggagtgcaagcaaaggggcgaatccctcccgccccccccccccttctaaatagcggtgttcccgctgcgtttcccccagggtgccctccccrgggccgtgcccacagtcccatcgggacgctctcgcctcaggatcccccggtgctttgacggcgcggccccaggmgggcgggcagccctccccgagcgcccgtcgccctcccgtcccggagctctgccygcaggttgcaggcgttgccactgtggcgttgcagcrccggctcctatcgagccgcttcccatcgcggagcggctcccgttgagccgttcattttgctttgcggagcagtgacacccyctgtatcagcccgggggattgacgtgaacttcagcctgccctcatccgtctccc

SEQ ID NO: 40912 - DNA, 600 bp, Chicken  19866894276086_2
aaaaccggggtgaactggaagcgcggagcaggttaaccctgcctgggtgccagcggagcgcggccgcacggcccgtagccattgtcttccctccccagagagacccagggggaggatgctgagtgcaagcaggaggagtgcaagcaaaggggcgaatccctcccgccccccccccccttctaaatagcggtgttcccgctgcgtttcccccagggtgccctccccrgggccgtgcccacagtcccatcgggacgctctcgcctcaggatcccccggtgctttgacggcgcggccccaggmgggcgggcagccctccccgagcgcccgtcgccctcccgtcccggagctctgccygcaggttgcaggcgttgccactgtggcgttgcagcrccggctcctatcgagccgcttcccatcgcggagcggctcccgttgagccgttcattttgctttgcggagcagtgacacccyctgtatcagcccgggggattgacgtgaacttcagcctgccctcatccgtctccctcgggggaagtgattcagagttttcgtctccattttgttgcagctttacctggcacaaatctcagccctgacttg

SEQ ID NO: 40913 - DNA, 600 bp, Chicken  19866894276086_3
ggagcgcggccgcacggcccgtagccattgtcttccctccccagagagacccagggggaggatgctgagtgcaagcaggaggagtgcaagcaaaggggcgaatccctcccgccccccccccccttctaaatagcggtgttcccgctgcgtttcccccagggtgccctccccrgggccgtgcccacagtcccatcgggacgctctcgcctcaggatcccccggtgctttgacggcgcggccccaggmgggcgggcagccctccccgagcgcccgtcgccctcccgtcccggagctctgccygcaggttgcaggcgttgccactgtggcgttgcagcrccggctcctatcgagccgcttcccatcgcggagcggctcccgttgagccgttcattttgctttgcggagcagtgacacccyctgtatcagcccgggggattgacgtgaacttcagcctgccctcatccgtctccctcgggggaagtgattcagagttttcgtctccattttgttgcagctttacctggcacaaatctcagccctgacttgagcaaatggcatttttgggaggtgtttgagccggaccccagcaagttgtccatt

SEQ ID NO: 40914 - DNA, 600 bp, Chicken  19866894276086_4
ctccccagagagacccagggggaggatgctgagtgcaagcaggaggagtgcaagcaaaggggcgaatccctcccgccccccccccccttctaaatagcggtgttcccgctgcgtttcccccagggtgccctccccrgggccgtgcccacagtcccatcgggacgctctcgcctcaggatcccccggtgctttgacggcgcggccccaggmgggcgggcagccctccccgagcgcccgtcgccctcccgtcccggagctctgccygcaggttgcaggcgttgccactgtggcgttgcagcrccggctcctatcgagccgcttcccatcgcggagcggctcccgttgagccgttcattttgctttgcggagcagtgacacccyctgtatcagcccgggggattgacgtgaacttcagcctgccctcatccgtctccctcgggggaagtgattcagagttttcgtctccattttgttgcagctttacctggcacaaatctcagccctgacttgagcaaatggcatttttgggaggtgtttgagccggaccccagcaagttgtccattttgttttgcctctctcctggtgccgttacgtttcct

SEQ ID NO: 40915 - DNA, 600 bp, Chicken  19866894276086_5
ccccccttctaaatagcggtgttcccgctgcgtttcccccagggtgccctccccrgggccgtgcccacagtcccatcgggacgctctcgcctcaggatcccccggtgctttgacggcgcggccccaggmgggcgggcagccctccccgagcgcccgtcgccctcccgtcccggagctctgccygcaggttgcaggcgttgccactgtggcgttgcagcrccggctcctatcgagccgcttcccatcgcggagcggctcccgttgagccgttcattttgctttgcggagcagtgacacccyctgtatcagcccgggggattgacgtgaacttcagcctgccctcatccgtctccctcgggggaagtgattcagagttttcgtctccattttgttgcagctttacctggcacaaatctcagccctgacttgagcaaatggcatttttgggaggtgtttgagccggaccccagcaagttgtccattttgttttgcctctctcctggtgccgttacgtttcctacgccgtatgactgtaatgctcttttagctccttgtaagatacaatttgacattctcttacgtgtatttggagttatgggt

SEQ ID NO: 40916 - DNA, 600 bp, Chicken  19866894276088_1
ccttctccacacttgcagtcatttgtttgttatcacttggctagagccaaacaagtaatttgatcttgttttgggattatcaagtaaaatatctaatttgttaactaaatgtctaaataatttcaactcctgttttctagcttattctctcaaaagctgtatcctatctagtttcactgtcagtttagatattgttcctccctcccagaaaacacagagctctcagttcattccaagaatagtttatcagtgcacatttcatgtcaagagtgtaacagattaagtacagaatgatacagscttcagagatgtacttttctacaatttgctgattttaataagcatctgtaggatacatttttccttaaaacacttaaaaatgctatgctagttcttaagcagaaccagaaactgaaatgattagctagtgtattattaaatttgtcaatggtacttatataatttattattttattagttctcatttacaaattattattaagacaggactataaaatattttcacagaatcttagactcatagaatcacattatagttttggtttggaagggacttcaaaacacatccagttccaaccc

SEQ ID NO: 40917 - DNA, 599 bp, Chicken  19866894276091_1
  misc_feature (1)..(140): n is any nucleotide
nnnnnnnnnnnnnnnnnnnnnnnnnnnnnnnnnnnnnnnnnnnnnnnnnnnnnnnnnnnnnnnnnnnnnnnnnnnnnnnnnnnnnnnnnnnnnnnnnnnnnnnnnnnnnnnnnnnnnnnnnnnnnnnnnnnnnnnnnnnntggtctttttcacccagcccattctataatccaatgacttctgatagaggtagctcagcatatacacacgtctgcagactgggctggattaagatgagagatttttattattctttatagctggcataacacagctctctatttcccactgtgacctcawctgaagtagaaaagtttctccctggccaccagcacagtaaaagcagcaaaagtaaggccwgagatgaagttttgttgtacatggcacaggctgcaagctctgggtgcaaacagctggagatttaacagacacaagatragawggaaacaggtggaaatggaaacagcacgcccaagttcacagcaggtaagagtcagaaatagaacccaagtctcaatttccagctaggactttcattcaccagctcatcttgtttcacagcttccaactgctgctcaagcaattgcttctgatagaac

SEQ ID NO: 40918 - DNA, 599 bp, Chicken  19866894276091_2
  misc_feature (1)..(80): n is any nucleotide
nnnnnnnnnnnnnnnnnnnnnnnnnnnnnnnnnnnnnnnnnnnnnnnnnnnnnnnnnnnnnnnnnnnnnnnnnnnnnnnntggtctttttcacccagcccattctataatccaatgacttctgatagaggtagctcagcatatacacacgtctgcagactgggctggattaagatgagagatttttattattctttatagctggcataacacagctctctatttcccactgtgacctcawctgaagtagaaaagtttctccctggccaccagcacagtaaaagcagcaaaagtaaggccwgagatgaagttttgttgtacatggcacaggctgcaagctctgggtgcaaacagctggagatttaacagacacaagatragawggaaacaggtggaaatggaaacagcacgcccaagttcacagcaggtaagagtcagaaatagaacccaagtctcaatttccagctaggactttcattcaccagctcatcttgtttcacagcttccaactgctgctcaagcaattgcttctgatagaacaaattagggttcctcagtgtaatccatgtgcatccaggaagacaggacaagaaattattt

SEQ ID NO: 40919 - DNA, 599 bp, Chicken  19866894276091_3
  misc_feature (1)..(2): n is any nucleotide
nntggtctttttcacccagcccattctataatccaatgacttctgatagaggtagctcagcatatacacacgtctgcagactgggctggattaagatgagagatttttattattctttatagctggcataacacagctctctatttcccactgtgacctcawctgaagtagaaaagtttctccctggccaccagcacagtaaaagcagcaaaagtaaggccwgagatgaagttttgttgtacatggcacaggctgcaagctctgggtgcaaacagctggagatttaacagacacaagatragawggaaacaggtggaaatggaaacagcacgcccaagttcacagcaggtaagagtcagaaatagaacccaagtctcaatttccagctaggactttcattcaccagctcatcttgtttcacagcttccaactgctgctcaagcaattgcttctgatagaacaaattagggttcctcagtgtaatccatgtgcatccaggaagacaggacaagaaattatttatcttctgcttgcaaagcttcagcaacaagccactaaaagccaacctcattgctgacactattttaatgtacagctct

SEQ ID NO: 40920 - DNA, 600 bp, Chicken  19866894276091_4
gtctttttcacccagcccattctataatccaatgacttctgatagaggtagctcagcatatacacacgtctgcagactgggctggattaagatgagagatttttattattctttatagctggcataacacagctctctatttcccactgtgacctcawctgaagtagaaaagtttctccctggccaccagcacagtaaaagcagcaaaagtaaggccwgagatgaagttttgttgtacatggcacaggctgcaagctctgggtgcaaacagctggagatttaacagacacaagatragawggaaacaggtggaaatggaaacagcacgcccaagttcacagcaggtaagagtcagaaatagaacccaagtctcaatttccagctaggactttcattcaccagctcatcttgtttcacagcttccaactgctgctcaagcaattgcttctgatagaacaaattagggttcctcagtgtaatccatgtgcatccaggaagacaggacaagaaattatttatcttctgcttgcaaagcttcagcaacaagccactaaaagccaacctcattgctgacactattttaatgtacagctctaactt

SEQ ID NO: 40921 - DNA, 600 bp, Chicken  19866894276091_5
agctcatcttgtttcacagcttccaactgctgctcaagcaattgcttctgatagaacaaattagggttcctcagtgtaatccatgtgcatccaggaagacaggacaagaaattatttatcttctgcttgcaaagcttcagcaacaagccactaaaagccaacctcattgctgacactattttaatgtacagctctaacttacaggccaagctgcaacagtgcaggctttgtgtaaagctacagagcacaaggacaagtcctagcaaacccagacccaatcaaaagcacagtggaaatgcygtattttgtccaaccagaggtctgacactaatatcactgtgctcaacgaaggcctgtaatgcacctgcagaaaagcagaatgtgatgcgaggtaaccttgctcaggcaatctccttttgcttcttccacatcatttttggtttttgatagtttgcatttgtatttaaggaaaaaaaaaaagagctgatttaaagcaatatagcccaagttacctttccacagcttatcccagyagtacagataccagggctcaatctcttcccaactcaaacttcatggagttggaaacttgttattttc

SEQ ID NO: 40922 - DNA, 543 bp, Chicken  19866894276091_6
aaagctacagagcacaaggacaagtcctagcaaacccagacccaatcaaaagcacagtggaaatgcygtattttgtccaaccagaggtctgacactaatatcactgtgctcaacgaaggcctgtaatgcacctgcagaaaagcagaatgtgatgcgaggtaaccttgctcaggcaatctccttttgcttcttccacatcatttttggtttttgatagtttgcatttgtatttaaggaaaaaaaaaaagagctgatttaaagcaatatagcccaagttacctttccacagcttatcccagyagtacagataccagggctcaatctcttcccaactcaaacttcatggagttggaaacttgttattttcaggacttctcagaagattccctaaagctatagacaggaatccaaatcagagcacttctctcttgcccacatttatcttggaccaaaaaaaaaaaaaaaaaaaaaaagaagtttggaaggcaagaaaggatctggaaggtgctcacagaatagcacaacatgaaagcaaggggaaag

SEQ ID NO: 40923 - DNA, 599 bp, Chicken  19866894276093_1
  misc_feature (1)..(190): n is any nucleotide
nnnnnnnnnnnnnnnnnnnnnnnnnnnnnnnnnnnnnnnnnnnnnnnnnnnnnnnnnnnnnnnnnnnnnnnnnnnnnnnnnnnnnnnnnnnnnnnnnnnnnnnnnnnnnnnnnnnnnnnnnnnnnnnnnnnnnnnnnnnnnnnnnnnnnnnnnnnnnnnnnnnnnnnnnnnnnnnnnnnnnnnnnnnnnncttcaaacagtttcaaggaagaaattcacagctgcagcgacacagttttcctgagaagttcccagggttttaaataatcatctggttctaattctgcgtggggccaatcrttgtattgaagcacagaagaagccccgtagatgaaagcaggtctgtgcccagcctggttttgttctgcagctcctcaccgagccattcacgacagctctaacaattatgcaaacaaatcacaagtcagcatgcccgcaaattaaggaggaaaaaaaataaaatcaataaaagaaacctgaagatgacaggaagaagcagaggtgagagcgtatgaatgatcactcagaacagactatacttaaattgcagtaaaagttaaatgcctccattccacttaaaaaaagaaaaaccagctgca

SEQ ID NO: 40924 - DNA, 600 bp, Chicken  19866894276094_1
gtctctggactggaaattattccatgctcttcacccagtcagcacggggagttcctgagcaggcacagcaggctcattttgagcagatcttaatggctaaacaaaaataatcatgtcataaagctgaaacagaagttacggcatcatcagcatatatatatgtgaagtgttaagtgttctttaatactgatagatttatacaagtgtaaattcaaactcatgtgcttcctttaggatagacatagtgactgaggaggcaactcccatggttcacataagtgaacttccacagttcacttrtttcatcagaacytgccttgaggaaacatcattttcttctgctgtctctccacaacrataatactttctctgagagaaaagaggtaaagttacacaaatttcatcaatttacagatgtggtaatttatgtgggtcagatgcatattggctctgacagtacattttaaaggtatccacagatgcctgcacaggtctttccagactccacctattctaacaatataaagggtgaggttcatctcatttaacttcaagtgcctaagagctaggcacctaatccaaaatcatcatcatttagat

SEQ ID NO: 40925 - DNA, 600 bp, Chicken  19866894276094_2
aaattattccatgctcttcacccagtcagcacggggagttcctgagcaggcacagcaggctcattttgagcagatcttaatggctaaacaaaaataatcatgtcataaagctgaaacagaagttacggcatcatcagcatatatatatgtgaagtgttaagtgttctttaatactgatagatttatacaagtgtaaattcaaactcatgtgcttcctttaggatagacatagtgactgaggaggcaactcccatggttcacataagtgaacttccacagttcacttrtttcatcagaacytgccttgaggaaacatcattttcttctgctgtctctccacaacrataatactttctctgagagaaaagaggtaaagttacacaaatttcatcaatttacagatgtggtaatttatgtgggtcagatgcatattggctctgacagtacattttaaaggtatccacagatgcctgcacaggtctttccagactccacctattctaacaatataaagggtgaggttcatctcatttaacttcaagtgcctaagagctaggcacctaatccaaaatcatcatcatttagattcctgctataggc

SEQ ID NO: 40926 - DNA, 600 bp, Chicken  19866894276094_3
agcaggcacagcaggctcattttgagcagatcttaatggctaaacaaaaataatcatgtcataaagctgaaacagaagttacggcatcatcagcatatatatatgtgaagtgttaagtgttctttaatactgatagatttatacaagtgtaaattcaaactcatgtgcttcctttaggatagacatagtgactgaggaggcaactcccatggttcacataagtgaacttccacagttcacttrtttcatcagaacytgccttgaggaaacatcattttcttctgctgtctctccacaacrataatactttctctgagagaaaagaggtaaagttacacaaatttcatcaatttacagatgtggtaatttatgtgggtcagatgcatattggctctgacagtacattttaaaggtatccacagatgcctgcacaggtctttccagactccacctattctaacaatataaagggtgaggttcatctcatttaacttcaagtgcctaagagctaggcacctaatccaaaatcatcatcatttagattcctgctataggctatggagacagagaagaacaagagcttaatttatcctctctgag

SEQ ID NO: 40927 - DNA, 600 bp, Chicken  19866894276096_1
aagaggaactctcccaccctctttgtgctctgtgctctctagttgaaagccaagctcacagagatttacaggaagtttgaggtttttaaccatgcctgcaagcacaggttatgacttgacgtctatattacattgttgtacaactggccacagaaagctgataaagaaatattgtacttacacaagaaagtcactgttgtactcaaatctgcaacctcctgtgaatggggatatgttccagaaactactcagtgggaattaatcctttcaaaattgctgtgtaaaagccctgctcaacayggagtatttctgtgaggctgacaactctaaatcggtcatgttgctttttttctcagtgcagaagtaattgcagacaaaatgctacttcagaataggtacaccccccatgttttgaagaagtactaagaagtccttgtagcagcatttctatcatcttttttttattcatccaggatcaaattagctgagaaattctaaaattcctagataaaatcttttccattgcaatttcacagtcagattatctccttgagtgtgagatctgtggatgaaaaaagttctattacaattctttccata

SEQ ID NO: 40928 - DNA, 600 bp, Chicken  19866894276097_1
caagcactaataaacatggacactcagcccaccgaggggtttgagaaactgcagtttcttttgctgcagaacccctgcccaccagaaaccttcggaaacttgctgctcctctactgcaagcatcagtactacgacttggcagccgatgtgctggcagagaacgcccatctaacctacaaactgctcacaccttacttgtacaacttcttggatgccgttattacttgtcagactgcccctgaggaggctttccacaagctggatgacgcagcagggatgctgaccgagcagctgaggaarctcacaaagcaaatacaggaagctaggcaaaactgggatgatgaagctgtaaaaaaggctgttaatgagtatgatgagactctggataaatatatacccgtcttgatggtccaggctaagatttattgggacatgaagaactacacaatggtagaaaagatcttccgcaaatcagtggagttctgcaatgaacacgaggtatggaagctcaacgtggctcacgtgcttttcatgcaagaaaacaagtacaaagaggctatcagcttctatgagccaatagtcaaaaagcactatgataac

SEQ ID NO: 40929 - DNA, 600 bp, Chicken  19866894276104_1
accagttcaatctgaggatggaagcacacgtatactgtgtcctgcaaaatgcagacaaaaattcactcatacaagcactgcttcaagacagaagtcttgattttgagccagatggaattaaaggtttccagagctctccgtgatagcacattagcatttcctaacagtaggtggatcatttggcagactatgcagtttaaatacctgctgataaaccttttgatgactatactttattatagagggagttctcattttgctgcaagctagtgaagaaattgcatatgaaatccttgactktcacaaatgattagtgacatcatctacctcattctctaatgttataaaaatcaatggttagtagaaataagggaccctaaatattagtactagcagctgctgcaaccccaaattagttctctggtgtgaagctatgctagctgaagaaaagtggtagtcctgtaatgtagatcacttgtcttacgatctgcactcagctctgctgagtacctcaactctgaccacatccctcagatgttggtgtagctcaatagtcaacactttccctttcagccaagccatacaactattctcaagagc

SEQ ID NO: 40930 - DNA, 599 bp, Chicken  19866894276110_1
  misc_feature (1)..(69): n is any nucleotide
nnnnnnnnnnnnnnnnnnnnnnnnnnnnnnnnnnnnnnnnnnnnnnnnnnnnnnnnnnnnnnnnnnnnntgtagttggtggcctgtaactagtggtgttcaccactagttactgagttcaatcttgttcaaaatcaatgacctgaacgaaggaatagaatgcaccctcaacaaatttgctgctgttatgaatttgggaagagtggctgactcatcagaaggctgtgctgccattcagggggacctggacaagctggaaatttggggaaagaggaaccttacaaggttgaacaagggcaartgtagagtcatagaatcatagtaccatggaatcacaaggttggaaagaacctacaagatgatctagtccaactgtcctcctattactcttgctaccacaagccactaaamcatatcttgtagcttctcatccagatgcctcctgaacactgycagagacgatgactccaccacctccctgggcaggccattccagtgcctgaccaccctctgagagaaaaagtttttccttatgtttaatctaaacctcctctggtgcaacttgtggccatttccttgggtcctgtttgttgtctggga

SEQ ID NO: 40931 - DNA, 600 bp, Chicken  19866894276110_2
actgagttcaatcttgttcaaaatcaatgacctgaacgaaggaatagaatgcaccctcaacaaatttgctgctgttatgaatttgggaagagtggctgactcatcagaaggctgtgctgccattcagggggacctggacaagctggaaatttggggaaagaggaaccttacaaggttgaacaagggcaartgtagagtcatagaatcatagtaccatggaatcacaaggttggaaagaacctacaagatgatctagtccaactgtcctcctattactcttgctaccacaagccactaaamcatatcttgtagcttctcatccagatgcctcctgaacactgycagagacgatgactccaccacctccctgggcaggccattccagtgcctgaccaccctctgagagaaaaagtttttccttatgtttaatctaaacctcctctggtgcaacttgtggccatttccttgggtcctgtttgttgtctgggagaagaggccaaaccctcctacacatgtggaggaataactgcatgcagcagtacatgttacgggatgacctgctgaaaaggagctcttggagaaggacctgagtgtcctagt

SEQ ID NO: 40932 - DNA, 600 bp, Chicken  19866894276110_3
aatagaatgcaccctcaacaaatttgctgctgttatgaatttgggaagagtggctgactcatcagaaggctgtgctgccattcagggggacctggacaagctggaaatttggggaaagaggaaccttacaaggttgaacaagggcaartgtagagtcatagaatcatagtaccatggaatcacaaggttggaaagaacctacaagatgatctagtccaactgtcctcctattactcttgctaccacaagccactaaamcatatcttgtagcttctcatccagatgcctcctgaacactgycagagacgatgactccaccacctccctgggcaggccattccagtgcctgaccaccctctgagagaaaaagtttttccttatgtttaatctaaacctcctctggtgcaacttgtggccatttccttgggtcctgtttgttgtctgggagaagaggccaaaccctcctacacatgtggaggaataactgcatgcagcagtacatgttacgggatgacctgctgaaaaggagctcttggagaaggacctgagtgtcctagtggacaacacattgtccatgagccagcagtgtgttcctgaagc

SEQ ID NO: 40933 - DNA, 600 bp, Chicken  19866894276122_1
taagattacatttcttaaagtgactgggtctacctgccagatgaatttttcgcctgatttcctcaagctctggcagctgccttcattattggtgaaagtggcatggcaaagctagcatgaaaaatgaggctaagcacctgtcacttcatttttctgcaaagaaataaagaaaatacatgtaactcaatgctctgcaccatctatactcagcaacaacttgctgcaaaaagaataaagcatcagtttgttcttgcatacagtaagaatcatgacatgtaatggagttccagaaagctacaygtttaagataatcagaaaagataaaactccagacaaaaagctacaaggaaataaagacaaggatgcataagaatccccccctccataattgctgaatttcttctgtgaatgtaacaccctctacgcatgtgctgtttgggtgtaagagcttaaccagrgaacttcacctaacaactgacacagttgagactcattaattttctttacagtaaaaagagcctctcaataacagtgaatcagccaggcactaagccactctaatcgcaccctggttacacaaatgtttggataccttcatgt

SEQ ID NO: 40934 - DNA, 600 bp, Chicken  19866894276122_2
aagaaataaagaaaatacatgtaactcaatgctctgcaccatctatactcagcaacaacttgctgcaaaaagaataaagcatcagtttgttcttgcatacagtaagaatcatgacatgtaatggagttccagaaagctacaygtttaagataatcagaaaagataaaactccagacaaaaagctacaaggaaataaagacaaggatgcataagaatccccccctccataattgctgaatttcttctgtgaatgtaacaccctctacgcatgtgctgtttgggtgtaagagcttaaccagrgaacttcacctaacaactgacacagttgagactcattaattttctttacagtaaaaagagcctctcaataacagtgaatcagccaggcactaagccactctaatcgcaccctggttacacaaatgtttggataccttcatgttttctagaatttgccctcatggaagatggccaacttttggtgtatctgaagccaatgcatgccaggaaggtgaccttctcagcagatccagctattccaggatcctttgaaacctgtcagctttcatgcacaggagaatgcacctgacaagaacccaa

SEQ ID NO: 40935 - DNA, 600 bp, Chicken  19866894276135_1
gcgagggaggatgactgtagaggacaagtcagcatctctgggtattttgttttacctcccttcgtttctttctcattttaaaatgaattctaagggattatttacagtagagtcccctctgcattctttggcatctcgtctgaagtcagtgagttccatcctctctgccagcattcaggaaccagtttaggagacagaatcttccttaaagacaaaccaaggcatgaagtggtacaggagtagctgtaggtgaggactcagagtggggctcacatggccaccaaaacatggttgtcccartcttgtggcaaaatccccaggattacactctggagatcttctgtacctctagagtccgctgttcatgcaagcttctgctttgatccagttggactgcacagcccaagaatgcatgactcaacataagaggatgagcaaaggacgagccatgataagcagcagcccaatgatacctttttttcttaatacccacatcacacaatgcattacagtacagctcagcctacacatgtgaacaacacaggataagctacaggccctacaatgacggagatattgccctttggtttgaatggaaat

SEQ ID NO: 40936 - DNA, 553 bp, Chicken  19866894276135_10
accaaccccatatttaatcaaaacattttgttttgttccatttgtaaccatttccatccagtgaacaaatattttagcaacaaaaatgacagctcccttccatggacaaaaacatgagaattcacatcaactgccctacaatgccacagtgaaggtgacatatttttaatgatgtgttgaaattttctttacttctattccagtatttctttactaaaggcatcaatttaagattaacaatccattgtactcagtgctggagggttttgctggggtggtggtgggaaaacgaacaacttrtgagaaaaagagctgaagtaacacttcatcttaccctgaagtccacgagaacatgactgaaaatgcccacagcgctctgattggaacagatgaatgccaacctgaatgcctgggggagctacttatgttgccagctatgctgataccatgcagttttattggaaacactacttttcaactactgaaaagaaggaaacaggaaaaaaatccccattcctgtacaggactgctcacacttaaaaacaatcacaaa

SEQ ID NO: 40937 - DNA, 600 bp, Chicken  19866894276135_2
tcatgcaagcttctgctttgatccagttggactgcacagcccaagaatgcatgactcaacataagaggatgagcaaaggacgagccatgataagcagcagcccaatgatacctttttttcttaatacccacatcacacaatgcattacagtacagctcagcctacacatgtgaacaacacaggataagctacaggccctacaatgacggagatattgccctttggtttgaatggaaatctggagttttcaggcaattacaattagtaaggatcacacagtattcactgaataacagagaygttaatrtttgcatccagaccaaattccacctcagaccayctcctgccctatgttttcagctggatacactgcttttcattatgtctcaaacttctgactgagagtgaggcattttctttaatgatgttaagacaagatctacataatccacaaagmattccatgtaggaaatgggaagcactatatagatgtgaaagtgaatgttttcacgctttcttttaggaaagagaagagacggaacccactgaacttctctctgtgggacttatgctgtggtcttgatcctgaaaagacagaaa

SEQ ID NO: 40938 - DNA, 600 bp, Chicken  19866894276135_3
agcttctgctttgatccagttggactgcacagcccaagaatgcatgactcaacataagaggatgagcaaaggacgagccatgataagcagcagcccaatgatacctttttttcttaatacccacatcacacaatgcattacagtacagctcagcctacacatgtgaacaacacaggataagctacaggccctacaatgacggagatattgccctttggtttgaatggaaatctggagttttcaggcaattacaattagtaaggatcacacagtattcactgaataacagagaygttaatrtttgcatccagaccaaattccacctcagaccayctcctgccctatgttttcagctggatacactgcttttcattatgtctcaaacttctgactgagagtgaggcattttctttaatgatgttaagacaagatctacataatccacaaagmattccatgtaggaaatgggaagcactatatagatgtgaaagtgaatgttttcacgctttcttttaggaaagagaagagacggaacccactgaacttctctctgtgggacttatgctgtggtcttgatcctgaaaagacagaaaaacagtg

SEQ ID NO: 40939 - DNA, 600 bp, Chicken  19866894276135_4
ccaagaatgcatgactcaacataagaggatgagcaaaggacgagccatgataagcagcagcccaatgatacctttttttcttaatacccacatcacacaatgcattacagtacagctcagcctacacatgtgaacaacacaggataagctacaggccctacaatgacggagatattgccctttggtttgaatggaaatctggagttttcaggcaattacaattagtaaggatcacacagtattcactgaataacagagaygttaatrtttgcatccagaccaaattccacctcagaccayctcctgccctatgttttcagctggatacactgcttttcattatgtctcaaacttctgactgagagtgaggcattttctttaatgatgttaagacaagatctacataatccacaaagmattccatgtaggaaatgggaagcactatatagatgtgaaagtgaatgttttcacgctttcttttaggaaagagaagagacggaacccactgaacttctctctgtgggacttatgctgtggtcttgatcctgaaaagacagaaaaacagtggttttcctccgaaggaagttttttaggtagttt

SEQ ID NO: 40940 - DNA, 600 bp, Chicken  19866894276135_5
cagcctacacatgtgaacaacacaggataagctacaggccctacaatgacggagatattgccctttggtttgaatggaaatctggagttttcaggcaattacaattagtaaggatcacacagtattcactgaataacagagaygttaatrtttgcatccagaccaaattccacctcagaccayctcctgccctatgttttcagctggatacactgcttttcattatgtctcaaacttctgactgagagtgaggcattttctttaatgatgttaagacaagatctacataatccacaaagmattccatgtaggaaatgggaagcactatatagatgtgaaagtgaatgttttcacgctttcttttaggaaagagaagagacggaacccactgaacttctctctgtgggacttatgctgtggtcttgatcctgaaaagacagaaaaacagtggttttcctccgaaggaagttttttaggtagttttgatgcatttatctacagctgcctctcttgtatgaaccgaaccctctttttaacctctgtgttggctacataagcagagtacccacaaggacctatagacacatctagaagaagagt

SEQ ID NO: 40941 - DNA, 600 bp, Chicken  19866894276135_6
tgctttgcacatgcagaaacaacctagaatcagtaaatctggtttgcagcaaaaagccaaagaaatctgagaactgtagaccaacatacttagggtgccagacaggagagcttaggacatattgtacagactatttgtaaagacacgttctcagtgttctgaatccataaataatgtttgctaaaacgtattaggtgccttccccaagggctgtcagaaaaaaagaaagaaccagaccagaaggagcttaggcacattccagtttggggaggagaaagaggttgcagagacatctctagsagacttatcatagtacctgtatgatatgtttgccttttcttacccagagggcaggcgctggggaaatatgattccttgctctgacaacagtggggtttgaatactgtatggatacaaacagcgctctctcctgttcgagccactcctgacaaggtatcttgagccggattgacggcagccagaggggtttctggcagctgctcatatcccagggaagtgacaggtatgtgaactcatcacatcaaaccctggagaaaagcagaragaacaaggaaagtgtttggatctgtgcaaactaat

SEQ ID NO: 40942 - DNA, 600 bp, Chicken  19866894276135_7
tggggaggagaaagaggttgcagagacatctctagsagacttatcatagtacctgtatgatatgtttgccttttcttacccagagggcaggcgctggggaaatatgattccttgctctgacaacagtggggtttgaatactgtatggatacaaacagcgctctctcctgttcgagccactcctgacaaggtatcttgagccggattgacggcagccagaggggtttctggcagctgctcatatcccagggaagtgacaggtatgtgaactcatcacatcaaaccctggagaaaagcagaragaacaaggaaagtgtttggatctgtgcaaactaatcttgttccatccttatttacaaagttgatccaggccaaagcatcacctcttcaatccaaacaaaaaaatcactacacagagagcacagagagtctgccagtgtccytattgtgtgcctgtacgggtctcaaagcactcagaaataaatggatcatgataataaaggagaatcatctttgccttatcatcatatgctcagtaactcccatgaaaccttaagaaactccccctgctgcttccccaaacgcctatgcctcagcccca

SEQ ID NO: 40943 - DNA, 600 bp, Chicken  19866894276135_8
tatggatacaaacagcgctctctcctgttcgagccactcctgacaaggtatcttgagccggattgacggcagccagaggggtttctggcagctgctcatatcccagggaagtgacaggtatgtgaactcatcacatcaaaccctggagaaaagcagaragaacaaggaaagtgtttggatctgtgcaaactaatcttgttccatccttatttacaaagttgatccaggccaaagcatcacctcttcaatccaaacaaaaaaatcactacacagagagcacagagagtctgccagtgtccytattgtgtgcctgtacgggtctcaaagcactcagaaataaatggatcatgataataaaggagaatcatctttgccttatcatcatatgctcagtaactcccatgaaaccttaagaaactccccctgctgcttccccaaacgcctatgcctcagccccaggctcarttacccctttaatcctgtgcaggaggtccaagatcaaagttggtgggaaatggtttcattgcagctgttcccagcaccattcctggaatttggacagttttcattcttcggccgtgggatagccagttctgacac

SEQ ID NO: 40944 - DNA, 600 bp, Chicken  19866894276135_9
ggaaagtgtttggatctgtgcaaactaatcttgttccatccttatttacaaagttgatccaggccaaagcatcacctcttcaatccaaacaaaaaaatcactacacagagagcacagagagtctgccagtgtccytattgtgtgcctgtacgggtctcaaagcactcagaaataaatggatcatgataataaaggagaatcatctttgccttatcatcatatgctcagtaactcccatgaaaccttaagaaactccccctgctgcttccccaaacgcctatgcctcagccccaggctcarttacccctttaatcctgtgcaggaggtccaagatcaaagttggtgggaaatggtttcattgcagctgttcccagcaccattcctggaatttggacagttttcattcttcggccgtgggatagccagttctgacacttcagtgtcagctcttgggtttggcacaaattaggaactggagtctgcctcctgaaaactcctctgctctgtagaagcaccctggggggctacatggttaaatggtgcttgccccatgggtagtaatatttcagtgccaaagggagagattcctatgcaatcgtg

SEQ ID NO: 40945 - DNA, 600 bp, Chicken  19866894276136_1
ttggtgtccaccaggacctggagctccttttttgctgctttctagccagtctgcccccagcaagtgctggttcactgtgttattcctccccaggtgcaggccgtagcacttccctcagtggaatttatgggatccctctcagctcatcttttctcctgcctgtccaagtccttctggcagtacacatctgtcaatcaaccactcctccctcttttgtaataagagcaaagaaaatgctcttataacactctaatagctgaaattcatctttatgatgcctctcatttctcaaaaatagcrttcagtttttctgcatgctcttttgggtgtttgtcttatagaaggaatgcagaaacccaggtcagggttacaagctataaatatgttttatagggtctttcactgcacaggggggctaagtgtgttctatctcatataattgataccaggaaatatattctttttcccagtaattcttgtttcaaaagtaacactgaatctttgataaagtcctgcaggttcaaatgaacttggtagagaccaggaaaaagagatattggcattaatctttagtctttctagaaacagtgaatgtttgaa

SEQ ID NO: 40946 - DNA, 600 bp, Chicken  19866894276141_1
ttatcctcataaaaattccccctgcaggcttcaatgcagatgtgaggaattccacatcggattaacagggtgaccaacagtgagggacaaaggagttgatgtatctgaaagtttccagtggaattttgatctgaggcttgttgcaaacgtttaatcctaactcatcaactccagaatttattgagtcaatgcttcttgcttttcttcctcagggacaacagtgtaccactacctgagtttatatacttatgcagacacacgcacgtgaatcaagtactgctgggtaggtgatgaatggarmaatgcaatactgactgcagagccaaaacttgtgtctgctgtcatttaaatgcttttaagcatttgggaaagatgtttctcatagggaagttagtatacaaaacttttttgaagcaatttatctgctctatttcctcttttcctccccagatccctgtgcttacatgctgttaatgttcgggcmtgcagctacacgttaggatgagagggaatggcctcaagttgtatcaggggaggttcaggttggatattaggaaaaacttgtcgagagtggtgaggcagtggcacaggctgcacagg

SEQ ID NO: 40947 - DNA, 600 bp, Chicken  19866894276141_2
tatcctcataaaaattccccctgcaggcttcaatgcagatgtgaggaattccacatcggattaacagggtgaccaacagtgagggacaaaggagttgatgtatctgaaagtttccagtggaattttgatctgaggcttgttgcaaacgtttaatcctaactcatcaactccagaatttattgagtcaatgcttcttgcttttcttcctcagggacaacagtgtaccactacctgagtttatatacttatgcagacacacgcacgtgaatcaagtactgctgggtaggtgatgaatggarmaatgcaatactgactgcagagccaaaacttgtgtctgctgtcatttaaatgcttttaagcatttgggaaagatgtttctcatagggaagttagtatacaaaacttttttgaagcaatttatctgctctatttcctcttttcctccccagatccctgtgcttacatgctgttaatgttcgggcmtgcagctacacgttaggatgagagggaatggcctcaagttgtatcaggggaggttcaggttggatattaggaaaaacttgtcgagagtggtgaggcagtggcacaggctgcacaggg

SEQ ID NO: 40948 - DNA, 588 bp, Chicken  19866894276141_3
gtcaatgcttcttgcttttcttcctcagggacaacagtgtaccactacctgagtttatatacttatgcagacacacgcacgtgaatcaagtactgctgggtaggtgatgaatggarmaatgcaatactgactgcagagccaaaacttgtgtctgctgtcatttaaatgcttttaagcatttgggaaagatgtttctcatagggaagttagtatacaaaacttttttgaagcaatttatctgctctatttcctcttttcctccccagatccctgtgcttacatgctgttaatgttcgggcmtgcagctacacgttaggatgagagggaatggcctcaagttgtatcaggggaggttcaggttggatattaggaaaaacttgtcgagagtggtgaggcagtggcacaggctgcacagggaggtgggggagtcaccgtccctggaggtgttcaagacgtgtaggtgtggcactgagggatgtggttattgggctggtggggttgggttagggtgaccttagaggtcttttccaatcttaaagattctatatccatttaggaaatgtatttaaaaaaaaaaaaaagtgccat

SEQ ID NO: 40949 - DNA, 599 bp, Chicken  19866894276146_1
  misc_feature (1)..(70): n is any nucleotide
nnnnnnnnnnnnnnnnnnnnnnnnnnnnnnnnnnnnnnnnnnnnnnnnnnnnnnnnnnnnnnnnnnnnnnacacttgggatttggattttatgctgtgccttctgtcagtgataatggattgtgaagagcaccaggaggttaacttatttttacactcataaggaatacattttctgtgttactttcttatatatggcgttgttatctgcgtgacaggaccgtgtttcttacctggccatacaaattatgatagcttttgtcagctcatcttagagattatacaagctcgtgtgtctacwtctatgttcatatgttgcagctttasaaaaatgtttaggaagtggaattttttcttccrgatctaattaattgttatggtcttcatgtgtaacgtgagcattcccacaggcaggtgcatawgcttcccatttgtagtgcctttagtttgctgcctgcctaaccccatgaaattcctacacagagttatataccatggcacgctgatatgacctaagtttggcctgcctggcatcctctgaagtgagtaatggccttattcctgctttttgttgttgctgagggaaccaagggctggtgg

SEQ ID NO: 40950 - DNA, 599 bp, Chicken  19866894276146_2
  misc_feature (1)..(44): n is any nucleotide
nnnnnnnnnnnnnnnnnnnnnnnnnnnnnnnnnnnnnnnnnnnnacacttgggatttggattttatgctgtgccttctgtcagtgataatggattgtgaagagcaccaggaggttaacttatttttacactcataaggaatacattttctgtgttactttcttatatatggcgttgttatctgcgtgacaggaccgtgtttcttacctggccatacaaattatgatagcttttgtcagctcatcttagagattatacaagctcgtgtgtctacwtctatgttcatatgttgcagctttasaaaaatgtttaggaagtggaattttttcttccrgatctaattaattgttatggtcttcatgtgtaacgtgagcattcccacaggcaggtgcatawgcttcccatttgtagtgcctttagtttgctgcctgcctaaccccatgaaattcctacacagagttatataccatggcacgctgatatgacctaagtttggcctgcctggcatcctctgaagtgagtaatggccttattcctgctttttgttgttgctgagggaaccaagggctggtgggttcaagagagcacagtggggaggca

SEQ ID NO: 40951 - DNA, 599 bp, Chicken  19866894276146_3
  misc_feature (1)..(11): n is any nucleotide
nnnnnnnnnnnacacttgggatttggattttatgctgtgccttctgtcagtgataatggattgtgaagagcaccaggaggttaacttatttttacactcataaggaatacattttctgtgttactttcttatatatggcgttgttatctgcgtgacaggaccgtgtttcttacctggccatacaaattatgatagcttttgtcagctcatcttagagattatacaagctcgtgtgtctacwtctatgttcatatgttgcagctttasaaaaatgtttaggaagtggaattttttcttccrgatctaattaattgttatggtcttcatgtgtaacgtgagcattcccacaggcaggtgcatawgcttcccatttgtagtgcctttagtttgctgcctgcctaaccccatgaaattcctacacagagttatataccatggcacgctgatatgacctaagtttggcctgcctggcatcctctgaagtgagtaatggccttattcctgctttttgttgttgctgagggaaccaagggctggtgggttcaagagagcacagtggggaggcagcagyacatctctcacttgtggggctttgctct

SEQ ID NO: 40952 - DNA, 600 bp, Chicken  19866894276146_4
gtgaagagcaccaggaggttaacttatttttacactcataaggaatacattttctgtgttactttcttatatatggcgttgttatctgcgtgacaggaccgtgtttcttacctggccatacaaattatgatagcttttgtcagctcatcttagagattatacaagctcgtgtgtctacwtctatgttcatatgttgcagctttasaaaaatgtttaggaagtggaattttttcttccrgatctaattaattgttatggtcttcatgtgtaacgtgagcattcccacaggcaggtgcatawgcttcccatttgtagtgcctttagtttgctgcctgcctaaccccatgaaattcctacacagagttatataccatggcacgctgatatgacctaagtttggcctgcctggcatcctctgaagtgagtaatggccttattcctgctttttgttgttgctgagggaaccaagggctggtgggttcaagagagcacagtggggaggcagcagyacatctctcacttgtggggctttgctctctcagcccatcagttcttcctgctcgtctcctgggtgctcccagggctcctgctaatggtcac

SEQ ID NO: 40953 - DNA, 600 bp, Chicken  19866894276146_5
atgtttaggaagtggaattttttcttccrgatctaattaattgttatggtcttcatgtgtaacgtgagcattcccacaggcaggtgcatawgcttcccatttgtagtgcctttagtttgctgcctgcctaaccccatgaaattcctacacagagttatataccatggcacgctgatatgacctaagtttggcctgcctggcatcctctgaagtgagtaatggccttattcctgctttttgttgttgctgagggaaccaagggctggtgggttcaagagagcacagtggggaggcagcagyacatctctcacttgtggggctttgctctctcagcccatcagttcttcctgctcgtctcctgggtgctcccagggctcctgctaatggtcacagagcaggcttctcttctcgctcagaaatcacatgtctacccttctccaaattagcagttttcaggtgtcccgcaggaygctcggccgaaaatagtctgaacgcttctcctgttttattttgcttgccagctttcatgcatgtacacaggctccagtgaggcatcaatctgaacgttactgtccttcacttaaacgagattccatctgt

SEQ ID NO: 40954 - DNA, 446 bp, Chicken  19866894276146_6
gctgatatgacctaagtttggcctgcctggcatcctctgaagtgagtaatggccttattcctgctttttgttgttgctgagggaaccaagggctggtgggttcaagagagcacagtggggaggcagcagyacatctctcacttgtggggctttgctctctcagcccatcagttcttcctgctcgtctcctgggtgctcccagggctcctgctaatggtcacagagcaggcttctcttctcgctcagaaatcacatgtctacccttctccaaattagcagttttcaggtgtcccgcaggaygctcggccgaaaatagtctgaacgcttctcctgttttattttgcttgccagctttcatgcatgtacacaggctccagtgaggcatcaatctgaacgttactgtccttcacttaaacgagattccatctgtggtagaaatttttgca

SEQ ID NO: 40955 - DNA, 600 bp, Chicken  19866894276150_1
ggtattctagaaggagagatggacctgagcacaatgtcatacatttaaagtgctgacagactgatttagtacttgctgacaacttgggtacacactataatcttgcttcagacactgtgtagagcagtactgtcgaaatagtgtttggaacgtcactcttccagcagtctcagtgacaaacttcagcattaaaatcacatagggcctaagtttctttttaaagagctgaatatagaaggcattgccataagctgtggctgtgccccttttcattttataggcaaatggtttgtggtgttycatagtgttgatatgcatgcaatatagtatgaaatactgaacgttgaatgtaaagtagaaacatccccagatgtgtgtatgattgttgtggtttaactaaggcaaagatttaaaaataaataaataaaaagaggggctgttgcctgtctccagaggctgagatttaagaaggaaagctgactttcttcctgctggagatgaatgctttatgccttatgatgtggaggcccagaagcaggctgtctggggacagagaaaaccagcctagaaggtggtgaatcacagtcaaggatggagagg

SEQ ID NO: 40956 - DNA, 600 bp, Chicken  19866894276159_1
agcttgagcccgctcagcagcgaccggcggaagatgcccttcttcttgctcttgaggatctcagcatcgctgtgggccatgaggacgaagccacctcgggacacggcggggctgccggccaccgccggcgaggagtcggggtgcagggccgtgccattggtgtgttcactgcgcagggagttgatggacgtcctcaggggtgacctgatgaccgcagccatgccgtagggaacgctctgacggacgccgtaaccctggcgcatccctccgacccactggccctggtacgtccctggggargcaaaagcaaagagagggttcaaatttcttctccagaagagttggtgacgcgtcggcacagctgcacagggaggtggtggagccaccgtccctggaggtgttgcagaaccgtgatgtggcactgaggaacgcggtcagtgggcatggcaggatggattgggttggacttggtgaccttagtggtctttttcaatctgagtgattctgtgatgcatcctgtgggtaaggagtagcgtcagcctgcttgggctgttattactgggacctgttattattgggaacatttggacactgtagtgg

SEQ ID NO: 40957 - DNA, 599 bp, Chicken  19866894276169_1
  misc_feature (1)..(78): n is any nucleotide
nnnnnnnnnnnnnnnnnnnnnnnnnnnnnnnnnnnnnnnnnnnnnnnnnnnnnnnnnnnnnnnnnnnnnnnnnnnnnnttgcgagtaatagttgaacatacttgggagtctctggagttagatgttctttgaaatgatcctgggactgtagaacagtacgtgcaatggagaagactgaagtcttttgagtaacaggggttgtaaaggctttcctcattcacttaatgtagtgcagcaaaaaaggcaaatgatctggaagtgtatcagatccaaaaaacatttgtgataaagccatttggrgtttaattctgaaagaaatatatcttactagaaaatgttaggtttgctctattcaaatcttgcattatgcatgtggaacagtatgaaaaactacccaagcttcacttggcagatgtttggtggatatctacttgaatgatgcttgtcaatagagctggcttagaattaatttttgcccacagtttatctaccagcattggatacgctccttaataattcatatagattgctgaatcttagtttttatctccttgcagttagaaatgggcctaattagccacatttagaagtggaccatc

SEQ ID NO: 40958 - DNA, 599 bp, Chicken  19866894276170_1
  misc_feature (1)..(29): n is any nucleotide
nnnnnnnnnnnnnnnnnnnnnnnnnnnnncagatagagtgaaggaaacagcatggctctatgcctgaaagatcaaatcctatttgatttgaagctaattacttgatgctgatactgagatacttcttctagttcagtcatagtgtggtacaatgaatgaagctgacttcttccatcttacgtagttgcagtaccaatttttggccgcttaggtcttgagatgccaaagctgaataggatgagggatttaagttgcctgttgtacattttaaggctgggatagttcattttcttcatattwtctcatatgatgctattttcaatctgtgaccagagcagtgttgagagctgttgctagacaggtcttagtctgtgccaaggccttggatgctggaggtgcacaagaagctgtgaggggacacagccaagacagctgaccccatcagaccaaaagagtgttcctttccatatgacatcatgctcagcaataaagctggacaaaaaagaggagtgagggagaatgttcagagtaatggtgtttgtctcatcaagcagctgctacatgtgttgaacccagttttcctgcaaatggctgaatgt

SEQ ID NO: 40959 - DNA, 600 bp, Chicken  19866894276170_2
agacaggtcttagtctgtgccaaggccttggatgctggaggtgcacaagaagctgtgaggggacacagccaagacagctgaccccatcagaccaaaagagtgttcctttccatatgacatcatgctcagcaataaagctggacaaaaaagaggagtgagggagaatgttcagagtaatggtgtttgtctcatcaagcagctgctacatgtgttgaacccagttttcctgcaaatggctgaatgtctgcccatcagttttctctcttctacctttccagttctctcctccattctgctagkgaaaagtgagcaaatrgtagcatgggccttagctgcctacctatgttaacccacaggaaggtgacggacaagaacatcatcaaaaaggtgaagaaagtgtaaaagcatgttattcttcaaaatgccatagaatcatagaatcacaaggttggaaaggacctacaagatcatctagtccaaccatccttccattaccattactaccacaagttactaaaccatatctcatagcacctcatccagacacctcttgaacactgccaggggtggcgactcccaccacctccctgggcaggccat

SEQ ID NO: 40960 - DNA, 600 bp, Chicken  19866894276170_3
gtgccaaggccttggatgctggaggtgcacaagaagctgtgaggggacacagccaagacagctgaccccatcagaccaaaagagtgttcctttccatatgacatcatgctcagcaataaagctggacaaaaaagaggagtgagggagaatgttcagagtaatggtgtttgtctcatcaagcagctgctacatgtgttgaacccagttttcctgcaaatggctgaatgtctgcccatcagttttctctcttctacctttccagttctctcctccattctgctagkgaaaagtgagcaaatrgtagcatgggccttagctgcctacctatgttaacccacaggaaggtgacggacaagaacatcatcaaaaaggtgaagaaagtgtaaaagcatgttattcttcaaaatgccatagaatcatagaatcacaaggttggaaaggacctacaagatcatctagtccaaccatccttccattaccattactaccacaagttactaaaccatatctcatagcacctcatccagacacctcttgaacactgccaggggtggcgactcccaccacctccctgggcaggccattccggtgcctgaccac

SEQ ID NO: 40961 - DNA, 600 bp, Chicken  19866894276170_4
cccacaggaaggtgacggacaagaacatcatcaaaaaggtgaagaaagtgtaaaagcatgttattcttcaaaatgccatagaatcatagaatcacaaggttggaaaggacctacaagatcatctagtccaaccatccttccattaccattactaccacaagttactaaaccatatctcatagcacctcatccagacacctcttgaacactgccaggggtggcgactcccaccacctccctgggcaggccattccggtgcctgaccactctctgatagaaaaagttcttccttatgtccartctaaaccacctctggtacaacttgtggccatttccttgggtcctgyttgttgcctgggagaagaggccaaacccctcctcatcacatcctctcttyaggaagttgtgcttcccatctttggaaaattccacrgaaaaagaagatatctttaaataatagaggagccctgttgctccaatccatgagagatttaagtaatagagaggacaatgtgatggctttgaacatgtcagaaaaggctgatcaaagttgcaatggtgtgaggttatcccagagagcagtattagccattcttgcac

SEQ ID NO: 40962 - DNA, 600 bp, Chicken  19866894276170_5
gtgtaaaagcatgttattcttcaaaatgccatagaatcatagaatcacaaggttggaaaggacctacaagatcatctagtccaaccatccttccattaccattactaccacaagttactaaaccatatctcatagcacctcatccagacacctcttgaacactgccaggggtggcgactcccaccacctccctgggcaggccattccggtgcctgaccactctctgatagaaaaagttcttccttatgtccartctaaaccacctctggtacaacttgtggccatttccttgggtcctgyttgttgcctgggagaagaggccaaacccctcctcatcacatcctctcttyaggaagttgtgcttcccatctttggaaaattccacrgaaaaagaagatatctttaaataatagaggagccctgttgctccaatccatgagagatttaagtaatagagaggacaatgtgatggctttgaacatgtcagaaaaggctgatcaaagttgcaatggtgtgaggttatcccagagagcagtattagccattcttgcacaagcagaaaacttttcctcagttgattcctgaaaccaaataagaaat

SEQ ID NO: 40963 - DNA, 600 bp, Chicken  19866894276170_6
ggttggaaaggacctacaagatcatctagtccaaccatccttccattaccattactaccacaagttactaaaccatatctcatagcacctcatccagacacctcttgaacactgccaggggtggcgactcccaccacctccctgggcaggccattccggtgcctgaccactctctgatagaaaaagttcttccttatgtccartctaaaccacctctggtacaacttgtggccatttccttgggtcctgyttgttgcctgggagaagaggccaaacccctcctcatcacatcctctcttyaggaagttgtgcttcccatctttggaaaattccacrgaaaaagaagatatctttaaataatagaggagccctgttgctccaatccatgagagatttaagtaatagagaggacaatgtgatggctttgaacatgtcagaaaaggctgatcaaagttgcaatggtgtgaggttatcccagagagcagtattagccattcttgcacaagcagaaaacttttcctcagttgattcctgaaaccaaataagaaatcaagaatagctcttctgcttttgtgctcccaagcaacatattcatgaaaa

SEQ ID NO: 40964 - DNA, 600 bp, Chicken  19866894276170_7
atccttccattaccattactaccacaagttactaaaccatatctcatagcacctcatccagacacctcttgaacactgccaggggtggcgactcccaccacctccctgggcaggccattccggtgcctgaccactctctgatagaaaaagttcttccttatgtccartctaaaccacctctggtacaacttgtggccatttccttgggtcctgyttgttgcctgggagaagaggccaaacccctcctcatcacatcctctcttyaggaagttgtgcttcccatctttggaaaattccacrgaaaaagaagatatctttaaataatagaggagccctgttgctccaatccatgagagatttaagtaatagagaggacaatgtgatggctttgaacatgtcagaaaaggctgatcaaagttgcaatggtgtgaggttatcccagagagcagtattagccattcttgcacaagcagaaaacttttcctcagttgattcctgaaaccaaataagaaatcaagaatagctcttctgcttttgtgctcccaagcaacatattcatgaaaataatggtttaacatggtagagatgtctgtgagcctt

SEQ ID NO: 40965 - DNA, 600 bp, Chicken  19866894276171_1
cagttggtctttaacgatgaagaccaagacttaattcagttacatataaggcttctctagcttgtgtgggtagggtggacaggggaatggctcactgagcagttggtgacatccatccagctcctctgaggggagtggttgcttccaccatgtcccctagcaaagccaaagcaataagagtaccacttggagactttgacagctcagaacttaaaaagatgatttcctggagggcttggctgttgcccatataaacatggttcatttgccagtaagtatatgatgataattatagataaygaaggctacaaatgagttagccttcytgattagggtgccacaaagtcattttcttttaagcagagcactcatttgatgttcccaatgcttgggatttataatggccttaaaaagcaaaagcagatgagatctattgagtcaagagtggattgtggctcgagtgtaattaaagacagaagattgagtgagcaaagcccaaagtgcccaggagcaggcagacaaagctgatgcactgtgccagatgggaaagggatcagaagtcagctgggtggcttttctttcccccttttctgggaaggg

SEQ ID NO: 40966 - DNA, 600 bp, Chicken  19866894276171_2
agacttaattcagttacatataaggcttctctagcttgtgtgggtagggtggacaggggaatggctcactgagcagttggtgacatccatccagctcctctgaggggagtggttgcttccaccatgtcccctagcaaagccaaagcaataagagtaccacttggagactttgacagctcagaacttaaaaagatgatttcctggagggcttggctgttgcccatataaacatggttcatttgccagtaagtatatgatgataattatagataaygaaggctacaaatgagttagccttcytgattagggtgccacaaagtcattttcttttaagcagagcactcatttgatgttcccaatgcttgggatttataatggccttaaaaagcaaaagcagatgagatctattgagtcaagagtggattgtggctcgagtgtaattaaagacagaagattgagtgagcaaagcccaaagtgcccaggagcaggcagacaaagctgatgcactgtgccagatgggaaagggatcagaagtcagctgggtggcttttctttcccccttttctgggaagggagttatccaaagccttatctaccctg

SEQ ID NO: 40967 - DNA, 600 bp, Chicken  19866894276171_3
cttccaccatgtcccctagcaaagccaaagcaataagagtaccacttggagactttgacagctcagaacttaaaaagatgatttcctggagggcttggctgttgcccatataaacatggttcatttgccagtaagtatatgatgataattatagataaygaaggctacaaatgagttagccttcytgattagggtgccacaaagtcattttcttttaagcagagcactcatttgatgttcccaatgcttgggatttataatggccttaaaaagcaaaagcagatgagatctattgagtcyagagtggattgtggctcgagtgtaattaaagacagaagattgagtgagcaaagcccaaagtgcccaggagcaggcagacaaagctgatgcactgtgccagatgggaaagggatcagaagtcagctgggtggcttttctttcccccttttctgggaagggagttatccaaagccttatctaccctgctggtgttagaaggtgaatggtgatgtgtggatgtgggcaggagaattctcggtctgttctggttattcttaaaaataaaaataacaaaaaacccaccataatactaaatctttg

SEQ ID NO: 40968 - DNA, 600 bp, Chicken  19866894276171_4
ttccaccatgtcccctagcaaagccaaagcaataagagtaccacttggagactttgacagctcagaacttaaaaagatgatttcctggagggcttggctgttgcccatataaacatggttcatttgccagtaagtatatgatgataattatagataaygaaggctacaaatgagttagccttcytgattagggtgccacaaagtcattttcttttaagcagagcactcatttgatgttcccaatgcttgggatttataatggccttaaaaagcaaaagcagatgagatctattgagtcaygagtggattgtggctcgagtgtaattaaagacagaagattgagtgagcaaagcccaaagtgcccaggagcaggcagacaaagctgatgcactgtgccagatgggaaagggatcagaagtcagctgggtggcttttctttcccccttttctgggaagggagttatccaaagccttatctaccctgctggtgttagaaggtgaatggtgatgtgtggatgtgggcaggagaattctcggtctgttctggttattcttaaaaataaaaataacaaaaaacccaccataatactaaatctttgc

SEQ ID NO: 40969 - DNA, 600 bp, Chicken  19866894276177_1
tgttacacttttgtgatcatctttgacagaagtgaagaaaacggtgattaaaagccatttaaaatgtttcatctctctcatcaagtttaatgaaaagaaaatgtatagaaaatcttcctcacaaagctggaaagctggatgggaattgctttagatagctgattaaaaaagaggttgttaaagggcagacatataggacacaaagccaggataaagagaaacctcttactgctgtgagtggatacttcagagaaaagatggctcaaatcataaaaaacagtttcagatctcattttagayccartcttcttcagatgtcctggtgaggcattggaacaggctgcccagtgaagcgatggaatcaccatcccagagattttcaagaaacgtgtagatatcactacatgtgtgtagtgatgcgtgacatggtttagtggtattgtggtggtgggttcatggttggactggatggtttcagcagtctttccaacctttatgattctatgattttatgaaataaactaaagaacaaacttgtttctggctgcagaaccatcctcttgcaccctaatgcagagccaaaattctagaattacaccg

SEQ ID NO: 40970 - DNA, 600 bp, Chicken  19866894276177_2
acacttttgtgatcatctttgacagaagtgaagaaaacggtgattaaaagccatttaaaatgtttcatctctctcatcaagtttaatgaaaagaaaatgtatagaaaatcttcctcacaaagctggaaagctggatgggaattgctttagatagctgattaaaaaagaggttgttaaagggcagacatataggacacaaagccaggataaagagaaacctcttactgctgtgagtggatacttcagagaaaagatggctcaaatcataaaaaacagtttcagatctcattttagayccartcttcttcagatgtcctggtgaggcattggaacaggctgcccagtgaagcgatggaatcaccatcccagagattttcaagaaacgtgtagatatcactacatgtgtgtagtgatgcgtgacatggtttagtggtattgtggtggtgggttcatggttggactggatggtttcagcagtctttccaacctttatgattctatgattttatgaaataaactaaagaacaaacttgtttctggctgcagaaccatcctcttgcaccctaatgcagagccaaaattctagaattacaccgtgat

SEQ ID NO: 40971 - DNA, 441 bp, Chicken  19866894276178_1
ttgacatgagagcatggaggcaaaaattatcacgtgagggcagattaaatcgatttttgtgagaagaggtattaattaatgagttgtgggcagtgcaattagttgactcattaaagcccagtgtatctgaagtcagtttccagaatgaagataacacatgcagtaaacttgttcccttgagattatacttaaggctttgataaccactgcctggttgaatgagatgcagccatgtttagagaaccccaaataccagatcaaactgtactaccaaaattctcatcccagatacacattaamcagcactccctgtggagactggaagttatgcatatttaaactcaagcttaaagctgcttagattggatgtgaaggttctacatccatgggaaaatatagttatgttttttgtgggtaattaaaatcaagaagcggtcagtt

SEQ ID NO: 40972 - DNA, 600 bp, Chicken  19866894276183_1
ggattctttgctctacttctgtttcctacaggcatttagctgcttttactgtactcctcctttataggattgatattatcttaaagttgtctaactagtgttttcctatgaacgtgggattggtaaaactagttagtagctctgcccctactacctttcttgatctgctcatttcctgtgttaagaatcagtatgattgattaaaggtgcacagttttaagtacatgcaacttatataaattgttctgaagtagcctgaagacctaagagttagttcttgaatgagcagcaggtatgtastgcttcatatctgtagcctttaacaagcatgcatcataaagattgttggaaagagtttacaccccagtaatgttttgactaccgaaatactgacatatacttccacaaactgtgtgacctactcactagaagtcccacagtaaatctcccatgtctctttcagttgttagtgaaccttacaaatcttgtaaccttttttgactgttgtcttttgacttccttaacctttattaaactaaattagtgataaaattacatggggttcagcatgttagcacctagctggtactgagggaaggt

SEQ ID NO: 40973 - DNA, 600 bp, Chicken  19866894276184_1
gttttgagatttgaaagcatgtgttattggagtcacactttttaaatatattccaaggtagcagaattgattggccaactcatttgtctttcagaatgcatcttgccctgtgaatgcgtatctctctgagctgaagcagtgactgtccccctgcccataccaatggctgctccatccatacaactcaaccctcctcctcctgttgacaaaatctgagcagtcatggtgtaaacatctgaatttctggtttgctaaactggaagaaatgagactcaactctccctcctcttgaattctgcmctttcttgtttggactttgagtactgagtgtagaaaatgcttcatgagcaagcccataatcccctattcttttccaccagcatttctgcacagtgctttcactctctatctcccagaaatcaagactaaaaggcaaatgtcgcagatgaagtcagaaggaccatgggtgaatgtggagtggtctgattatgtgatggatatgtgggaaggtgtttcatatgggtcacacttggtgaaggtaatttccatcttgctgccaagattcagagcagaaatgctcagaaacttctaaaatcaatg

SEQ ID NO: 40974 - DNA, 600 bp, Chicken  19866894276184_2
atagcttggagtgtttggtctcagggatgcaatttttggctggtagaaagccttactagaagttgcagaggacatgagggggacaacatcagcatgaaaacgctgactgctttcttccagcacttaaaaacatgttctttgataggtggtgatcaccaatggggccacgtgtgtttggcttttccctcacccacacactggagtgttggatgatctcaaccctgagacacagagaagcatgggagatctcatgtaggagcccttgctggaaatcccatatctgtgtcctttctaccacargggaaaggaatttagcactgggctcatggtgggctmtgggagaggtgaagacatcatttcccatgatagaaaagaccaaaagcaatcagccaggcagctctacttacctgtcgtaagagaaggtgcctccaggaaggactctgatgatgtcatccaygtggtcatgctctgggttttgttggacatttcttcctggttttcaccatccctttgagagtgtttttgaggctgaaaatacccttggagatgcctcttgaattcaattgcttccaggcctgtggatttaattgctgggtcagt

SEQ ID NO: 40975 - DNA, 600 bp, Chicken  19866894276184_3
tggctggtagaaagccttactagaagttgcagaggacatgagggggacaacatcagcatgaaaacgctgactgctttcttccagcacttaaaaacatgttctttgataggtggtgatcaccaatggggccacgtgtgtttggcttttccctcacccacacactggagtgttggatgatctcaaccctgagacacagagaagcatgggagatctcatgtaggagcccttgctggaaatcccatatctgtgtcctttctaccacargggaaaggaatttagcactgggctcatggtgggctmtgggagaggtgaagacatcatttcccatgatagaaaagaccaaaagcaatcagccaggcagctctacttacctgtcgtaagagaaggtgcctccaggaaggactctgatgatgtcatccaygtggtcatgctctgggttttgttggacatttcttcctggttttcaccatccctttgagagtgtttttgaggctgaaaatacccttggagatgcctcttgaattcaattgcttccaggcctgtggatttaattgctgggtcagtgatgatgaaatctggcaccacagtttgacagctgag

SEQ ID NO: 40976 - DNA, 600 bp, Chicken  19866894276184_4
aatggggccacgtgtgtttggcttttccctcacccacacactggagtgttggatgatctcaaccctgagacacagagaagcatgggagatctcatgtaggagcccttgctggaaatcccatatctgtgtcctttctaccacargggaaaggaatttagcactgggctcatggtgggctmtgggagaggtgaagacatcatttcccatgatagaaaagaccaaaagcaatcagccaggcagctctacttacctgtcgtaagagaaggtgcctccaggaaggactctgatgatgtcatccaygtggtcatgctctgggttttgttggacatttcttcctggttttcaccatccctttgagagtgtttttgaggctgaaaatacccttggagatgcctcttgaattcaattgcttccaggcctgtggatttaattgctgggtcagtgatgatgaaatctggcaccacagtttgacagctgagctctcttgcttagaaaataattgtagttcaacaaaatgacttctagtatgggagaaaagtcacaactcagtgttgcacctgcaaaaactcacagmtcacaggtatggcttcaagttaggam

SEQ ID NO: 40977 - DNA, 600 bp, Chicken  19866894276184_5
ggaaggactctgatgatgtcatccaygtggtcatgctctgggttttgttggacatttcttcctggttttcaccatccctttgagagtgtttttgaggctgaaaatacccttggagatgcctcttgaattcaattgcttccaggcctgtggatttaattgctgggtcagtgatgatgaaatctggcaccacagtttgacagctgagctctcttgcttagaaaataattgtagttcaacaaaatgacttctagtatgggagaaaagtcacaactcagtgttgcacctgcaaaaactcacagmtcacaggtatggcttcaagttaggamaccattttccaaatcatacacgctctagagaagggcaagaacttatggacagatcatactgtctcctgtcttctcaaggaaggctggaatatgataaacttactcagaataaaggctggttttaaaggaagctgttcccaaggagtgtggtggaactcattggtacctccatggctgcgttcacagcatcacttgggatggagttctgatcaaagctataattaaaggtctgtggaactgtagcatcttcacaatgtggatacactgaagcatt

SEQ ID NO: 40978 - DNA, 600 bp, Chicken  19866894276184_6
gtggtcatgctctgggttttgttggacatttcttcctggttttcaccatccctttgagagtgtttttgaggctgaaaatacccttggagatgcctcttgaattcaattgcttccaggcctgtggatttaattgctgggtcagtgatgatgaaatctggcaccacagtttgacagctgagctctcttgcttagaaaataattgtagttcaacaaaatgacttctagtatgggagaaaagtcacaactcagtgttgcacctgcaaaaactcacagmtcacaggtatggcttcaagttaggamaccattttccaaatcatacacgctctagagaagggcaagaacttatggacagatcatactgtctcctgtcttctcaaggaaggctggaatatgataaacttactcagaataaaggctggttttaaaggaagctgttcccaaggagtgtggtggaactcattggtacctccatggctgcgttcacagcatcacttgggatggagttctgatcaaagctataattaaaggtctgtggaactgtagcatcttcacaatgtggatacactgaagcattgagctgtgccagtcttcttgttggat

SEQ ID NO: 40979 - DNA, 600 bp, Chicken  19866894276184_7
gctttgctttctagatacagagcaggagagggggaagcagagtttggaaaggactatattgttcctaatgtaattgggaatgtcccatgccaagggagtccccagctgctctgtgtgtctgcaattacattggctcagtacaactagagcaaggttgctgccaagcagctcagctattttcttgacccatctctctgttcagtaagtccctggctttgtgaaatgctctgatttcatatactatgaaacaatgtgctatgaaggctaaacaacaacaactacaacaacaacaaccagttrtggaggaaaaaawtaaagcaaatcmattcctggagaagatacattcattttagaggcaagttgctgctcatcctttgattatgcctgtttcaagcactgaacaggtaggaaaagactaactgccgtggctgcaagaagtgtgtctggtgccatccaagtcagtaatgtcctcgtgttacaaagcccaaagacatcctatgacaatgtacagagtgtaagatacatccacgcataccgtatctggggttggatgcatcaccttgggcactgcccacccagaaagtgactcttctaagtgtc

SEQ ID NO: 40980 - DNA, 600 bp, Chicken  19866894276184_8
gatacagagcaggagagggggaagcagagtttggaaaggactatattgttcctaatgtaattgggaatgtcccatgccaagggagtccccagctgctctgtgtgtctgcaattacattggctcagtacaactagagcaaggttgctgccaagcagctcagctattttcttgacccatctctctgttcagtaagtccctggctttgtgaaatgctctgatttcatatactatgaaacaatgtgctatgaaggctaaacaacaacaactacaacaacaacaaccagttrtggaggaaaaaawtaaagcaaatcmattcctggagaagatacattcattttagaggcaagttgctgctcatcctttgattatgcctgtttcaagcactgaacaggtaggaaaagactaactgccgtggctgcaagaagtgtgtctggtgccatccaagtcagtaatgtcctcgtgttacaaagcccaaagacatcctatgacaatgtacagagtgtaagatacatccacgcataccgtatctggggttggatgcatcaccttgggcactgcccacccagaaagtgactcttctaagtgtcgtttaattcagca

SEQ ID NO: 40981 - DNA, 600 bp, Chicken  19866894276184_9
gagagggggaagcagagtttggaaaggactatattgttcctaatgtaattgggaatgtcccatgccaagggagtccccagctgctctgtgtgtctgcaattacattggctcagtacaactagagcaaggttgctgccaagcagctcagctattttcttgacccatctctctgttcagtaagtccctggctttgtgaaatgctctgatttcatatactatgaaacaatgtgctatgaaggctaaacaacaacaactacaacaacaacaaccagttrtggaggaaaaaawtaaagcaaatcmattcctggagaagatacattcattttagaggcaagttgctgctcatcctttgattatgcctgtttcaagcactgaacaggtaggaaaagactaactgccgtggctgcaagaagtgtgtctggtgccatccaagtcagtaatgtcctcgtgttacaaagcccaaagacatcctatgacaatgtacagagtgtaagatacatccacgcataccgtatctggggttggatgcatcaccttgggcactgcccacccagaaagtgactcttctaagtgtcgtttaattcagcacagaggataagc

SEQ ID NO: 40982 - DNA, 600 bp, Chicken  19866894276187_1
gcatattttgataggaacagtttttatttagtctatttatttttagcacgaactaccaggcagtcataagacagttgccagaaagggttatatttgcaaaaaaccctttcaatatttcattagaataactgatgtatttgatttttcagtccttcccacctcattatttttctctgctcgtggaataatagttgtcaaccaaagagacacttgaaatcatataataatcttagcacagattcactaactgttggatgcctttgagatattttggtatcctacacgtgacttttttttttkgggttgtcttcattttcaatcattcacttgcttgccaaaagttataacggtaaatgacgttgttctcagatgtcacgttttggtacccaggggtactatattttcatttttcctaatgattaatgatatccatgaggaataaaggataacagtatgactggtgctttgatgcatgcatataccaacctcagtactgcagtcccgtggtaatatatttaaaacatgaatgcacagtgcaaacaaaaacttccataaatagaaaggaatttgtgcagggttgctaaaacttcctcatttttt

SEQ ID NO: 40983 - DNA, 600 bp, Chicken  19866894276192_1
ccgtaaggttaggacatgtaggggacatggcaccaccacatgccacctctccaagacaggtgggtgtcacacaaagccccagtgcctgatctgcaagggacacagtccatgggctctgccaccacccctatggaacaccccagccttgggcagcgggtccccatgcccagataagaacacaggcaaccttcatgccacaagggaccagggcacacagtgtggggggcacggtcctacttgggacccatgggtggcaacaaactagcacggccaaaatgggaactgggttctgcagcagtsagagcacagctggctgctgcctcagcacctccatcctctcatcagagtcctcccagacaggcaggatgaggccaccagcctccacctgtgcctccacatcacaactgtcacccccatagccagaagccatcagcacatgagcctctgccccagtgatgccaaggaccccctgatcaccgctccttacccaatgtagttggtcctcaaggaaatctccagctcccggagcacctgtgtcgactcctgcactcgccgcttgaactgggggaatagggacagccaaatggtcactaggctgat

SEQ ID NO: 40984 - DNA, 600 bp, Chicken  19866894276192_2
tgccagcacttggattcactgctccagcctcatgtaccagcagccaccaaccgtgagtggcatttggggacagggccaggagcagggccagcaaggtgccacacggcgctcagacctcacctggtcacagacaagctcccacttcttctcattgtcatactggctgagcagcttcatcttgtccgggggcaggttcatggagctctgtggggagacaggtgtcaggggcacagctgtccccagagtcccctctgggcacgtggtgctccccattcactcagcacccagtgtctctgtttkccggtgggaccatggggacattgctgtccccaggatgtgatcgtgtcaccatcaggcatcacagacccatcagcaatgtccctgtccaagggtgtctgggatccccactgcagagggcacaggagctggaggacaggggatgctgggaggaaaactgaagtcactcctccacatcacaagggcgcaaaactcccagcctcagccagccccggatccctcagtccagcagcaccaccaccttgaatggtgacccaggctgggaatgcagctgagccccgatgggctgagaatgatggagag

SEQ ID NO: 40985 - DNA, 600 bp, Chicken  19866894276193_1
cagggaggctctgctggggatgtggaaggggatgtgggagaaagagaagggttggcataccccactaacccctcttctttccagctgggtccaggagtttctcaatgaggagaacaaggggctggacgtgctgctcgagtacctcgcctttgcccagtgctctgtcgcgtacgtccccgctgccactggcattctgggtgccccttttcccctaatcccctgccctgatgctccgtcactgggctggggtcagcttcctgtcgggctcagaggggctgggtgggcttggggggctctgarcagcccacgttcacagccctggatgtccccatgtgtctgctggcattgaggtttctccttgcccatctgtccctgtccccacatgggccaccaggtatgacatggagagcactgagaacggcagcccgggctctgaaaagggcaaagccctggagcggtcagttgaggacctgagcaaaagcaactcctcatctcccacacacggcatctccaaagtgcggcacctcactgtcaggtaacatgyggcaccccagcgccggaccccactctgcctcgctgccccctggccctgccatgccg

SEQ ID NO: 40986 - DNA, 600 bp, Chicken  19866894276193_2
tggggtcagcttcctgtcgggctcagaggggctgggtgggcttggggggctctgarcagcccacgttcacagccctggatgtccccatgtgtctgctggcattgaggtttctccttgcccatctgtccctgtccccacatgggccaccaggtatgacatggagagcactgagaacggcagcccgggctctgaaaagggcaaagccctggagcggtcagttgaggacctgagcaaaagcaactcctcatctcccacacacggcatctccaaagtgcggcacctcactgtcaggtaacatgyggcaccccagcgccggaccccactctgcctcgctgccccctggccctgccatgccgtgctgtgccggctcagagaggggctcggcagggagatgcagtcctggtcctcaaaatggattcccatcactgtgggggggactggggagggaaaaagccacgtgtgctcccagcagtggataaaccctgctgggagccagggcagaagcacggttggatccattctcagcgctgccccctgctgcaggatgccctggccaaaggcaggagtggggtgatctgtgaatgagcaaaatcagagctg

SEQ ID NO: 40987 - DNA, 600 bp, Chicken  19866894276197_1
aacctttcccctgtggaatttaagtttagctcaccctctgaccaaaaggactgcaaatcaattagatctgacaagtccaacttcatgtgcatcagcagggcaaatagtaatgtctcagcattaagaaaaattccttggccagaaaaaaattctgaccttggatgaagtgaaatgccctctgctgaactgcttgtttgtgcaatacccacaggttacgcagcataagcgaaacagggagaaaatgtgtattagtgtgcatcagaattggaaaatactcagtcttcctagaggtttttgaaygagctgctggattgctttggctgcgatgtggccacttagaagccatttgaagaaagaaactcaatttacgctattgctcatctctgcccttcctacaagaaagtacatagattttctctgatacgcccgaacttagagctcattcctccttgggaaaatgatatttggtcaaggtgtcaaatgtcaatgtgccaaggagtccaaagaataaaataaaatgtggtgtgtctctctctggaaagcattcgctgtggtgccagggaaactcaattccagtattccttctgctgcagattttta

SEQ ID NO: 40988 - DNA, 600 bp, Chicken  19866894276198_1
tgtttcatacacacttccatgtcaggtaccattaggtcagactgcccctatgctgccatttttcacacaggaacaaaatgtaatggaatattattgggaagctttaacttctactgccatatcgccaacatctgcctctgacattgtggaccaacataataaaataggaagcattcagtttggagctggccagtttggagctgacctatcacctttatatctggtctatgtaggcacaggtccattgattaaagtgagttttgtcccacatgtactaccaaatatgttattttttaataygaggtcatgtttctggaagcatgctaagatcttaataccacagtggaatagtagagccttactacatcttgtgacctcagtttacttaaacttgcatgttttctactctggtaagacataaataaagcagctctgtgtactacgcaagctgcagagagcacagtgcaactcaggacgcatccatggccactactttctgaatgataactgccttttgcctccataaacaaagctcactatggcaaatgtccagcaagtcatggtgtaaagaaaaatttggaagcaacccatccactgtcc

SEQ ID NO: 40989 - DNA, 599 bp, Chicken  19866894276209_1
  misc_feature (1)..(110): n is any nucleotide
nnnnnnnnnnnnnnnnnnnnnnnnnnnnnnnnnnnnnnnnnnnnnnnnnnnnnnnnnnnnnnnnnnnnnnnnnnnnnnnnnnnnnnnnnnnnnnnnnnnnnnnnnnnnnntgtatattagcaactagcgactaaaagaaaaaaagagtcaaactcaaaaaatgaacttagtagcagatgtatagtgaccctagctttaggccatgcttttacccaagagaaaggctatttgctgatctccataggtagtagactcctaccacagcatgacttctgcttcataactcccaccaaaaaaaasgtttgaatactggagaatcccaatcctatccagagcytacattgccttwcacaggggattccaaaggaaaagagtatacacacaagaaactaattgagcttgtttctttctgttgctattctcataaaagcctaagaggtatgggaaagcttcagagactttaatggcaattcttatctttcaggcatcggatctccaaatctaaatttaggtaagtaaaactgacttttgttttcttccttttcactgattttgctccttatcttgtgaaacggcttattcctgcatctgtggggtgc

SEQ ID NO: 40990 - DNA, 599 bp, Chicken  19866894276209_2
  misc_feature (1)..(73): n is any nucleotide
nnnnnnnnnnnnnnnnnnnnnnnnnnnnnnnnnnnnnnnnnnnnnnnnnnnnnnnnnnnnnnnnnnnnnnnnntgtatattagcaactagcgactaaaagaaaaaaagagtcaaactcaaaaaatgaacttagtagcagatgtatagtgaccctagctttaggccatgcttttacccaagagaaaggctatttgctgatctccataggtagtagactcctaccacagcatgacttctgcttcataactcccaccaaaaaaaasgtttgaatactggagaatcccaatcctatccagagcytacattgccttwcacaggggattccaaaggaaaagagtatacacacaagaaactaattgagcttgtttctttctgttgctattctcataaaagcctaagaggtatgggaaagcttcagagactttaatggcaattcttatctttcaggcatcggatctccaaatctaaatttaggtaagtaaaactgacttttgttttcttccttttcactgattttgctccttatcttgtgaaacggcttattcctgcatctgtggggtgcagtcttgattctagggcatgctgccasgtttggtaga

SEQ ID NO: 40991 - DNA, 599 bp, Chicken  19866894276209_3
  misc_feature (1)..(65): n is any nucleotide
nnnnnnnnnnnnnnnnnnnnnnnnnnnnnnnnnnnnnnnnnnnnnnnnnnnnnnnnnnnnnnnnntgtatattagcaactagcgactaaaagaaaaaaagagtcaaactcaaaaaatgaacttagtagcagatgtatagtgaccctagctttaggccatgcttttacccaagagaaaggctatttgctgatctccataggtagtagactcctaccacagcatgacttctgcttcataactcccaccaaaaaaaasgtttgaatactggagaatcccaatcctatccagagcytacattgycttwcacaggggattccaaaggaaaagagtatacacacaagaaactaattgagcttgtttctttctgttgctattctcataaaagcctaagaggtatgggaaagcttcagagactttaatggcaattcttatctttcaggcatcggatctccaaatctaaatttaggtaagtaaaactgacttttgttttcttccttttcactgattttgctccttatcttgtgaaacggcttattcctgcatctgtggggtgcagtcttgattctagggcatgctgccasgtttggtagattttagtc

SEQ ID NO: 40992 - DNA, 599 bp, Chicken  19866894276209_4
  misc_feature (1)..(61): n is any nucleotide
nnnnnnnnnnnnnnnnnnnnnnnnnnnnnnnnnnnnnnnnnnnnnnnnnnnnnnnnnnnnntgtatattagcaactagcgactaaaagaaaaaaagagtcaaactcaaaaaatgaacttagtagcagatgtatagtgaccctagctttaggccatgcttttacccaagagaaaggctatttgctgatctccataggtagtagactcctaccacagcatgacttctgcttcataactcccaccaaaaaaaasgtttgaatactggagaatcccaatcctatccagagcytacattgccttwcacaggggattccaaaggaaaagagtatacacacaagaaactaattgagcttgtttctttctgttgctattctcataaaagcctaagaggtatgggaaagcttcagagactttaatggcaattcttatctttcaggcatcggatctccaaatctaaatttaggtaagtaaaactgacttttgttttcttccttttcactgattttgctccttatcttgtgaaacggcttattcctgcatctgtggggtgcagtcttgattctagggcatgctgccasgtttggtagattttagtcaatc

SEQ ID NO: 40993 - DNA, 600 bp, Chicken  19866894276209_5
tatccagagcytacattgccttwcacaggggattccaaaggaaaagagtatacacacaagaaactaattgagcttgtttctttctgttgctattctcataaaagcctaagaggtatgggaaagcttcagagactttaatggcaattcttatctttcaggcatcggatctccaaatctaaatttaggtaagtaaaactgacttttgttttcttccttttcactgattttgctccttatcttgtgaaacggcttattcctgcatctgtggggtgcagtcttgattctagggcatgctgccasgtttggtagattttagtcaatcgtctaccaaatattaatatactttttctaaatttcatactgaaataaggcacagggactactgagagtatttcactcaagagtacatatctgattgctaccaccacatcttaaaatataaaaaataaaagcagaaggaaaagaagttctaccacatattacactatggccatcaacgtcaaccctgtcagctcaaggttccgtttcctacactgggttccattactctgtgctgcttgactgtaaatctttcaacagacagagtttgaatattcaggt

SEQ ID NO: 40994 - DNA, 600 bp, Chicken  19866894276211_1
ttgctctggctggtttttaatgtcaccattatctgatgttactcgcaaaatggatgaaactctcttctgatgcttgaaaggcttgagaattagagctcagctttgagctcagctccagcacgttccactggtgtccctctttgatggatcctgtgttcctggtgcaggctgaggcacggctgcagtgcggcacgaaggtgggctgtgctcagtggtctgcagagcatccgtcccagcccagtgcttttggtgcagcccttctagcttccctctgccatccctgtgagcaggtccttcacrggtgtggaggctgagataaaaagaggtctgctgctgaaaagcagcacaaatgaaggcagcaccggtggtttgtggagcttgatgcagattcctgtgtgcctgagatttggacacgggagaagagatgctttgtgtaggaagacagaagactggcggtgcaattgtgtgctggtgcacacatcatgattgcatcactactgctttctgttcaatcatggtttccagtaaatccccagcagctgcttccgctattgggctcttactggattttggtgaaatcttattacaaatctctgcact

SEQ ID NO: 40995 - DNA, 599 bp, Chicken  19866894276213_1
  misc_feature (1)..(154): n is any nucleotide
nnnnnnnnnnnnnnnnnnnnnnnnnnnnnnnnnnnnnnnnnnnnnnnnnnnnnnnnnnnnnnnnnnnnnnnnnnnnnnnnnnnnnnnnnnnnnnnnnnnnnnnnnnnnnnnnnnnnnnnnnnnnnnnnnnnnnnnnnnnnnnnnnnnnnnnnnntttgtgaaggtactgatgtgtgcaaaataaatagttcttgacagaggctttcagaaatgtaaggctactgatgcctcagccctacaaggagatgatatacaagaaagtgtcccttttaggaaaaaaaaaaccttaggcttccatcwttgttttttatggatgactaagatcatctgcttttatcttcaaaatgtgaatgtatttctatgctaaatactacagattttttgaaatggttctaagatrtcatctttctccatactaccttaggagcacatgcaaacccatcaggctggaccttcactgagttcccagaagcctcgggtgtttaagtgtgatacctgtgaaaaagcttttgcgaaaccaagtcagctggagagacattgtcgcattcacacaggtaacatcagaaatgatcttcatctcataaaattttctcatgcgt

SEQ ID NO: 40996 - DNA, 599 bp, Chicken  19866894276213_2
  misc_feature (1)..(54): n is any nucleotide
nnnnnnnnnnnnnnnnnnnnnnnnnnnnnnnnnnnnnnnnnnnnnnnnnnnnnntttgtgaaggtactgatgtgtgcaaaataaatagttcttgacagaggctttcagaaatgtaaggctactgatgcctcagccctacaaggagatgatatacaagaaagtgtcccttttaggaaaaaaaaaaccttaggcttccatcwttgttttttatggatgactaagatcatctgcttttatcttcaaaatgtgaatgtatttctatgctaaatactacagattttttgaaatggttctaagatrtcatctttctccatactaccttaggagcacatgcaaacccatcaggctggaccttcactgagttcccagaagcctcgggtgtttaagtgtgatacctgtgaaaaagcttttgcgaaaccaagtcagctggagagacattgtcgcattcacacaggtaacatcagaaatgatcttcatctcataaaattttctcatgcgtatgtgactgttatattttggagtgtttgctcttggattcacataactgcatttaaataacaaaggaaagaaaaaagaaaaaggttaaaatgagggcaaac

SEQ ID NO: 40997 - DNA, 600 bp, Chicken  19866894276213_3
agcctcgggtgtttaagtgtgatacctgtgaaaaagcttttgcgaaaccaagtcagctggagagacattgtcgcattcacacaggtaacatcagaaatgatcttcatctcataaaattttctcatgcgtatgtgactgttatattttggagtgtttgctcttggattcacataactgcatttaaataacaaaggaaagaaaaaagaaaaaggttaaaatgagggcaaacttgatatttcccttgataaagggaatgcagaatgcacaggctgcagtttgtggcctgccacaaagagaaarctacatgtagtagagcctgtctgccttccccttcacctcgtgtgtattaacaacatgagttttaaacgttggagtcacttctctgaaccaacttctttcttccgtaccactgctaccaattaatggctgttgtgctagaattaaaaggaatggataaaattatccatattgcttacaagctgctgaagactaaggaatataactgtgtgtgctgtagcatggggaggactcccaaaacatgattactgtatccttcagtgagtcagccagagctttctctttctgcgatatcactgtctt

SEQ ID NO: 40998 - DNA, 600 bp, Chicken  19866894276214_1
ataactatttaagcaactttatgtgtactgtcattgtttaccaattttttgtgttactctcttccttggtttatattttaatattttgttcctaagttacgattatgcaaaaagacgatttgttttggatgactatttggaatgtttacaattatttaatacaatttacttaactattttgaaaccaaatgatgtgttgaattaaagaaggttcaacactcaaattgccttcatatgctcatttttcagcatactgcactgacagctgaggaaagcacattttcatttgtacgacgtgcrtggtgctccaccaggttgcactgatgaaatatgygattttagaaggacaacttttctcatggaatcaacattcaatttatctgtcattatggtagctaacagatgagtgcaagcagagattaaaagtgaaaatgtaaaaccatattgttatctacaaaacatatgcagaacttcaactatagcttacagagtatgaggcagcgattcaactatcagattcaaagacattttcaaataaccaaataagcttgcactcgggagcagatatccacatttacacacatccaacttacgccaaaa

SEQ ID NO: 40999 - DNA, 600 bp, Chicken  19866894276214_2
tgtttaccaattttttgtgttactctcttccttggtttatattttaatattttgttcctaagttacgattatgcaaaaagacgatttgttttggatgactatttggaatgtttacaattatttaatacaatttacttaactattttgaaaccaaatgatgtgttgaattaaagaaggttcaacactcaaattgccttcatatgctcatttttcagcatactgcactgacagctgaggaaagcacattttcatttgtacgacgtgcrtggtgctccaccaggttgcactgatgaaatatgygattttagaaggacaacttttctcatggaatcaacattcaatttatctgtcattatggtagctaacagatgagtgcaagcagagattaaaagtgaaaatgtaaaaccatattgttatctacaaaacatatgcagaacttcaactatagcttacagagtatgaggcagcgattcaactatcagattcaaagacattttcaaataaccaaataagcttgcactcgggagcagatatccacatttacacacatccaacttacgccaaaaccaccacgacctccagattttcagctctgcacca

SEQ ID NO: 41000 - DNA, 599 bp, Chicken  19866894276215_1
  misc_feature (1)..(17): n is any nucleotide
nnnnnnnnnnnnnnnnnactttgaaatgacttctctattttagctgctatcagtacttcccttgaaataaatctgtttaggtcctacagaaaactgttaaaataaaacaaatactgcaggcttcatccatcgtgatggggctcccggctcgagagaggctgtctgccttcactcagttgtgcaactgagctgctccatagccttttccattgaaaaagattattgtgcttaattgaagacatgcaaataaatcccatccactggtttcttccttgtttgcagatgttcagagagttctcyctcagctttgtgcacttcaaatcagtatttgaactggttagacaagagtgctttaaatttaaggaaatgaatgctttccacatgaaaattttctatgctttcttcagtctttaatatagaagaactaggcaattcatataatactcagaaagaattgtatattaaarctgcaattttacttctgaagagaaccctgcttgacaacggttacacagattttccttccaatccatttaatttgaaatgtgcttcattacatttactatattgtgcagtgatttaataaagttttcctttaa

SEQ ID NO: 41001 - DNA, 600 bp, Chicken  19866894276215_2
ttcactcagttgtgcaactgagctgctccatagccttttccattgaaaaagattattgtgcttaattgaagacatgcaaataaatcccatccactggtttcttccttgtttgcagatgttcagagagttctcyctcagctttgtgcacttcaaatcagtatttgaactggttagacaagagtgctttaaatttaaggaaatgaatgctttccacatgaaaattttctatgctttcttcagtctttaatatagaagaactaggcaattcatataatactcagaaagaattgtatattaaarctgcaattttacttctgaagagaaccctgcttgacaacggttacacagattttccttccaatccatttaatttgaaatgtgcttcattacatttactatattgtgcagtgatttaataaagttttcctttaattttaacatccatcaaaatataaaacttttaatataggagaactcctttaataccactaaagaaaagcactgaagcaaactccttgccagaaatacagatagtttcaaacaacaaatttaaaaccccactggaaattttgatattaaccattctgagttacatcaaag

SEQ ID NO: 41002 - DNA, 600 bp, Chicken  19866894276216_1
agcaggggggacagcccctcccctcactcagtagcagcactgggcctggtgctccccagggtgcagttggccctcctggtgtcagggcacactgctggctcctgtacaacttactgtcagccagagcccccatcccttttagcggggctgctgcccaacatttcatgcccagcctgtatgtacagccagggctgctcctctccccaggtgcagaattgggtgcttctcctattaaactccatgtggctggtgattgcccagctctccaatttgcctagatctctctgtgaggcctctccrcccttgatggagtcaacatctcctcycaaattaatattgtcagcaaacttgctcaaaacaccttctagtcctatatccatgtcacttaggaaaatacaaaggagaagtagccctaaagtggagccctggggaaccccactagtgaccagccactggcctgatgtaacttcatttactgtaaccctttgggcccgattcatcagccaattgctcacccattgattatatttatgcctacttctgtgatgggcattttgtccagaaggatactgtgagaaacactatcaaaagctttactga

SEQ ID NO: 41003 - DNA, 600 bp, Chicken  19866894276216_2
ctcagtagcagcactgggcctggtgctccccagggtgcagttggccctcctggtgtcagggcacactgctggctcctgtacaacttactgtcagccagagcccccatcccttttagcggggctgctgcccaacatttcatgcccagcctgtatgtacagccagggctgctcctctccccaggtgcagaattgggtgcttctcctattaaactccatgtggctggtgattgcccagctctccaatttgcctagatctctctgtgaggcctctccrcccttgatggagtcaacatctcctcycaaattaatattgtcagcaaacttgctcaaaacaccttctagtcctatatccatgtcacttaggaaaatacaaaggagaagtagccctaaagtggagccctggggaaccccactagtgaccagccactggcctgatgtaacttcatttactgtaaccctttgggcccgattcatcagccaattgctcacccattgattatatttatgcctacttctgtgatgggcattttgtccagaaggatactgtgagaaacactatcaaaagctttactgaagtccagtaagataccttcaactagc

SEQ ID NO: 41004 - DNA, 600 bp, Chicken  19866894276218_1
tcattacccagaagatatcagaaacagaagaagaaaaataaagaagaaaatattttaagcttatccttttaagcctccaaccttcagtaagagatatatgcttgactactgaaatagatctactgaacaactgctctctgtaaactgctagcataaatgtgtacaaaagacttaaatcctagataggctctatttccagggataaaatgtagctacagctaccattcatcttctctagttttacatcaccatctgcaatcatttgtctaaattttaagatctcctcccagaaatctacaraggaacaaacaaaaattaattatgaaaaaggctttgtttttacattcatgtgatgtcattacatcacttaattataagcaatgcagataagcaaaaaatctagcatctttactctctagataaaaatattgmaataatgcaaagttgtaaaatttttggaaaaacagaacaaagtagtgatgctgatttatttgtcctatgttgtttaatgtgtctgtgaataacattggaggtgatatataaaattctgatatttgaaatmaatcacattttaaaawtaacaartgcctgccaaactat

SEQ ID NO: 41005 - DNA, 600 bp, Chicken  19866894276218_2
gctctctgtaaactgctagcataaatgtgtacaaaagacttaaatcctagataggctctatttccagggataaaatgtagctacagctaccattcatcttctctagttttacatcaccatctgcaatcatttgtctaaattttaagatctcctcccagaaatctacaraggaacaaacaaaaattaattatgaaaaaggctttgtttttacattcatgtgatgtcattacatcacttaattataagcaatgcagataagcaaaaaatctagcatctttactctctagataaaaatattgmaataatgcaaagttgtaaaatttttggaaaaacagaacaaagtagtgatgctgatttatttgtcctatgttgtttaatgtgtctgtgaataacattggaggtgatatataaaattctgatatttgaaatmaatcacattttaaaawtaacaartgcctgccaaactataacagatggaattcaggtattgcagtataagagcattaataataccattattttttctttgtggtaacaaatgataaacattttactggctttgtgaaaaagcatgtatgtttttcagagaacaaagaggag

SEQ ID NO: 41006 - DNA, 600 bp, Chicken  19866894276218_3
ttgtctaaattttaagatctcctcccagaaatctacaraggaacaaacaaaaattaattatgaaaaaggctttgtttttacattcatgtgatgtcattacatcacttaattataagcaatgcagataagcaaaaaatctagcatctttactctctagataaaaatattgmaataatgcaaagttgtaaaatttttggaaaaacagaacaaagtagtgatgctgatttatttgtcctatgttgtttaatgtgtctgtgaataacattggaggtgatatataaaattctgatatttgaaatmaatcacattttaaaawtaacaartgcctgccaaactataacagatggaattcaggtattgcagtataagagcattaataataccattattttttctttgtggtaacaaatgataaacattttactggctttgtgaaaaagcatgtatgtttttcagagaacaaagaggagagaactgtgttcttctggactgcaatcmagaaaacctgagtcaatcctgaggtcaaaagatcctttatgcaattaggaaataatcaattatttctttaactgtcatgtcctataagcttataattcttcc

SEQ ID NO: 41007 - DNA, 600 bp, Chicken  19866894276218_4
atctcctcccagaaatctacaraggaacaaacaaaaattaattatgaaaaaggctttgtttttacattcatgtgatgtcattacatcacttaattataagcaatgcagataagcaaaaaatctagcatctttactctctagataaaaatattgmaataatgcaaagttgtaaaatttttggaaaaacagaacaaagtagtgatgctgatttatttgtcctatgttgtttaatgtgtctgtgaataacattggaggtgatatataaaattctgatatttgaaatmaatcacattttaaaawtaacaartgcctgccaaactataacagatggaattcaggtattgcagtataagagcattaataataccattattttttctttgtggtaacaaatgataaacattttactggctttgtgaaaaagcatgtatgtttttcagagaacaaagaggagagaactgtgttcttctggactgcaatcmagaaaacctgagtcaatcctgaggtcaaaagatcctttatgcaattaggaaataatcaattatttctttaactgtcatgtcctataagcttataattcttccttttctcccatgattg

SEQ ID NO: 41008 - DNA, 600 bp, Chicken  19866894276218_5
cccagaaatctacaraggaacaaacaaaaattaattatgaaaaaggctttgtttttacattcatgtgatgtcattacatcacttaattataagcaatgcagataagcaaaaaatctagcatctttactctctagataaaaatattgmaataatgcaaagttgtaaaatttttggaaaaacagaacaaagtagtgatgctgatttatttgtcctatgttgtttaatgtgtctgtgaataacattggaggtgatatataaaattctgatatttgaaatmaatcacattttaaaawtaacaartgcctgccaaactataacagatggaattcaggtattgcagtataagagcattaataataccattattttttctttgtggtaacaaatgataaacattttactggctttgtgaaaaagcatgtatgtttttcagagaacaaagaggagagaactgtgttcttctggactgcaatcmagaaaacctgagtcaatcctgaggtcaaaagatcctttatgcaattaggaaataatcaattatttctttaactgtcatgtcctataagcttataattcttccttttctcccatgattggcacaag

SEQ ID NO: 41009 - DNA, 600 bp, Chicken  19866894276218_6
aaaacagaacaaagtagtgatgctgatttatttgtcctatgttgtttaatgtgtctgtgaataacattggaggtgatatataaaattctgatatttgaaatmaatcacattttaaaawtaacaartgcctgccaaactataacagatggaattcaggtattgcagtataagagcattaataataccattattttttctttgtggtaacaaatgataaacattttactggctttgtgaaaaagcatgtatgtttttcagagaacaaagaggagagaactgtgttcttctggactgcaatcmagaaaacctgagtcaatcctgaggtcaaaagatcctttatgcaattaggaaataatcaattatttctttaactgtcatgtcctataagcttataattcttccttttctcccatgattggcacaagaataattgtattactgtttgtgaagtaatcttataaaaaggtgtagtgattgcatgagtggagaagtgaaatgaggaaaaaagtcaaatagaaaataccatcaaagytgaactgctgaaagatgagacactgcagtactttatttctggtaccatccttgcagctgacayttcca

SEQ ID NO: 41010 - DNA, 600 bp, Chicken  19866894276218_7
tgtgaaaaagcatgtatgtttttcagagaacaaagaggagagaactgtgttcttctggactgcaatcmagaaaacctgagtcaatcctgaggtcaaaagatcctttatgcaattaggaaataatcaattatttctttaactgtcatgtcctataagcttataattcttccttttctcccatgattggcacaagaataattgtattactgtttgtgaagtaatcttataaaaaggtgtagtgattgcatgagtggagaagtgaaatgaggaaaaaagtcaaatagaaaataccatcaaagytgaactgctgaaagatgagacactgcagtactttatttctggtaccatccttgcagctgacayttccataatatggataagaatcttttatatcctcctatggtaaataggttctcgaagcaacatttactgaagaatttcatctcttaaatttaatcataaattttgtctttacattttcttaataaaacatagaaaatataagagcataacgtatttacagctagttcaagaaaaacccaacaccatgcagagtaatgtcctacrcctgcttttgaataaacgtaatctcccagtgaa

SEQ ID NO: 41011 - DNA, 600 bp, Chicken  19866894276218_8
aatcmagaaaacctgagtcaatcctgaggtcaaaagatcctttatgcaattaggaaataatcaattatttctttaactgtcatgtcctataagcttataattcttccttttctcccatgattggcacaagaataattgtattactgtttgtgaagtaatcttataaaaaggtgtagtgattgcatgagtggagaagtgaaatgaggaaaaaagtcaaatagaaaataccatcaaagytgaactgctgaaagatgagacactgcagtactttatttctggtaccatccttgcagctgacayttccataatatggataagaatcttttatatcctcctatggtaaataggttctcgaagcaacatttactgaagaatttcatctcttaaatttaatcataaattttgtctttacattttcttaataaaacatagaaaatataagagcataacgtatttacagctagttcaagaaaaacccaacaccatgcagagtaatgtcctacrcctgcttttgaataaacgtaatctcccagtgaaagtcgattggacattatgttgagattatgtatgacccatataaacaccgtgtgaacgtgtctt

SEQ ID NO: 41012 - DNA, 588 bp, Chicken  19866894276218_9
ggaaaaaagtcaaatagaaaataccatcaaagytgaactgctgaaagatgagacactgcagtactttatttctggtaccatccttgcagctgacayttccataatatggataagaatcttttatatcctcctatggtaaataggttctcgaagcaacatttactgaagaatttcatctcttaaatttaatcataaattttgtctttacattttcttaataaaacatagaaaatataagagcataacgtatttacagctagttcaagaaaaacccaacaccatgcagagtaatgtcctacrcctgcttttgaataaacgtaatctcccagtgaaagtcgattggacattatgttgagattatgtatgacccatataaacaccgtgtgaacgtgtctttttaatgcaatatgtttatgctagaaagaaaatataaaaggtcattaatatttttaggttttgattttttttttcattatttcccttaagacaagaaaatttactgtggtgatggctttcattttatagcctaataggacctaagaaaggtggatgcttatggctttatcatagtgaagcagttgtatatga

SEQ ID NO: 41013 - DNA, 599 bp, Chicken  19866894276219_1
  misc_feature (1)..(68): n is any nucleotide
nnnnnnnnnnnnnnnnnnnnnnnnnnnnnnnnnnnnnnnnnnnnnnnnnnnnnnnnnnnnnnnnnnnnacgagaccgcatacccattgtaacctccagttcttcaggttaccaccctcttaccctctcatcctgtctgcatacagcagcttgactcgagtggtctctaatcctaaaactgcactggttattttcatgatgtttcagagagctcaaaaaataaaaactaatttaactccgaatgcataataagatgccagaatatcacctataaactcatgacttgatgacttagactttytgcatgaaagaaataccattccagaggaatccgcagctcacatcaacccaccaaggtgggtaaaaatgacctttatatccaaacatggctccatctgagccaaagtgcagacacacaaggagcagttggacatggctgacatttttcaaggaggtatttcaggttgctgaggcattcaggtatctcyggatctaaaaggttttacaagtcrcatgggtgcttccaaccaaagccaccagcmagatgtacatctccacccaaataccacattactgtgccctgtatgaatgccaggaaga

SEQ ID NO: 41014 - DNA, 600 bp, Chicken  19866894276219_2
tattttcatgatgtttcagagagctcaaaaaataaaaactaatttaactccgaatgcataataagatgccagaatatcacctataaactcatgacttgatgacttagactttytgcatgaaagaaataccattccagaggaatccgcagctcacatcaacccaccaaggtgggtaaaaatgacctttatatccaaacatggctccatctgagccaaagtgcagacacacaaggagcagttggacatggctgacatttttcaaggaggtatttcaggttgctgaggcattcaggtatctcyggatctaaaaggttttacaagtcrcatgggtgcttccaaccaaagccaccagcmagatgtacatctccacccaaataccacattactgtgccctgtatgaatgccaggaagatcctttctcctaaaggatactatcacttaatgaagaactgagataaataatagttaagccttcacgtattaaggaataatataggcacaaatggtcctgtaggtgtgccactgatggacagataggtaaagagacaggtaagcagcagcgtttacacatgcaaactgcaaccctacacacaacatcag

SEQ ID NO: 41015 - DNA, 600 bp, Chicken  19866894276219_3
tcaaaaaataaaaactaatttaactccgaatgcataataagatgccagaatatcacctataaactcatgacttgatgacttagactttytgcatgaaagaaataccattccagaggaatccgcagctcacatcaacccaccaaggtgggtaaaaatgacctttatatccaaacatggctccatctgagccaaagtgcagacacacaaggagcagttggacatggctgacatttttcaaggaggtatttcaggttgctgaggcattcaggtatctcyggatctaaaaggttttacaagtcrcatgggtgcttccaaccaaagccaccagcmagatgtacatctccacccaaataccacattactgtgccctgtatgaatgccaggaagatcctttctcctaaaggatactatcacttaatgaagaactgagataaataatagttaagccttcacgtattaaggaataatataggcacaaatggtcctgtaggtgtgccactgatggacagataggtaaagagacaggtaagcagcagcgtttacacatgcaaactgcaaccctacacacaacatcagcccacgctgtcttctgatctcttc

SEQ ID NO: 41016 - DNA, 600 bp, Chicken  19866894276219_4
tgcataataagatgccagaatatcacctataaactcatgacttgatgacttagactttytgcatgaaagaaataccattccagaggaatccgcagctcacatcaacccaccaaggtgggtaaaaatgacctttatatccaaacatggctccatctgagccaaagtgcagacacacaaggagcagttggacatggctgacatttttcaaggaggtatttcaggttgctgaggcattcaggtatctcyggatctaaaaggttttacaagtcrcatgggtgcttccaaccaaagccaccagcmagatgtacatctccacccaaataccacattactgtgccctgtatgaatgccaggaagatcctttctcctaaaggatactatcacttaatgaagaactgagataaataatagttaagccttcacgtattaaggaataatataggcacaaatggtcctgtaggtgtgccactgatggacagataggtaaagagacaggtaagcagcagcgtttacacatgcaaactgcaaccctacacacaacatcagcccacgctgtcttctgatctcttctggagagtggccaaatccacagtacttgga

SEQ ID NO: 41017 - DNA, 600 bp, Chicken  19866894276220_1
ttatgtcaatcagcgaattctccagtgaatgcatgtcaaaagtccttgtgcgatcctgcaagcaaatacaaagacagtttaggcaacatagtgttaaaaaaaagccacctgtaacatgaaaacttctgttttattctacagcacgtgcttatacaccactaaagtcagtcgaatacagagaacaatgcattggaatatgaatacagggaatgtgaatctgatatatatttataacaaccaatcatttgtttaagaagtccaatatttagtttgtgttccttgctgtacagataaactacrttaaaaataattggagttcacagtcaggaagcaaagagcagctcccaggagacagaatggcaaagagaagtcataaagtaggtatagcagcctgaactaaagaaaatctgaattcacagaatgacacacagaattcctcccacctaaactactaccctgataaacagcctcattctacacaatcagttctaattttgcacaattataaagcatctcacacaggtagcagagctgtggcagtctggtttgctaggtgacaagttagctctatttttaaagtccccggaatcgcaagtttga

SEQ ID NO: 41018 - DNA, 600 bp, Chicken  19866894276228_1
aatgtgcctgtagagagtaggctgtgaaaggcaagaaattgtcagcacaacctgtcatgcagtctttaatactgggagaactgtatcacttttgaacacaatgatattaagtgagttaaaaagggctttgttctttttctgttgacaacctgccctgagctttgggagctgcagatgcaggacatttctctcgagcttggctgtagaagcccaggcagatggggtgagaggtcctggtttctttctcttgtgcattgtccattctgagtctctcttcctgatccagagttctggccctgyttcttcctgttacaaaataagatgccttttcagctgtcttacacattatggtgtggcaggcattgctaaatcaccaacaggtcagttctcaggaacatctgatgaaattcaagcattgtgaaagcaatggcatttgtgaagcatgatgctgttccagcaaaactgggggactctcaggaaacccttccttctcaaaatggcagaaagattagctgtcaaccacaaaaaaaaagttcacatacttgtctaaatgaatggcaaatctgccctcagctgccaaaagggcaaaggttttgtttc

SEQ ID NO: 41019 - DNA, 600 bp, Chicken  19866894276235_1
aggggaccagctgccttccccacatgcctgctcctgatgatctcacttccagaagggccatctccgtgcctgaggacaacgtgtccctgggcacagactgaacccttgaaatcaaatccctgcatatgcaggaagatgctcctttaccaggctcacttgttgagctctttaaagctgccagtcggtacaaagagaagagaactacaagcttacctttaaccaaaggcagttacactcaaatctcttaaacacctccagggatggggactccaccacgtccctggacagcctgttgcaacrctcaactgcctccatgaagaaattaatcctaacgtccattctaaatctctccrgyacaactttagactgttgataacacatctgcagtttggtcggctccaggtgattctccagatacctaaaactttatgagtatagaaacctgcttaaaaaaatacaagagctgaagcgagacattcaatcacctgactccaggaatcaaagacttgagacaaaaaacaatggacaaaatcccaagatgtgacaacattactgctatgcatatacgtggccagaatcagcaaggcagatcttgctgtt

SEQ ID NO: 41020 - DNA, 600 bp, Chicken  19866894276235_2
agggccatctccgtgcctgaggacaacgtgtccctgggcacagactgaacccttgaaatcaaatccctgcatatgcaggaagatgctcctttaccaggctcacttgttgagctctttaaagctgccagtcggtacaaagagaagagaactacaagcttacctttaaccaaaggcagttacactcaaatctcttaaacacctccagggatggggactccaccacgtccctggacagcctgttgcaacrctcaactgcctccatgaagaaattaatcctaacgtccattctaaatctctccrgyacaactttagactgttgataacacatctgcagtttggtcggctccaggtgattctccagatacctaaaactttatgagtatagaaacctgcttaaaaaaatacaagagctgaagcgagacattcaatcacctgactccaggaatcaaagacttgagacaaaaaacaatggacaaaatcccaagatgtgacaacattactgctatgcatatacgtggccagaatcagcaaggcagatcttgctgttcagaagagacagggttttcagtgcttcttccatgtgcatttcaccactttcag

SEQ ID NO: 41021 - DNA, 600 bp, Chicken  19866894276235_3
ggccatctccgtgcctgaggacaacgtgtccctgggcacagactgaacccttgaaatcaaatccctgcatatgcaggaagatgctcctttaccaggctcacttgttgagctctttaaagctgccagtcggtacaaagagaagagaactacaagcttacctttaaccaaaggcagttacactcaaatctcttaaacacctccagggatggggactccaccacgtccctggacagcctgttgcaacrctcaactgcctccatgaagaaattaatcctaacgtccattctaaatctctccrgyacaactttagactgttgataacacatctgcagtttggtcggctccaggtgattctccagatacctaaaactttatgagtatagaaacctgcttaaaaaaatacaagagctgaagcgagacattcaatcacctgactccaggaatcaaagacttgagacaaaaaacaatggacaaaatcccaagatgtgacaacattactgctatgcatatacgtggccagaatcagcaaggcagatcttgctgttcagaagagacagggttttcagtgcttcttccatgtgcatttcaccactttcaggg

SEQ ID NO: 41022 - DNA, 599 bp, Chicken  19866894276243_1
  misc_feature (1)..(15): n is any nucleotide
nnnnnnnnnnnnnnnagtggcaacttatcaacttggagtgccaggatcccaaaacaagtatccacttgaggatctcctgattcttaaatgatacacacaaagctcttcacaggctgacatcaaactcaattgacccccatttaaaagaaaagaacatccctcaattttgactatacggtcaactaaaccgtttgcgaaggtatgacttcattacagagttgtatccgcagtgcccctacactgcaataaactgtcttcagttccagatccaggagacagaaaatcttatttatccccacycgcttttttttcccctcctttccaaagctttttagaaagaattttaaggaattggagggtagggtgtggtaaaaaaatgtcaagcccattaaataagaaatattagatcataaaacaacccttcttatgcttgtaaaaagcaaacattcatcacgctgttctttcttctgtttatactacaacaatgggaatgttcaacagagcattggaatagttagggaatagaacataaagatgtgtttattcagtgcatgtaaacagttccatttagctgatctgtaaaagcaaacaattgaaay

SEQ ID NO: 41023 - DNA, 600 bp, Chicken  19866894276243_2
ycgcttttttttcccctcctttccaaagctttttagaaagaattttaaggaattggagggtagggtgtggtaaaaaaatgtcaagcccattaaataagaaatattagatcataaaacaacccttcttatgcttgtaaaaagcaaacattcatcacgctgttctttcttctgtttatactacaacaatgggaatgttcaacagagcattggaatagttagggaatagaacataaagatgtgtttattcagtgcatgtaaacagttccatttagctgatctgtaaaagcaaacaattgaaaygggcacttctcagacacaatttgaacagtacaaaaccctaaacgctgawacaccaagaattcatcactttgaaatgagaaaacgtactctacctttcgaacttgtgatacagtgcaagtaagacatcgtatttctttttcagccttgatacagtgctatcaactttagtgcttacagtatccatgttaacatccacctctttgagaaactgaaaaaatgtgcacacgctgaaaaacagagatgacagattaacgtgactctgaaaatgactattctgaaatagctccaccgaataaaaat

SEQ ID NO: 41024 - DNA, 600 bp, Chicken  19866894276243_3
gaattggagggtagggtgtggtaaaaaaatgtcaagcccattaaataagaaatattagatcataaaacaacccttcttatgcttgtaaaaagcaaacattcatcacgctgttctttcttctgtttatactacaacaatgggaatgttcaacagagcattggaatagttagggaatagaacataaagatgtgtttattcagtgcatgtaaacagttccatttagctgatctgtaaaagcaaacaattgaaaygggcacttctcagacacaatttgaacagtacaaaaccctaaacgctgawacaccaagaattcatcactttgaaatgagaaaacgtactctacctttcgaacttgtgatacagtgcaagtaagacatcgtatttctttttcagccttgatacagtgctatcaactttagtgcttacagtatccatgttaacatccacctctttgagaaactgaaaaaatgtgcacacgctgaaaaacagagatgacagattaacgtgactctgaaaatgactattctgaaatagctccaccgaataaaaatcaccataaaacattactttacttcaatagacttcaatgtatttttacta

SEQ ID NO: 41025 - DNA, 600 bp, Chicken  19866894276244_1
agtaaagacacagtcccacatcaggcagttatgcagtctcagcactcacccttgttcagtgacctcaacacacatcaacagtggttcaagtatgtaacacaagaaagaaaaagtggaagcaagcatggctaggtgacctacagaggctatatgctgcctcctgcagctgcaattgagggtacactgcaggagtggagtcttcattacttcagtagaagtatgctgtaaaaatacaacattattgtaacagactctggaatatgcattttgcaatgagtttacacctatgaatgatgttaygttacaacatgggatacaaaagcatagcactacatacccttttaataaaggcctacatacaagaagagtcagagcactcactgcttctacagaaagggaaggacagctccagtttacaaggaggcaactgaaggcaggtcagacartgtgatccacagcctaaagaggagyagggatccctgctcctgccaygttcccctgcctcccccacagaggtgtgccatgatgcacagtaatgctgccagcttccataggactgcagctgaaygcagctggttgtagcactgcacaccgctgagc

SEQ ID NO: 41026 - DNA, 600 bp, Chicken  19866894276244_2
ctatatgctgcctcctgcagctgcaattgagggtacactgcaggagtggagtcttcattacttcagtagaagtatgctgtaaaaatacaacattattgtaacagactctggaatatgcattttgcaatgagtttacacctatgaatgatgttaygttacaacatgggatacaaaagcatagcactacatacccttttaataaaggcctacatacaagaagagtcagagcactcactgcttctacagaaagggaaggacagctccagtttacaaggaggcaactgaaggcaggtcagacartgtgatccacagcctaaagaggagyagggatccctgctcctgccaygttcccctgcctcccccacagaggtgtgccatgatgcacagtaatgctgccagcttccataggactgcagctgaaygcagctggttgtagcactgcacaccgctgagcaaattattaccggtggtctttacgaaacatcccagcccaraaaagctgctgtaaatgaaaacagtttgtaacattttccagtacaaatcagaaacagttgacaattattaagcccaggaacagagcttggaacagcttgtatcctg

SEQ ID NO: 41027 - DNA, 600 bp, Chicken  19866894276244_3
attgagggtacactgcaggagtggagtcttcattacttcagtagaagtatgctgtaaaaatacaacattattgtaacagactctggaatatgcattttgcaatgagtttacacctatgaatgatgttaygttacaacatgggatacaaaagcatagcactacatacccttttaataaaggcctacatacaagaagagtcagagcactcactgcttctacagaaagggaaggacagctccagtttacaaggaggcaactgaaggcaggtcagacartgtgatccacagcctaaagaggagyagggatccctgctcctgccaygttcccctgcctcccccacagaggtgtgccatgatgcacagtaatgctgccagcttccataggactgcagctgaaygcagctggttgtagcactgcacaccgctgagcaaattattaccggtggtctttacgaaacatcccagcccaraaaagctgctgtaaatgaaaacagtttgtaacattttccagtacaaatcagaaacagttgacaattattaagcccaggaacagagcttggaacagcttgtatcctgctcctatttccgcagttagcttgct

SEQ ID NO: 41028 - DNA, 600 bp, Chicken  19866894276244_4
tggagtcttcattacttcagtagaagtatgctgtaaaaatacaacattattgtaacagactctggaatatgcattttgcaatgagtttacacctatgaatgatgttaygttacaacatgggatacaaaagcatagcactacatacccttttaataaaggcctacatacaagaagagtcagagcactcactgcttctacagaaagggaaggacagctccagtttacaaggaggcaactgaaggcaggtcagacartgtgatccacagcctaaagaggagyagggatccctgctcctgccaygttcccctgcctcccccacagaggtgtgccatgatgcacagtaatgctgccagcttccataggactgcagctgaaygcagctggttgtagcactgcacaccgctgagcaaattattaccggtggtctttacgaaacatcccagcccaraaaagctgctgtaaatgaaaacagtttgtaacattttccagtacaaatcagaaacagttgacaattattaagcccaggaacagagcttggaacagcttgtatcctgctcctatttccgcagttagcttgctgggctgccttctgattttggt

SEQ ID NO: 41029 - DNA, 572 bp, Chicken  19866894276244_5
tgcaatgagtttacacctatgaatgatgttaygttacaacatgggatacaaaagcatagcactacatacccttttaataaaggcctacatacaagaagagtcagagcactcactgcttctacagaaagggaaggacagctccagtttacaaggaggcaactgaaggcaggtcagacartgtgatccacagcctaaagaggagyagggatccctgctcctgccaygttcccctgcctcccccacagaggtgtgccatgatgcacagtaatgctgccagcttccataggactgcagctgaaygcagctggttgtagcactgcacaccgctgagcaaattattaccggtggtctttacgaaacatcccagcccaraaaagctgctgtaaatgaaaacagtttgtaacattttccagtacaaatcagaaacagttgacaattattaagcccaggaacagagcttggaacagcttgtatcctgctcctatttccgcagttagcttgctgggctgccttctgattttggtggggtttggttgcttttttttctttcagtcaaaacttttcaggctcaa

SEQ ID NO: 41030 - DNA, 500 bp, Chicken  19866894276244_6
tttaataaaggcctacatacaagaagagtcagagcactcactgcttctacagaaagggaaggacagctccagtttacaaggaggcaactgaaggcaggtcagacartgtgatccacagcctaaagaggagyagggatccctgctcctgccaygttcccctgcctcccccacagaggtgtgccatgatgcacagtaatgctgccagcttccataggactgcagctgaaygcagctggttgtagcactgcacaccgctgagcaaattattaccggtggtctttacgaaacatcccagcccaraaaagctgctgtaaatgaaaacagtttgtaacattttccagtacaaatcagaaacagttgacaattattaagcccaggaacagagcttggaacagcttgtatcctgctcctatttccgcagttagcttgctgggctgccttctgattttggtggggtttggttgcttttttttctttcagtcaaaacttttcaggctcaa

SEQ ID NO: 41031 - DNA, 600 bp, Chicken  19866894276246_1
cttttctctgtggctatctagacttgcagccagatctctttgaggaataaccttagatgctctttgcagacagtacagaataaagagaagcaaaagttgcgactgtgccctggctacttattctctaagcccttaacaattataaaaaaataaattataaaactctatctttttcattagaaatggactaacatttcccttctactcctctaggactatttttaatcatgagaaactgaatttactaatagtgatcaacaatgtgtttgacagtagcaatgagctcagaaaatgcatagrgaactcttgggctagtagacctctatgaaagaatcctctagaaatggtagaaagtaagttcagagaagccctaacaaccagctactaaattaataaacattttgttctggtgtatacaaagagcaaaaatacacttgatccacatatatttgtcacatcccttgtgtctacttcacatcctttctaacactgtgattgtgtcaaacaactaccaaactcatgatatttgcactctattttcatgaactgtctttacatgtttcattaaaataataataaaaaccacaaaatatcataata

SEQ ID NO: 41032 - DNA, 600 bp, Chicken  19866894276250_1
atgcagctttgacctaatggaagacttcatggggcttcacccgatggtttctgcttcaaacatctcaaccttttgcttccctctggtgtggacgctgctgttctgcctggttaattgcagaaagcatcgcgccatgttgggcagacgtgagcgcttcaggagccctttttgcatcacttgactcattcaaaaaggaagtcgttttggtttcagaagttcgtttggtgcagaagtggtttgtgcctgttctaaaattgtgcatttccagcagtgagcagcgaagggagagtttggtctcartgtgcttagggctcttcgcttgggtcctttctgtattccttcctcagactatttactttctacagattatatatccatatccatatctatgtacaaatagatatgtatacataaggatatataatgcatatatatgggtttttaattgtgctttaaagtgctgagcccggcactgcaccgacactgcggccagcagatttgcagctctcttttgtgggatctctgcaatcgttggccatgagggttcagccactccttggcaggagcccagctggaatcatcattgattttggcacaatc

SEQ ID NO: 41033 - DNA, 600 bp, Chicken  19866894276250_2
gtgcttagggctcttcgcttgggtcctttctgtattccttcctcagactatttactttctacagattatatatccatatccatatctatgtacaaatagatatgtatacataaggatatataatgcatatatatgggtttttaattgtgctttaaagtgctgagcccggcactgcaccgacactgcggccagcagatttgcagctctcttttgtgggatctctgcaatcgttggccatgagggttcagccactccttggcaggagcccagctggaatcatcattgattttggcacaatcygtgccatcatgccccattgagccctacccaccaacggagcactttgcacagcgcgttcccctcgtcggagcggagggaaccgctgcgttgggggctgggggaggaagtgcagaaaacaggaacccagtgcagccctgaggctgctgtgagcggcagtgctgggccggaggacggcaaacgcatcatcaggagctggcggcggggcaaggtgaggatacaggggggtcttgggggtggggagtgggcagcagcgatggcagaagtgcttcggtgggcaaagagagccacttcctgggcatg

SEQ ID NO: 41034 - DNA, 599 bp, Chicken  19866894276256_1
  misc_feature (1)..(6): n is any nucleotide
nnnnnntctgttggccctgaggatgcccttcctgcccttggggagctgttcctccccagcacatgaatgggctcctcattagggtctgctctttcctgctgcgccagagctctccacttcacaatgaacaggcttcatgtggctgtaacatgcggttcatgtcacttcttagatctatggaggtagtgctacaatgacccaagcttgttagaagacaataggacagaaactgcattaggacaagagcaacatgttagtgtactgatctctaatgtgctttatggcaatggacaagcaagygctgttataagcagtgttttaaatactgttgcctgggaaaaagaaactcttaaaaatcacagtccatctgtagtttaaaagaaaacatagatggtattaaagtggctctctgggaatagtggtatccaggtgtttccttttgtggctgttcttgcacaaatctgcattgactcatgcaatcgcactgcccactgaaacagactcactggctgcacgagattaggtacaggcaaataaagcagtcaagcactctggcccaaatgtccaagcctatgcatatacattggatacaaacagcc

SEQ ID NO: 41035 - DNA, 600 bp, Chicken  19866894276256_2
tccaggtgtttccttttgtggctgttcttgcacaaatctgcattgactcatgcaatcgcactgcccactgaaacagactcactggctgcacgagattaggtacaggcaaataaagcagtcaagcactctggcccaaatgtccaagcctatgcatatacattggatacaaacagccttatttttcagaagatgctcaatacttccaaattgccccgagataaatggagttgctgcagttctctggcagcagcaaaatgagctcagccctagtgcagatcaggctgttcaaccaggcagcaygccctgacatgggtagagaagaccaagagcggacctctgtggtmttaccatttattgaatgccatgaacaagacaccagctatcacatcaaagttaggggttttgtggggaatggagatgtgtagtggctagattatcacccatctccaaatgccctcaggcagggaagagctctatttactttcaaaagggacttagaaaccagatcttgaattatttgatatgcaacgaatatattccttatccttttgaagcacagggcaaatttaggaacacttcatgtggatttcagatgactca

SEQ ID NO: 41036 - DNA, 600 bp, Chicken  19866894276256_3
gactcatgcaatcgcactgcccactgaaacagactcactggctgcacgagattaggtacaggcaaataaagcagtcaagcactctggcccaaatgtccaagcctatgcatatacattggatacaaacagccttatttttcagaagatgctcaatacttccaaattgccccgagataaatggagttgctgcagttctctggcagcagcaaaatgagctcagccctagtgcagatcaggctgttcaaccaggcagcaygccctgacatgggtagagaagaccaagagcggacctctgtggtmttaccatttattgaatgccatgaacaagacaccagctatcacatcaaagttaggggttttgtggggaatggagatgtgtagtggctagattatcacccatctccaaatgccctcaggcagggaagagctctatttactttcaaaagggacttagaaaccagatcttgaattatttgatatgcaacgaatatattccttatccttttgaagcacagggcaaatttaggaacacttcatgtggatttcagatgactcagaaagatatttattaatttttaaatacctatttctctgctgcag

SEQ ID NO: 41037 - DNA, 600 bp, Chicken  19866894276258_1
ttgaagattgagatcattatgtcctgggatctgcaatgtgtggtaatacttgtttttctctttttttaccagttaataatccttgtggcaccaacaatggtggttgttctcatctgtgtctcataaaagctggtggtcagggttattcctgcgaatgtcccgataacttcatgattgtacagtttggcagtacagcacactgccttccaatgtgctccagcacccagttcctctgtgcagacactgagaggtaagtgctgttcatcttcttttttctgatgccctttaaagatacatttygcagtttagacttttgaaaagggcatgaaagcagtaattccttctctgtgattctgtgatgtcctagcaaagacaaagctgggaccagacagactttgtttaggaaaaaatatctacagactcctaatttaaatgtttttttcaccttttttccccattacacttcattactaaagcaaagtttgggttactggaaacgtgtagaccccagaaaccatttccagtcaaaatcacagcctggaccttttcccatttgcacatcttttgtagcacatctctttcttccaagtacatgctgtc

SEQ ID NO: 41038 - DNA, 599 bp, Chicken  19866894276261_1
  misc_feature (1)..(148): n is any nucleotide
nnnnnnnnnnnnnnnnnnnnnnnnnnnnnnnnnnnnnnnnnnnnnnnnnnnnnnnnnnnnnnnnnnnnnnnnnnnnnnnnnnnnnnnnnnnnnnnnnnnnnnnnnnnnnnnnnnnnnnnnnnnnnnnnnnnnnnnnnnnnnnnnnnnntttttcatcactcccatcacccttaccataaagaagttactctcctatgttcaagttttaggccactgttccttgtcctatcactacacacccctgagaagagcctggcctcatccatttgcctcccacatccctttaggtatttataaacrtttatcagatcccctctcagttttcttttccccgggctgaacagacccaggttcctcagcccttcctcacacaggagatgctctgggccctttatcatctttgtggccctctgctgggttccttccaggagatccctgtcttttttgaactggggagcccagagctggacacagtggctgagctgcagcayggaacccatcctgctttcttttgaggcctggaaacaaatcagggaggcgggcagtcctgctcctgctgtcccacagagcccgtgctgccttcacagaggatttactgt

SEQ ID NO: 41039 - DNA, 600 bp, Chicken  19866894276261_2
cctatgttcaagttttaggccactgttccttgtcctatcactacacacccctgagaagagcctggcctcatccatttgcctcccacatccctttaggtatttataaacrtttatcagatcccctctcagttttcttttccccgggctgaacagacccaggttcctcagcccttcctcacacaggagatgctctgggccctttatcatctttgtggccctctgctgggttccttccaggagatccctgtcttttttgaactggggagcccagagctggacacagtggctgagctgcagcayggaacccatcctgctttcttttgaggcctggaaacaaatcagggaggcgggcagtcctgctcctgctgtcccacagagcccgtgctgccttcacagaggatttactgtagtagattcaagcccaaaaatcattaagtacagctctggaatgacttgggagagtcaaggcgctgttcttagcctctgctttgactcactgtgcctacaggctcatccttgtgaatgtgcagctcccgacccaagcttttttcctgtcgtctgggccctgtttttcagatgcaggtggagggtgtatgttgg

SEQ ID NO: 41040 - DNA, 600 bp, Chicken  19866894276267_1
gaaacgcttccaggttcctgtaaatgcccccacatttcacactcatcatatcatgtgaaattcttgaccctgaagaagatgcagggtgaatcactaaaccaaaatgaaagaagaagaatatggagaatagaaagtttgtggattatgaagacaaaatatagtatagagcagaacagaaggggaagttcgcaatgcagtagatgttagaggaaaaacagcactgaaggaagatattatcgcaccactctccttgatatttcaatggggttacattaagtgtgttagaaggatgtctagtaycttatgcacatmaattttcatggttctattgaggtcaaactgctattgcctttttagaaaggaatactgtgttcatgcgttataaccagacaaaattgtagggcagtgcttgcccaggagtgtaattaccaggaaagctgtatctgcaggcacagactgactctttccatgtccagttggatttgcatatcctgtcctgttctgggttacctccaccagaaacattctggactagatctgaaaatccttgcctggcccaacttctctcttccagctttcctgagagtttcagctgttctc

SEQ ID NO: 41041 - DNA, 600 bp, Chicken  19866894276267_2
ggttcctgtaaatgcccccacatttcacactcatcatatcatgtgaaattcttgaccctgaagaagatgcagggtgaatcactaaaccaaaatgaaagaagaagaatatggagaatagaaagtttgtggattatgaagacaaaatatagtatagagcagaacagaaggggaagttcgcaatgcagtagatgttagaggaaaaacagcactgaaggaagatattatcgcaccactctccttgatatttcaatggggttacattaagtgtgttagaaggatgtctagtaycttatgcacatmaattttcatggttctattgaggtcaaactgctattgcctttttagaaaggaatactgtgttcatgcgttataaccagacaaaattgtagggcagtgcttgcccaggagtgtaattaccaggaaagctgtatctgcaggcacagactgactctttccatgtccagttggatttgcatatcctgtcctgttctgggttacctccaccagaaacattctggactagatctgaaaatccttgcctggcccaacttctctcttccagctttcctgagagtttcagctgttctctctatttcttag

SEQ ID NO: 41042 - DNA, 599 bp, Chicken  19866894276269_1
  misc_feature (1)..(127): n is any nucleotide
nnnnnnnnnnnnnnnnnnnnnnnnnnnnnnnnnnnnnnnnnnnnnnnnnnnnnnnnnnnnnnnnnnnnnnnnnnnnnnnnnnnnnnnnnnnnnnnnnnnnnnnnnnnnnnnnnnnnnnnnnnnnnnnctagaatgacaggggaggatcaacaaggaaaaaagctaaatgagaatggacactggaatatctctccaatctcttttcagcatctgagctgaagacttgcccgctgttgtcacagatctccagctgattctgaacagaacaggttttccttctgagaatggacatgtgaatgyatggatcctgcctggccaagggatggagcccaggagaagctcagacagaccttacartaattctagctgacacatgtcattgttatcatagcagatactgatattttttctttctgaaatggctctaccagtaccttctgggttacagctgaggagcaacagtctagagactaaaagaggaagagccctttctggaagggtgtgtatcagttttcrtttcccttgtaggtactggcagaagggcaaggaagctgtggaaggcttgcaggcagttggggtctgttagtactgaagccaga

SEQ ID NO: 41043 - DNA, 599 bp, Chicken  19866894276269_2
  misc_feature (1)..(70): n is any nucleotide
nnnnnnnnnnnnnnnnnnnnnnnnnnnnnnnnnnnnnnnnnnnnnnnnnnnnnnnnnnnnnnnnnnnnnnctagaatgacaggggaggatcaacaaggaaaaaagctaaatgagaatggacactggaatatctctccaatctcttttcagcatctgagctgaagacttgcccgctgttgtcacagatctccagctgattctgaacagaacaggttttccttctgagaatggacatgtgaatgyatggatcctgcctggccaagggatggagcccaggagaagctcagacagaccttacartaattctagctgacacatgtcattgttatcatagcagatactgatattttttctttctgaaatggctctaccagtaccttctgggttacagctgaggagcaacagtctagagactaaaagaggaagagccctttctggaagggtgtgtatcagttttcrtttcccttgtaggtactggcagaagggcaaggaagctgtggaaggcttgcaggcagttggggtctgttagtactgaagccagaatcacaacggcacctccagctcgaggtcagatttcattggcagattctctgggcttg

SEQ ID NO: 41044 - DNA, 600 bp, Chicken  19866894276269_3
tgaagacttgcccgctgttgtcacagatctccagctgattctgaacagaacaggttttccttctgagaatggacatgtgaatgyatggatcctgcctggccaagggatggagcccaggagaagctcagacagaccttacartaattctagctgacacatgtcattgttatcatagcagatactgatattttttctttctgaaatggctctaccagtaccttctgggttacagctgaggagcaacagtctagagactaaaagaggaagagccctttctggaagggtgtgtatcagttttcrtttcccttgtaggtactggcagaagggcaaggaagctgtggaaggcttgcaggcagttggggtctgttagtactgaagccagaatcacaacggcacctccagctcgaggtcagatttcattggcagattctctgggcttggacacttcagatggccaagatgggttatgagaaatatctaaattcattcaaacctctttcaaggctaacctctgtatgaagctgtgccagcttctttggtaccaagaaagaactgctggtgctgtgattcaccagctggtcagggcatttttgctaaatt

SEQ ID NO: 41045 - DNA, 600 bp, Chicken  19866894276269_4
ttagtactgaagccagaatcacaacggcacctccagctcgaggtcagatttcattggcagattctctgggcttggacacttcagatggccaagatgggttatgagaaatatctaaattcattcaaacctctttcaaggctaacctctgtatgaagctgtgccagcttctttggtaccaagaaagaactgctggtgctgtgattcaccagctggtcagggcatttttgctaaattttgagttccatctctttctctggaactagagaaacctgatggaaaatagcctctttcagttcaaaytgcagcatgcagttctcctcctgttttggaaacaactcctgtctcaggtctcaagggagcagatgcagtttatgccagagatttaatacaatacgcacacaccaagctcccgagcatgaaagggtcgtttgaacagagcagctctatccagagcacagacttcatgaatctctggacgcgtttagacctggcagaaatcggagctaacatcaaagacagctgctatcagagcaatacagtcacatttgagcaacggtgtgctcaggctactattaatagctttagatcagtaacaggcaa

SEQ ID NO: 41046 - DNA, 600 bp, Chicken  19866894276273_1
gcagcatacccctatgtcgaaggaacatgcaaagaattcatagtatctgacagtgctgctcagtccagacattgcatctctccagacatggaaataatcccttctcttgctccacgtctgcatgtattcaaattgcttaagttctgaatgttgcttgtgatgtgttgtagagcattgtatgcagttcctgtaaatgcgtaggaggggttttactgcttaaaacttttaagaatactggttgaaaagaaatgccatgttatgagcaaagagcacaaggcttctcatccctctgcacagggytcagtgtgttggaggcatggggggggtcgtcactgatcacttttgttagctcctaatgctttgagggatgtttttggaagagttagtgcttaatgctagctgtgactcattcaggtagcagtcccctgcacagcctacggagctgtgatcagcctcactgttgctcaaatgctgtcattgctcaagtatggaatcttggtggccaagagttgccttacctggctggaaagctgagcaactgcttggtattccatctagcgtgccataatgaaagcatgaagaccagaaatgcagcaaatt

SEQ ID NO: 41047 - DNA, 600 bp, Chicken  19866894276276_1
ttccttacccctctcttccaaacagtatttttgcactttcaaatgcaatactctagacttttgtcacaggtcaagaacttgacattttttacaatgtgttctacaaggcacagctcagcagcagaactacatttccattagtaccagtgtcactagtggacagagccgtgatttattaggcaaaagggagcagcaaggactaattggctggatgaggacataccagtgtgtgagaggaatgcctaaacaacagagagcacatgcaaaggcagcttgttcctttggtacaacctcatagtraatggcattactaacagatctgagatataagaaatgcagtatgtaatccagaygcgaattcaatcttgctcaaatcagtgcgctttccagaaacactctkatatgaaaaaaggtaaactttgtttagtttgagaggacagtacttagtaaacaagaagataaaaacatctttgttactttccttgctgtaagttgttcatatctgtggttaaatcttttcttaccaccaccacactgaagaaaaagtgcagacttcaacaggcatgaaatatgagaactgttgttgtcttctgtaataat

SEQ ID NO: 41048 - DNA, 600 bp, Chicken  19866894276276_2
tagacttttgtcacaggtcaagaacttgacattttttacaatgtgttctacaaggcacagctcagcagcagaactacatttccattagtaccagtgtcactagtggacagagccgtgatttattaggcaaaagggagcagcaaggactaattggctggatgaggacataccagtgtgtgagaggaatgcctaaacaacagagagcacatgcaaaggcagcttgttcctttggtacaacctcatagtraatggcattactaacagatctgagatataagaaatgcagtatgtaatccagaygcgaattcaatcttgctcaaatcagtgcgctttccagaaacactctkatatgaaaaaaggtaaactttgtttagtttgagaggacagtacttagtaaacaagaagataaaaacatctttgttactttccttgctgtaagttgttcatatctgtggttaaatcttttcttaccaccaccacactgaagaaaaagtgcagacttcaacaggcatgaaatatgagaactgttgttgtcttctgtaataatccagtaatggtatacccttaagcagaaattattacgttctaaaagaatccagt

SEQ ID NO: 41049 - DNA, 600 bp, Chicken  19866894276276_3
ctacaaggcacagctcagcagcagaactacatttccattagtaccagtgtcactagtggacagagccgtgatttattaggcaaaagggagcagcaaggactaattggctggatgaggacataccagtgtgtgagaggaatgcctaaacaacagagagcacatgcaaaggcagcttgttcctttggtacaacctcatagtraatggcattactaacagatctgagatataagaaatgcagtatgtaatccagaygcgaattcaatcttgctcaaatcagtgcgctttccagaaacactctkatatgaaaaaaggtaaactttgtttagtttgagaggacagtacttagtaaacaagaagataaaaacatctttgttactttccttgctgtaagttgttcatatctgtggttaaatcttttcttaccaccaccacactgaagaaaaagtgcagacttcaacaggcatgaaatatgagaactgttgttgtcttctgtaataatccagtaatggtatacccttaagcagaaattattacgttctaaaagaatccagtacatattcaacakgtagacttttgtaaggacaagaagataactttaa

SEQ ID NO: 41050 - DNA, 600 bp, Chicken  19866894276276_4
tgctcaaatcagtgcgctttccagaaacactctkatatgaaaaaaggtaaactttgtttagtttgagaggacagtacttagtaaacaagaagataaaaacatctttgttactttccttgctgtaagttgttcatatctgtggttaaatcttttcttaccaccaccacactgaagaaaaagtgcagacttcaacaggcatgaaatatgagaactgttgttgtcttctgtaataatccagtaatggtatacccttaagcagaaattattacgttctaaaagaatccagtacatattcaacakgtagacttttgtaaggacaagaagataactttaaaagtcagggggaggggagagcagtggacattttcatgcatcaaacaatcatacttcaaaagagctggcttggtcctctcagtaacagctgcagatataatgctaataataccgtaaaataaggcttcacatattaaaacagcaacttttttttttaaactgcccttgttctcttatcgcgccatatttagtaacaaccaccagtgtaatcccccaatgtgacctaactatagaattagatgttcttaagagctggaccacatgggg

SEQ ID NO: 41051 - DNA, 599 bp, Chicken  19866894276281_1
  misc_feature (1)..(80): n is any nucleotide
nnnnnnnnnnnnnnnnnnnnnnnnnnnnnnnnnnnnnnnnnnnnnnnnnnnnnnnnnnnnnnnnnnnnnnnnnnnnnnnnatgtctaaggaggagtgacagtactgaactaaacctccatctcctccaacttatttcagcatggctcgatgtgatgctctccttgacactcagattgcttgtcatggtctctcttatttgggaagttgatggatttaacaaaggaagtttattaggttagcgaagtaattttgtaaatcccttttcatgcgttatcctgtttttctaaactcctttgtcratttagtctttccaataggtttctttatgaaattcttttgatgtcagcctgtgggttgtgttgctgaatcacctttcctgataattagggtaacatttgctgttttctgaccacgtggtatccttgtttgatgtattttaaaggaaagcaaagaaaacctgtttctaattatgtgattgcaatgtgggatatctrtgaattctgaaatagaaatcatctggtcctcctgatttgaatgtttagagatcttttagtcttactgctgtccatgcagtaattgccytgtttccatattttct

SEQ ID NO: 41052 - DNA, 600 bp, Chicken  19866894276281_2
atttgggaagttgatggatttaacaaaggaagtttattaggttagcgaagtaattttgtaaatcccttttcatgcgttatcctgtttttctaaactcctttgtcratttagtctttccaataggtttctttatgaaattcttttgatgtcagcctgtgggttgtgttgctgaatcacctttcctgataattagggtaacatttgctgttttctgaccacgtggtatccttgtttgatgtattttaaaggaaagcaaagaaaacctgtttctaattatgtgattgcaatgtgggatatctrtgaattctgaaatagaaatcatctggtcctcctgatttgaatgtttagagatcttttagtcttactgctgtccatgcagtaattgccytgtttccatattttctggtagttccacctgatagataaggctgtaactgagatagaccaagatctctcgtctcaagtctacatcattacttctgcaactgttgagaaatatttttcctagataaacatgtctgtagattttactaatggtcttaatcagaggtcatcgcttactattaataggtaatggcaaaggcaatatgtaaaattgtt

SEQ ID NO: 41053 - DNA, 600 bp, Chicken  19866894276281_3
tctaaactcctttgtcratttagtctttccaataggtttctttatgaaattcttttgatgtcagcctgtgggttgtgttgctgaatcacctttcctgataattagggtaacatttgctgttttctgaccacgtggtatccttgtttgatgtattttaaaggaaagcaaagaaaacctgtttctaattatgtgattgcaatgtgggatatctrtgaattctgaaatagaaatcatctggtcctcctgatttgaatgtttagagatcttttagtcttactgctgtccatgcagtaattgccytgtttccatattttctggtagttccacctgatagataaggctgtaactgagatagaccaagatctctcgtctcaagtctacatcattacttctgcaactgttgagaaatatttttcctagataaacatgtctgtagattttactaatggtcttaatcagaggtcatcgcttactattaataggtaatggcaaaggcaatatgtaaaattgtttaaaacatctaaggaaaggaaaaaataaaaactcttcaataacaaaactgaacatttcagtatttgggtggactttgatatcagactt

SEQ ID NO: 41054 - DNA, 600 bp, Chicken  19866894276292_1
ttagcttactacctgcttttcttttaaagcagtgctaatttaagtatactggagcaaatttttaaagtatgcttctgttcagacttaatgctgatagcaagtacttctcttagctttgaaaaacaattgataatctggaaccaaaatctgagctgcagccaggcagctgcatgttagactcctgcatgcagagtggggcccctctgcttgcttacctgctagcagtgtgctggcactgtaacgtggaccaggaactgaaaggcagcagctgaagtagcttccagtgtagtctccactatygtttcttggacagccctctatttccctgaattcattgttgtatcagtaacaacttcttaacacagcagcaagtgcaggtttttctggggaggtctttgagatggaatataacctcgatccacagggctcctgggtttctggcctcgtttcatggcaggagttgtgaaacctggacatacgctgtggaattttcagtgacgtagttggtaaaaatgctccttacaaacgatttgaagtggaaggatgacagacttcgtgggtgagcaaagagcagtagttgaagggaagagtgggatttgc

SEQ ID NO: 41055 - DNA, 600 bp, Chicken  19866894276312_1
gcagcctggtgactcctatcatgacaaaccagctctccattggtgctccccctatctaactcaaacattcctgcagaagttaatggatatggctcatgtatctgcccatcttcacagacagcattaccaagttgtaaaaccatatccatactgattgcctaaccaagctgggggtcactggtgccagtggcaggcaggctgagggcagagggagctttagagaagcttcagaaacctgaaaggtctgacatctctgtttgtgagtaggtgccaactcattttcaatacaagggggaaaayggcagattagaacaagaaaataaatgtcctcatggtgttaaatctgtgtggttatgccagtgatagagtgacaccaacttttgtcagcagtggtacggtccattttatgggggctcagactaggaaacaaggacccacccgtacgttgctatatgggaactgctgggaagcagcatcttccagagctcctctcaagccaccacagagcaatggaaatgcagcaaacaaaagctgctgccaccaccacccaaagctccatcaaagacatgaactttggcctttttctttctttctttcttt

SEQ ID NO: 41056 - DNA, 599 bp, Chicken  19866894276321_1
  misc_feature (1)..(111): n is any nucleotide
nnnnnnnnnnnnnnnnnnnnnnnnnnnnnnnnnnnnnnnnnnnnnnnnnnnnnnnnnnnnnnnnnnnnnnnnnnnnnnnnnnnnnnnnnnnnnnnnnnnnnnnnnnnnnnnccggggagcggccctactgctgcccggcctgcggcaagggcttcatccagaagcaccacctccagaaacaccaacgcatccacggggtgcagctgcggggcggctgggcgggacggccgcgtgccagcgcagccggggagcggctctaccgctgcatcgagtgcacggagagcttccccatgcaaacgytgctggaggagcaccagcgccggcacacccagcagcggcccttccagtgyaacggctgcagcaagagcttccgccaccggcagtccttgaaccaccaccagaaggtccacgccgtggccaacgctcccgctgccagcttgccaaaccgggggacagggaccgacccctgcaagccattgacccaggataatccrtagcacgagggctgcagatgggatggaaggggcagcatttgtgcaggcagagaggtgaagcagcctgcgatggagggatgcagcgggcagctggcatcacagcgc

SEQ ID NO: 41057 - DNA, 599 bp, Chicken  19866894276321_2
  misc_feature (1)..(61): n is any nucleotide
nnnnnnnnnnnnnnnnnnnnnnnnnnnnnnnnnnnnnnnnnnnnnnnnnnnnnnnnnnnnnccggggagcggccctactgctgcccggcctgcggcaagggcttcatccagaagcaccacctccagaaacaccaacgcatccacggggtgcagctgcggggcggctgggcgggacggccgcgtgccagcgcagccggggagcggctctaccgctgcatcgagtgcacggagagcttccccatgcaaacgytgctggaggagcaccagcgccggcacacccagcagcggcccttccagtgyaacggctgcagcaagagcttccgccaccggcagtccttgaaccaccaccagaaggtccacgccgtggccaacgctcccgctgccagcttgccaaaccgggggacagggaccgacccctgcaagccattgacccaggataatccrtagcacgagggctgcagatgggatggaaggggcagcatttgtgcaggcagagaggtgaagcagcctgcgatggagggatgcagcgggcagctggcatcacagcgccacggggatgaggatsgagctggctgatccacagcctgagcacgaggaga

SEQ ID NO: 41058 - DNA, 600 bp, Chicken  19866894276321_3
ggggtgcagctgcggggcggctgggcgggacggccgcgtgccagcgcagccggggagcggctctaccgctgcatcgagtgcacggagagcttccccatgcaaacgytgctggaggagcaccagcgccggcacacccagcagcggcccttccagtgyaacggctgcagcaagagcttccgccaccggcagtccttgaaccaccaccagaaggtccacgccgtggccaacgctcccgctgccagcttgccaaaccgggggacagggaccgacccctgcaagccattgacccaggataatccrtagcacgagggctgcagatgggatggaaggggcagcatttgtgcaggcagagaggtgaagcagcctgcgatggagggatgcagcgggcagctggcatcacagcgccacggggatgaggatsgagctggctgatccacagcctgagcacgaggagaccgagtggccctggacccaatggagctggtctggtggtagggctgagctgggctgtgctgctgcccagtggaaaaaggctcagccaaagagcagctcggcgtgtttggcaccgtgggatggggagcggagcacttgaaatcaggg

SEQ ID NO: 41059 - DNA, 600 bp, Chicken  19866894276321_4
agcgccggcacacccagcagcggcccttccagtgyaacggctgcagcaagagcttccgccaccggcagtccttgaaccaccaccagaaggtccacgccgtggccaacgctcccgctgccagcttgccaaaccgggggacagggaccgacccctgcaagccattgacccaggataatccrtagcacgagggctgcagatgggatggaaggggcagcatttgtgcaggcagagaggtgaagcagcctgcgatggagggatgcagcgggcagctggcatcacagcgccacggggatgaggatsgagctggctgatccacagcctgagcacgaggagaccgagtggccctggacccaatggagctggtctggtggtagggctgagctgggctgtgctgctgcccagtggaaaaaggctcagccaaagagcagctcggcgtgtttggcaccgtgggatggggagcggagcacttgaaatcagggttacttcaatccttaccagcattcgaggttggttggggggtgcgggtggcccagggagaggctgttgttgctgggacagccggagtcaccgcacaaatgaggagaggtttggataaaggat

SEQ ID NO: 41060 - DNA, 600 bp, Chicken  19866894276334_1
gatggctggcaagcacagccccagctgggcacggctctgggatggaaacccaaagcacgcagtgtaatgcatgccgcaaccacagcttgaaggctgccggccccgagcagtgctgacacatctataaaaacacaaccaccagtgggtcccaccacagggcgaggagcacagcgacagccctgcaccatggaaacccactcacaacagctgcagagaggcctggccccagctgcccacaccacccaggggtgcaaacagctccactgcagcacaggtctcgaagcaaatgaccccatcccrtttcttttccagctacttctgcaccccctagaaaaccagacttcttttggcaagaacgacaatatcctggggacatctcgttttggtttttatctattcctgtatctccttggagtttggagagaacccatggcctcccacatcaattccggcttccatttattaaatacctctctggcattttcctttcacttgcacgccgctcgtttaatattacacttgacattctaagctttatggatggcaacagaggcagaacgggagggataaaaatatcccacgtgggaaggcaggctgcag

SEQ ID NO: 41061 - DNA, 600 bp, Chicken  19866894276340_1
acatatgactgacagctgctgcctcaaatacagcaagtgaatgggctggaggagtgtaaaattttcaaccaaaaaaacagcaggtagcttttcatgaaaaaaaatccatattccttttattttagcttatctttgtgcttcgctccatgttctgctattatgaagctgacccactatgcgtcaggaagggactgccaagatgttaacaatacctatcacaaaacctcctcttctagcagacattaaaatccatgaacacagagcagtctcttttcaatggactgagagtggggagccagrcaaaaagaatgatactgtatattagctgctctcagacatgacagaaggcagcagaacttctagcattaattccatgatagatattcctgaaaaaaaatttccactgaaaaaaaaatacactatattgataataaaggaaagagatgaagaatcatagaatcctagaatcgctaaggttggaaaagacccacaggatcatccaggccaaccattcgcccttcaccaatggttctcactaaaccatgtccctcaacacaacaacatccaaacgctctttgaacaccaccagggtcagtgact

SEQ ID NO: 41062 - DNA, 599 bp, Chicken  19866894276342_1
  misc_feature (1)..(140): n is any nucleotide
nnnnnnnnnnnnnnnnnnnnnnnnnnnnnnnnnnnnnnnnnnnnnnnnnnnnnnnnnnnnnnnnnnnnnnnnnnnnnnnnnnnnnnnnnnnnnnnnnnnnnnnnnnnnnnnnnnnnnnnnnnnnnnnnnnnnnnnnnnnnttttgaaagctaaatgccagcacacttcagtcctttgtgctccagtctcttgattgctgatgatattgcccactgctccagcctctgaaaacatctacagctttctattcctcttattcccttcctgaatgggtttcctgggctgagttgcatcattccmtgtgttgcaaggttgaactgaactgcctgcaggtggcaagttagtttggacttttgcctcattcagtcccctgtgtttgctgaggcagcagtcagacactggataatgccagctgtggtaccacactgcaggcagagctgcatgytgaggtttcctcaacattttgggctgttctggaagtgactctgcgtggccagagctgaggtgtgggaaagcattgccaccataccccctctggtggtgcarcctgtcccacctggacactccctgcctggctgcccagaccgctctgtatctgt

SEQ ID NO: 41063 - DNA, 600 bp, Chicken  19866894276342_2
aaagctaaatgccagcacacttcagtcctttgtgctccagtctcttgattgctgatgatattgcccactgctccagcctctgaaaacatctacagctttctattcctcttattcccttcctgaatgggtttcctgggctgagttgcatcattccmtgtgttgcaaggttgaactgaactgcctgcaggtggcaagttagtttggacttttgcctcattcagtcccctgtgtttgctgaggcagcagtcagacactggataatgccagctgtggtaccacactgcaggcagagctgcatgytgaggtttcctcaacattttgggctgttctggaagtgactctgcgtggccagagctgaggtgtgggaaagcattgccaccataccccctctggtggtgcarcctgtcccacctggacactccctgcctggctgcccagaccgctctgtatctgtgccccccaacctaatgcctccacagcatggccttyggtgagcagcaggttggctgctctaaagggaaagaaagaaactcaaaacacctgctccttaacgaaccatggctgtktctggagccagctggcacctgtcagcccaggtag

SEQ ID NO: 41064 - DNA, 600 bp, Chicken  19866894276342_3
attcctcttattcccttcctgaatgggtttcctgggctgagttgcatcattccmtgtgttgcaaggttgaactgaactgcctgcaggtggcaagttagtttggacttttgcctcattcagtcccctgtgtttgctgaggcagcagtcagacactggataatgccagctgtggtaccacactgcaggcagagctgcatgytgaggtttcctcaacattttgggctgttctggaagtgactctgcgtggccagagctgaggtgtgggaaagcattgccaccataccccctctggtggtgcarcctgtcccacctggacactccctgcctggctgcccagaccgctctgtatctgtgccccccaacctaatgcctccacagcatggccttyggtgagcagcaggttggctgctctaaagggaaagaaagaaactcaaaacacctgctccttaacgaaccatggctgtktctggagccagctggcacctgtcagcccaggtagcctggagtcattctgagagaaactaggaactgttctaattctgctcccacctcacccatggcagaacacaccttctgagtgccctactgtacagcagtaac

SEQ ID NO: 41065 - DNA, 580 bp, Chicken  19866894276342_4
ggcaagttagtttggacttttgcctcattcagtcccctgtgtttgctgaggcagcagtcagacactggataatgccagctgtggtaccacactgcaggcagagctgcatgytgaggtttcctcaacattttgggctgttctggaagtgactctgcgtggccagagctgaggtgtgggaaagcattgccaccataccccctctggtggtgcarcctgtcccacctggacactccctgcctggctgcccagaccgctctgtatctgtgccccccaacctaatgcctccacagcatggccttyggtgagcagcaggttggctgctctaaagggaaagaaagaaactcaaaacacctgctccttaacgaaccatggctgtktctggagccagctggcacctgtcagcccaggtagcctggagtcattctgagagaaactaggaactgttctaattctgctcccacctcacccatggcagaacacaccttctgagtgccctactgtacagcagtaacacaagccttcctgcctgcgtcacccagcagaggtgagaggcccttggtcacagctggagctcatgttt

SEQ ID NO: 41066 - DNA, 503 bp, Chicken  19866894276342_5
gctgtggtaccacactgcaggcagagctgcatgytgaggtttcctcaacattttgggctgttctggaagtgactctgcgtggccagagctgaggtgtgggaaagcattgccaccataccccctctggtggtgcarcctgtcccacctggacactccctgcctggctgcccagaccgctctgtatctgtgccccccaacctaatgcctccacagcatggccttyggtgagcagcaggttggctgctctaaagggaaagaaagaaactcaaaacacctgctccttaacgaaccatggctgtktctggagccagctggcacctgtcagcccaggtagcctggagtcattctgagagaaactaggaactgttctaattctgctcccacctcacccatggcagaacacaccttctgagtgccctactgtacagcagtaacacaagccttcctgcctgcgtcacccagcagaggtgagaggcccttggtcacagctggagctcatgttt

SEQ ID NO: 41067 - DNA, 600 bp, Chicken  19866894276346_1
agcatgcaggctcttgttcattgctgatgaaaatacatggctaacagtgatgattgtgttgcaaagttgtgttttggagctgagaacttgctctatcagatattgttattgtgctgtttgttgttgtttccatggaaataaataggaggcattacttttggtgtaacctatgttaaaatcatacttggttaagaagcaaaaatttttatttagcaacattgaatttattagcctgtaattatggaggagcatcacagttttgttctatggtcatttttaaaatcacattcccttttctgyttttacttttcttaactgacactgcataatgttgttagagacggtttcaacaaaatacaggacttttatagacagcaagctgaagagaaacgcctgataggctgtatttgtgtgatctgcctttgcttctgtgtggagaaagggaagaaagacgcttcctgtctcatttgctgtggttaccatgtatagcttcatcttctttatcattcagatcggtcactcggtagctccacaccaccattctctaaatagaaggaaagaacacgtttccccttgccttccttcccttccataaaaggc

SEQ ID NO: 41068 - DNA, 600 bp, Chicken  19866894276351_1
acttattgttcaaataatttccaagaagattggcaggattaccgaagacactgctgttgtttcaaagaaatatgaaaagagacgagacttgactgaaattgagggcagatagattctggctagattaaaagttataattctgtaatggtagaagattgaactcatcaaccgcagagtattttatacacatctcaaagctttctctaacgaaaaagatgagctgagccttgtccaagggcagccgggagttcagggtgggtggggagaaagaatttgagggatggctgatgtgaaaaaaamcacagcgagcacaaagtcatggaaataatccccccacgctcgattttgagaaaagggagaattcagaaagccttttggatggttatctctatcaaagagactatttttctctttcctccgtacaaatataggagcagaaaggtgacggaaaccatagttcactaaccacgttgggtgattttccggatcatttttaagtaagtcttttcaggataatttttctgcaatcatgcttctgacaaaggattttggctcccttctcttctaacatccccctaccagccccccgccctccgtgga

SEQ ID NO: 41069 - DNA, 600 bp, Chicken  19866894276352_1
tgctgtgctttaccattcttcttttctatttctcccttgataacagagaaagagcagaacaaggggaaggataaaagaaaaaaattacactaagattacaaaaccagtaaattttcaaggcaagaaccctaaatcattacattcaggcaggaagctctgggggggtagggagggagggaggggataaccacatactggaaagaattccttttcataacctataccataaaaattaccttgcaaggaagatttttcatgctaactgattggaggggaggagtcagggaggacagggaataytcmaatcatgggtactttttaccagaagctaattcaatacataacttttttagcatcacagacttcagataactgatcrtatctatgtttaaaacaaaacaaaaagccccacgcaaccaaatccttctctacaggtaagaaatacactcactgatggagattcactcattttcagcaattctaaccaattctggctgtatggagcagctctttctacagtatcacaaaatgcagaaggctgaagtggaaacaaaagttaaaccaaaccatttaaaaattatagtactgtgacaattttat

SEQ ID NO: 41070 - DNA, 600 bp, Chicken  19866894276352_2
tgtgctttaccattcttcttttctatttctcccttgataacagagaaagagcagaacaaggggaaggataaaagaaaaaaattacactaagattacaaaaccagtaaattttcaaggcaagaaccctaaatcattacattcaggcaggaagctctgggggggtagggagggagggaggggataaccacatactggaaagaattccttttcataacctataccataaaaattaccttgcaaggaagatttttcatgctaactgattggaggggaggagtcagggaggacagggaataytcmaatcatgggtactttttaccagaagctaattcaatacataacttttttagcatcacagacttcagataactgatcrtatctatgtttaaaacaaaacaaaaagccccacgcaaccaaatccttctctacaggtaagaaatacactcactgatggagattcactcattttcagcaattctaaccaattctggctgtatggagcagctctttctacagtatcacaaaatgcagaaggctgaagtggaaacaaaagttaaaccaaaccatttaaaaattatagtactgtgacaattttatttc

SEQ ID NO: 41071 - DNA, 600 bp, Chicken  19866894276352_3
aaaaattacactaagattacaaaaccagtaaattttcaaggcaagaaccctaaatcattacattcaggcaggaagctctgggggggtagggagggagggaggggataaccacatactggaaagaattccttttcataacctataccataaaaattaccttgcaaggaagatttttcatgctaactgattggaggggaggagtcagggaggacagggaataytcmaatcatgggtactttttaccagaagctaattcaatacataacttttttagcatcacagacttcagataactgatcrtatctatgtttaaaacaaaacaaaaagccccacgcaaccaaatccttctctacaggtaagaaatacactcactgatggagattcactcattttcagcaattctaaccaattctggctgtatggagcagctctttctacagtatcacaaaatgcagaaggctgaagtggaaacaaaagttaaaccaaaccatttaaaaattatagtactgtgacaattttatttcatttttctcagaactacatgcttgctaccactaggaacacacagtcctttttttttattattattattttccctct

SEQ ID NO: 41072 - DNA, 600 bp, Chicken  19866894276354_1
cccatcagagctctggaaaagagagctaacaaagatctagctaccagttcagtcaccttaaccagttaactaaatattgcaagatgaatataggccaacgttggcataacagtaagtggttattaaaaatatgttctgtttgatctgaggaaggggaatattagcataagattatatgtccagggttctaggatgaagttatgtcttgtttccctctaaaatgtaaagaacagatttactgattctcttctgtactctagggattcccacgctttgctcatttttcactggtgacataartggaaaacagcaattagttcaactgtacatgagaaaatgcacactgcttttctaactggatttttatttttatttcaaacaattttctaagctatttttttggtcctgtatttaattgcaaaatcatggatgatacaatgcagtacatatcttatggcatgataagagtagtcctcaagacctcttattcccacagttctgaactgtaaaaatatataaaagactctactttacctgctctaaggatgtctcctaggctagatggaaaggtaggcctttccattcatactcagcagttaa

SEQ ID NO: 41073 - DNA, 600 bp, Chicken  19866894276358_1
tgaaatgccaaggttttgggaatgaggcacctattttctttgcggctctgctaagaatacttacctaagcttttggggtgttgcagtcgtaaatgcagtatccatttttatgttgagttatccagttgacactgaatctggagtctaccgtgtgaggatattcagagactggaggaactttctccttaatgggagagaatgatgtttatatggaagcttgggtttggagctggtcacagctaacctgggtctgacttccacacctcaggtcttgactcagtgaaaacaaatttggtcacrtgtggctgatcttccacatcaaggaggtacctgcccagctcaggtcactgtgtttgggttggcagagatgcagcattctgctcctctaaaacacatgttcttagctgaggaatcagcagagctataaagcaaaagaggatatggcttgtgcacaggttgtactgacctgttccagatcttaccgatgcagttaggtttttggcagtaaatactgagctccctccaagcacacagcagcatgtgttctttaatggcattggtgtggtagcactaatgccagtgaactgcagttttcattgc

SEQ ID NO: 41074 - DNA, 600 bp, Chicken  19866894276363_1
gccctgcaattgcagctgtcagactgtcctgtccaatttctgcaggagagcattttgttatcattggagcaattgctattctccaacacatatagatgcaagcacactacttagttctagaaatactgttagatgacaacataatataacaggtcatacctttggctgacaaatagcatggtagaagacagatctggaaaatctctatcttctctaggagtgacagtctctggttagtgcttaactccatactgcgaacacagagcagttcccttgcaagtggtgcccatcatgctagaygtctacatgagcagaacagaagtacttgtgtggggatcagcctgtgtctcagaggcttcccaccttgcacgaaatccctgtgtttagggagaacctgattcttgtagacaacaggtgccatgtgactatggtgtgccattgtgcygattggaagctgtaatcctaacaagcacrtgactgactagctgctatcctatggtaggaggttcatgggaagaatgagttacaaatgatagygtggccggtcatgaaaataaagggccaggcagcactgggagactaatagttttgcaggctgac

SEQ ID NO: 41075 - DNA, 600 bp, Chicken  19866894276363_2
ataacaggtcatacctttggctgacaaatagcatggtagaagacagatctggaaaatctctatcttctctaggagtgacagtctctggttagtgcttaactccatactgcgaacacagagcagttcccttgcaagtggtgcccatcatgctagaygtctacatgagcagaacagaagtacttgtgtggggatcagcctgtgtctcagaggcttcccaccttgcacgaaatccctgtgtttagggagaacctgattcttgtagacaacaggtgccatgtgactatggtgtgccattgtgcygattggaagctgtaatcctaacaagcacrtgactgactagctgctatcctatggtaggaggttcatgggaagaatgagttacaaatgatagygtggccggtcatgaaaataaagggccaggcagcactgggagactaatagttttgcaggctgactgcaaagtacaattcaccttccaaggtgcagtgaacatactccctctgttccctatcgatatgccacaggatgagcttttgtgaaagaataaggaagaggatgactggccatggcatatcactgagacacacacctacatagggg

SEQ ID NO: 41076 - DNA, 600 bp, Chicken  19866894276363_3
agcatggtagaagacagatctggaaaatctctatcttctctaggagtgacagtctctggttagtgcttaactccatactgcgaacacagagcagttcccttgcaagtggtgcccatcatgctagaygtctacatgagcagaacagaagtacttgtgtggggatcagcctgtgtctcagaggcttcccaccttgcacgaaatccctgtgtttagggagaacctgattcttgtagacaacaggtgccatgtgactatggtgtgccattgtgcygattggaagctgtaatcctaacaagcacrtgactgactagctgctatcctatggtaggaggttcatgggaagaatgagttacaaatgatagygtggccggtcatgaaaataaagggccaggcagcactgggagactaatagttttgcaggctgactgcaaagtacaattcaccttccaaggtgcagtgaacatactccctctgttccctatcgatatgccacaggatgagcttttgtgaaagaataaggaagaggatgactggccatggcatatcactgagacacacacctacataggggggaattttctcactagctcccaactccta

SEQ ID NO: 41077 - DNA, 600 bp, Chicken  19866894276363_4
tgcttaactccatactgcgaacacagagcagttcccttgcaagtggtgcccatcatgctagaygtctacatgagcagaacagaagtacttgtgtggggatcagcctgtgtctcagaggcttcccaccttgcacgaaatccctgtgtttagggagaacctgattcttgtagacaacaggtgccatgtgactatggtgtgccattgtgcygattggaagctgtaatcctaacaagcacrtgactgactagctgctatcctatggtaggaggttcatgggaagaatgagttacaaatgatagygtggccggtcatgaaaataaagggccaggcagcactgggagactaatagttttgcaggctgactgcaaagtacaattcaccttccaaggtgcagtgaacatactccctctgttccctatcgatatgccacaggatgagcttttgtgaaagaataaggaagaggatgactggccatggcatatcactgagacacacacctacataggggggaattttctcactagctcccaactcctaatctcccaccgtggtcagccttgctgcagaaatgtctttttagaaaggaaatacactactaaa

SEQ ID NO: 41078 - DNA, 600 bp, Chicken  19866894276365_1
ttaaaagactcccagatcagatgcttcattgtttcattcatgtaagttcgttacgcatcttcactggtgctgcatggcctagaagccagtaattctgctccttctgaatgcttctgccattcagtcttgcaggacaagatatctgagctgtagtttaggacactttgaaactggaggtgacataagctaaattaaagaaatttcattgctgattttcaaatggaagaggaaagaaaggtgaaattacctggaagaattttcaggcagaacatcttgagccagttgtatggctggacttcyctggcttgctgaaccaccagctctcccttattgttggaattgtttgaagtcatttcattataccactatagtgatatgtaacacctttattgttcagcataatgttctataggcacaccaagatggcaaaaccaacagtgcaaggcattagagaagtgtcccagcatagactgattgcctctgttcagcaggaggacacagctttagcccagaaggctacgcacagcaatgcaaatgaagtgttttgagtgaccagcttatacctctcagagtaacacaaagtcgagctctgcctagctg

SEQ ID NO: 41079 - DNA, 600 bp, Chicken  19866894276365_2
agctctcccttattgttggaattgtttgaagtcatttcattataccactatagtgatatgtaacacctttattgttcagcataatgttctataggcacaccaagatggcaaaaccaacagtgcaaggcattagagaagtgtcccagcatagactgattgcctctgttcagcaggaggacacagctttagcccagaaggctacgcacagcaatgcaaatgaagtgttttgagtgaccagcttatacctctcagagtaacacaaagtcgagctctgcctagctggagacacactttaatgcyccagctgaggttatagcacagggaaaaaaaaaaatctctttcacaatcaaaaatgaagggttgggagaagacgttgtagggttaagcactgaagaggggtgtttccaaaataagaagtgctttccaaagtagttcagatttcaaccaggttacctacatacaagttacaaagaaagaaaaaaacagacttgtcatctctgcatgttttgcatgtactgaatcacatgagttttggtactaagagaaccgctactaaagaaaactaccctttaaaatgtatttgaatttcagatctataga

SEQ ID NO: 41080 - DNA, 599 bp, Chicken  19866894276366_1
  misc_feature (1)..(156): n is any nucleotide
nnnnnnnnnnnnnnnnnnnnnnnnnnnnnnnnnnnnnnnnnnnnnnnnnnnnnnnnnnnnnnnnnnnnnnnnnnnnnnnnnnnnnnnnnnnnnnnnnnnnnnnnnnnnnnnnnnnnnnnnnnnnnnnnnnnnnnnnnnnnnnnnnnnnnnnnnnnnaccaagcagaaggtagctaggagaagctcctttttttctgagacctatccctgaacaggaaccaaacttctttgactgcttgaaagacagctgggactgaggcccaagctactggggagccccactttgcatgaggctttataygaacttccaaagggttcaagaagccaaactgttcccagtggggagatctagagattgcatccagcccttgcctttctgtgaagcagagcatcctgaaatgggaagccccagtcatattcagagacatgctggcatggctgcagtgcttttagtttcagcagtgtccctgtgaagtgctcagatgggagcagcatcctggccagcccaggaggacaggccccagggaggtcctcttgaagtcccttgctctgccttgctgcccctgctggatgggacccagggtgggtcatgctctcagt

SEQ ID NO: 41081 - DNA, 600 bp, Chicken  19866894276366_2
acagcctcagcacaacattggaggagtgtttctgggctgtctgtgtggtgggatgtccccttcctgagctcttggctgcaggcaggagctgctgacctgcctcacaccagcatgctggcagcccaagtcatccaaccccccacccaaatagcctcggctttacagcaaggaggagggtgaaggtgagctgggcctactggtttaatgtctgctgagatgtgctgttatttccaatccattcaacccatcttcttgagctcccctgagatatttaagtgggcttgagcatctcggtccagraggtaaatgatgccttgcactctgctaagccccatcttacccccaaaatggtctctgaggcagtgtcctygcaaccatgtgcttgttcaggatgtctgtatggcatcctatggcacttcttgggtatctgccctgctttwattcctgaccccagtcactccccttcctcagccagctctgatgtgaaatgccagcggctgtccggccactgtgaggcactgcatgattcctcagtggcttctggagtgacaagtgccctgggaagggaagaacgtgggaatttgaggaactgcattgttt

SEQ ID NO: 41082 - DNA, 543 bp, Chicken  19866894276366_3
cttggctgcaggcaggagctgctgacctgcctcacaccagcatgctggcagcccaagtcatccaaccccccacccaaatagcctcggctttacagcaaggaggagggtgaaggtgagctgggcctactggtttaatgtctgctgagatgtgctgttatttccaatccattcaacccatcttcttgagctcccctgagatatttaagtgggcttgagcatctcggtccagraggtaaatgatgccttgcactctgctaagccccatcttacccccaaaatggtctctgaggcagtgtcctygcaaccatgtgcttgttcaggatgtctgtatggcatcctatggcacttcttgggtatctgccctgctttwattcctgaccccagtcactccccttcctcagccagctctgatgtgaaatgccagcggctgtccggccactgtgaggcactgcatgattcctcagtggcttctggagtgacaagtgccctgggaagggaagaacgtgggaatttgaggaactgcattgttttgggctggctgaa

SEQ ID NO: 41083 - DNA, 473 bp, Chicken  19866894276366_4
cacccaaatagcctcggctttacagcaaggaggagggtgaaggtgagctgggcctactggtttaatgtctgctgagatgtgctgttatttccaatccattcaacccatcttcttgagctcccctgagatatttaagtgggcttgagcatctcggtccagraggtaaatgatgccttgcactctgctaagccccatcttacccccaaaatggtctctgaggcagtgtcctygcaaccatgtgcttgttcaggatgtctgtatggcatcctatggcacttcttgggtatctgccctgctttwattcctgaccccagtcactccccttcctcagccagctctgatgtgaaatgccagcggctgtccggccactgtgaggcactgcatgattcctcagtggcttctggagtgacaagtgccctgggaagggaagaacgtgggaatttgaggaactgcattgttttgggctggctgaa

SEQ ID NO: 41084 - DNA, 600 bp, Chicken  19866894276368_1
ctggcacgtgtgcaaaccttgattataattagctggcagttcagctgcagatgtaatttcagtaaaaattacttggatatggaaagaagaattacctcatctaaattgactgcatcgaattaaggggcttgtaaggaaatctgcaccaaacatctgactcatcttttgtacaaagatgctctcaggaaatggcccgccgagggaaattaccccaaacaactctgtggttaactagcagctctcctcagacgttgtacttcccaaatcacaacccacagcctcacttgagctgttacacasaaggtagttttgtgcacaggtacctgagttaaggggtctcagcgttccttgctctccttctcctctaaaggtgaggctcaggctgcggttcctccatctcctttctgcatctctctttagcttaagcaatgtgttaccttattcgagctacacacatgcacgtcatcagagataatcagcccaccaaaattattccacgtatctcaatcatctttcagacaaaaaagaaaaagcagcaatgcaccaccaagcacttcagccccctgcatcgttacagcttgcaagatcttctgagttaat

SEQ ID NO: 41085 - DNA, 600 bp, Chicken  19866894276373_1
tgatagtagagctgtatgaaaagtgaatatattactgagaataaaatgtatctgtcagtatctgtaagaaacctgtaagaacaaagattgtttttaaatcccagaaaaaaagtaataacaaataaacagaatacttgccttccagggtattaaaaaaaaaaaaaaaaaaaaaaaaaggttttctattctcaggaggattaataattgacatgtagcagctcttgtggttgaacagtcactaagcagatggatagatattattccctctcatatatttactaacggaaagttcttagaacrggcattgacatagtatgaattactttatgctcttgagatttttagttccataaatatttttggcagcctggctgagggcatctggcctttatttcatacttttaaagcatactttttacatttcccacagagcaacacactgaaatcacaaaccacaactgttgcctcttctctgagaacatggcttatcttgctgaagaaatatgttatataaaatyttcttgcctgtatagtgtatatgatatagtgattatgctatatatgatagtataattacacacctatactaaaggtagcagt

SEQ ID NO: 41086 - DNA, 600 bp, Chicken  19866894276373_2
ctcttgtggttgaacagtcactaagcagatggatagatattattccctctcatatatttactaacggaaagttcttagaacrggcattgacatagtatgaattactttatgctcttgagatttttagttccataaatatttttggcagcctggctgagggcatctggcctttatttcatacttttaaagcatactttttacatttcccacagagcaacacactgaaatcacaaaccacaactgttgcctcttctctgagaacatggcttatcttgctgaagaaatatgttatataaaatyttcttgcctgtatagtgtatatgatatagtgattatgctatatatgatagtataattacacacctatactaaaggtagcagttctgcaattaatttttattcaagagtaataggaagagtacaayttactggttttaagataacatttacagttactttgggaaccttmgatgacaagatgacaggactgatcattaacatgctgtttacaaacacagactacatctgtgttctctgaaaagaacataggatctgggatcagactcaagtaagtttcacatttgcagctgagaacagata

SEQ ID NO: 41087 - DNA, 600 bp, Chicken  19866894276373_3
agttccataaatatttttggcagcctggctgagggcatctggcctttatttcatacttttaaagcatactttttacatttcccacagagcaacacactgaaatcacaaaccacaactgttgcctcttctctgagaacatggcttatcttgctgaagaaatatgttatataaaatyttcttgcctgtatagtgtatatgatatagtgattatgctatatatgatagtataattacacacctatactaaaggtagcagttctgcaattaatttttattcaagagtaataggaagagtacaayttactggttttaagataacatttacagttactttgggaaccttmgatgacaagatgacaggactgatcattaacatgctgtttacaaacacagactacatctgtgttctctgaaaagaacataggatctgggatcagactcaagtaagtttcacatttgcagctgagaacagatacctctacctataaagaataactaatggcatagatacttccatgtatgggaactattgaatcatggcctgaaccactgatggagcacctggggaaaggacctggtcagttctgagagcacaggtga

SEQ ID NO: 41088 - DNA, 600 bp, Chicken  19866894276373_4
tttatttcatacttttaaagcatactttttacatttcccacagagcaacacactgaaatcacaaaccacaactgttgcctcttctctgagaacatggcttatcttgctgaagaaatatgttatataaaatyttcttgcctgtatagtgtatatgatatagtgattatgctatatatgatagtataattacacacctatactaaaggtagcagttctgcaattaatttttattcaagagtaataggaagagtacaayttactggttttaagataacatttacagttactttgggaaccttmgatgacaagatgacaggactgatcattaacatgctgtttacaaacacagactacatctgtgttctctgaaaagaacataggatctgggatcagactcaagtaagtttcacatttgcagctgagaacagatacctctacctataaagaataactaatggcatagatacttccatgtatgggaactattgaatcatggcctgaaccactgatggagcacctggggaaaggacctggtcagttctgagagcacaggtgaaggcaattcacttgtgtgactgaaaggggtggagcctggctgca

SEQ ID NO: 41089 - DNA, 600 bp, Chicken  19866894276392_1
tatgtatctctgtgctcatgtgtggaatttggccaactcgaactctgagttggtcatgagcagccaaatggctttcagttttcttttgttgtagctgcattccctacagggtaaaacctttcaggctccgcttcaaggtacaatattctcctctgagaggataaatgattaaaatgcggagtctgcttgtgaaaagtctaactttacaaagttacgctcgtttggtctccaagaaataacagttccatcttttcaggtctcagttaagccaagacatgtgctaattttcttttaactttsgagttctgatggccttaaggaaatatgcatacaagagaaaactggaatctgttgcaccgtgaaggagttggagtgcctggtgtgattaaactggaaagattgtcttcaccagcaatttggagtgattaggtgtgagggcacaggctagtgtttgggtttatgcatcatcacagcttattctaatactttaaaacagatagaataggcaaaccatccatcgtttatcacagaactgcaacttttattacttggctgatatgtctgagtcttgatgggcttggtcatgaaagggatggacca

SEQ ID NO: 41090 - DNA, 600 bp, Chicken  19866894276392_2
tgatgaaggaattcttcaaatatactttttatttagtgagtgtaattaagatagtattgatagcaagatggcaacaagaatgttagaaccagctgtgtaaccagctgtgttggatctgtggtccacctgacagatctcatcccaggcagtaagtgactggactagattttactttggactatagcacctcaacttagaagatttcttcatattattccaactgtaactttccagtaacatctccaggagaggtatgagtttgggacctgaaaaaaattgccacaagacaaaactccataygattggtaagactagcatctgctgattaactattccatgtatatctgaagagtgggttcaggtgcatgtctatccgtggtgaacacctttgggctgagtaatgtgagggttggttgaaagtttttgtcttatccttctatctcagtccacaactctgctttgtagatgataatatctgtgttaatgaatacattcttcaatttctggaaatcatgttcatgtgaatcagtgcatattcctatatgcagaactcaacatctgcaaattaattagtatatgacccttagtgggaaagtgctt

SEQ ID NO: 41091 - DNA, 600 bp, Chicken  19866894276393_1
ctcaggtttctgaaacgtgctcccaaaattgtcccgtgctgaactacagctggaggctgcagatcgaacctgatgatgagctctccatactgcacctcgtgttgctttccttccgagcaggccgggtcgtggcagggtgttttctcagcatctgtgtgttgaagcccagggctgcagctgggaggtgggtgcaccttttgggagctgctttctgctgctggtggtgcagcagtgacacagagcagctggcggggatctctgttggtgtggcattgccaacctgccaggcctgctgggtgstaccgacaccaggcaagttcagttacagctttgctactgggcaggggcatcagcagcttgagcttttgyatttttgragttgtactggaagagtacatttagaggggctttgttaagtggtggaatgatgcgtaactcagaagcaaacgtaaatcagagatgtgatgggcggagctgatgtaaaacaaatctgactgctttgtcataagcataaagcaaacttctcacttgttcagctttctgtagagtattcaccgtggagccatgcgtgacctctcaaaccaagttggcaaggctgag

SEQ ID NO: 41092 - DNA, 600 bp, Chicken  19866894276393_2
ctgatgatgagctctccatactgcacctcgtgttgctttccttccgagcaggccgggtcgtggcagggtgttttctcagcatctgtgtgttgaagcccagggctgcagctgggaggtgggtgcaccttttgggagctgctttctgctgctggtggtgcagcagtgacacagagcagctggcggggatctctgttggtgtggcattgccaacctgccaggcctgctgggtgstaccgacaccaggcaagttcagttacagctttgctactgggcaggggcatcagcagcttgagcttttgyatttttgragttgtactggaagagtacatttagaggggctttgttaagtggtggaatgatgcgtaactcagaagcaaacgtaaatcagagatgtgatgggcggagctgatgtaaaacaaatctgactgctttgtcataagcataaagcaaacttctcacttgttcagctttctgtagagtattcaccgtggagccatgcgtgacctctcaaaccaagttggcaaggctgagggatctccttagggtgggcttccaagtaggaaaagcaaaatggcagtccattaggagctcccgttatcc

SEQ ID NO: 41093 - DNA, 600 bp, Chicken  19866894276393_3
gagctctccatactgcacctcgtgttgctttccttccgagcaggccgggtcgtggcagggtgttttctcagcatctgtgtgttgaagcccagggctgcagctgggaggtgggtgcaccttttgggagctgctttctgctgctggtggtgcagcagtgacacagagcagctggcggggatctctgttggtgtggcattgccaacctgccaggcctgctgggtgstaccgacaccaggcaagttcagttacagctttgctactgggcaggggcatcagcagcttgagcttttgyatttttgragttgtactggaagagtacatttagaggggctttgttaagtggtggaatgatgcgtaactcagaagcaaacgtaaatcagagatgtgatgggcggagctgatgtaaaacaaatctgactgctttgtcataagcataaagcaaacttctcacttgttcagctttctgtagagtattcaccgtggagccatgcgtgacctctcaaaccaagttggcaaggctgagggatctccttagggtgggcttccaagtaggaaaagcaaaatggcagtccattaggagctcccgttatcctctctcaa

SEQ ID NO: 41094 - DNA, 600 bp, Chicken  19866894276402_1
aaataaatgctccaccgagagagaggtatctggcatcttatcaagggactataaacagaaaagggatggggttccttagaaacaaggtttgtctttctgctcagtttcaagcttacggggagggagggggatgcagtgaattttcacagggtacaaatttgtagattaaggtttgtataggacaagaacttgatttaagtagaccccaaagcactatgaaaacaactcttaatcgtttgtgtagaattcgggtaattacacagctaactccacagcagaaaaagaaatccactgcactcyagttgaatgctgaacttttctaagcaaaacagtgggagctaaattagaggcaatggagttacccagctggaaagctgctggtaaaatacygagtattgataattcccacattcctttgctaccaagaaatcatacagccctttcatagctgactgataagccgagaagcggtgcatttaactaaccactgaaaggcagtgttgcttattgaaccaggtcagcacctgtgtatatctttagaggacaacaaagagcctggctggttatctccaactactgtctgtctatggcatatcgtgc

SEQ ID NO: 41095 - DNA, 600 bp, Chicken  19866894276402_2
gtctttctgctcagtttcaagcttacggggagggagggggatgcagtgaattttcacagggtacaaatttgtagattaaggtttgtataggacaagaacttgatttaagtagaccccaaagcactatgaaaacaactcttaatcgtttgtgtagaattcgggtaattacacagctaactccacagcagaaaaagaaatccactgcactcyagttgaatgctgaacttttctaagcaaaacagtgggagctaaattagaggcaatggagttacccagctggaaagctgctggtaaaatacygagtattgataattcccacattcctttgctaccaagaaatcatacagccctttcatagctgactgataagccgagaagcggtgcatttaactaaccactgaaaggcagtgttgcttattgaaccaggtcagcacctgtgtatatctttagaggacaacaaagagcctggctggttatctccaactactgtctgtctatggcatatcgtgctgaaagcattgcaaagtcgagagctggggaatggctgcaatgtgcaagctgcagcagggaatggagtcactacgtaggtaactgaatggt

SEQ ID NO: 41096 - DNA, 600 bp, Chicken  19866894276403_1
cctctgcaaaacccgaaatcccacctcctataatgctggcaaagcttgccctatttttgctccatctgcttctgttataaactttttatgaaaccatttaaaaacattattttccacattgcttttactttgtattgattcaaacaaaaacgtattactcatttcaaaccattggctataaaacctaagattcaaagtagatcttcctgtatggtaaggactgacagcttcatagcaatggaaagccctatgatcttggattcttaagtaatgaaaacaagaaaaagggattattttagktaagtctatgattttacaaacttggagagggttctgaaggttaggtactgcatttccttctgcctgaagccactgcacttaatcactaatgtttacagcattctggatatgaagatttaaaaacaaaaaaacagagatagtaaagatttttaagagtctctgacccttcaaaagtagtttgtgcatacccaatgtgccatcccctaaataattacttgtacagctttgtacacccacacaattaggccatggcttcacaatttcaaacttgaactcactaaacctttgaactcattacag

SEQ ID NO: 41097 - DNA, 600 bp, Chicken  19866894276403_2
tactttgtattgattcaaacaaaaacgtattactcatttcaaaccattggctataaaacctaagattcaaagtagatcttcctgtatggtaaggactgacagcttcatagcaatggaaagccctatgatcttggattcttaagtaatgaaaacaagaaaaagggattattttagktaagtctatgattttacaaacttggagagggttctgaaggttaggtactgcatttccttctgcctgaagccactgcacttaatcactaatgtttacagcattctggatatgaagatttaaaaackaaaaaacagagatagtaaagatttttaagagtctctgacccttcaaaagtagtttgtgcatacccaatgtgccatcccctaaataattacttgtacagctttgtacacccacacaattaggccatggcttcacaatttcaaacttgaactcactaaacctttgaactcattacagtatcactctgttgcatacatgaagaatttaatttaaaaatcaatatataatccaattactaaccttgtgaacaggagagagacctctcctgatattctttttcccctgttgtggatgcatagctg

SEQ ID NO: 41098 - DNA, 600 bp, Chicken  19866894276404_1
taacttggtggggaatatttttctttaattaatcaactttccttttctttttttaagtttggtgaggcaggttgctgttttttctttgtctctattgcacaaaggatataaatgacaatctacaagctgacattattaaaagactaccttcagagctgtttacttagtataacatcatatttcagctgcagaatttgaagagctctggcagaagctacattccagagaggtcttgtaaggcaggtagaaatatgtgcttatcatgttcaactactgaaaagtatacaaaaggaaaaactscacatttaaccaacaaagcagatctktktttctaaatactaacttctgaggctttccttagcttcagtatttcctcttctctcaacatggtggctacctcctctgtttttcttcttggtttgctctacttgcttgtgaatgtttaatattgatcagctctgcccttcactctgggatgtctgccaaacacctcatgctagctattacaggattaaatatattttgtctatctggaagaagatttttcagtctctgctgttctctggcatccagcttacaagggttgctttaaaattcctt

SEQ ID NO: 41099 - DNA, 600 bp, Chicken  19866894276404_2
aattaatcaactttccttttctttttttaagtttggtgaggcaggttgctgttttttctttgtctctattgcacaaaggatataaatgacaatctacaagctgacattattaaaagactaccttcagagctgtttacttagtataacatcatatttcagctgcagaatttgaagagctctggcagaagctacattccagagaggtcttgtaaggcaggtagaaatatgtgcttatcatgttcaactactgaaaagtatacaaaaggaaaaactscacatttaaccaacaaagcagatctktktttctaaatactaacttctgaggctttccttagcttcagtatttcctcttctctcaacatggtggctacctcctctgtttttcttcttggtttgctctacttgcttgtgaatgtttaatattgatcagctctgcccttcactctgggatgtctgccaaacacctcatgctagctattacaggattaaatatattttgtctatctggaagaagatttttcagtctctgctgttctctggcatccagcttacaagggttgctttaaaattccttgcctggggccaaatcactcctgctaa

SEQ ID NO: 41100 - DNA, 600 bp, Chicken  19866894276404_3
ttaatcaactttccttttctttttttaagtttggtgaggcaggttgctgttttttctttgtctctattgcacaaaggatataaatgacaatctacaagctgacattattaaaagactaccttcagagctgtttacttagtataacatcatatttcagctgcagaatttgaagagctctggcagaagctacattccagagaggtcttgtaaggcaggtagaaatatgtgcttatcatgttcaactactgaaaagtatacaaaaggaaaaactscacatttaaccaacaaagcagatctktktttctaaatactaacttctgaggctttccttagcttcagtatttcctcttctctcaacatggtggctacctcctctgtttttcttcttggtttgctctacttgcttgtgaatgtttaatattgatcagctctgcccttcactctgggatgtctgccaaacacctcatgctagctattacaggattaaatatattttgtctatctggaagaagatttttcagtctctgctgttctctggcatccagcttacaagggttgctttaaaattccttgcctggggccaaatcactcctgctaaca

SEQ ID NO: 41101 - DNA, 600 bp, Chicken  19866894276404_4
cttgcttgtgaatgtttaatattgatcagctctgcccttcactctgggatgtctgccaaacacctcatgctagctattacaggattaaatatattttgtctatctggaagaagatttttcagtctctgctgttctctggcatccagcttacaagggttgctttaaaattccttgcctggggccaaatcactcctgctaacaacaaaacctacaagaaggccaccagcagggcaggaattttcatgtggcttagagagctgaatgttttaaacatcatcttctcaagaaacagacagttgractgtaggctgctggtcttacagtgccatggaatagacagcatcctattaaaactcactccaattacactgctgccacactgtttacctttcttgtgctatgctgaaaaatgcaacagttgctcagcctttcaattacattcctgtattttttctggaaagatggtacataaagatatgtcatggttttggctagggtagtttactttcttcaaggaggctcacatatgatgctgtattttggatttggggtgaaaatagtgatgataatacaccaatgttttagttgttgcagagcagc

SEQ ID NO: 41102 - DNA, 600 bp, Chicken  19866894276414_1
tcctgtgggcttattgtaatctctgttatgagattgcagagcaaagcctgtaaatagcaggggcagatgagcacttaagaaacaaagaatgtgctctcatcctgatgtccctaatcaacattcttgaaaagaaaacaaaaatatctaaatgctgcaaggacagtgccttggactatggtgttggttggtttttgtttggttggtttttcgaaaattgttttaaaggagtctgagtgatttcttcagtttttactgtaagagaagatgaccttttacattatactacaataaaagctaaayctaaattattctattatttcagtccatgcaagaccttacatttataaaaagtaaacatattatttgaactaagtgaaaacgtattaaaaaggagaaattgtcatggaagaaaagcagatctatttatgttatgcagccactctggtgtcacatgaggtcttaattaaggagactccttttttacccacacctctgaaggatgtgcttttgtccatagttcctcattcatgaactgagatgtctcaagagcacctccccracatttcacctggtgtaaattgaagtaggctggaaataatc

SEQ ID NO: 41103 - DNA, 600 bp, Chicken  19866894276414_2
agaagatgaccttttacattatactacaataaaagctaaayctaaattattctattatttcagtccatgcaagaccttacatttataaaaagtaaacatattatttgaactaagtgaaaacgtattaaaaaggagaaattgtcatggaagaaaagcagatctatttatgttatgcagccactctggtgtcacatgaggtcttaattaaggagactccttttttacccacacctctgaaggatgtgcttttgtccatagttcctcattcatgaactgagatgtctcaagagcacctccccracatttcacctggtgtaaattgaagtaggctggaaataatcaggaagactgttgattcactccagtagtcaacatacaccaccaagtgcatcaaaatggactgtggaagaaaaatcacacctagttcctgagggctgtgctgtcatcagtctttccaagtcaaatctgagagaatctgccataagagtctttgatagtactagattctcctttagcaccagcgtacacatttgctgtcctggaatttccaccctgtgcatccccagtgaaagtactagttatcctaagtggagatgagca

SEQ ID NO: 41104 - DNA, 600 bp, Chicken  19866894276415_1
aacctcctgtccccgtttgttccttgtgggacatgggggctgtggggcacggagaggcaatgggtgctgttggctccccgcggcagcctcagccctttcccaggcacggtgcagcagtccctgcgccctggaagcggatgtgtatgtttgtgtttggtggtgttcctatggagacctgaccccgccgagctcctgccctgaaccgcagcagagggcccggccccatgggcagcagtgctgtgctgtgctgcagcgctgctgggatgagggtccctgttgccccctgggccccgcagcacsgcagggcaaaaatggcactgctcacggctgctgtcacacctgcaasctggaaccgagctctgctgccctccttgaaacccttattcattaatgagcttaatgagcccacctttttgggagggccgggggatctgagcatgacayggtgcaaagcgctgccaggctcaaacatgacgttcattctgctttgggtgggggttggttcttcttttccctcttctccttcttcttctccttttccttttttacatcccccccccacacacaccatgagagttttgctggggaacaactaaagac

SEQ ID NO: 41105 - DNA, 600 bp, Chicken  19866894276415_2
gcacggagaggcaatgggtgctgttggctccccgcggcagcctcagccctttcccaggcacggtgcagcagtccctgcgccctggaagcggatgtgtatgtttgtgtttggtggtgttcctatggagacctgaccccgccgagctcctgccctgaaccgcagcagagggcccggccccatgggcagcagtgctgtgctgtgctgcagcgctgctgggatgagggtccctgttgccccctgggccccgcagcacsgcagggcaaaaatggcactgctcacggctgctgtcacacctgcaasctggaaccgagctctgctgccctccttgaaacccttattcattaatgagcttaatgagcccacctttttgggagggccgggggatctgagcatgacayggtgcaaagcgctgccaggctcaaacatgacgttcattctgctttgggtgggggttggttcttcttttccctcttctccttcttcttctccttttccttttttacatcccccccccacacacaccatgagagttttgctggggaacaactaaagacggccacgcttcagctttgctccagtgggtgctgggaaggtttgctg

SEQ ID NO: 41106 - DNA, 600 bp, Chicken  19866894276415_3
tgtttgtgtttggtggtgttcctatggagacctgaccccgccgagctcctgccctgaaccgcagcagagggcccggccccatgggcagcagtgctgtgctgtgctgcagcgctgctgggatgagggtccctgttgccccctgggccccgcagcacsgcagggcaaaaatggcactgctcacggctgctgtcacacctgcaasctggaaccgagctctgctgccctccttgaaacccttattcattaatgagcttaatgagcccacctttttgggagggccgggggatctgagcatgacayggtgcaaagcgctgccaggctcaaacatgacgttcattctgctttgggtgggggttggttcttcttttccctcttctccttcttcttctccttttccttttttacatcccccccccacacacaccatgagagttttgctggggaacaactaaagacggccacgcttcagctttgctccagtgggtgctgggaaggtttgctgcaggcaggcagcatctcgtccctgtgcagccctgcagcctggggacaccgggagaggcagtgggcactgcaggtggtgccagggtaggttgttgagtc

SEQ ID NO: 41107 - DNA, 600 bp, Chicken  19866894276419_1
atgagacttcaaagtaagggaaaaaagacagaaaataaagaaattaatgcaaaaaaaaatccattttcaatgattaaacagagactacaaaatctttctggggagttgcgtttttagctgactgagtctgacagaaattttagattacagtactgcttgcagcactgcaatttcctctgtagaaaggtccaacttctgcctccactgaaatcagtaacagctccctctggtttcagtggtgcaggaacagcccctaacttattcaaatctatagcagcagggagacatccactccttacractgcttcacagagagaacttttctatatcaagcaytcattgcacagaccagggcttcgtaatgcatcagaaatwaaattaaaacttataggtcagaaatacttacttccactagggatcaggtccctrtctggaatgaagagcttatatccatagtgcttttctagaacatctggcagaatttctagtgcaaactgctcctcttcattattatcgcaatccaatgcatcaggatccactttggtgtatgaaagatatgcatcgtattccttgttatctgtaaggaaacaagctcacatt

SEQ ID NO: 41108 - DNA, 600 bp, Chicken  19866894276419_2
aaagaaattaatgcaaaaaaaaatccattttcaatgattaaacagagactacaaaatctttctggggagttgcgtttttagctgactgagtctgacagaaattttagattacagtactgcttgcagcactgcaatttcctctgtagaaaggtccaacttctgcctccactgaaatcagtaacagctccctctggtttcagtggtgcaggaacagcccctaacttattcaaatctatagcagcagggagacatccactccttacractgcttcacagagagaacttttctatatcaagcaytcattgcacagaccagggcttcgtaatgcatcagaaatwaaattaaaacttataggtcagaaatacttacttccactagggatcaggtccctrtctggaatgaagagcttatatccatagtgcttttctagaacatctggcagaatttctagtgcaaactgctcctcttcattattatcgcaatccaatgcatcaggatccactttggtgtatgaaagatatgcatcgtattccttgttatctgtaaggaaacaagctcacattcagccctgctgtttgcaagagcactacaaaaagcac

SEQ ID NO: 41109 - DNA, 600 bp, Chicken  19866894276419_3
aaacagagactacaaaatctttctggggagttgcgtttttagctgactgagtctgacagaaattttagattacagtactgcttgcagcactgcaatttcctctgtagaaaggtccaacttctgcctccactgaaatcagtaacagctccctctggtttcagtggtgcaggaacagcccctaacttattcaaatctatagcagcagggagacatccactccttacractgcttcacagagagaacttttctatatcaagcaytcattgcacagaccagggcttcgtaatgcatcagaaatwaaattaaaacttataggtcagaaatacttacttccactagggatcaggtccctrtctggaatgaagagcttatatccatagtgcttttctagaacatctggcagaatttctagtgcaaactgctcctcttcattattatcgcaatccaatgcatcaggatccactttggtgtatgaaagatatgcatcgtattccttgttatctgtaaggaaacaagctcacattcagccctgctgtttgcaagagcactacaaaaagcacatggcagttctagaaaattgcattattcccagaaatgat

SEQ ID NO: 41110 - DNA, 600 bp, Chicken  19866894276419_4
gacagaaattttagattacagtactgcttgcagcactgcaatttcctctgtagaaaggtccaacttctgcctccactgaaatcagtaacagctccctctggtttcagtggtgcaggaacagcccctaacttattcaaatctatagcagcagggagacatccactccttacractgcttcacagagagaacttttctatatcaagcaytcattgcacagaccagggcttcgtaatgcatcagaaatwaaattaaaacttataggtcagaaatacttacttccactagggatcaggtccctrtctggaatgaagagcttatatccatagtgcttttctagaacatctggcagaatttctagtgcaaactgctcctcttcattattatcgcaatccaatgcatcaggatccactttggtgtatgaaagatatgcatcgtattccttgttatctgtaaggaaacaagctcacattcagccctgctgtttgcaagagcactacaaaaagcacatggcagttctagaaaattgcattattcccagaaatgatcacagaatcacagaatatcttgagttggaagagacacgcaagccgagcccagcc

SEQ ID NO: 41111 - DNA, 600 bp, Chicken  19866894276425_1
gagtcaatttcctagagaaatgaggcttatgcatttcatctggaattattctgtgattactttgaaagagacaagatggggaattatgaaaggcatgaagaaaatgaactggaagagcttttcaattctagatagcaagggagaatctaatgaaattaccaagtaaagcagctaactacaggactgtttctgacaatgtcatagctgtttcaaatacgaatatgcagctctttgccacaggaaaaccagtacttttgcactgcttgaagatgtctgacaacaagcaccattggctgcctsccttgtcttttgtctgaggttttacactgattcctctcagagagaggacactaaactaggctgacttttgctcagactccagtgtggttaatgaagtatgtgttctagcagtttgctgtggattacttcataagaaatttcagtgacatttggctaagctttaagagatacctcagaggttcataagtgactaggagacgagtaggagggagtagtttctcaacagcaccaatttttctatcatcatcattaaacatacgtatggaaaattttagagcaacaaaggaaggaaaacaaatg

SEQ ID NO: 41112 - DNA, 600 bp, Chicken  19866894276429_1
cttcacccattcagcatcagctgaagaagctgccagcaatgcctttggctctcaggactgaggtcagactggagctgagccccatctctcagaagggcagagaggtggggtacagtcacagagccgggcagaggggactctgcagaaaggaaagaaatcagacacagaggccttgaagagcattcagttcctgtggctgctgttgcctgtggtaacatactgttaccctgcacagtcatacccaacatggtgtcatacccagcgctgtcactgacctgccaggattcaaccttcacagcrtgaatggctttgcgctcagacctaaagtctgctgtaaaggagagcagctttccatgcacttcacagacaatggcctgcattatttctgctttgtttcagcttctgtcagctccaaatttcaatgaaatcaagcgcagttctattttccctcttctcttttcatgctcccacactcagggtgactgctgggttcagtgagatcccagcacagccgaagcagatgacatgcagggacagcctgtgaatgctggctcgctaccccacgtctggatgtctgcaaaaccaaggaaaattatttaa

SEQ ID NO: 41113 - DNA, 600 bp, Chicken  19866894276436_1
actttatcactttcatttccagacgctactataaagaaactgatggtctgaaacttgatgttggagcatatatgaaggcattagaggtattttatagcttgcattatgcttactcgctctgtgcaccttgttaaagagtcactggcatgaatatgggtcatcatctgtaattactctccttggtggaggaagtttccacagactgaaacccatttgctgcattctaaagatggctggatttatattattcattttttctgtgtttaaaatgtgaacttttacaatcacggtgtctttacyggaatgaggcccttggaagagggaactggaaaacaaaaacatggtgtattttctgcaacatatccaagaaaaagctgaaggtccattgatgtttggcatagcattgttaacacagccccttgcccttagcaatttacagcataaagtccttattcagcaagatacttatgtgcagtctgtttttaagcycaagtctgtgcagaacccagtagacaaactaacytaagggtgagagaaggggacaattattactctcctttctataggcttgcagagagattctaaaaagattcctattga

SEQ ID NO: 41114 - DNA, 600 bp, Chicken  19866894276436_2
aagtttccacagactgaaacccatttgctgcattctaaagatggctggatttatattattcattttttctgtgtttaaaatgtgaacttttacaatcacggtgtctttacyggaatgaggcccttggaagagggaactggaaaacaaaaacatggtgtattttctgcaacatatccaagaaaaagctgaaggtccattgatgtttggcatagcattgttaacacagccccttgcccttagcaatttacagcataaagtccttattcagcaagatacttatgtgcagtctgtttttaagcycaagtctgtgcagaacccagtagacaaactaacytaagggtgagagaaggggacaattattactctcctttctataggcttgcagagagattctaaaaagattcctattgagtggatgtggataataaaacaacgtaggcaagtatacaagcacagaagatagcgaatgtaatgtatgcttgcagcacattcatttgtatcagtaygaattctggagggattttctgccttcccaacaagtttggacttttcatcatcatggaacaagctagaaatgctttacgtactcaggttttcagc

SEQ ID NO: 41115 - DNA, 600 bp, Chicken  19866894276436_3
ctaaagatggctggatttatattattcattttttctgtgtttaaaatgtgaacttttacaatcacggtgtctttacyggaatgaggcccttggaagagggaactggaaaacaaaaacatggtgtattttctgcaacatatccaagaaaaagctgaaggtccattgatgtttggcatagcattgttaacacagccccttgcccttagcaatttacagcataaagtccttattcagcaagatacttatgtgcagtctgtttttaagcycaagtctgtgcagaacccagtagacaaactaacytaagggtgagagaaggggacaattattactctcctttctataggcttgcagagagattctaaaaagattcctattgagtggatgtggataataaaacaacgtaggcaagtatacaagcacagaagatagcgaatgtaatgtatgcttgcagcacattcatttgtatcagtaygaattctggagggattttctgccttcccaacaagtttggacttttcatcatcatggaacaagctagaaatgctttacgtactcaggttttcagcacactgttggagaacaaagcttttcaactcagac

SEQ ID NO: 41116 - DNA, 481 bp, Chicken  19866894276436_4
gcatagcattgttaacacagccccttgcccttagcaatttacagcataaagtccttattcagcaagatacttatgtgcagtctgtttttaagcycaagtctgtgcagaacccagtagacaaactaacytaagggtgagagaaggggacaattattactctcctttctataggcttgcagagagattctaaaaagattcctattgagtggatgtggataataaaacaacgtaggcaagtatacaagcacagaagatagcgaatgtaatgtatgcttgcagcacattcatttgtatcagtaygaattctggagggattttctgccttcccaacaagtttggacttttcatcatcatggaacaagctagaaatgctttacgtactcaggttttcagcacactgttggagaacaaagcttttcaactcagactgggtactttagccactaaaagtatgcagggatgttgaacgaaccctccacat

SEQ ID NO: 41117 - DNA, 600 bp, Chicken  19866894276441_1
ccagggaaaatgtaagtgcagtttccagcaacacattataaatggattgagcagtaagccattgatccagacatgcaggcaattgaaggcaacgtaagctgcaagtttgttagactgatgtaccagctcttttctgtgttgcttcaggacacaaagtgcctgagcttccaccagtgtggtaatgcagacaaggctacgtgtagaaccctgctcagtctcccaacctcatgatgggactgatgtactcctggactttggctgttacttctcctcagacacagactgcaagctgtgctgggstaaatgttcctgaaaactgtcttaatggtagtactacactttgaaatttattactctagctatgcctttgtggtgccgagatgaagatgggatgagctgagggactgtctaggcccatctggaaaaaattctttcctgatcccccaaagaaacgtccttgagtcagagctatttttgaaggaaaaaagaggtaactgcaagacactccaatgcaaatgcttaaattaccaaaggaaaggtaaaagccggtctactccattctacttcaaaatggctaatgggaaggttgaaattttacct

SEQ ID NO: 41118 - DNA, 600 bp, Chicken  19866894276444_1
catcccgcagcacctgcacccggccggccgggattagagggagcgcggagatcagaggctgctttagagcggccttgaaataggatttcctcaagtgataaggggaagggtgggaagatgcaccgaggtcacagtacctgcaccccccctgcacctcaccgtgtgcctttggggcaccgagcccccgagttgcagtgggaaaatggctctgggtgcaggaaagcaaagctgggagcagccattgctcccaccccaccttcctgcaggcacagcgctgctgcgatcgatgccccgttcagwgctcaggcaaaaaatgaagttctgtgcctgctgtctgcttcaatcatcatttcagtgcaactcgcgatggccgcggtgcagttcgttctcgaatcatgcaaaattaaagcgtgtgttttagcctgccctccgctctcaaaatagccccacgcctgtcgaggtgcccaatatagagcagcatctgcaggactgcgaacccagggatgcttcgacagcagccaaagctctgagctctgcccagcgcctcccgcacccaaaccttccgcccacggcacagggcagaaccccctcctccatgag

SEQ ID NO: 41119 - DNA, 600 bp, Chicken  19866894276448_1
acatcttttaaaagttccctaaacctcccgttccctgatcactgtgcatcaaatatgtcatggagacgccgtgtcacagccatgccgtcacgtccgcgccggcaggagatgggcgctgactgtgaggcctcctggcaggctgttgggtagcccagtcccctcgcgtttgtcagctgcggccgtgctcctctggcggcaggaggccgccggcacgggacctgacacgtccccgcgggccgcagcaccgcgctgacaggccgcgtatgcagccgcgccacgcagccggctcggtgggctccyggcgcggtgctgggatgctgctgccacgctcgcctccgccattcccagcgcgcggcctctygccgggtgaaatgrggccttgagactgcaccgccttgcctctccctgtgtgtagatgtgtcgttggatcaccctcgttttttaaaagaggtggtatttttaaacactgataaaattggaaactgggaagcgcatttggcatgcgtaagcagatggttaaagacatttgctgagaaggatcggaaacatattcacggctctcctgcttggttaaatgctgctttcactttttagccagcg

SEQ ID NO: 41120 - DNA, 600 bp, Chicken  19866894276448_2
ggagacgccgtgtcacagccatgccgtcacgtccgcgccggcaggagatgggcgctgactgtgaggcctcctggcaggctgttgggtagcccagtcccctcgcgtttgtcagctgcggccgtgctcctctggcggcaggaggccgccggcacgggacctgacacgtccccgcgggccgcagcaccgcgctgacaggccgcgtatgcagccgcgccacgcagccggctcggtgggctccyggcgcggtgctgggatgctgctgccacgctcgcctccgccattcccagcgcgcggcctctygccgggtgaaatgrggccttgagactgcaccgccttgcctctccctgtgtgtagatgtgtcgttggatcaccctcgttttttaaaagaggtggtatttttaaacactgataaaattggaaactgggaagcgcatttggcatgcgtaagcagatggttaaagacatttgctgagaaggatcggaaacatattcacggctctcctgcttggttaaatgctgctttcactttttagccagcgggccttgaagctgtgtccgttgtgccatgttttggttaggacagcaatggccagtgtggtt

SEQ ID NO: 41121 - DNA, 600 bp, Chicken  19866894276448_3
acagccatgccgtcacgtccgcgccggcaggagatgggcgctgactgtgaggcctcctggcaggctgttgggtagcccagtcccctcgcgtttgtcagctgcggccgtgctcctctggcggcaggaggccgccggcacgggacctgacacgtccccgcgggccgcagcaccgcgctgacaggccgcgtatgcagccgcgccacgcagccggctcggtgggctccyggcgcggtgctgggatgctgctgccacgctcgcctccgccattcccagcgcgcggcctctygccgggtgaaatgrggccttgagactgcaccgccttgcctctccctgtgtgtagatgtgtcgttggatcaccctcgttttttaaaagaggtggtatttttaaacactgataaaattggaaactgggaagcgcatttggcatgcgtaagcagatggttaaagacatttgctgagaaggatcggaaacatattcacggctctcctgcttggttaaatgctgctttcactttttagccagcgggccttgaagctgtgtccgttgtgccatgttttggttaggacagcaatggccagtgtggttttagctgccacaga

SEQ ID NO: 41122 - DNA, 599 bp, Chicken  19866894276456_1
  misc_feature (1)..(47): n is any nucleotide
nnnnnnnnnnnnnnnnnnnnnnnnnnnnnnnnnnnnnnnnnnnnnnnctcacaatatccattcttcttccgcatcagttccaagtgtctgaaattttccatgtgaaggggggaatgcttatggattttctacctctacttttaggtgaaagttaggtgaaaagtcattagtgtttgcacaggatgctgctggaaagggatgaggaatatagctatggtccagccaaccgtagctggtttcctgatctaacatttagttagaattactcctggttaaataaagagattgtaaaattctaayagaagaaataraacacagacaataaacatacttaggtttaatttcagattacagtttcatcccgataagtgtaattatttagaaaataaaacgaagcagcatatgacaagctgcctgctaaacctgcacatctgccttagacaggcaggacagccagctgctcaaagtgctgctttgaagcaaagaggcatttttggccactgccttcccaccgatgtcaggctttctgctgcccaccagatggcaggcagagatcagcgtgctgctgggacgactgcaaagctgagctgctgcggaga

SEQ ID NO: 41123 - DNA, 599 bp, Chicken  19866894276456_2
  misc_feature (1)..(36): n is any nucleotide
nnnnnnnnnnnnnnnnnnnnnnnnnnnnnnnnnnnnctcacaatatccattcttcttccgcatcagttccaagtgtctgaaattttccatgtgaaggggggaatgcttatggattttctacctctacttttaggtgaaagttaggtgaaaagtcattagtgtttgcacaggatgctgctggaaagggatgaggaatatagctatggtccagccaaccgtagctggtttcctgatctaacatttagttagaattactcctggttaaataaagagattgtaaaattctaayagaagaaataraacacagacaataaacatacttaggtttaatttcagattacagtttcatcccgataagtgtaattatttagaaaataaaacgaagcagcatatgacaagctgcctgctaaacctgcacatctgccttagacaggcaggacagccagctgctcaaagtgctgctttgaagcaaagaggcatttttggccactgccttcccaccgatgtcaggctttctgctgcccaccagatggcaggcagagatcagcgtgctgctgggacgactgcaaagctgagctgctgcggagagaaaaactcac

SEQ ID NO: 41124 - DNA, 470 bp, Chicken  19866894276456_3
gcaggacagccagctgctcaaagtgctgctttgaagcaaagaggcatttttggccactgccttcccaccgatgtcaggctttctgctgcccaccagatggcaggcagagatcagcgtgctgctgggacgactgcaaagctgagctgctgcggagagaaaaactcacttctgttctatttgagcactgcagtcctgctttattgctctttgcagtgctctgaagacatgctgcacctccaggatggtcctgagctaaactctgtagaaaggctcatgtgtgagaattaattggaacatttmatycagctaacagatgctctacagatcccagtaattattactataacccaataacaacaatacatgagcaaggcaatagtagcctctggtgcaaaatatttccaacaagggaatctgcagaagaacattttaaaagtgacctgcatgggattttctcctttcttatgcca

SEQ ID NO: 41125 - DNA, 467 bp, Chicken  19866894276456_4
ggacagccagctgctcaaagtgctgctttgaagcaaagaggcatttttggccactgccttcccaccgatgtcaggctttctgctgcccaccagatggcaggcagagatcagcgtgctgctgggacgactgcaaagctgagctgctgcggagagaaaaactcacttctgttctatttgagcactgcagtcctgctttattgctctttgcagtgctctgaagacatgctgcacctccaggatggtcctgagctaaactctgtagaaaggctcatgtgtgagaattaattggaacatttmatycagctaacagatgctctacagatcccagtaattattactataacccaataacaacaatacatgagcaaggcaatagtagcctctggtgcaaaatatttccaacaagggaatctgcagaagaacattttaaaagtgacctgcatgggattttctcctttcttatgcca

SEQ ID NO: 41126 - DNA, 600 bp, Chicken  19866894276459_1
cagtgatctctaccttaactgtcttgtgcgctcagtcccgggagtttcataggaaccagactgaaattcaaggtccgcagtactgagaaaaaggcaatgggagagctgtgtgctatgttctgcttcttctaaaatacacacagccatcactccagcaagatgaaggcttgcagctgcctgccagcacactctctggactcactttctcatgtctgccatgtgagaaaagagcaacacagccctcccatcccagctctgcaaactgaagacagacagcactgcatctgactttctcttttscgataagatgcccataattcactttgaatacgttgcaaagttgcttgcattccaagcacaagtgcttgttctgctcaatgtcactgctcgtcagtcagatttaaaytcaatactgcaggacaaatattacattgatattcataactgtgatagtattttaccttaatagaggatcttagcacatgataaaatgtggatcacagaagctggtccgcagctacaacccagtaacctcttaataatttgtatgagtgagtgcaaaggaatgtgtaagtgaattacagattacatcagatctgt

SEQ ID NO: 41127 - DNA, 600 bp, Chicken  19866894276459_2
tgtgtgctatgttctgcttcttctaaaatacacacagccatcactccagcaagatgaaggcttgcagctgcctgccagcacactctctggactcactttctcatgtctgccatgtgagaaaagagcaacacagccctcccatcccagctctgcaaactgaagacagacagcactgcatctgactttctcttttscgataagatgcccataattcactttgaatacgttgcaaagttgcttgcattccaagcacaagtgcttgttctgctcaatgtcactgctcgtcagtcagatttaaaytcaatactgcaggacaaatattacattgatattcataactgtgatagtattttaccttaatagaggatcttagcacatgataaaatgtggatcacagaagctggtccgcagctacaacccagtaacctcttaataatttgtatgagtgagtgcaaaggaatgtgtaagtgaattacagattacatcagatctgtatattacttcagcacaggtgacgttcctttgatctcaggggtaggcccagcaatactctgccagcatttcatcaccaggctcccacaaatgccttccaaacgacag

SEQ ID NO: 41128 - DNA, 600 bp, Chicken  19866894276464_1
atttgccttgcttaggaagacagcatttgcttaatgcctaacattagaaggagacagggagaatttaggacacccatagttgaggaaattaacttagaaaaacagatcttactaatgtgattttagtgaatcttttttttttcttttactgctgacaggattcaaaagtgataaatactttattgaatcctctctcatcttcctttcttatttttggtgttttcccaaggatttaaatagagaaaggattcatctttaatgacaccgtttattcagaatacagcactgtttttcaatttragatgccttgtcagaatccttcttagctaaattatgaagtgccaactctagatttaatgtcagtagtcaggaaaatgaattggagtaaatcaacactgttgataatcagcttggcaaaattcaatgttacagattccaaagtagagagttttagtgtgtgyagtgcttaagagggacttatagacacaaggaaagggaacaagtataaaaacatgataatgacaattgcacatttttgagtgatagaaataggatttctttattgtgaaaactaacaggagagcatgactaacatgacat

SEQ ID NO: 41129 - DNA, 600 bp, Chicken  19866894276464_2
tcaaaagtgataaatactttattgaatcctctctcatcttcctttcttatttttggtgttttcccaaggatttaaatagagaaaggattcatctttaatgacaccgtttattcagaatacagcactgtttttcaatttragatgccttgtcagaatccttcttagctaaattatgaagtgccaactctagatttaatgtcagtagtcaggaaaatgaattggagtaaatcaacactgttgataatcagcttggcaaaattcaatgttacagattccaaagtagagagttttagtgtgtgyagtgcttaagagggacttatagacacaaggaaagggaacaagtataaaaacatgataatgacaattgcacatttttgagtgatagaaataggatttctttattgtgaaaactaacaggagagcatgactaacatgacatcttcctgtgactaagctgtttctgagtgtattcttttctgtgcaacagtgtagactcgagaaaaagacttcgccttattttgatttctaaatcattacarttatataacagcaaaacaaatgaaaaacagcaacaacaacaacaaaaacaaataccagaaa

SEQ ID NO: 41130 - DNA, 522 bp, Chicken  19866894276464_3
gataatcagcttggcaaaattcaatgttacagattccaaagtagagagttttagtgtgtgyagtgcttaagagggacttatagacacaaggaaagggaacaagtataaaaacatgataatgacaattgcacatttttgagtgatagaaataggatttctttattgtgaaaactaacaggagagcatgactaacatgacatcttcctgtgactaagctgtttctgagtgtattcttttctgtgcaacagtgtagactcgagaaaaagacttcgccttattttgatttctaaatcattacarttatataacagcaaaacaaatgaaaaacagcaacaacaacaacaaaaacaaataccagaaactcctccaaaagagtattgatgttatttttatactatatattctaaagataagttcattgcattttgtcttgcatacagtattaaatggaaaagtatatgaagtggtcaccatcatttaatggtaactttctagctccctgctaatgatgaggaaaacaag

SEQ ID NO: 41131 - DNA, 600 bp, Chicken  19866894276469_1
gtggaacttaccaagaatattatcttaaggccacccatttaggactggttacaattttcctaacataaattgttttctgttcttatataataatttgatagaccgatttgtcaaggatttcctgactcatctgactgaatgaaattttctgtgattttaaaagcacagtcaaaaatttgctgttgctgtcactgataaaaaacaaaataaggagaataagtatagttgggatatatcttttttttttttttctagaaaatattaacaactccttcatacgaacttttttctggctgtgayaaacctttgaggttctttaggtttttgttggggtctagagtgatggaggcgttacattaccatctctagaatcatcttgtgtctgttagtaattctcctgcaatacactgcacattactgcctttatgacacactgcttctggtcctatgctcctgttaatcttttcctttggagttcttaaagcatatatgagggtgctgagccagaggctgcagtttcctggctgtcgcctgatcaagcttcacagatcatgcaactgaagatcgatctgagagaagattcaagggactactgacatc

SEQ ID NO: 41132 - DNA, 600 bp, Chicken  19866894276476_1
ggttattgatactgactgctttttcactgactaggtgaaataaattactctgtgtactggaagctggacaagctgagcttataactcatttttctatcttaacatagccagttaatgctttgaggcattacatttagaaatgaaatactgcataggctgagttgagactgctcagaaggcttgccttccccctgctgcaccctcagttctctcacctcctcctcatcccactgctgctcataggtcacgggtcgtgcttctgaacctgagcttgctatggaaaacctggtatgaagtaayttgagcaagcgtgtggctggaccaggctcatgtggcttctcagaacagacaattctccctgctcatgtcccatgcaacttctgattaggacttatgatgtgtttccacccacaaaatggctgtgaatgccttgcttaagcaaaataccttagaatttatatattttttaattcttagcctttcagattgcataggtcgaatgtaaacctgtattataggggaaaatggctggttttgtgctcagccaggcagcctgatgttcatcttgtgttctccaagtctttcccaggacaagaactg

SEQ ID NO: 41133 - DNA, 532 bp, Chicken  19866894276476_2
ttttttattaagcattttgctttagtaaatgttgctgagtgtattcagcagttgcgggtcacttattgctataactttaggtgcataggaaaagttcagttacagacttcaatttttcttccaactgaactgcacgtacatccatttcagaactaatctgccatggaactagtctataagtagcgtaaaatctgtcatccaaggctttgattaggaaaaaaccctgcattaaggctgctgccagttgggaggtgttgtataaaggaaattattctgaatggggaagtggaaatgaaaggktgattctttcttctggcttgaacagtgttcaaggcattcttcaaggtgtgcattatgaaagggggtggacaatgttatcaaacacaatatgactttttttcaataggaatctggtggagtttttttttaagtcctacagctttgcttgcaaaaacctgaagtatttttgagcagtacagtggtgtttctctcttccaaatgcatctttgaccagtggagatttttattggtt

SEQ ID NO: 41134 - DNA, 599 bp, Chicken  19866894276483_1
  misc_feature (1)..(209): n is any nucleotide
nnnnnnnnnnnnnnnnnnnnnnnnnnnnnnnnnnnnnnnnnnnnnnnnnnnnnnnnnnnnnnnnnnnnnnnnnnnnnnnnnnnnnnnnnnnnnnnnnnnnnnnnnnnnnnnnnnnnnnnnnnnnnnnnnnnnnnnnnnnnnnnnnnnnnnnnnnnnnnnnnnnnnnnnnnnnnnnnnnnnnnnnnnnnnnnnnnnnnnnnnnnnnnnnntttacagaaggaattgtgcagttgctccatagtaaagacccccaccatcatattactagccagcagctcagtacaaactgtaaatgaacgytgattcactacagtaaaagatcaggtactggatactaaaacctgtcttgcaaatgctttcaaatagtttgtggttttgagttaaatattagggtgatagattattagatggcagctaccacttcagaatgcagcacagaagaccagggagtcatctagagtagcagtgtgcaatcatttctaggctgtgcttcacctgcacgtcattgggctcaccatctcctctgtcctcctcttccctcctattcctgttctcagcgctgccattgccttttggcctccaagacaacccatgctttg

SEQ ID NO: 41135 - DNA, 600 bp, Chicken  19866894276487_1
taaattatgtgagatattaagttagcattagagttgtgtactgttgttaaagcaaataagaaatctctagttatgtcatcactttctgctgacaccaatgactctatctataagtagccttcaggaaagcaggagacaaacaaatagaagaatggaaaaaatgaatgcaaaagagaaacatgagaagcaactggctgatgaggttagggcgatcatcacagccattaagaaaagcatataaagatagctttgtcaagagggctaaccaattccaaaatgcatttttgctcactttgccamatgtccagttaacagatttcaaaatgctttctttgctacaagtccaccacatttccaaatgaatcaatataaactgggactccattgtctagattatttaactgctgtaataggcatgcttgattgccagggtctgtcattccagagaccaaatcaaagacatgatattaacttctttcaaagatgcagcaaccaaggcagtagaagaatgcaaataaatcaattctgcatgcttaatcccatctccctttcatgcacgcctggtaatggaaaatgatttttttccaccctgccttatca

SEQ ID NO: 41136 - DNA, 600 bp, Chicken  19866894276487_2
agattttgtcacagtaatgaagcacaggaaaagggagcttgttataaactgattacagtttagattgaagggcaggttttcattagctttgttagattgggcataatcattggactggagtaattaccccacaagaaacttctgaatgagaaggtgagtccaatgtacagtgcacaaaaataaaaaccaatgagctaaggtgtaaaaaagaaaaacaggagttcttccaagctacatcaatgaaaacagctgaacttctcattaagaaactcaacaaagaaagtatacaacctatttgaraaatcaagaatttgtttaaatgttgttcttcctgcrgtcaactatccaacctttctttgttccataatgaccagggagatacacctatctttccacctgcaattactcaagcgytagtggcagggatacaaatcagactggtcatcrcgtggttctgacttacagtcagaagcacatatatagctgaacctgccctgagtgcaacttactgtacttacttgctcccatagggatttaccaattgtaatgtgcactagaccaaataaaccattacagatcttacctcttttctcaggaaga

SEQ ID NO: 41137 - DNA, 600 bp, Chicken  19866894276487_3
gcttgttataaactgattacagtttagattgaagggcaggttttcattagctttgttagattgggcataatcattggactggagtaattaccccacaagaaacttctgaatgagaaggtgagtccaatgtacagtgcacaaaaataaaaaccaatgagctaaggtgtaaaaaagaaaaacaggagttcttccaagctacatcaatgaaaacagctgaacttctcattaagaaactcaacaaagaaagtatacaacctatttgaraaatcaagaatttgtttaaatgttgttcttcctgcrgtcaactatccaacctttctttgttccataatgaccagggagatacacctatctttccacctgcaattactcaagcgytagtggcagggatacaaatcagactggtcatcrcgtggttctgacttacagtcagaagcacatatatagctgaacctgccctgagtgcaacttactgtacttacttgctcccatagggatttaccaattgtaatgtgcactagaccaaataaaccattacagatcttacctcttttctcaggaagatgccaaagtgccttcattttcacactcagatgcaaa

SEQ ID NO: 41138 - DNA, 553 bp, Chicken  19866894276487_4
ctggagtaattaccccacaagaaacttctgaatgagaaggtgagtccaatgtacagtgcacaaaaataaaaaccaatgagctaaggtgtaaaaaagaaaaacaggagttcttccaagctacatcaatgaaaacagctgaacttctcattaagaaactcaacaaagaaagtatacaacctatttgaraaatcaagaatttgtttaaatgttgttcttcctgcrgtcaactatccaacctttctttgttccataatgaccagggagatacacctatctttccacctgcaattactcaagcgytagtggcagggatacaaatcagactggtcatcrcgtggttctgacttacagtcagaagcacatatatagctgaacctgccctgagtgcaacttactgtacttacttgctcccatagggatttaccaattgtaatgtgcactagaccaaataaaccattacagatcttacctcttttctcaggaagatgccaaagtgccttcattttcacactcagatgcaaaacctcaaaaaatttccttctcaaaaatttta

SEQ ID NO: 41139 - DNA, 520 bp, Chicken  19866894276487_5
gagaaggtgagtccaatgtacagtgcacaaaaataaaaaccaatgagctaaggtgtaaaaaagaaaaacaggagttcttccaagctacatcaatgaaaacagctgaacttctcattaagaaactcaacaaagaaagtatacaacctatttgaraaatcaagaatttgtttaaatgttgttcttcctgcrgtcaactatccaacctttctttgttccataatgaccagggagatacacctatctttccacctgcaattactcaagcgytagtggcagggatacaaatcagactggtcatcrcgtggttctgacttacagtcagaagcacatatatagctgaacctgccctgagtgcaacttactgtacttacttgctcccatagggatttaccaattgtaatgtgcactagaccaaataaaccattacagatcttacctcttttctcaggaagatgccaaagtgccttcattttcacactcagatgcaaaacctcaaaaaatttccttctcaaaaatttta

SEQ ID NO: 41140 - DNA, 600 bp, Chicken  19866894276488_1
gaaagcaggttagccagtaatctggcacatggacttgggcacctcacctatccctgtgctgccttgcccccacccttctgcaccacgaccacaggcgaggcaagaccagccccccatctttgtaggatgcttcacacagtggtgccttgccgtagtaaggactctggtctccatcacagacctactactattaataatccagaggattagaaagataagccagttacagaaagactcaagcttgtcagtgctgcccactggcttgtggtattttataggtggaagaacggcttcgttctstttatttacagtccataactttggaaacagcttaagagctgctcaggttttgttttgttgcagacccctcagcataggagacatctgtgctgacagaattatctttttcttwtttttttaatcctgttccttacaatcgtgcctttaacaagagctgggctttaatgggcagctcagctgcatccctccccctcagcttgggggagatgtctgaccagatgcatagaagtaacaaacgggcagatcaagtacatttatttcagttacaaagcatagaatttcagattttaatatctattt

SEQ ID NO: 41141 - DNA, 600 bp, Chicken  19866894276488_2
cccatctttgtaggatgcttcacacagtggtgccttgccgtagtaaggactctggtctccatcacagacctactactattaataatccagaggattagaaagataagccagttacagaaagactcaagcttgtcagtgctgcccactggcttgtggtattttataggtggaagaacggcttcgttctstttatttacagtccataactttggaaacagcttaagagctgctcaggttttgttttgttgcagacccctcagcataggagacatctgtgctgacagaattatctttttcttwtttttttaatcctgttccttacaatcgtgcctttaacaagagctgggctttaatgggcagctcagctgcatccctccccctcagcttgggggagatgtctgaccagatgcatagaagtaacaaacgggcagatcaagtacatttatttcagttacaaagcatagaatttcagattttaatatctatttaatcctaaagaaagtaaaatactttatttacttgtaggtgaagtgcaatagaactctgccctttgcctttcccaggagatgagcagcgaaaggcaatgattgctctttgggg

SEQ ID NO: 41142 - DNA, 600 bp, Chicken  19866894276494_1
tgagcagcatggaatgttttaaacatgaaagatcaagaacagattaaacaacattaaacctaaaacacgacagctcatcaattgcttaagttataaagattttattactaagtgtaaggagctgcagctacaacctcaacacataacctgctcctatagcttctttgcagcccaattactgtaattaatgcacacctgcaaagtaccaaatattctgtgataaagcatcacctttgatcatattatctggaaaaaggaaaatgtggataatttcactgctttttaatgagcaattcaagwccacacttaaccccacattttgttggggttaccacttcccaaatccatatgttaggcgcttgtgagctctgacagacaggctccatcccgtttaactaaagcagttaggaatgatcacacacttgctgtgtctccccatcagaaggacagaagggctgcaggagaagcagagctgcctctgctcattaaccatcacattgcagcattctgttaacagccactaacaaggtgtgcattcatgccttggccacttcagttcaagggtgcatacctcccgttacatcagctgttttgagccag

SEQ ID NO: 41143 - DNA, 600 bp, Chicken  19866894276498_1
ctttgagctcatgaagcactttgacagatttaagctcactgcctgtcccactgaagatatggggggactctcactgggcagttctgaaaggacagttggcagccagggatgctctcccagagcccgctggaagcacaggctgactccagctggcttattccatacaaccaccaaaactagcttcattttgtggaggttcatcttctacccacttgttcttaggtagatctcatgagtcatctctgagcaattttttgtttatgtgcatgcacaaacagattaaaggtggtggctcttctktgtttatttattcttctccagatacagctgacccattcagacgtctgtaaatacacacactgatgcaagactgaaaaaatgacccttttgaatctgtatcatctttatacaagaagaatacttacggtgctcatttatatcaaggatttgctaggagggaattcagtatctttcttttatgcttatgtctgccttactaatagaactgtttaatagattgttttatatatatatgcatacacatatataatgaatcaagcaaggtctagttctgttcattccgttttgtctctgctttat

SEQ ID NO: 41144 - DNA, 600 bp, Chicken  19866894276505_1
aggcatctgtttattctcttattcatgctgagtgcttggtatttctgagatgattggttctagaagtgtatcccaggagactaaacctgctattggtatcctgcgtgttctctgaacctgcagtgggagaaggctgcatattactgtgcctgttctatctgctgttaccaaatgggcagcagaacacccccaagagtgtcaaattccttacttgctttgctttttttctttagactttaaaatctgctccatatcaattcccttatttagcagctacttttttttccaggtttttttttwaattattattattattattattattattactactatcgcttgactataaagatctctaacttgtttgctcttcttccagtattacccgcgttttcttggcaaacttgtagaaggatattaggaaaaggttatgaggaaatcagaagttgcactgtgactcactcagtggaagcaagatgtctgattccagtaatttttcctgacaaatttgaatttatttcaataacaaaattattcaagatggataataaggttatttcaggaaggtttgccgcttgcataaaacccaggcagagaaaa

SEQ ID NO: 41145 - DNA, 600 bp, Chicken  19866894276514_1
gcaatttagaacaaacataaagctgaaaatgctcataggtaggactggaaaaaaaaaaggcaaaaaaaaccccaagcccaacataatgtgtgattcaaaaagctttttgttgacctcagaaacacaacgctgatctattattcacagcagtttttatattacaaatgctgctttgttcaacactggttattcatattttccttagcatctctgcattgcaactctgctttctttaacgtaaaatacaatagtcactgcaggcttactcaaactatgcactctaattcacactaaaggtcyacgaaggagctgcactattgaaagggcaaagaaagaaacttcttttaaagtcccaattgcagtgagaggtgtaatcctcagtgacatcttatgaatttgtacacgtattctattcattccaataagaaaaaaaactttttatcttaggttgtcttcacaaggtgcaccttacctctttccagtttagcacaatatagtgtttagagctgctctttccagtctgttcttccttgcaaatatgtatgacaagtatttttctgtaattgaaacccacatctgagtatttcaccaacaacttcc

SEQ ID NO: 41146 - DNA, 600 bp, Chicken  19866894276514_2
tgcactattgaaagggcaaagaaagaaacttcttttaaagtcccaattgcagtgagaggtgtaatcctcagtgacatcttatgaatttgtacacgtattctattcattccaataagaaaaaaaactttttatcttaggttgtcttcacaaggtgcaccttacctctttccagtttagcacaatatagtgtttagagctgctctttccagtctgttcttccttgcaaatatgtatgacaagtatttttctgtaattgaaacccacatctgagtatttcaccaacaacttccaatgagacaraaagttgtgccctggcctagtggaggcaaccctgcacatagcaggggggttgaaactcartgatcactgtggtccttttcaacccaggccattctatgattctatgatccatgatttcagtataatgtatactttcttccctatcttgtcttacctattttaaaattcccttttaaataattgccttctttattattttgtgtattcaacattgtattttcaatcttacgttttcagtaatattccaaatttaaattgatacagaaggattatacttcaaaccaaccactaaactaccaa

SEQ ID NO: 41147 - DNA, 600 bp, Chicken  19866894276514_3
gtaatcctcagtgacatcttatgaatttgtacacgtattctattcattccaataagaaaaaaaactttttatcttaggttgtcttcacaaggtgcaccttacctctttccagtttagcacaatatagtgtttagagctgctctttccagtctgttcttccttgcaaatatgtatgacaagtatttttctgtaattgaaacccacatctgagtatttcaccaacaacttccaatgagacaraaagttgtgccctggcctagtggaggcaaccctgcacatagcaggggggttgaaactcartgatcactgtggtccttttcaacccaggccattctatgattctatgatccatgatttcagtataatgtatactttcttccctatcttgtcttacctattttaaaattcccttttaaataattgccttctttattattttgtgtattcaacattgtattttcaatcttacgttttcagtaatattccaaatttaaattgatacagaaggattatacttcaaaccaaccactaaactaccaaggcagaatttagaaggttgtttttagaaatacattttggcttgctctgtattttgtttca

SEQ ID NO: 41148 - DNA, 600 bp, Chicken  19866894276519_1
gtttccctgtttcttcatttttgggagctcggagatgcaggagaaatggccacctacacacacatggggcaggtgatggcactaaggaccacgtaggtctgtcactgcagtcataggtctcccacatcagaatactctcagtctaggacagccctcctgtaatgtgttatgcatctctctgtggtggaagccccggcatcagcaaagcagcaatttacactatttctagggatggagcagcaccaaccgacaggtaccttatctccaggcactgtgttgtattttagccctcctttggcraatattgagcctgaagcatcctccctgcttgaaagccatacttgaaagcaccagacagcagtgaagcagatccctccctgcacacctctgctagggagtgtatctactccatgggtacttgtgtggagagctacaagtgcttcctacttgctaagtgctctgaagagctgattacatcttgcagacatccctgggaaggtggagagggtgatgatgcccaaagccctgcaatttgggaacagtttgttcttggtggatggtggcctggcatgatgcgtgctggtcccagggattcaccct

SEQ ID NO: 41149 - DNA, 600 bp, Chicken  19866894276520_1
atactgcaaaaagggtaaaggacaatacaaatctctgtccttcctttcaggagatgatatgagagaagcagaatgagttgtcctggcaaaaaatgaggttggccaatgcagaaatcaatcccatccaacagaaattacataatcacagaatcatagcatcaccaaagttggaaaacgacctcaaagaccatccagtccaaccgtccccctaccaccaatatcttccctctaaaccacgctctcagtacagcatctaaatgttccttgaacacctccagggacagtgactccaccacctcyccaagcagctcattccagtgccagaccactctttcagagaagaaatttttcctaacatccaatctgaatctccccagtgcaatactggggattatattcagaagttttctccaagtgcatgaaacactgtaaggacacagagaagcagatttagtaattttactgcacatgcatgtttctagatttagtttgcacaaggttaatctgtactattacacaggcttaattttatattatcatctattaatttgatgaatgaggtaaaggtttcttatcaacattcctaacgcagaaattcac

SEQ ID NO: 41150 - DNA, 581 bp, Chicken  19866894276525_1
tcaccttttaacagacagagaaaacaaaattagcaacagtaatgagtcctttctgccactatttcatactccataaatgagctgattactttgtcagtactactctgacttacgaagtgactactttgtcagtattatatgcttcccagaaccgtgaacatcaaatgccataacacacctaactggtatgcaacgcaccacatacctaatatggccacagcacttcgaaaaaatgcacaagcttcagcagttttgtttaaaaacactcagtcttgcttaatcattctgaatcctaaaatrtgggcaaggaatcctacattcctttcccacatgaatcagtgcgtgcaagcaaaaggctccctcctgctctgaaatggaattttagatgcacgcaataatttrtcccaagcactttcccccatcaatttctaatgacttactgataatgaaacgtgctttcagaatcagaggcattttaaacccattttaaaccttaccgaaggactccactagagatgctattatgatactggatgaggtcatttagacttcaatgtctggatgctacaacaggctaacac

SEQ ID NO: 41151 - DNA, 479 bp, Chicken  19866894276525_2
ctctgacttacgaagtgactactttgtcagtattatatgcttcccagaaccgtgaacatcaaatgccataacacacctaactggtatgcaacgcaccacatacctaatatggccacagcacttcgaaaaaatgcacaagcttcagcagttttgtttaaaaacactcagtcttgcttaatcattctgaatcctaaaatrtgggcaaggaatcctacattcctttcccacatgaatcagtgcgtgcaagcaaaaggctccctcctgctctgaaatggaattttagatgcacgcaataatttrtcccaagcactttcccccatcaatttctaatgacttactgataatgaaacgtgctttcagaatcagaggcattttaaacccattttaaaccttaccgaaggactccactagagatgctattatgatactggatgaggtcatttagacttcaatgtctggatgctacaacaggctaacac

SEQ ID NO: 41152 - DNA, 600 bp, Chicken  19866894276526_1
ttgttagttgcacaggtattagagaagagcaagatcttttctgttctttcatatgtcaagtttcttttcaagtctagtccttgaatagaatttctttttcagagatctttcacactgatgtcaggatttccacagtaaatcgaggttcccctgtaaggcaaggtgacaaacttaaacactcatttctcactccttaacacagctgtagtgtgatgttagcgcctcgtttttccaagtggtaagttattttggagttcaaagagcaaccaatgtggttacagagaaatcttcagcaaattwttttattattattattttggtcactccaagtctgcayttatttatcctctttggagccttgcatttttcctatccctcaaacagtctcagaattgaactactccatttatcatgcacaatttacccaagaggctggttgaactggtatgcctttgggatgctgtatgcagtagacctgtcaagtgtcacgtactgaaacaaatcctgcctctcctctttagctctgcccctacctcatgcattcatgcagcacagcacattgctttcctcatgtttctgagttggtgtcctacctctgca

SEQ ID NO: 41153 - DNA, 600 bp, Chicken  19866894276526_2
tttctgttctttcatatgtcaagtttcttttcaagtctagtccttgaatagaatttctttttcagagatctttcacactgatgtcaggatttccacagtaaatcgaggttcccctgtaaggcaaggtgacaaacttaaacactcatttctcactccttaacacagctgtagtgtgatgttagcgcctcgtttttccaagtggtaagttattttggagttcaaagagcaaccaatgtggttacagagaaatcttcagcaaattwttttattattattattttggtcactccaagtctgcayttatttatcctctttggagccttgcatttttcctatccctcaaacagtctcagaattgaactactccatttatcatgcacaatttacccaagaggctggttgaactggtatgcctttgggatgctgtatgcagtagacctgtcaagtgtcacgtactgaaacaaatcctgcctctcctctttagctctgcccctacctcatgcattcatgcagcacagcacattgctttcctcatgtttctgagttggtgtcctacctctgcaatccctcccttcctcctcctcttgagcacatgccata

SEQ ID NO: 41154 - DNA, 600 bp, Chicken  19866894276527_1
acctgctacaacaggttgattacacatcaattttttgctgaagtatccaacattaccttcttacagaagggaccttaatcttggaccagaaaaaaactatgtcaacgttgaagagatttcctcagtaatctcttcaaaaggaagcccttctaacttcacaattacattaatcctagggatacacacaaaagcccatcagtgctctcaagagtcataactccactatgggttctcctattcctggcttacacagaaatcccaatttcacatgtcagtcactcatcaactgcaaagccttcyccccaccagcctttatgtttagaatggaaataagagatgaagcaaagctactgttacttctggaagtattaaaataaatttacttatccgaatggtatctgatggttctgacaggaaattaaggagtagaatatgccagagactgtcagagttcaataagcatttggacaacactctcagacatggggcttgattttggggtggtcctgtgcagagccaagagttgcactcagtgatccttgtgggttccttccaactcacaacattctgtgattctagaaatttgtccaactccactga

SEQ ID NO: 41155 - DNA, 599 bp, Chicken  19866894276533_1
  misc_feature (1)..(228): n is any nucleotide
nnnnnnnnnnnnnnnnnnnnnnnnnnnnnnnnnnnnnnnnnnnnnnnnnnnnnnnnnnnnnnnnnnnnnnnnnnnnnnnnnnnnnnnnnnnnnnnnnnnnnnnnnnnnnnnnnnnnnnnnnnnnnnnnnnnnnnnnnnnnnnnnnnnnnnnnnnnnnnnnnnnnnnnnnnnnnnnnnnnnnnnnnnnnnnnnnnnnnnnnnnnnnnnnnnnnnnnnnnnnnnnnnnnntctttcaattcacatatatctcctttgcatttaaatattttggttcacatcatttttgcattaaaaaatgarttgtgaaaagcaatctacataggatgcacaagaatggaagtcaaggttgaagtataaatacggtaatatgtaagctcctttgagtcctcctaaaaatacttctgtatggaaagcttattagactgggattttgatatgctcttttgtatttctgctgtagtcaggctagcaattcaggaaaaaacaacttttctcatgatgtttccatttctggccccaggtagcagaagagaatgcaatgcctatgaaatttcgtatacagaatgtaggaaattattagtcagattttggggtgtgct

SEQ ID NO: 41156 - DNA, 600 bp, Chicken  19866894276545_1
aatgtgagatcatgtcagacaaagttccagtcattttcagattattaatacattttggtttgtgactgcccatgctaagtcaatgtaaaacagttttttttaattaaagttctgtaaagattgaaataaaaatgaatagctatataaatttgtaatacattaagataaaaatatcagtaccattcagaaatgaatctggcaataaagtattattttttgactaacaaagttagcatttggattcatggtcttcttaacagttctctcgtcccggctcctacgaagtcctcaaaatatgcwgaatgatatattgtgttctatttaatcactgagcatgttaataaatgcaagtttttagatgggaaagagtactctgaactatatttttatagtctacacttccttactcacgtctaaggaaacacagatgatcccagcattaaatgttcttttcatgaaagactattataatcaagctgatattcttcttatttatataagcttttttttctctctctctttttttttttttttttcccctgttttggaatcttcttaactaacataacccatctgtgacagctgctgttgataaaagct

SEQ ID NO: 41157 - DNA, 600 bp, Chicken  19866894276550_1
tttctgtttgtacatttaaaaggcttgatgacaaccattttatctttgtttcaaggcttccaatggactgaagtctggtattttgagataatacaattacaaaactagcctatttgagaaggaagctgccttggtgggctgtgaattaagtagaccctggacactgacttcatttgttcagatagtatgcgcatcagtgaaagtaattactaaaaaaaagaaacctctcagcaattttcttccaagtcaatatgcacaagctgtggtttagcactgtcctccctgtagttatgctgtaaygcactgcagaggttacaaaattcacagcatcgagagggtgaagagagcaaggggaaaggacaacctataggaagttcccatttctgactcaatagacattttttagccatgacaccttttcctccaaggttatcccaggaatttgttcaactgctgttgttggattccatgggggagaagaggatgtaaaaggattagggaaaatgcctgaggtcccaagagcactgtgaaatttggataacttatgagattcactggcttttctgctttgcaggataaagaaattgtttgagccataaa

SEQ ID NO: 41158 - DNA, 600 bp, Chicken  19866894276550_2
tacaaaattcacagcatcgagagggtgaagagagcaaggggaaaggacaacctataggaagttcccatttctgactcaatagacattttttagccatgacaccttttcctccaaggttatcccaggaatttgttcaactgctgttgttggattccatgggggagaagaggatgtaaaaggattagggaaaatgcctgaggtcccaagagcactgtgaaatttggataacttatgagattcactggcttttctgctttgcaggataaagaaattgtttgagccataaaccctagggaaaakagtaagggaagaatcttttttcacttttttttttttttttttttttgggttttgctgttgttgttgttgttttattttttatttttattttttttaaaaaaaggatgctcttaccttctccgtcaaaaataggctgggtttccatggtcggcgtcggcttcgacccatcatctgaattgagagttaaaaagaatcgaaaagaaactaccattattgaggtaaatactatctactctccagtactgttgaatgtttgggatttgtacatggcccggccaagtccagaagagagagaagaca

SEQ ID NO: 41159 - DNA, 600 bp, Chicken  19866894276555_1
tttggatctacattgcgcaagagggcttttgcattctgactgccagaacgtacttctaaataaagcttatgaataaatgcgaagttataatatacgactgtgtgatttaattattctttttttctcctcacactagcacttctagtacaataatcttacaagtaacaacatttgaagcttagatcttttctatgaagactgtggtatttacgtactgtactgtccaagtaagtgactctgatcataacttctcagtgtctgacatagtagtgatgttctcagcagtgaatagaggttccytgtccatacataggacttttgctagttggacaaatgcattatagcagccctgaagcacaggccttgggatccacttttacagtgctgtcttcagcagagatctaatagaaatgcatcgttgtgttaaggctttgccaaagcatgcatagtcacgaacatcttgtttcctaaaacatgattcagaactatctgcacttctgaacagattcatgctatgctcataaaaggggacagcaaacttatagctgaatcaggaaatgcttttgcattactgatatgaataggatctaatccagcagt

SEQ ID NO: 41160 - DNA, 540 bp, Chicken  19866894276560_1
tgatcttcttctatggatcacacatctgggacattttcatgttgttttcgagaactaactggtgttggctaggggcttacaagtggttgggatggtttggagcccaaaccttcgatcctccattgtgctgcatcttgtctacccgctcacaaatgtcagaaggctctaaggtccccctggccctatttacactatgggcccattatgctgatcttcggtcctcctgtcctcactgtcctctgggagctcttcctgcagctgtggagccccagggaaccttccctgagctccccatgttcytggcacctggacagggacagcttgcttcctccgacccctcctggggcacagctcagcctggccagccactgcctcaccatttccacccagcctgctaaatctctccctcttcaaaaagaaagagaagccaaggaagtctggaagggaggggagacaaacacatctgcacctgggaaatgtcatgtttggtttttcaactccaaatgggcagcgacagcagctccgtgggggtgtgagcag

SEQ ID NO: 41161 - DNA, 599 bp, Chicken  19866894276563_1
  misc_feature (1)..(105): n is any nucleotide
nnnnnnnnnnnnnnnnnnnnnnnnnnnnnnnnnnnnnnnnnnnnnnnnnnnnnnnnnnnnnnnnnnnnnnnnnnnnnnnnnnnnnnnnnnnnnnnnnnnnnnnnnattaatttaattgctcgtttgtcctgagttatggtagcaacgagtaactacccaagatggctttatttccacatctaaaagccctaatttgcttagtgatgtattgcctttaaggttttctttgtttcagttgttaaccgttctaccttctttccaaaaacttcagattactttaaaaaatagctttcattttgytgcttggaaaatctgaaaatacactgaaatactgtccatgaaacatgagcataacaaaaaactccctaayattcagctttggttttccttccctagtttagaagggaaggcatttcatttgcccaccaatcttgttcctcaaaatccttgtctttggaaagctaatactatcattagtataaaatgttcctttctgatgctttctgtagaacatgagtgaaaataacacaaccaaacaaattgagccactctgtaagagaccaaaacctcttggtctccccatactctgccctccatct

SEQ ID NO: 41162 - DNA, 599 bp, Chicken  19866894276563_2
  misc_feature (1)..(35): n is any nucleotide
nnnnnnnnnnnnnnnnnnnnnnnnnnnnnnnnnnnattaatttaattgctcgtttgtcctgagttatggtagcaacgagtaactacccaagatggctttatttccacatctaaaagccctaatttgcttagtgatgtattgcctttaaggttttctttgtttcagttgttaaccgttctaccttctttccaaaaacttcagattactttaaaaaatagctttcattttgytgcttggaaaatctgaaaatacactgaaatactgtccatgaaacatgagcataacaaaaaactccctaayattcagctttggttttccttccctagtttagaagggaaggcatttcatttgcccaccaatcttgttcctcaaaatccttgtctttggaaagctaatactatcattagtataaaatgttcctttctgatgctttctgtagaacatgagtgaaaataacacaaccaaacaaattgagccactctgtaagagaccaaaacctcttggtctccccatactctgccctccatctgcatcagaacactacagtctttttagttaaaggtagtttcacatttggcttttctaagggagtacakaac

SEQ ID NO: 41163 - DNA, 600 bp, Chicken  19866894276563_3
taayattcagctttggttttccttccctagtttagaagggaaggcatttcatttgcccaccaatcttgttcctcaaaatccttgtctttggaaagctaatactatcattagtataaaatgttcctttctgatgctttctgtagaacatgagtgaaaataacacaaccaaacaaattgagccactctgtaagagaccaaaacctcttggtctccccatactctgccctccatctgcatcagaacactacagtctttttagttaaaggtagtttcacatttggcttttctaagggagtacakaacttgctttcctatcagaaaaaaatcagaagtcaaagctactaaaagaagrttatgatctagtgagattcacatgractgcagggaccgcagccagaccgccttcatcttgaatctgcgtgcgcatacaggatgtgctactaaaaccatttttattgctgattgtaaatgtgaattactctctttttttccccacgcttacagaacatcgagtatttaatacgtaatccatgtatataatttattacgagaaaaatattagcataatttcagtaaaaattaaacttcttccaaatcatt

SEQ ID NO: 41164 - DNA, 600 bp, Chicken  19866894276563_4
ttgcccaccaatcttgttcctcaaaatccttgtctttggaaagctaatactatcattagtataaaatgttcctttctgatgctttctgtagaacatgagtgaaaataacacaaccaaacaaattgagccactctgtaagagaccaaaacctcttggtctccccatactctgccctccatctgcatcagaacactacagtctttttagttaaaggtagtttcacatttggcttttctaagggagtacakaacttgctttcctatcagaaaaaaatcagaagtcaaagctactaaaagaagrttatgatctagtgagattcacatgractgcagggaccgcagccagaccgccttcatcttgaatctgcgtgcgcatacaggatgtgctactaaaaccatttttattgctgattgtaaatgtgaattactctctttttttccccacgcttacagaacatcgagtatttaatacgtaatccatgtatataatttattacgagaaaaatattagcataatttcagtaaaaattaaacttcttccaaatcatttactaaatatgaacactttcaaaaataatacctcttctagcaaaaactttta

SEQ ID NO: 41165 - DNA, 600 bp, Chicken  19866894276563_5
atccttgtctttggaaagctaatactatcattagtataaaatgttcctttctgatgctttctgtagaacatgagtgaaaataacacaaccaaacaaattgagccactctgtaagagaccaaaacctcttggtctccccatactctgccctccatctgcatcagaacactacagtctttttagttaaaggtagtttcacatttggcttttctaagggagtacakaacttgctttcctatcagaaaaaaatcagaagtcaaagctactaaaagaagrttatgatctagtgagattcacatgractgcagggaccgcagccagaccgccttcatcttgaatctgcgtgcgcatacaggatgtgctactaaaaccatttttattgctgattgtaaatgtgaattactctctttttttccccacgcttacagaacatcgagtatttaatacgtaatccatgtatataatttattacgagaaaaatattagcataatttcagtaaaaattaaacttcttccaaatcatttactaaatatgaacactttcaaaaataatacctcttctagcaaaaacttttatacaaaagataatcaataatttact

SEQ ID NO: 41166 - DNA, 600 bp, Chicken  19866894276564_1
ttccccagtggcagtcagcccttaaacgaggtctaagagaggtgcagccaggctccatcccctccagtcacacagctgaattgccttcatctgtgcccccagggctgactcagtgcttgcctcgggtgatccatcagtggttcaggctgtgactcagcagttcccatacaggaggttttacttcagcttgaaccaaaacttgggtggctaacaagcaaaagctgtctcatttcagcactactaaactcacactgctctatcactttattagaaatttgcaattttccttgcaaaaggttygtaatgaggggcttaaagttacaccagcaacaatatcagcacctacacaatgcttttcttccatagctcttaaaagcattttaaggagtttaattttagcacggactcaagtcagccacagcagatgcagagtttgcatgttgccatcaattctcacaaagtccacattaatgatctgaaataaccgttccattcaagctctaaatggaaagaggctgccaattatgcacaacactgtttgtcattgtgccctagatgaatatttactgagacctaacacattttctttttgtgtctaaa

SEQ ID NO: 41167 - DNA, 600 bp, Chicken  19866894276569_1
tctgaaagatgcagcagtctcacaacagaatgagttttctgctgtgctaatgtaaatactgcaagactctgcagggttaatgtaaaactacagcagcgatgctcagggaatatctctgtcccattcaataacgtgaagtgttagtcagcaaagctgtggctaatgggaagtttctacgtagctcatgagaaggtcatttcacataactaaattcatgagaaaaactctcagagtttatctaactatggaagattcatctattactttattccacgagattaataccataatttaaatggygactgctgaaggatttctgggtgaaacctgaccactgttcagtacaaagtacagtgtgaagtaccaaataaataaacaaacaaacaaataaataaataaatgcaggtattttaggttataatctacaggaacatagatcaaatctgcctggtttcttttgatagattgagaggaattattcagaatagtgaactgtgttgtaaaatgttgacaggatcaggcccttaagtaccgcacagacaatgtctatatagactctgactaatgtatgtattttgtaagcaattactatcatttgtc

SEQ ID NO: 41168 - DNA, 600 bp, Chicken  19866894276569_2
aatctgcctggtttcttttgatagattgagaggaattattcagaatagtgaactgtgttgtaaaatgttgacaggatcaggcccttaagtaccgcacagacaatgtctatatagactctgactaatgtatgtattttgtaagcaattactatcatttgtcctctgacagtattttctgaaacattacagaaaaatgaataataattttaatttgtactgtattaaattatatgtgtattaattattaaataaagataattactaaaagttaatgaaagaaactatcattataatatctgmcacaaataaaaaatctacctattgtgtgctagaaacaataccacccattaattagcttatgtaccccaaaatctaaaggagtgtcaagaattcccagtatttgctcaaatacttcttgctagatgatgagatttatgatacagccaaaactatgcgctggatgttggaaataatgcttctcactttagtacactgatgtaacctctcctgtcttcacactgatggatgtataaaattaatataaataagttattggttcatgtcatctatgccttagggatcagctcttgaaaattttca

SEQ ID NO: 41169 - DNA, 600 bp, Chicken  19866894276569_3
ttatttttcattactgttcaggttgacccgagacaaaacaatctcgatctttcttacgttccattatttctgattttttttgtcctaatttataggaaatcacagctttaatgcaatttagtttcaattgtgggaaagaggtatttttaatttctctattgtgaaagacaaaatgtgttatttactgttcgagtatgtgtgaacatacagtagatgtaatattctgtgctacacaacagctctactatctacagataaataaaaaacagaatacattgagctggaggtgtaatagtcttwgaggacttagagtcctcaagcacaaatccactgtgaagrgaagagagacaaatcatttggggaaaaaatgaaactcactgtcctctttattgctgttctctacagtaattttcttgcattagaagttgggaggtattttagtatggtcatactgcaaaactatgcattgcttcccacaaaaccagcatggccacaagatcaacaaatgctgactaaggggtctctaccacaatgggtgagaaatccactgatctcatctttgctgatctttttgccagttgctttgcataggccctgggg

SEQ ID NO: 41170 - DNA, 600 bp, Chicken  19866894276569_4
aatctcgatctttcttacgttccattatttctgattttttttgtcctaatttataggaaatcacagctttaatgcaatttagtttcaattgtgggaaagaggtatttttaatttctctattgtgaaagacaaaatgtgttatttactgttcgagtatgtgtgaacatacagtagatgtaatattctgtgctacacaacagctctactatctacagataaataaaaaacagaatacattgagctggaggtgtaatagtcttwgaggacttagagtcctcaagcacaaatccactgtgaagrgaagagagacaaatcatttggggaaaaaatgaaactcactgtcctctttattgctgttctctacagtaattttcttgcattagaagttgggaggtattttagtatggtcatactgcaaaactatgcattgcttcccacaaaaccagcatggccacaagatcaacaaatgctgactaaggggtctctaccacaatgggtgagaaatccactgatctcatctttgctgatctttttgccagttgctttgcataggccctggggaattcaccatttctgaaaaacttcacaaatgtggaagta

SEQ ID NO: 41171 - DNA, 600 bp, Chicken  19866894276570_1
ttctgcaagcaagcaagcttgagaaaattgcgagcactcatttagccccttatctgatgagtgatcccagcccactcgcctcccttccccacgcctgcatgtaatcgcatcaggtgcctcctttcccaccctgcaccaggcaggacaggtgtacctgcagaggagaaattgaaagcttgaaaaacaggttttaaaacccagagggcatcaagatgcagaggagaactcacaagtgctccccctgggatgacggcatcgcagggctgtggagcccctctgcagagcagcgtggagaagagyggggtgagagcaggaacccctcagccctgggggtcctgcagacctccttaaccccgccatggaacccatagcaaaaggcagaaccacctacatgtcccagctcagccttcctgctgtcctccctcccaggagccagcacctgcatgctcctttctttatcaccacgctccccagcagatttgctttgctgtggctgtttcgggatgacggcagtgtcctacaagctcagaccataaatcaaggctgtcaagcatggaacacccctccttttcctgctcccatcccagatgccgtgaacgc

SEQ ID NO: 41172 - DNA, 600 bp, Chicken  19866894276570_2
tacctgcagaggagaaattgaaagcttgaaaaacaggttttaaaacccagagggcatcaagatgcagaggagaactcacaagtgctccccctgggatgacggcatcgcagggctgtggagcccctctgcagagcagcgtggagaagagyggggtgagagcaggaacccctcagccctgggggtcctgcagacctccttaaccccgccatggaacccatagcaaaaggcagaaccacctacatgtcccagctcagccttcctgctgtcctccctcccaggagccagcacctgcatgctccyttctttatcaccacgctccccagcagatttgctttgctgtggctgtttcgggatgacggcagtgtcctacaagctcagaccataaatcaaggctgtcaagcatggaacacccctccttttcctgctcccatcccagatgccgtgaacgcgctctgcacctgattgcatccaaggctgcagatcacagctccaatcacaccgcatagcraggaccaacctctgatcccygtgagcaggcgcacctaagggcagcagagcccaacagaaggggaaggcacctttaacataccttatcttgat

SEQ ID NO: 41173 - DNA, 552 bp, Chicken  19866894276570_3
tggaacccatagcaaaaggcagaaccacctacatgtcccagctcagccttcctgctgtcctccctcccaggagccagcacctgcatgctcctttctttatcaccacgctccccagcagatttgctttgctgtggctgtttcgggatgacggcagtgtcctacaagctcagaccataaatcaaggctgtcaagcatggaacacccctccttttcctgctcccatcccagatgccgtgaacgcgctctgcacctgattgcatccaaggctgcagatcacagctccaatcacaccgcatagcraggaccaacctctgatcccygtgagcaggcgcacctaagggcagcagagcccaacagaaggggaaggcacctttaacataccttatcttgattatgtagattaatgcagctggagcaggggaaggggtagggatagagtgggtgctgcgagaagccatttccagaaccccacagagccgcagcctccttcaggagcgttttttgggaggcggttgcagggccaaacccctgcaggatgcatgctctgaggag

SEQ ID NO: 41174 - DNA, 532 bp, Chicken  19866894276570_4
agaaccacctacatgtcccagctcagccttcctgctgtcctccctcccaggagccagcacctgcatgctcctttctttatcaccacgctccccagcagatttgctttgctgtggctgtttcgggatgacggcagtgtcctacaagctcagaccataaatcaaggctgtcaagcatggaacacccctccttttcctgctcccatcccagatgccgtgaacgcgctctgcacctgattgcatccaaggctgcagatcacagctccaatcacaccgcatagcraggaccaacctctgatcccygtgagcaggcgcacctaagggcagcagagcccaacagaaggggaaggcacctttaacataccttatcttgattatgtagattaatgcagctggagcaggggaaggggtagggatagagtgggtgctgcgagaagccatttccagaaccccacagagccgcagcctccttcaggagcgttttttgggaggcggttgcagggccaaacccctgcaggatgcatgctctgaggag

SEQ ID NO: 41175 - DNA, 600 bp, Chicken  19866894276572_1
atgcctattgacttctgagtgaggtcacttctactgtatgaaagaatcaagagatgtcaggtaatcttaaaaggcaatagctgtgatgtggtttgaggctgtgaatattaggtctcttcggaaggcatgctatttcatgggctgtaagaaagagaattccccttactactaaatgcttgtaggctgaagctatttgttcaggtggccagaagcaaagtcccagtgccttagaaatagctaaggaaccagggcgatcatctcaaaatcagggagggaaatgcaaacagaaggcaaacctgkaaatgattttccccatcttgcgaacaaatcctatgggaggggcaatttattcattttttttcaacaacttattcttaaaaacttastttgtgttggttagcacctttttcctggaactagttctttaatttatcttcagttcccctgtttattttattaaaataaacacccaaaaagccagtatgatgcctttgttaggaaaaagaaaaaatagatgcatcctaaagtgtgttctgtgtttttttttttccacgtgtgcagctcaggatgggagggagaagaaaaaaagaaaatgatagc

SEQ ID NO: 41176 - DNA, 600 bp, Chicken  19866894276572_2
tgtggtttgaggctgtgaatattaggtctcttcggaaggcatgctatttcatgggctgtaagaaagagaattccccttactactaaatgcttgtaggctgaagctatttgttcaggtggccagaagcaaagtcccagtgccttagaaatagctaaggaaccagggcgatcatctcaaaatcagggagggaaatgcaaacagaaggcaaacctgkaaatgattttccccatcttgcgaacaaatcctatgggaggggcaatttattcattttttttcaacaacttattcttaaaaacttastttgtgttggttagcacctttttcctggaactagttctttaatttatcttcagttcccctgtttattttattaaaataaacacccaaaaagccagtatgatgcctttgttaggaaaaagaaaaaatagatgcatcctaaagtgtgttctgtgtttttttttttccacgtgtgcagctcaggatgggagggagaagaaaaaaagaaaatgatagcttggctactaaaaggttgttataacatcttatgctgttttgatttctgaatttgatcagaatccaagtaaattgcaagccttacct

SEQ ID NO: 41177 - DNA, 600 bp, Chicken  19866894276584_1
caaacgtttgaaagcatgaagggcaggccacagcttgaaatagtggcccagtttccccctgagtttaggcactgagctcaggcacctccatgacactcaggtccagatgagttcatataaggtgtgatgtgagctgactcgctctctgtgtctgtctctttccatctgtacgtcaggagaacagaacaaccatgtcactcacaaattacaagtggaggaaacgtggatccatgtgtggggcttcccatattgtcacaaactgatctctgcccctgctgatgttacatggagctttctgcratgcctgagacataatgtgaaccaatttctactcattctgcaccatttgagtgggttatttttgtgtctccccattgctagatgtcactgtacagggccagcacatcatcatcaattttcttctttaatactgtcaggcaactgaatctacacatgtgtctaatacagcgatgtacaaaatgcagcagtaaatgtggaaatagccctttttctaagaagatagctttccaggctgtaccaggcttaatgctagaaggagttgatgtcatagaatcacagaatggcctgggttgaaaagga

SEQ ID NO: 41178 - DNA, 600 bp, Chicken  19866894276585_1
ccccttttgggagattcctgtctttttggaactgtggagcccagaatcagacacggtattctaaatatccaagcagtacagtccctgtaggtcaaagctcccctggacaggttctagcttgaggaagaagagtgcagcgaaggctgaggacaactctttggcttcccctgcgacttggacagcttctcttaatagaaccatggaaagttatgggaaaaagatggaatggactgattggtgaaggtcttaccttccaaaggtaggaattacacgtgttgtctgtgcacacacatggcatcrtcgtggtttcgtggctttttaatcagtattccacatttatatgtggaatatatatgtatttaggttaactgtgcacccaaacattccttagatgaaggccttttatgtcagcttttctcttgatgaatttacagctaagcacagttagttaaaaatatctgaagaacagtttgtaatgaacacacgatacggccaggcagcgttgctgtgagggtgtcacgtaggttggaaattcagatggctgctctgaactcagaaactcatttaagagcattttcagtagctggatggggcagatgt

SEQ ID NO: 41179 - DNA, 600 bp, Chicken  19866894276587_1
ggccatgccacacatgcatattacaaactcgttacaagctcgtttacacgcgcgctgctcgctccccacacaacctctttctgatgctcctaatgtttcttctttcccaccatggctgcttccacctggcagaagggagaaatgcacttggtagggctgcctggtgtcatctgcagcaggaggagctgggagggggccaggtgctggcctttgggtgggctgtctgctggtggcactgtctcccgggcgtcctgtccttcatggccagcacaaagctgtgtctgctctccatgagccttygcagctgtgttctgcaggcatcaggccctgcagcccccaggtgtgctgccatgctgtgggggaagggctgcagttcctgcagcggggtggctatggggctgagcaccagcacacaccattggatgtccatgggagtctgtggttggaggggccagacatgagggagcagatggagcagcagcagcagaggtttcctgagcactgctgggtggctggaagggagggtggcctcactgctcctttctgttgccattcctctgctggatgggcattcccagctgtcctcccaagctgtgcaaa

SEQ ID NO: 41180 - DNA, 600 bp, Chicken  19866894276599_1
acattcatgagaatggtttgaaggaaacttttgctcatatcagcatgagagaataccatgttttgaacacctgtggagacagagacacttccagaccagcaaaatgagagcctgaagaaaaatcatatagcacagtgtgggacttgtaggtggaacaagttccgtgtggggacccgtgttcagtgccctacctgtctgcttttgtaccctgcactattgacttttggacatctactaagagtctggagtttgctaaaagcagttgtgaagttcaggagatagttgtgagcatgaggtcartgtagtagtgtcaataaatgtcaagagtggggagggaggaacaagtatcgtggctaaagcccagtctgtgtgtctrgtcctgtggggctgagctcacccaccacttccatgcctgcactctccagctaaacaaatttggttttactgtcctctcaytcacaatacacrataaaggtgctgtagtggaaacgctgagtaatggcctgaaacagtgattgagcacctggtgggaaggcagggccaagccaggggagctcaggtgcatgcaatatacctgagtgaccagaaggggtcaagcca

SEQ ID NO: 41181 - DNA, 526 bp, Chicken  19866894276599_2
agacagagacacttccagaccagcaaaatgagagcctgaagaaaaatcatatagcacagtgtgggacttgtaggtggaacaagttccgtgtggggacccgtgttcagtgccctacctgtctgcttttgtaccctgcactattgacttttggacatctactaagagtctggagtttgctaaaagcagttgtgaagttcaggagatagttgtgagcatgaggtcartgtagtagtgtcaataaatgtcaagagtggggagggaggaacaagtatcgtggctaaagcccagtctgtgtgtctrgtcctgtggggctgagctcacccaccacttccatgcctgcactctccagctaaacaaatttggttttactgtcctctcaytcacaatacacrataaaggtgctgtagtggaaacgctgagtaatggcctgaaacagtgattgagcacctggtgggaaggcagggccaagccaggggagctcaggtgcatgcaatatacctgagtgaccagaaggggtcaagccagg

SEQ ID NO: 41182 - DNA, 446 bp, Chicken  19866894276599_3
aagttccgtgtggggacccgtgttcagtgccctacctgtctgcttttgtaccctgcactattgacttttggacatctactaagagtctggagtttgctaaaagcagttgtgaagttcaggagatagttgtgagcatgaggtcartgtagtagtgtcaataaatgtcaagagtggggagggaggaacaagtatcgtggctaaagcccagtctgtgtgtctrgtcctgtggggctgagctcacccaccacttccatgcctgcactctccagctaaacaaatttggttttactgtcctctcaytcacaatacacrataaaggtgctgtagtggaaacgctgagtaatggcctgaaacagtgattgagcacctggtgggaaggcagggccaagccaggggagctcaggtgcatgcaatatacctgagtgaccagaaggggtcaagccagg

SEQ ID NO: 41183 - DNA, 434 bp, Chicken  19866894276599_4
gggacccgtgttcagtgccctacctgtctgcttttgtaccctgcactattgacttttggacatctactaagagtctggagtttgctaaaagcagttgtgaagttcaggagatagttgtgagcatgaggtcartgtagtagtgtcaataaatgtcaagagtggggagggaggaacaagtatcgtggctaaagcccagtctgtgtgtctrgtcctgtggggctgagctcacccaccacttccatgcctgcactctccagctaaacaaatttggttttactgtcctctcaytcacaatacacrataaaggtgctgtagtggaaacgctgagtaatggcctgaaacagtgattgagcacctggtgggaaggcagggccaagccaggggagctcaggtgcatgcaatatacctgagtgaccagaaggggtcaagccagg

SEQ ID NO: 41184 - DNA, 599 bp, Chicken  19866894276611_1
  misc_feature (1)..(152): n is any nucleotide
nnnnnnnnnnnnnnnnnnnnnnnnnnnnnnnnnnnnnnnnnnnnnnnnnnnnnnnnnnnnnnnnnnnnnnnnnnnnnnnnnnnnnnnnnnnnnnnnnnnnnnnnnnnnnnnnnnnnnnnnnnnnnnnnnnnnnnnnnnnnnnnnnnnnnnnncacatgcacagtagcatttttacactgtgtgtccatgcaagcatgcatgttgagtagctgcattaccagaagtgaatgctgtgtagggatgtccatgggctgatgcacacacctacaaaagtgagaacaaactatcagtacatttcargtagcaaaagcacatacaaaatgtccagcatccccatyccagacataagtaatataacatacaggtgcaaagctgagcactcccagtgccctgttttagctcagtcatgagacctggctgcttgacaccttccagcccaagctggctgcaggcactaaaggatcatgggccattttcatgccacaagtgtgggttttgtsagcaygtctgttacrtgttcagtttcaagacaacctacatgtggcaaaaaggtactaccatttatgtactttgtgtatggatgacctgaagaagacctt

SEQ ID NO: 41185 - DNA, 599 bp, Chicken  19866894276611_2
  misc_feature (1)..(114): n is any nucleotide
nnnnnnnnnnnnnnnnnnnnnnnnnnnnnnnnnnnnnnnnnnnnnnnnnnnnnnnnnnnnnnnnnnnnnnnnnnnnnnnnnnnnnnnnnnnnnnnnnnnnnnnnnnnnnnnnnncacatgcacagtagcatttttacactgtgtgtccatgcaagcatgcatgttgagtagctgcattaccagaagtgaatgctgtgtagggatgtccatgggctgatgcacacacctacaaaagtgagaacaaactatcagtacatttcargtagcaaaagcacatacaaaatgtccagcatccccatyccagacataagtaatataacatacaggtgcaaagctgagcactcccagtgccctgttttagctcagtcatgagacctggctgcttgacaccttccagcccaagctggctgcaggcactaaaggatcatgggccattttcatgccacaagtgtgggttttgtsagcaygtctgttacrtgttcagtttcaagacaacctacatgtggcaaaaaggtactaccatttatgtactttgtgtatggatgacctgaagaagaccttcaagggagaagcttacagtgatgatggtttcatttgtt

SEQ ID NO: 41186 - DNA, 600 bp, Chicken  19866894276611_3
gttgagtagctgcattaccagaagtgaatgctgtgtagggatgtccatgggctgatgcacacacctacaaaagtgagaacaaactatcagtacatttcargtagcaaaagcacatacaaaatgtccagcatccccatyccagacataagtaatataacatacaggtgcaaagctgagcactcccagtgccctgttttagctcagtcatgagacctggctgcttgacaccttccagcccaagctggctgcaggcactaaaggatcatgggccattttcatgccacaagtgtgggttttgtsagcaygtctgttacrtgttcagtttcaagacaacctacatgtggcaaaaaggtactaccatttatgtactttgtgtatggatgacctgaagaagaccttcaagggagaagcttacagtgatgatggtttcatttgtttttgttgtcactgggttatttcaatgaagtttaagagggctcatttttctacagttatttgggatacatattcaccaactcttgcccctctcaatcttcagttgatccagactaagaagggacaaagtaatttcttatcccctctttgatgtcgtttgtgtag

SEQ ID NO: 41187 - DNA, 600 bp, Chicken  19866894276611_4
gtagctgcattaccagaagtgaatgctgtgtagggatgtccatgggctgatgcacacacctacaaaagtgagaacaaactatcagtacatttcargtagcaaaagcacatacaaaatgtccagcatccccatyccagacataagtaatataacatacaggtgcaaagctgagcactcccagtgccctgttttagctcagtcatgagacctggctgcttgacaccttccagcccaagctggctgcaggcactaaaggatcatgggccattttcatgccacaagtgtgggttttgtsagcaygtctgttacrtgttcagtttcaagacaacctacatgtggcaaaaaggtactaccatttatgtactttgtgtatggatgacctgaagaagaccttcaagggagaagcttacagtgatgatggtttcatttgtttttgttgtcactgggttatttcaatgaagtttaagagggctcatttttctacagttatttgggatacatattcaccaactcttgcccctctcaatcttcagttgatccagactaagaagggacaaagtaatttcttatcccctctttgatgtcgtttgtgtagtcctt

SEQ ID NO: 41188 - DNA, 600 bp, Chicken  19866894276611_5
taccagaagtgaatgctgtgtagggatgtccatgggctgatgcacacacctacaaaagtgagaacaaactatcagtacatttcargtagcaaaagcacatacaaaatgtccagcatccccatyccagacataagtaatataacatacaggtgcaaagctgagcactcccagtgccctgttttagctcagtcatgagacctggctgcttgacaccttccagcccaagctggctgcaggcactaaaggatcatgggccattttcatgccacaagtgtgggttttgtsagcaygtctgttacrtgttcagtttcaagacaacctacatgtggcaaaaaggtactaccatttatgtactttgtgtatggatgacctgaagaagaccttcaagggagaagcttacagtgatgatggtttcatttgtttttgttgtcactgggttatttcaatgaagtttaagagggctcatttttctacagttatttgggatacatattcaccaactcttgcccctctcaatcttcagttgatccagactaagaagggacaaagtaatttcttatcccctctttgatgtcgtttgtgtagtccttctgctgttag

SEQ ID NO: 41189 - DNA, 600 bp, Chicken  19866894276611_6
aaatggttcctatcacacagtgacacactgtcaatcacagtgggtttctttcctgcgtatggagttttcttatttgtactataacagaacatgttgatgttgtatattaaacagtacagtggtataagtaatattaagatatggtgtatcagagggcgtagtcaaaaggcaggggcaaacggcatttcccgttcatgaaggggatttggggggttattctttggattgtttttgcacaaatcatcttcaattcgtttagaaccaaatgtttcaataatttcattgtacatgaaaggaagrcaygaaagtaggatgctgtgtacatacatctaaacaaactgcgccctcmgaaaactaccttagtgtaatctcccttttttctctgcttcgctgtggtgcaataacctaatatggtttaactgagccccagaaaaagggtaaatatggcgaatggctttaagtttctacctgtgtggaaaaaaaagcaaaaaagaaccactttccagcccttccccaggcattgccttttccaatagaaacattgcatttacacagttttgttttttttctttttgctgtgattttatattgtaacttcgt

SEQ ID NO: 41190 - DNA, 600 bp, Chicken  19866894276611_7
tggttcctatcacacagtgacacactgtcaatcacagtgggtttctttcctgcgtatggagttttcttatttgtactataacagaacatgttgatgttgtatattaaacagtacagtggtataagtaatattaagatatggtgtatcagagggcgtagtcaaaaggcaggggcaaacggcatttcccgttcatgaaggggatttggggggttattctttggattgtttttgcacaaatcatcttcaattcgtttagaaccaaatgtttcaataatttcattgtacatgaaaggaagrcaygaaagtaggatgctgtgtacatacatctaaacaaactgcgccctcmgaaaactaccttagtgtaatctcccttttttctctgcttcgctgtggtgcaataacctaatatggtttaactgagccccagaaaaagggtaaatatggcgaatggctttaagtttctacctgtgtggaaaaaaaagcaaaaaagaaccactttccagcccttccccaggcattgccttttccaatagaaacattgcatttacacagttttgttttttttctttttgctgtgattttatattgtaacttcgtttt

SEQ ID NO: 41191 - DNA, 600 bp, Chicken  19866894276611_8
ttcctgcgtatggagttttcttatttgtactataacagaacatgttgatgttgtatattaaacagtacagtggtataagtaatattaagatatggtgtatcagagggcgtagtcaaaaggcaggggcaaacggcatttcccgttcatgaaggggatttggggggttattctttggattgtttttgcacaaatcatcttcaattcgtttagaaccaaatgtttcaataatttcattgtacatgaaaggaagrcaygaaagtaggatgctgtgtacatacatctaaacaaactgcgccctcmgaaaactaccttagtgtaatctcccttttttctctgcttcgctgtggtgcaataacctaatatggtttaactgagccccagaaaaagggtaaatatggcgaatggctttaagtttctacctgtgtggaaaaaaaagcaaaaaagaaccactttccagcccttccccaggcattgccttttccaatagaaacattgcatttacacagttttgttttttttctttttgctgtgattttatattgtaacttcgttttttattttgagaaaactgtatttgaaaaaatcataaaaaatgtgaaa

SEQ ID NO: 41192 - DNA, 600 bp, Chicken  19866894276617_1
cgtaagttgaaaacctcaaaacgttttttgggatgaaggatttgtagagctgtggaagaacaagagaaaatattactgaccagtttataaactgcttgccctaaaatagaaggctgggtgaaataacacctctggaccaaagcgaagtggctctcctgtgtggccacagggccaggagctgggctgagccacatcatacttttggccccactgtccacattcacagtgaatggtaaaggcttctgacttcaggaatcttttaccttgtactccttatgaaaatctaattttctttggagytgagaatggccgaattctgcctcctgagatgagctgtgattgtatcaccatctccttgcccaggaaggctggaaggtctgtagcagtgttaaagcatcaactttcactcccagtggctcaaaagcgagctcgagcccagttctctcttagtacaacttattagaaacctctggagttaatgggtgggtttggttttccctgagaggttttaaggctggacctctccagcgaggtaagcaccagtgggcagtgactatggctgtgctcagaaggatgatgtaagattggcttaaaatcatg

SEQ ID NO: 41193 - DNA, 600 bp, Chicken  19866894276617_2
ccgaattctgcctcctgagatgagctgtgattgtatcaccatctccttgcccaggaaggctggaaggtctgtagcagtgttaaagcatcaactttcactcccagtggctcaaaagcgagctcgagcccagttctctcttagtacaacttattagaaacctctggagttaatgggtgggtttggttttccctgagaggttttaaggctggacctctccagcgaggtaagcaccagtgggcagtgactatggctgtgctcagaaggatgatgtaagattggcttaaaatcatggcaagcacrttggcctcttttctgtgcaattccttgcactgctgattggagttttggggtttttttttaaccaaaattatggtttgaaacacctggccacaaacgccagtcacaaagrgaaagcaaacacctctttctcctgatgccacacttgtatattgtcacctgaaggccagattcctatctacatagatctaactcattcactggctgaaaatagccttcagcaaaactactttgagttctctatcagcaacaagcagtgcaagaccacctgcagcctccagaaaggacttacgttttgttctt

SEQ ID NO: 41194 - DNA, 600 bp, Chicken  19866894276617_3
caaaagcgagctcgagcccagttctctcttagtacaacttattagaaacctctggagttaatgggtgggtttggttttccctgagaggttttaaggctggacctctccagcgaggtaagcaccagtgggcagtgactatggctgtgctcagaaggatgatgtaagattggcttaaaatcatggcaagcacrttggcctcttttctgtgcaattccttgcactgctgattggagttttggggtttttttttaaccaaaattatggtttgaaacacctggccacaaacgccagtcacaaagrgaaagcaaacacctctttctcctgatgccacacttgtatattgtcacctgaaggccagattcctatctacatagatctaactcattcactggctgaaaatagccttcagcaaaactactttgagttctctatcagcaacaagcagtgcaagaccacctgcagcctccagaaaggacttacgttttgttcttggaggagctgaagtaccaggccctgctgtctgagggtgcttccaagaagattatcggcttaggcactgcagctgaatctctcttctctgtctgtccgcagactgaattg

SEQ ID NO: 41195 - DNA, 599 bp, Chicken  19866894276657_1
  misc_feature (1)..(51): n is any nucleotide
nnnnnnnnnnnnnnnnnnnnnnnnnnnnnnnnnnnnnnnnnnnnnnnnnnnttctgaggattcacatctggctttgctggtcacgtaagcttacagtccatgtaactctcagtgtctacagcctggactaagctttataaagtcattgggtgggagagcttctgcaaactactgcggtgttacctttgtctatatcattaacagttatgctatagttccaaagaaaaagtgatccccaaaccagtatcacaaaaattaattttaagaaagaaagaaagaaagagagagagagagagagaragaaagaaagaaagaaagaaagaaagaaagaaagaaagaaagaaagaaagaaagaaagaaagaaagaaagaaagaaagaaagaaagaaagaaaggaggaaaaagagagagaaagagagagaaagagagagaaaggaagcaaaagaaaaaagacaaccagaaataaaatccatcagacaaacgagggagcgagaagaaacgggaggtgaggctgtgtgcggcccgagccgggccgggccggggggatagcggcacagccggcactccccgcccgggtaccgccgggcaccgcctgccctc

SEQ ID NO: 41196 - DNA, 599 bp, Chicken  19866894276660_1
  misc_feature (1)..(158): n is any nucleotide
nnnnnnnnnnnnnnnnnnnnnnnnnnnnnnnnnnnnnnnnnnnnnnnnnnnnnnnnnnnnnnnnnnnnnnnnnnnnnnnnnnnnnnnnnnnnnnnnnnnnnnnnnnnnnnnnnnnnnnnnnnnnnnnnnnnnnnnnnnnnnnnnnnnnnnnnnnnnnnttgattatttttgtgacactctagatgcctcactgcttattaccaatctgaataaaaaatgatgcatacactgtgatattcatctatgtatttgacgttaaattccacttcagtctaaacagtggtgtgagtccaaagaatygaaatatatgtaatatatacatttctgaagccaccttaaaacatgcaagatgctttacctccaacaaatttacatttacaattaatattcttcctcttctctctctcttgcatgcattgcccctgactttaacaagtgtagggaagatgatatttgtctaagagcaccatggaacaaaaccacttgaatttaagaagaaaacaaaaacatggagggcttcaggtacaagtcaaaggtgactcctttcctgaactcagtttttgcaaattagctacatgttggtgtacatatgaggaata

SEQ ID NO: 41197 - DNA, 600 bp, Chicken  19866894276662_1
acaaatgtggtattcaacagagcttggtattatggaggtcatgagtccttggctgatgggaggaatagaccttgccagaagtgccaactagtaagggaatgtgttaaataaacatgaatgaaaaatgtgcctacagagaagcatgtgtttcgcttttttgttactgaaattaagtgggcaataactatccaaaaatactacttaatctcttcagagccacctttctagtttttaatgactaagagtattttggaatatttctcaattttcagaatttcaagcattttagtagaaatggtrattcttattttaatagccagctcatcacgtggcgctctggaagctgtgtgaattctctgtaccgttacctgtttcctgtcactgagatgcagtggcattaaacagcaaaatgtcacattcctctaaagtatggtttgataaatcatattatccactcaaaaccccctgtacacacctgaaaggagagctgtaggacaatgcttgttgctgaaatgtrcaacacagagtgtgtttgcctctgttattaaagaagctgttggcagaggacatttactaaaaccatcactttcttggaccctc

SEQ ID NO: 41198 - DNA, 600 bp, Chicken  19866894276662_2
cacctttctagtttttaatgactaagagtattttggaatatttctcaattttcagaatttcaagcattttagtagaaatggtrattcttattttaatagccagctcatcacgtggcgctctggaagctgtgtgaattctctgtaccgttacctgtttcctgtcactgagatgcagtggcattaaacagcaaaatgtcacattcctctaaagtatggtttgataaatcatattatccactcaaaaccccctgtacacacctgaaaggagagctgtaggacaatgcttgttgctgaaatgtrcaacacagagtgtgtttgcctctgttattaaagaagctgttggcagaggacatttactaaaaccatcactttcttggaccctcttccaggtgggatcccatttgtcctcacaggagagtttttccagcagtctcagaggccggccgcattcatggtagctgggacagtcaactggctctccaactttgcagtcggactgctctttcctttcattcaggtactcaacatgcttgatccttgatgtgctatagttgttatgctgttagtaatttttttgtaatagtaaatgtattttcattg

SEQ ID NO: 41199 - DNA, 600 bp, Chicken  19866894276663_1
gcacttggaataaaccatgtctttcatcccagcaaaagacaaaacccagacaaaccccatgtgcaaattgtggaatacctgcttggtgttccaaggatggttgtagcaagcaggaggaggttggcccagtgctgcctgcacccatgagtccatgagtggcccatctggtgcatttttcaccatttacttaaggaagtaaaggatatagtgcatacaggaatttccttctattttgtgtatgtcttggaggaagatgtatcatgcttaatccccattacttctttgcaggcctctggttgkttcaaatgccaggacagagcccccatgggcaacagcttgggtatactcagggaaggatggctaccctgaggatgctctgtttgttgtttcttccttttgatcatgtggaccacatacacgtctccttttccccttccttgtctcatcagttgtttcttttttgctttttttatttttgtttattcttttactacctcagggaaacctaaaattttgttaaaaattagttctgaatggatcaaagctaccctgctttggctgagctctggcacaaatcatacctgagcctgctttgctaca

SEQ ID NO: 41200 - DNA, 600 bp, Chicken  19866894276677_1
tatttggagctgctctctgcccccgttgtgttggtggggttttctgtgagcatagctgggttggagctgggatggctccattggggcgccttcgcagcagaggagctcagcatttagtgcattccctggtggctgctatttaatgaccagtattgagcttttgctgcttcagggctgatgatgttacactgcattaccaaatccaatccgctctggagtgagaagcaaggtcgggttttttcttctcgtttgtttttaggggagagttaatagaagtctgaaaaatgggttcttggaggkaaaaaaaaaaggcctcaaagaggggagtttgtgtgtgtgcttaatgcacgtggctttgagctgtgtggtccctgcccagctggggagcagagggcagcaaagggctccgatgaccttgcaggtaagtggcctgtaggaaccctgcaagaaattgctgcagtccagattggcttaagcatcagtgcatgagcatctcacttccgtgtgtcttatctgtggctttctgttatcaagttagttatttaatctttcagctgagttaagtattaagtcttccaaggccgtgccttgtgatgggga

SEQ ID NO: 41201 - DNA, 600 bp, Chicken  19866894276677_2
atttggagctgctctctgcccccgttgtgttggtggggttttctgtgagcatagctgggttggagctgggatggctccattggggcgccttcgcagcagaggagctcagcatttagtgcattccctggtggctgctatttaatgaccagtattgagcttttgctgcttcagggctgatgatgttacactgcattaccaaatccaatccgctctggagtgagaagcaaggtcgggttttttcttctcgtttgtttttaggggagagttaatagaagtctgaaaaatgggttcttggaggakaaaaaaaaaggcctcaaagaggggagtttgtgtgtgtgcttaatgcacgtggctttgagctgtgtggtccctgcccagctggggagcagagggcagcaaagggctccgatgaccttgcaggtaagtggcctgtaggaaccctgcaagaaattgctgcagtccagattggcttaagcatcagtgcatgagcatctcacttccgtgtgtcttatctgtggctttctgttatcaagttagttatttaatctttcagctgagttaagtattaagtcttccaaggccgtgccttgtgatggggaa

SEQ ID NO: 41202 - DNA, 520 bp, Chicken  19866894276685_1
gttttcactgtcaaaatgcactgtctcttgtcattaggaaagataaaatacacttttcagtgagtcacttcatctaagcagtcaacagatacactttcatgggaaggctaactctccagtaaagagaaagggaaaaatctatgacaagtcacattgctgtagttccacatgttctagacaaaacttgaaaacaaagagggatttcagttgtgaactgttcatatgcatatataaacacctatatatacaaactaaaaaaaaaccaacacaaaaattccattttcaaacaattaaatattycctgtgcttccatttcagatctcagtttgaattgcaattattttttatgtttaatgataattcatcactggatcactgggctcaagctacacaggaaaaagctagtactttaattctcacagatatcatcattgtgcatatagaagtagaagcttcacagcaaatgctattaaaatgcataacttgtcaccatgcaaagccacagagttccaaacagaaa

SEQ ID NO: 41203 - DNA, 600 bp, Chicken  19866894276686_1
ctttctggtggctcagcacaaactacaacccatccctctttcatacaggtcatatgggtcagaaaatataagaccttctgaattcatcatgggttgtgccatccatgctttggcaaatgtggcatacttactatcagacagcaaaattcaaagctagttttctaggctggaggaaaagaacttggctcctgataaagaaaatggggtgtatttgctcccagaactgcacgtgagggaatgagatgcttgagattttaaggtagaactctgtcttatacatggaaacaaattaaaaaaatrctggaaaagctttcatttttgttgagaggattttttagagagagcagactgctcccatgctggtagccacaggagcaaacaggcatgcttctggcaagtgagaaggttccccctcttcctgaagctgaaaaatggaatccaaygtacaaaatacctcttgtaattaatcagttggcttattcacgcctcctaaacttgaagttgagagctgtctggaaacttgaagtaccttagggataaaataatgggcattaagcttattttatagtaagtcaagctttgggagtctgccagcatttg

SEQ ID NO: 41204 - DNA, 600 bp, Chicken  19866894276686_2
aaattcaaagctagttttctaggctggaggaaaagaacttggctcctgataaagaaaatggggtgtatttgctcccagaactgcacgtgagggaatgagatgcttgagattttaaggtagaactctgtcttatacatggaaacaaattaaaaaaatrctggaaaagctttcatttttgttgagaggattttttagagagagcagactgctcccatgctggtagccacaggagcaaacaggcatgcttctggcaagtgagaaggttccccctcttcctgaagctgaaaaatggaatccaaygtacaaaatacctcttgtaattaatcagttggcttattcacgcctcctaaacttgaagttgagagctgtctggaaacttgaagtaccttagggataaaataatgggcattaagcttattttatagtaagtcaagctttgggagtctgccagcatttgtcaggattattggaccatacctaatcaaagcaggaaaaggcacaagctgaagtctttgactatctgaaagttcagagagtgatgagcaaaagggacctctcccaagctgtgagataaataataaatggtcaaaaaagatgtag

SEQ ID NO: 41205 - DNA, 600 bp, Chicken  19866894276690_1
tagcccaggagaggcccttggtgtagtaagctgcccacctgcatggatcatagaattatagaattgtttgagttggaagaaacccttacagaccatcttgtccagcttcctgcaatgaacagggacagctacagatagatcaggctgctcagagtcccatccagtctgaccttgaatgtctccaggcacaggacatcccaccaccagcttgttccagtgcttctctacacttacagtaaaaatgtacttgctgagggtgcactaaatcctgcttctgatgtgatgaaggtattaaagaamatcatttccagttgctgtggtttactttattatttcacaagtgacasggctttccctttccatcttccctcttcctgggggaaaaagcataaaggacccaatcagtataagagggataactaaattactacctatgataaacagatgtaagacaatatgatatgaaaaggagttacaggtagtaaatcaaacaaatgggagagagatgagatctaactgcactttaaggaatggaagagaccagttcactcttgtcacctggtactggaaatcacatggaatgtactggagactcctggg

SEQ ID NO: 41206 - DNA, 600 bp, Chicken  19866894276690_2
tcatagaattatagaattgtttgagttggaagaaacccttacagaccatcttgtccagcttcctgcaatgaacagggacagctacagatagatcaggctgctcagagtcccatccagtctgaccttgaatgtctccaggcacaggacatcccaccaccagcttgttccagtgcttctctacacttacagtaaaaatgtacttgctgagggtgcactaaatcctgcttctgatgtgatgaaggtattaaagaamatcatttccagttgctgtggtttactttattatttcacaagtgacasggctttccctttccatcttccctcttcctgggggaaaaagcataaaggacccaatcagtataagagggataactaaattactacctatgataaacagatgtaagacaatatgatatgaaaaggagttacaggtagtaaatcaaacaaatgggagagagatgagatctaactgcactttaaggaatggaagagaccagttcactcttgtcacctggtactggaaatcacatggaatgtactggagactcctgggaaatataatctgtctcttctcagtaaatacccctctcagagtgctgg

SEQ ID NO: 41207 - DNA, 600 bp, Chicken  19866894276692_1
ctgttgatgacagcatgagcttgatatgaagctcaggacgcattaggtgatgcttctaccctcaatatttaaggaatcaacttgcatcagcctgatctattgcggtgaccgcttaggttccaagtcagaaagaccctctgaaaagaacaaggtgtacagaaattccagaccacttgggctcctgctccatcttgcacagccacttcgtgtccagccctaccccacagctcagtgctaggaccagcctcatgtccagccagcagaagactgccgagtgctgggagtaatgcacactgctcyaattcctttctattggcacaaaactcmattttactttggggcataatccacaattaatgtagatgtatgtagacaatatgcaagtactcacatgaatatcagctcattttgtctcctatttttactcaactctcttttgtaccatctttctagtaaaagggcctttgagattggttctttaacttccgtccaagcctcagcaggactctgccacactccaagtagctgaaggagactggaaatggccttcaccacctgaatgacaggcaggaaacaaagaatgcaggagcttctgcagct

SEQ ID NO: 41208 - DNA, 600 bp, Chicken  19866894276692_2
gaagctcaggacgcattaggtgatgcttctaccctcaatatttaaggaatcaacttgcatcagcctgatctattgcggtgaccgcttaggttccaagtcagaaagaccctctgaaaagaacaaggtgtacagaaattccagaccacttgggctcctgctccatcttgcacagccacttcgtgtccagccctaccccacagctcagtgctaggaccagcctcatgtccagccagcagaagactgccgagtgctgggagtaatgcacactgctcyaattcctttctattggcacaaaactcmattttactttggggcataatccacaattaatgtagatgtatgtagacaatatgcaagtactcacatgaatatcagctcattttgtctcctatttttactcaactctcttttgtaccatctttctagtaaaagggcctttgagattggttctttaacttccgtccaagcctcagcaggactctgccacactccaagtagctgaaggagactggaaatggccttcaccacctgaatgacaggcaggaaacaaagaatgcaggagcttctgcagctcctgtgtaagatgaatcacttcctcca

SEQ ID NO: 41209 - DNA, 600 bp, Chicken  19866894276699_1
atatattctgatttttgtgtggttctgtgtgaagacaggagttggactcattgacccttatgggtcacttccaactcgggatattctatgcttctgtgcttgcacttccaccaccaaatggtggaaacaagtttgtgtctctagccagtgctgggtcttgtttagggataggattggctgtgcagtgacccttcagttgtgctaacatagccatgaagcacacagaggtgttaattcagggatgggtgcaggcaccacgccatgagtctggttgtaataggggtaggagtgtcactgccyccctggtgaacacaagttcacaggctacatcccacagcatttgtcttcacattctgtagtgccttggttagcatgagaaagttgatctgatacagatttgtttattttaagcgaatttgggacacattccaaagtgccacattgacagcctgggaaaaaaaaaagtggtcctgtgtttaccctcwgaaaagggacagragagaaaagagccacwcaggctcttctctgcctaccatctttaatgaggagaaaacagttaggaaaatgcacttccaggtagaataataatatcccccagta

SEQ ID NO: 41210 - DNA, 600 bp, Chicken  19866894276699_2
tgacccttcagttgtgctaacatagccatgaagcacacagaggtgttaattcagggatgggtgcaggcaccacgccatgagtctggttgtaataggggtaggagtgtcactgccyccctggtgaacacaagttcacaggctacatcccacagcatttgtcttcacattctgtagtgccttggttagcatgagaaagttgatctgatacagatttgtttattttaagcgaatttgggacacattccaaagtgccacattgacagcctgggaaaaaaaaaagtggtcctgtgtttaccctcwgaaaagggacagragagaaaagagccacwcaggctcttctctgcctaccatctttaatgaggagaaaacagttaggaaaatgcacttccaggtagaataataatatcccccagtacttaaagccaacttgcatttgattcatagcrgtttgctggggtaactcttctccaggcagatcatttcagatgagcaagaagctcctgtgggtcctctgcacctggatttcaacagcaatttatcaacagaagccctccagtttgtccccctccatctaaaagaggaaagaaaacaaagggaata

SEQ ID NO: 41211 - DNA, 600 bp, Chicken  19866894276699_3
gtgctaacatagccatgaagcacacagaggtgttaattcagggatgggtgcaggcaccacgccatgagtctggttgtaataggggtaggagtgtcactgccyccctggtgaacacaagttcacaggctacatcccacagcatttgtcttcacattctgtagtgccttggttagcatgagaaagttgatctgatacagatttgtttattttaagcgaatttgggacacattccaaagtgccacattgacagcctgggaaaaaaaaaagtggtcctgtgtttaccctcwgaaaagggacagragagaaaagagccacwcaggctcttctctgcctaccatctttaatgaggagaaaacagttaggaaaatgcacttccaggtagaataataatatcccccagtacttaaagccaacttgcatttgattcatagcrgtttgctggggtaactcttctccaggcagatcatttcagatgagcaagaagctcctgtgggtcctctgcacctggatttcaacagcaatttatcaacagaagccctccagtttgtccccctccatctaaaagaggaaagaaaacaaagggaatattttcccttcaga

SEQ ID NO: 41212 - DNA, 600 bp, Chicken  19866894276699_4
gaagcacacagaggtgttaattcagggatgggtgcaggcaccacgccatgagtctggttgtaataggggtaggagtgtcactgccyccctggtgaacacaagttcacaggctacatcccacagcatttgtcttcacattctgtagtgccttggttagcatgagaaagttgatctgatacagatttgtttattttaagcgaatttgggacacattccaaagtgccacattgacagcctgggaaaaaaaaaagtggtcctgtgtttaccctcwgaaaagggacagragagaaaagagccacwcaggctcttctctgcctaccatctttaatgaggagaaaacagttaggaaaatgcacttccaggtagaataataatatcccccagtacttaaagccaacttgcatttgattcatagcrgtttgctggggtaactcttctccaggcagatcatttcagatgagcaagaagctcctgtgggtcctctgcacctggatttcaacagcaatttatcaacagaagccctccagtttgtccccctccatctaaaagaggaaagaaaacaaagggaatattttcccttcagaggtgataggaagttct

SEQ ID NO: 41213 - DNA, 600 bp, Chicken  19866894276699_5
ccacagcatttgtcttcacattctgtagtgccttggttagcatgagaaagttgatctgatacagatttgtttattttaagcgaatttgggacacattccaaagtgccacattgacagcctgggaaaaaaaaaagtggtcctgtgtttaccctcwgaaaagggacagragagaaaagagccacwcaggctcttctctgcctaccatctttaatgaggagaaaacagttaggaaaatgcacttccaggtagaataataatatcccccagtacttaaagccaacttgcatttgattcatagcrgtttgctggggtaactcttctccaggcagatcatttcagatgagcaagaagctcctgtgggtcctctgcacctggatttcaacagcaatttatcaacagaagccctccagtttgtccccctccatctaaaagaggaaagaaaacaaagggaatattttcccttcagaggtgataggaagttcttttctttctctgagattcatggtctcttcaggttgtttccttacagcttaccagagttgtcaaactcacttgagcttgggaacacggggacatgaaacatttagaattggctctggc

SEQ ID NO: 41214 - DNA, 600 bp, Chicken  19866894276703_1
aagccaagagacaagtgagtagcttgctatttattgcccaaacgtagatcacagacgaaaatgaacagaagtatttctaactgcagcaattcttgcccacgtttcgtgactgtcggttatttgctgctcgtccccgtttcttggggtgcatcattcagccttactgcctgacccagtagttggaagcaccataaatgtgaggtgattctataaccgtggactggggaattctaatgctcacagatagtgacaggtatggaattttggtgctctgggggttataagttggatttagaaagygtggttgccaccaaagcctttcattatgctttcctgctctgcactggacctttctctctgctctgtgaattttagcatgcaaattgtaaagagaaacatcaagttacattctagaattaaatttgcagatttctgatattacctacagtactcttgaggtgtgaaagtgtaagaatatcactaattttttagggaaaactgggccattaatgagtgagttgatagagctgtgacagttgtaaaagcattccccagtgtacacagagagacacagatagaccagggastggggggtgtgtg

SEQ ID NO: 41215 - DNA, 600 bp, Chicken  19866894276703_2
ggatttagaaagygtggttgccaccaaagcctttcattatgctttcctgctctgcactggacctttctctctgctctgtgaattttagcatgcaaattgtaaagagaaacatcaagttacattctagaattaaatttgcagatttctgatattacctacagtactcttgaggtgtgaaagtgtaagaatatcactaattttttagggaaaactgggccattaatgagtgagttgatagagctgtgacagttgtaaaagcattccccagtgtacacagagagacacagatagaccagggastggggggtgtgtgtgtagcatggcttaacaatgctgtgggctccatgggaaaaagaatcatttgagcctttactggagcataagtttagtcttttacacttgtatccaggctggtatgttgtaggtggagcagatatcccaatacttactattcagatgactcaaaacaaaacatcacaaactgtgagaatgcaggacagttagaccaaacccctttcaatcttttcaatgtagttttttattttccatcttaattcctaaatggctgaggagtggcaccttcaccctccagctgctttc

SEQ ID NO: 41216 - DNA, 599 bp, Chicken  19866894276707_1
  misc_feature (1)..(142): n is any nucleotide
nnnnnnnnnnnnnnnnnnnnnnnnnnnnnnnnnnnnnnnnnnnnnnnnnnnnnnnnnnnnnnnnnnnnnnnnnnnnnnnnnnnnnnnnnnnnnnnnnnnnnnnnnnnnnnnnnnnnnnnnnnnnnnnnnnnnnnnnnnnnnntgtggtttggtagtttttacatgttgcacgtactagcactcatctaacagtagaaacgaaacacaggagaactgttatttacaacatctatgtttacagcaagagaaacaatagaaatgcaaagtaggcattcctggttattaagtggttaatagttyttcccatgacttaatagagtttatggaattgagtagtcgtcttttgctgagctgttactaagcagtcatccataggcatgattctacaagctcattattaaagacttaccgctgctcctcggagtttgaatcagccttcatgactgaatgcctacatttctcagccattctattttgcaaagtacagtggactggtctatttcataatactggtacrttctaggaaaccgacttttttgagggtcccaaacattttctagaatgattgggaatggattttggaaccccaagcaataact

SEQ ID NO: 41217 - DNA, 600 bp, Chicken  19866894276707_2
tatttacaacatctatgtttacagcaagagaaacaatagaaatgcaaagtaggcattcctggttattaagtggttaatagttyttcccatgacttaatagagtttatggaattgagtagtcgtcttttgctgagctgttactaagcagtcatccataggcatgattctacaagctcattattaaagacttaccgctgctcctcggagtttgaatcagccttcatgactgaatgcctacatttctcagccattctattttgcaaagtacagtggactggtctatttcataatactggtacrttctaggaaaccgacttttttgagggtcccaaacattttctagaatgattgggaatggattttggaaccccaagcaataactcctcccactgcacactattggtttgggtacagtgtctgtgacctaattccaacaagctgtctagarattattttatacttgctatataccatgcttagaatataaagatgatgatctcagtgttgattaaacttaaattcttcatgcattgcctggatctaggagacgttcagttagctgagtaaaaaatcagttctgatcaagtacttcaagagcag

SEQ ID NO: 41218 - DNA, 600 bp, Chicken  19866894276707_3
tcatccataggcatgattctacaagctcattattaaagacttaccgctgctcctcggagtttgaatcagccttcatgactgaatgcctacatttctcagccattctattttgcaaagtacagtggactggtctatttcataatactggtacrttctaggaaaccgacttttttgagggtcccaaacattttctagaatgattgggaatggattttggaaccccaagcaataactcctcccactgcacactattggtttgggtacagtgtctgtgacctaattccaacaagctgtctagarattattttatacttgctatataccatgcttagaatataaagatgatgatctcagtgttgattaaacttaaattcttcatgcattgcctggatctaggagacgttcagttagctgagtaaaaaatcagttctgatcaagtacttcaagagcagctgatcaaatcaactaaaataaatgaggtcccacagtctgatctggatattttagagacttgtgcaagataaaagcgttaaaaaatctgttaagtgtgtatcctcaagttaggtgctgtgcttgcatcccagaaatgtgtgcccagct

SEQ ID NO: 41219 - DNA, 600 bp, Chicken  19866894276710_1
tgtgaagaatgcttctcatagcagcaggagcaaggcaaatggggccaatctgagagataaatgacttctgtcttgctttccccaaatgcttgttttatctcagagctctcatcctgtgtaattgaggctcagccctgacatccttaaacacaagcttttataggggatgcagtgcaatgaaatgagatcttcagatgttcaattcagttataacgtggttaagtgattccctttcttgagctttctcacaaggctctctttcaattggaattctcccagaggaagaaaacacacaattaraagacattcaaaaatctaaacagtttttcttagttcttcagagacatttaattggaattatgttgttctctgtaagagattgggaggatgaagttttatttcaggtcctgatttcatagctttgttatttttcagcttcacacacttgagacagactttcccactcagaaaggtcaacagcttataaatcatggctgcctataaatcaagactgtattcagctggaattactgtactttgacatttcccacttctttatgatccatcccaaagccacaaagatggaaagtccttgccttg

SEQ ID NO: 41220 - DNA, 600 bp, Chicken  19866894276710_2
aagagattgggaggatgaagttttatttcaggtcctgatttcatagctttgttatttttcagcttcacacacttgagacagactttcccactcagaaaggtcaacagcttataaatcatggctgcctataaatcaagactgtattcagctggaattactgtactttgacatttcccacttctttatgatccatcccaaagccacaaagatggaaagtccttgccttgtcctgaagagtataaaggccctggaaacactaaaacagaacatgagaagtgtagtagcagcaagactttacaytgtcagcagggtgggtttgctcttattgctcttacttatatttatggaatccattgctggcagggtggggctgaatgggttagttaaggacagaattggcccatttaccsatagtagctttttgaattcaagaccttcactttgttgaaagcagccaagataagtgcagagrattttaatacctaaatatcaacatgaataagctattcttagaatgtctctttgccaaatttactaatttgaatttggagttaggacactgaatcctatagcatgattttctccaagattttggcctcc

SEQ ID NO: 41221 - DNA, 600 bp, Chicken  19866894276710_3
ataaatcatggctgcctataaatcaagactgtattcagctggaattactgtactttgacatttcccacttctttatgatccatcccaaagccacaaagatggaaagtccttgccttgtcctgaagagtataaaggccctggaaacactaaaacagaacatgagaagtgtagtagcagcaagactttacaytgtcagcagggtgggtttgctcttattgctcttacttatatttatggaatccattgctggcagggtggggctgaatgggttagttaaggacagaattggcccatttaccsatagtagctttttgaattcaagaccttcactttgttgaaagcagccaagataagtgcagagrattttaatacctaaatatcaacatgaataagctattcttagaatgtctctttgccaaatttactaatttgaatttggagttaggacactgaatcctatagcatgattttctccaagattttggcctcctcagtcctaccttatcctgcgctagtcaccccagataagccaagcatctgcttttaaaaatcatcaatcagtaattagaagctataaatttgaaaactgggcacgattta

SEQ ID NO: 41222 - DNA, 600 bp, Chicken  19866894276710_4
tcccacttctttatgatccatcccaaagccacaaagatggaaagtccttgccttgtcctgaagagtataaaggccctggaaacactaaaacagaacatgagaagtgtagtagcagcaagactttacaytgtcagcagggtgggtttgctcttattgctcttacttatatttatggaatccattgctggcagggtggggctgaatgggttagttaaggacagaattggcccatttaccsatagtagctttttgaattcaagaccttcactttgttgaaagcagccaagataagtgcagagrattttaatacctaaatatcaacatgaataagctattcttagaatgtctctttgccaaatttactaatttgaatttggagttaggacactgaatcctatagcatgattttctccaagattttggcctcctcagtcctaccttatcctgcgctagtcaccccagataagccaagcatctgcttttaaaaatcatcaatcagtaattagaagctataaatttgaaaactgggcacgatttaggttacctaaagtgctgcaactagttcatggcttcttaacctctgacttcccttgacagcaa

SEQ ID NO: 41223 - DNA, 600 bp, Chicken  19866894276715_1
ggaggaagtgtgtgtgaataagcgccgtgttgtgtatcgagcgtgctatggaatcacccattactctctattccttttccactggatcaagaacaattgcttgttttcattcagatcttttcatctccccaccaccccttcctttccagctgtaaaactctaattcctttaaacaaatggaactggagtggtctgcttagtcattttcattagcttcctattagggcccagagtggtttctaatgcttttcttaaagatgccaaaatgccagatcttaccctgtgagttttgagagccaraaagtacgaagagaactttccagcactgggcaatatgtctgcatgccagggacacagtgactgacagctaccatgggagcgacaagggtcttgtggaaaaaacaccacctgaaaatcaagctgtgttggttatttcctatttktattttcaaaayagaygaaggaattagctgaagcaaaaataataattttaccttttctttgcaggtttgatcttattattctatctggtattttatggcttcctcgcggcgctcttcacattcacaatgtgggttatgcttcagacactgagcaatg

SEQ ID NO: 41224 - DNA, 600 bp, Chicken  19866894276715_2
ttccagctgtaaaactctaattcctttaaacaaatggaactggagtggtctgcttagtcattttcattagcttcctattagggcccagagtggtttctaatgcttttcttaaagatgccaaaatgccagatcttaccctgtgagttttgagagccaraaagtacgaagagaactttccagcactgggcaatatgtctgcatgccagggacacagtgactgacagctaccatgggagcgacaagggtcttgtggaaaaaacaccacctgaaaatcaagctgtgttggttatttcctatttktattttcaaaayagaygaaggaattagctgaagcaaaaataataattttaccttttctttgcaggtttgatcttattattctatctggtattttatggcttcctcgcggcgctcttcacattcacaatgtgggttatgcttcagacactgagcaatgacattccaaaataccgtgaccggatttctagtccaggtaacagtgtatttatctcttcataaactcagttctggtttaacagccaagttttactcatgactttgttttaagtagaaactgcctatgagaaactgtgtttatta

SEQ ID NO: 41225 - DNA, 600 bp, Chicken  19866894276715_3
aactctaattcctttaaacaaatggaactggagtggtctgcttagtcattttcattagcttcctattagggcccagagtggtttctaatgcttttcttaaagatgccaaaatgccagatcttaccctgtgagttttgagagccaraaagtacgaagagaactttccagcactgggcaatatgtctgcatgccagggacacagtgactgacagctaccatgggagcgacaagggtcttgtggaaaaaacaccacctgaaaatcaagctgtgttggttatttcctatttktattttcaaaayagaygaaggaattagctgaagcaaaaataataattttaccttttctttgcaggtttgatcttattattctatctggtattttatggcttcctcgcggcgctcttcacattcacaatgtgggttatgcttcagacactgagcaatgacattccaaaataccgtgaccggatttctagtccaggtaacagtgtatttatctcttcataaactcagttctggtttaacagccaagttttactcatgactttgttttaagtagaaactgcctatgagaaactgtgtttattattcagttacttg

SEQ ID NO: 41226 - DNA, 600 bp, Chicken  19866894276715_4
ctaattcctttaaacaaatggaactggagtggtctgcttagtcattttcattagcttcctattagggcccagagtggtttctaatgcttttcttaaagatgccaaaatgccagatcttaccctgtgagttttgagagccaraaagtacgaagagaactttccagcactgggcaatatgtctgcatgccagggacacagtgactgacagctaccatgggagcgacaagggtcttgtggaaaaaacaccacctgaaaatcaagctgtgttggttatttcctatttktattttcaaaayagaygaaggaattagctgaagcaaaaataataattttaccttttctttgcaggtttgatcttattattctatctggtattttatggcttcctcgcggcgctcttcacattcacaatgtgggttatgcttcagacactgagcaatgacattccaaaataccgtgaccggatttctagtccaggtaacagtgtatttatctcttcataaactcagttctggtttaacagccaagttttactcatgactttgttttaagtagaaactgcctatgagaaactgtgtttattattcagttacttggaag

SEQ ID NO: 41227 - DNA, 600 bp, Chicken  19866894276717_1
aagccagtcagtctttttgtgaacttctcctgaactgatgatggcagtttcctttataggtgattgagcattccaagtaccaagaatccaaaagaattgcgatctttctgagcatgccagatgaaatccagacagaagaaatcattaaggacatttttaagcaaggcaaggagtgtttcatcccacgttacaaacctcacagcaatcacatggacatgctaaagctgtcatcagctgaagacatttcttcactcactttgacatcctggaatattctccagcctagcgatgacgacagcrcaagagaggaagctcttgctggcggtgagtatcttcatcaaacatcatagggttgctgagcaggagtagcctggtaggaaataatctgatcacaagaatggaattaagtgttttgctttggtcttacatattgtggtagagatgctgaagtcaatgttagcaggtgctactttctcctgcctgttttccactactctgtgccaccgctgccagcagaactggcaagagcaaggctggacagttaatccaactgaaataagttcatctctccagataaatcacctccctggtcctgttcca

SEQ ID NO: 41228 - DNA, 589 bp, Chicken  19866894276717_2
gtaggaaataatctgatcacaagaatggaattaagtgttttgctttggtcttacatattgtggtagagatgctgaagtcaatgttagcaggtgctactttctcctgcctgttttccactactctgtgccaccgctgccagcagaactggcaagagcaaggctggacagttaatccaactgaaataagttcatctctccagataaatcacctccctggtcctgttccagggacagactcaatgcagtcttggcaagcgtagcatagaggttcacgaaggaagcaggggcttgccaggagtygcttgagctgccattgaaagtcatggggattcacagttttcagatgaactcagggaactttaatttccactgtctgaaaggtacaaaactttccaggtgacacctatgggctgacatgagaattttctgaagtctttgatcctgaaaattgtatcgcatgggtaaagcacagcactgcccatgcagaacagttttctggactgagaccttagactgaaaataacatatctttctcgtaggattgggtaaatattgcaaactcttttcaatcaatgttccctcacgtttt

SEQ ID NO: 41229 - DNA, 600 bp, Chicken  19866894276718_1
gctcttggaaagctctcactggggaaggacacttcagttttagcaattgtggtttcacatttgataaattgatcaaaaccaactcaactactttgaaacggattgaagaacgctttgttcagggcttttgtcactgatacttgaagtcctgcagcagtgtggtcattcccctttagcattccctttaggttatggcatggagtcctgcctttgcagaagcagtactgtagtttatcaattggtattgatattaattggtattaattatcaaggagtcgctaggatctgaagtcagaggcrtttcatgaatacagataaccacaccctccaattccagggtctagcattctagctgcagttcayggcttacgagcccttccacagtaaatgctctcttcaggatactaattagtcatattttaagttaatgaagcttctaaccatctgcttattttttaaacacagattcttcaagcagcagaatggtaacggaaaaagatgttgagagctctatgacttgccagaaaaaaccacagctgattaaggtcagataactgaagatgtaaccatttcacaacaaagtcttgcctgtgagcaaag

SEQ ID NO: 41230 - DNA, 567 bp, Chicken  19866894276718_2
ataaattgatcaaaaccaactcaactactttgaaacggattgaagaacgctttgttcagggcttttgtcactgatacttgaagtcctgcagcagtgtggtcattcccctttagcattccctttaggttatggcatggagtcctgcctttgcagaagcagtactgtagtttatcaattggtattgatattaattggtattaattatcaaggagtcgctaggatctgaagtcagaggcrtttcatgaatacagataaccacaccctccaattccagggtctagcattctagctgcagttcayggcttacgagcccttccacagtaaatgctctcttcaggatactaattagtcatattttaagttaatgaagcttctaaccatctgcttattttttaaacacagattcttcaagcagcagaatggtaacggaaaaagatgttgagagctctatgacttgccagaaaaaaccacagctgattaaggtcagataactgaagatgtaaccatttcacaacaaagtcttgcctgtgagcaaagcagttcaataaacaattcacataattatca

SEQ ID NO: 41231 - DNA, 600 bp, Chicken  19866894276723_1
catcctgccattggaggtgacatagtttcaaacacctggggaatgaggcaatgcaaatgaggaggagttgcccacagcatttagtgataaagctgatgggctgaaaccgtgaacacatgctgcaggtggatcttaacctccttgcagatgtgggctatgtcagacctgcagtgccctcagcaagtcaatatgcagttggggttgtctctgtactgtgatgctcttgctctaatgatatttcagctgcttcaagtgctctgagattgctggagaaaacattagctgtgctcagagtgacgyattttgccatgaaagcattgcagtgagcagaatttcacctcaaaagtgaaagaggcccgaagtctccggtctgtgctgccagcaggaggagcaacacagcttaggagagagggaatctgcatgagaagcgaaacactgccttaggtaagacgggaggtgactgagtcaacagcaagcacctacacgtggcctgccctcaggacgacagcagtggtcgttgtttccttgcacttctcccagctgaccgagcatttgacaaggctgagcagagtgccgttagttgagcaaaggatacttgcg

SEQ ID NO: 41232 - DNA, 600 bp, Chicken  19866894276724_1
agagttttagaaagaaattgtgcaggaagtagctatcatcaatttaaatgctataaaaagtgttcagatatgctgagttctctctctaggaaaaaacaattataacagaaccatgccagatttgtttcgaagtagtattttacaacaagtgagttttggtatttgtttacctgaaaggtattctgtgactggtaggaaaattgacagcccagccttgaaaatgtctgcttaaaaatatagttgtcgtgtggcctgctaaccttttgccatgaaggtgtatgtagacaccccttggtcttraacagagtggtgtagtccactgttgcttcctctttacattttagaggtttaacataactcgtaaagaggaaaagctaatcttaaaaacgtttatatggttgaacagtattcttgattttgtataaaagtttacttggaaatcatttacaggtttacaagtcttaaccagaagtcagactgccacaatctcttaggtacccagcagcactgtttggtagcagcaggtgaacagccctacacttggacatagacagagaaaaggcagctgacattggaacaagaacaacagggaagggatat

SEQ ID NO: 41233 - DNA, 600 bp, Chicken  19866894276733_1
atacatatacaaacatatacagacagtatctgtctctctatgtatatgtgtgtatatatatgtatatatacatatgtatatatatagcgccatctcagtgaagaatagactagggaaaaaattacctgtacttgatttttttttttcaaataagaaaaggagttaaatataggtgataaattgttcacaattaataatgtaaatgtgcatatatctcagatgtattgtctgtgctgttagtgaaaccagatttcctatttctgtgtcagtatgtgcatcttttgctttccataaaacatkacatggctgttgagtcgattggtagctggagaactaatataaactcataaatgatagacatctatattgtaatgaaaaggtccaaccaattgatgagtgggcataatgccattcaagcagatgggtctgagcatcagcagccaaaacatcaagtaagtccatcaaatggagatgttgaggctgggtagatttcacagccaggaacactgaatgttaagacagtgtaattagcagaatatgacaccattaaaccagctgtgggctggattaattctgaaaaatataataaataccttccac

SEQ ID NO: 41234 - DNA, 599 bp, Chicken  19866894276735_1
  misc_feature (1)..(116): n is any nucleotide
nnnnnnnnnnnnnnnnnnnnnnnnnnnnnnnnnnnnnnnnnnnnnnnnnnnnnnnnnnnnnnnnnnnnnnnnnnnnnnnnnnnnnnnnnnnnnnnnnnnnnnnnnnnnnnnnnnnntcaggatggatttacttacttgctgctaatagagtgagaaatgttcacctttgtgcagtgttctctgtcctagtttgtttcttttcagtagcagaataacccaaggatccatttaaagatggagagcaaaaggtggttcttgtgcttttgaattgtgtttttcgtgtttatattcacctaaaarttcaaaatgtggactgcttaatgtaaytaatgaacttatgtatggatagagaatcttaggaaggttatgcagcagttcactgagatgcccgctcttgcatgggaaagtaataatatacttactgtgaattaaaaataacagcactgcaggtgacatgacttctctttcttccctgccctttctgtgttatctgtcatccactttcacatcttgtttactggagttggtggaaacgtggattggaagcagatagcaagtattcaagagtccattggtgaaactagctcccaaagtgttgt

SEQ ID NO: 41235 - DNA, 599 bp, Chicken  19866894276735_2
  misc_feature (1)..(89): n is any nucleotide
nnnnnnnnnnnnnnnnnnnnnnnnnnnnnnnnnnnnnnnnnnnnnnnnnnnnnnnnnnnnnnnnnnnnnnnnnnnnnnnnnnnnnnnnntcaggatggatttacttacttgctgctaatagagtgagaaatgttcacctttgtgcagtgttctctgtcctagtttgtttcttttcagtagcagaataacccaaggatccatttaaagatggagagcaaaaggtggttcttgtgcttttgaattgtgtttttcgtgtttatattcacctaaaarttcaaaatgtggactgcttaatgtaaytaatgaacttatgtatggatagagaatcttaggaaggttatgcagcagttcactgagatgcccgctcttgcatgggaaagtaataatatacttactgtgaattaaaaataacagcactgcaggtgacatgacttctctttcttccctgccctttctgtgttatctgtcatccactttcacatcttgtttactggagttggtggaaacgtggattggaagcagatagcaagtattcaagagtccattggtgaaactagctcccaaagtgttgtcgttgctgtagacaggtactgtattca

SEQ ID NO: 41236 - DNA, 600 bp, Chicken  19866894276735_3
ctgagatgcccgctcttgcatgggaaagtaataatatacttactgtgaattaaaaataacagcactgcaggtgacatgacttctctttcttccctgccctttctgtgttatctgtcatccactttcacatcttgtttactggagttggtggaaacgtggattggaagcagatagcaagtattcaagagtccattggtgaaactagctcccaaagtgttgtcgttgctgtagacaggtactgtattcaatttattcttgccatctcaggggtccttttttttaaataatacttgaattcgktagtgtgataataggaagttattattaacttaacgtatgtttaccatggaaggtgcttcaaagatattaccatgtaagggtgctttggggttttgcacttctttcttaaaaagagcagattttttttttgcaacaaggaataaagatcgggcaaaaagactgttttactgatgtgaaattattactgggcatttgcagaatggagactgctgtactgcctggtgaattttgatttgctatacatagtaacaaatagcaaatcttattttgcctttgtacaaggagcattacttgtagaca

SEQ ID NO: 41237 - DNA, 600 bp, Chicken  19866894276735_4
gtacacatcatcacaattccttgtttaccgatctgactgaggtcttaatggatctatctgtctcagtgtataagaagtcagaaagtatcattttctaaatggttgtcaaaattgacaatcctggaacaaagcggtgttctgaaggctcacaggctttctgtgattgagtatagcagcaagattgatgtcagttcaatgaaagttgccttgcagtaaaatcacattgagctacctggaggggcttaatgtcaaacacgtaatagctctttaggtttgcagtgttactccacacttcataakgaaaagtgtttcaagtatctatttgtcatggcaagtgggaatcatgcactctggagaaggctgccttatccatttgaaggaggcatgcatagtttataaagctgctgctgttattcatctgtcactgtcagggagcagatagaattagaaacagtgctcactgccctgtctccatgtactctgtggagtaatctttaaatattagacgtaattgaaatatttctgcttttattttcacagctcaatcttttttcacaatttttaaaactgaataaataacattagatgggttataaggct

SEQ ID NO: 41238 - DNA, 600 bp, Chicken  19866894276737_1
tagtgtttttattcatgtttggtgtccaggaagcctgataaaatctgataataaagcacttcagcaggaacattcttagaagtacgctctttaatgatattttactatctcctattcctatcagtttacagcttgtcattgtgtatgttcaaattcatacggtttcaggacaatttgcatttgtgtaagcttacttaaatctaattacgctagtaattaactaattcttttttttttactgcaaagatttctgtacgtcccattcactctaatgttttcataaatgacttgaatgcaagrttaaaatgtatactctgttagtttgcagatgacacttagttggtaagagctgttgactccctcaagagcagagagccttgcagaaagatctttacaaattggaagactgggcaaccatcacctgcctgaaatttcaagtgctggatcctgcacatttgacaggtcaaccctgcatatatgtgcagattgagatgaggctggagggcaggcctgtgaaaaggggtcatctggggagtgatgtttggcagcatgctgaatacaagccagtagtgttccctgtcaacccaaagggccaactgt

SEQ ID NO: 41239 - DNA, 599 bp, Chicken  19866894276740_1
  misc_feature (1)..(74): n is any nucleotide
nnnnnnnnnnnnnnnnnnnnnnnnnnnnnnnnnnnnnnnnnnnnnnnnnnnnnnnnnnnnnnnnnnnnnnnnnntaatttctttgtattctataaacgtttggtgtctactgtctctgattagagcgacattgttttgattagaaatcacaaaagaaatgcagcattcatccaagaaaggagtaatttcctaccagcttttttttctaaaggaaagaattgttataaccagtatgtcatgttaaagtcaagtaatactagtgaaagtatgatgatgtcaaagatgtaaattcagatccaraaatatctcaaatactctcattcttaaattttaaattatttgaattggttgtgaccttacatgcattgagcagattttaactaacttgctgtttacagtgcctgtgaacaatttcctacagaatagagctcaaagtatattattaaccacgcatactatattttctaggcctttgaaacttcattaacgcccacttgagatgattaactttcatgtctaactttctttctcacataaatttttaagtttattttttttttaataatgtagttcagaatgtatctttgtgcatataattt

SEQ ID NO: 41240 - DNA, 599 bp, Chicken  19866894276742_1
  misc_feature (1)..(219): n is any nucleotide
nnnnnnnnnnnnnnnnnnnnnnnnnnnnnnnnnnnnnnnnnnnnnnnnnnnnnnnnnnnnnnnnnnnnnnnnnnnnnnnnnnnnnnnnnnnnnnnnnnnnnnnnnnnnnnnnnnnnnnnnnnnnnnnnnnnnnnnnnnnnnnnnnnnnnnnnnnnnnnnnnnnnnnnnnnnnnnnnnnnnnnnnnnnnnnnnnnnnnnnnnnnnnnnnnnnnnnnnnnnaaaaaaaaaacagtattttaagcacgatctctgtctaaaggaattgtgttcctgatgtctctagagtatcttgaagagtgwacrttacttacaaaagctgtgttctcatttaaagtcccattgcgttgtgcatgttatcactgacaaccctctgggaagcatcctcctgccatcattcctgtgtggttatttacgcagacaaatagatatcttgttgattcaccagtagragaataaattatttaacttcagtctttacagattttctttggaccaacacattagttttggtcagtatcaggaattgggaaagctgaaaaacttttttttttgtcattgtttgtacttgatataattctttctagtcctgaaaayggaga

SEQ ID NO: 41241 - DNA, 599 bp, Chicken  19866894276742_2
  misc_feature (1)..(216): n is any nucleotide
nnnnnnnnnnnnnnnnnnnnnnnnnnnnnnnnnnnnnnnnnnnnnnnnnnnnnnnnnnnnnnnnnnnnnnnnnnnnnnnnnnnnnnnnnnnnnnnnnnnnnnnnnnnnnnnnnnnnnnnnnnnnnnnnnnnnnnnnnnnnnnnnnnnnnnnnnnnnnnnnnnnnnnnnnnnnnnnnnnnnnnnnnnnnnnnnnnnnnnnnnnnnnnnnnnnnnnnnaaaaaaaaaacagtattttaagcacgatctctgtctaaaggaattgtgttcctgatgtctctagagtatcttgaagagtgwacrttacttacaaaagctgtgttctcatttaaagtcccattgcgttgtgcatgttatcactgacaaccctctgggaagcatcctcctgccatcattcctgtgtggttatttacgcagacaaatagatatcttgttgattcaccagtagragaataaattatttaacttcagtctttacagattttctttggaccaacacattagttttggtcagtatcaggaattgggaaagctgaaaaacttttttttttgtcattgtttgtacttgatataattctttctagtcctgaaaayggagagtc

SEQ ID NO: 41242 - DNA, 599 bp, Chicken  19866894276742_3
  misc_feature (1)..(70): n is any nucleotide
nnnnnnnnnnnnnnnnnnnnnnnnnnnnnnnnnnnnnnnnnnnnnnnnnnnnnnnnnnnnnnnnnnnnnnaaaaaaaaaacagtattttaagcacgatctctgtctaaaggaattgtgttcctgatgtctctagagtatcttgaagagtgwacrttacttacaaaagctgtgttctcatttaaagtcccattgcgttgtgcatgttatcactgacaaccctctgggaagcatcctcctgccatcattcctgtgtggttatttacgcagacaaatagatatcttgttgattcaccagtagragaataaattatttaacttcagtctttacagattttctttggaccaacacattagttttggtcagtatcaggaattgggaaagctgaaaaacttttttttttgtcattgtttgtacttgatataattctttctagtcctgaaaayggagagtctagaataagggaaagtgggtctcttgttcacctgaaggctctaaataaatcaattcttaccttctattctgtcttgtgaatgcttagattcacataaaagaaactgtgaaggacttcagtaaattcagacygctgttatctccatt

SEQ ID NO: 41243 - DNA, 600 bp, Chicken  19866894276742_4
gagtgwacrttacttacaaaagctgtgttctcatttaaagtcccattgcgttgtgcatgttatcactgacaaccctctgggaagcatcctcctgccatcattcctgtgtggttatttacgcagacaaatagatatcttgttgattcaccagtagragaataaattatttaacttcagtctttacagattttctttggaccaacacattagttttggtcagtatcaggaattgggaaagctgaaaaacttttttttttgtcattgtttgtacttgatataattctttctagtcctgaaaayggagagtctagaataagggaaagtgggtctcttgttcacctgaaggctctaaataaatcaattcttaccttctattctgtcttgtgaatgcttagattcacataaaagaaactgtgaaggacttcagtaaattcagacygctgttatctccattttgcaggtaattgtttctattcttaccagaaatcactacaacttttgtcctgttcgagggccgatgttatgttcataryacgttttcatattaaggagatttttgtttgccaagcagcagtgcacttaaaaaggacaagggaagta

SEQ ID NO: 41244 - DNA, 585 bp, Chicken  19866894276742_5
ttgattcaccagtagragaataaattatttaacttcagtctttacagattttctttggaccaacacattagttttggtcagtatcaggaattgggaaagctgaaaaacttttttttttgtcattgtttgtacttgatataattctttctagtcctgaaaayggagagtctagaataagggaaagtgggtctcttgttcacctgaaggctctaaataaatcaattcttaccttctattctgtcttgtgaatgcttagattcacataaaagaaactgtgaaggacttcagtaaattcagacygctgttatctccattttgcaggtaattgtttctattcttaccagaaatcactacaacttttgtcctgttcgagggccgatgttatgttcataryacgttttcatattaaggagatttttgtttgccaagcagcagtgcacttaaaaaggacaagggaagtaatcaagatttagggcatacctgtcatgcggtgtgggactccacacatgctgcaagactagttctcataaaaataattatatgtttaggatattcccaactatgtaaaggcaaaaacaaagaaaa

SEQ ID NO: 41245 - DNA, 492 bp, Chicken  19866894276742_6
ggaaagctgaaaaacttttttttttgtcattgtttgtacttgatataattctttctagtcctgaaaayggagagtctagaataagggaaagtgggtctcttgttcacctgaaggctctaaataaatcaattcttaccttctattctgtcttgtgaatgcttagattcacataaaagaaactgtgaaggacttcagtaaattcagacygctgttatctccattttgcaggtaattgtttctattcttaccagaaatcactacaacttttgtcctgttcgagggccgatgttatgttcataryacgttttcatattaaggagatttttgtttgccaagcagcagtgcacttaaaaaggacaagggaagtaatcaagatttagggcatacctgtcatgcggtgtgggactccacacatgctgcaagactagttctcataaaaataattatatgtttaggatattcccaactatgtaaaggcaaaaacaaagaaaa

SEQ ID NO: 41246 - DNA, 491 bp, Chicken  19866894276742_7
gaaagctgaaaaacttttttttttgtcattgtttgtacttgatataattctttctagtcctgaaaayggagagtctagaataagggaaagtgggtctcttgttcacctgaaggctctaaataaatcaattcttaccttctattctgtcttgtgaatgcttagattcacataaaagaaactgtgaaggacttcagtaaattcagacygctgttatctccattttgcaggtaattgtttctattcttaccagaaatcactacaacttttgtcctgttcgagggccgatgttatgttcataryacgttttcatattaaggagatttttgtttgccaagcagcagtgcacttaaaaaggacaagggaagtaatcaagatttagggcatacctgtcatgcggtgtgggactccacacatgctgcaagactagttctcataaaaataattatatgtttaggatattcccaactatgtaaaggcaaaaacaaagaaaa

SEQ ID NO: 41247 - DNA, 600 bp, Chicken  19866894276781_1
aggcctccgagagatgcccagcactgagcttgaccagctcagtcaaaccaatgctatgttcttgggaagagccataacatgctatgccaacctaggttaacctcagttctttttctcttctcatcctggtattctgagtatatgagctttcattttcagactcactattctcagtgtctacatgcccaacatagcaaacacaatagctatcaattgatctcttttacctctaaagctcacagctttgctgtaaatatctactgaacttcatctgctctacagcttccctcctgatctcascttatgggaaggtatagatccagcagactgtagrgtcacaatttgggcaggaaatgygtactcaaggaacaggtctgacaggaaaaaaagaaaactaactagtatacctatgtgaaattgtgtattcataccactaataacatcagcatgtcttgaagaaaggttgtttctacagttcatgaattaaagagagagagagagagagagagagagagtcatgcccagaaaagcaataggcagcttctacaaccccctgagcctgatgttagcaacagttgccagcaaaaaataagtatctaa

SEQ ID NO: 41248 - DNA, 600 bp, Chicken  19866894276781_2
cagctcagtcaaaccaatgctatgttcttgggaagagccataacatgctatgccaacctaggttaacctcagttctttttctcttctcatcctggtattctgagtatatgagctttcattttcagactcactattctcagtgtctacatgcccaacatagcaaacacaatagctatcaattgatctcttttacctctaaagctcacagctttgctgtaaatatctactgaacttcatctgctctacagcttccctcctgatctcascttatgggaaggtatagatccagcagactgtagrgtcacaatttgggcaggaaatgygtactcaaggaacaggtctgacaggaaaaaaagaaaactaactagtatacctatgtgaaattgtgtattcataccactaataacatcagcatgtcttgaagaaaggttgtttctacagttcatgaattaaagagagagagagagagagagagagagagtcatgcccagaaaagcaataggcagcttctacaaccccctgagcctgatgttagcaacagttgccagcaaaaaataagtatctaaagggcaggattttccaaagctgtctcagtgccaa

SEQ ID NO: 41249 - DNA, 600 bp, Chicken  19866894276781_3
gttcttgggaagagccataacatgctatgccaacctaggttaacctcagttctttttctcttctcatcctggtattctgagtatatgagctttcattttcagactcactattctcagtgtctacatgcccaacatagcaaacacaatagctatcaattgatctcttttacctctaaagctcacagctttgctgtaaatatctactgaacttcatctgctctacagcttccctcctgatctcascttatgggaaggtatagatccagcagactgtagrgtcacaatttgggcaggaaatgygtactcaaggaacaggtctgacaggaaaaaaagaaaactaactagtatacctatgtgaaattgtgtattcataccactaataacatcagcatgtcttgaagaaaggttgtttctacagttcatgaattaaagagagagagagagagagagagagagagtcatgcccagaaaagcaataggcagcttctacaaccccctgagcctgatgttagcaacagttgccagcaaaaaataagtatctaaagggcaggattttccaaagctgtctcagtgccaaaacggacagcagctttggagaat

SEQ ID NO: 41250 - DNA, 600 bp, Chicken  19866894276781_4
tatcaccccaaacttgtaccaaattgttatttcctgatttggtgctttacagcatgaaaagctcagtttggttcttccttcaggttcagcagttcagttcttgttatatccctttaagatctatggcccttcagttgcactctttcaagacatcatacaggtgagatggagaacaaagataatgctcataaacacagatgttcttaagaggcttatcagctgtaagcaggtggtgaaacctaggcctggtaggacaaatctgaagtcagaccatatgcctacatcagcagatagcaggcygagctcaaggtgtaggcaaagctcactcctgtaaaagaaaaaaagcaaacaataatgggagggaaaggccacacaagagtgacatcaaagagcaaggagaaatacctggctgctacacccataatatgcaagaaccatctcatatttcagtccatctcagttctccttgattgcatccgtttcatgagaaactagatagaggaattcatatcatttgacatacggcttaaaggaaaaaaagtttaagtatctgggaggaagggcagtgagaaaactctatttccctcttctttcgcaccc

SEQ ID NO: 41251 - DNA, 599 bp, Chicken  19866894276784_1
  misc_feature (1)..(26): n is any nucleotide
nnnnnnnnnnnnnnnnnnnnnnnnnnctgcccctctgctgtcatctgtcacacagcaacagcatgtaacaagatattggtggggaaagttcaacctctgctgccataccactgacatccatctccagtgtggaccagcataatcaaataggaggcattacttttggagcagcccttgcaaacactggaacaccactaatgtcttctgttggtttgatactgggagtaatgctatgcatgaaagttgtcttgacccagcatgagttaaaaatatcacatatctactgagtttctgttgtasttggtcatttgaacctaagatggcatgtaggtgttctggagtactgagaatttgtttctcttcagaagttcttttaaggtctgactccacactggagatgccttctttccagtttctttgagtgaccacttcatggtgcctctgttctgctagcagtctgcagagaagacctctgccaggctttgttgccataaaatctaatgtgagcttcctgtggtcatttttctaaacagaaagcaataacatttccagttaagatatttagcttcaggacagttacccttgattgttgcgttaag

SEQ ID NO: 41252 - DNA, 600 bp, Chicken  19866894276785_1
aaaaataaaaataaaagagatcattagcaatagatgaaaaatgaaatttatttcatttttttctggcagtattgaaccttcagaggtcatgggagaaaatccattaaaattatattagtagtagtagtaataataataataacaacagcaataacaacaaataacaacatcattcttttagaaatcatattggaaattttgtagctatgttgttgggttcagtgcaggctaacagaaataatcatttaaagaaaagaggctgcaaatgcattgtgttccacaaggagttagcagcaccasagagtaatctgtgactgccacaacagtgacttcagtgggttttggaaacccaagtcttgtctcttattcagtgaacagaaatgaaatggatccaagggaaayaagattttctctgaaactaggagtttcaaaagtaataaactacaatttcagataaaataatgtatttattgtatatttggaagactaatacttayattgtttcttccagactttgtgttggctgcacattatttawtgtagaggtggtttaaaactctgcttgtatactgtcattaactacagatgaacatgcattca

SEQ ID NO: 41253 - DNA, 600 bp, Chicken  19866894276785_2
attaaaattatattagtagtagtagtaataataataataacaacagcaataacaacaaataacaacatcattcttttagaaatcatattggaaattttgtagctatgttgttgggttcagtgcaggctaacagaaataatcatttaaagaaaagaggctgcaaatgcattgtgttccacaaggagttagcagcaccasagagtaatctgtgactgccacaacagtgacttcagtgggttttggaaacccaagtcttgtctcttattcagtgaacagaaatgaaatggatccaagggaaayaagattttctctgaaactaggagtttcaaaagtaataaactacaatttcagataaaataatgtatttattgtatatttggaagactaatacttayattgtttcttccagactttgtgttggctgcacattatttawtgtagaggtggtttaaaactctgcttgtatactgtcattaactacagatgaacatgcattcatctctagacaattttacaatacagaacacatatctatgatcatatggataactcagcaaatggctcatcacatacaggcaacccggggacaacagatctttt

SEQ ID NO: 41254 - DNA, 600 bp, Chicken  19866894276785_3
tttgtagctatgttgttgggttcagtgcaggctaacagaaataatcatttaaagaaaagaggctgcaaatgcattgtgttccacaaggagttagcagcaccasagagtaatctgtgactgccacaacagtgacttcagtgggttttggaaacccaagtcttgtctcttattcagtgaacagaaatgaaatggatccaagggaaayaagattttctctgaaactaggagtttcaaaagtaataaactacaatttcagataaaataatgtatttattgtatatttggaagactaatacttayattgtttcttccagactttgtgttggctgcacattatttawtgtagaggtggtttaaaactctgcttgtatactgtcattaactacagatgaacatgcattcatctctagacaattttacaatacagaacacatatctatgatcatatggataactcagcaaatggctcatcacatacaggcaacccggggacaacagatctttttttgttgttgttattgcttatatccatataaatatggaattttagatagcaaacctgcctccactacctgttttcagaaggaagaataacttcat

SEQ ID NO: 41255 - DNA, 600 bp, Chicken  19866894276785_4
taatcatttaaagaaaagaggctgcaaatgcattgtgttccacaaggagttagcagcaccasagagtaatctgtgactgccacaacagtgacttcagtgggttttggaaacccaagtcttgtctcttattcagtgaacagaaatgaaatggatccaagggaaayaagattttctctgaaactaggagtttcaaaagtaataaactacaatttcagataaaataatgtatttattgtatatttggaagactaatacttayattgtttcttccagactttgtgttggctgcacattatttawtgtagaggtggtttaaaactctgcttgtatactgtcattaactacagatgaacatgcattcatctctagacaattttacaatacagaacacatatctatgatcatatggataactcagcaaatggctcatcacatacaggcaacccggggacaacagatctttttttgttgttgttattgcttatatccatataaatatggaattttagatagcaaacctgcctccactacctgttttcagaaggaagaataacttcatgaaaaacatccttaccacaggacattttagaaaaatcagtt

SEQ ID NO: 41256 - DNA, 600 bp, Chicken  19866894276787_1
gtttgttgttgttgttttttctttctctattgttcgtcttccatattcatagattctttgtaacaaagcttttgagatctcttggcagcatatcagcctgatttctgttatctagccaatgagtgtattgttcccacagtgaaatctgtgatactgggacaatactcaagttttgtatatcgcatatggagagagatgttcttttcagtgctgggtttgaaatagtcagtatgctgaaaaaagagccatctgaactaataaaaaccataagggagagattgtatctttagctgtgtcccygttcaggacagaagcacttaattcaaggtggagtggaagcagctggagccactaccaggatttacagtcagaaacactcccacaactgcatgcataagttgtctccaagtcagcaaagagggaacagtctgtccttaayggcatagcaagaagaagcacctggggtggggaggttctctgttgctcttgcttcagcagttgttacactagcctcgaagtggctaacaaacattcgtttctgttggtccttgaggtctaaccgttgaggtctaactcagctactgccaccatagaagcaaa

SEQ ID NO: 41257 - DNA, 600 bp, Chicken  19866894276787_2
tgaaatctgtgatactgggacaatactcaagttttgtatatcgcatatggagagagatgttcttttcagtgctgggtttgaaatagtcagtatgctgaaaaaagagccatctgaactaataaaaaccataagggagagattgtatctttagctgtgtcccygttcaggacagaagcacttaattcaaggtggagtggaagcagctggagccactaccaggatttacagtcagaaacactcccacaactgcatgcataagttgtctccaagtcagcaaagagggaacagtctgtccttaayggcatagcaagaagaagcacctggggtggggaggttctctgttgctcttgcttcagcagttgttacactagcctcgaagtggctaacaaacattcgtttctgttggtccttgaggtctaaccgttgaggtctaactcagctactgccaccatagaagcaaatgtattgctaaactattgcttattatggactacctaatacacaccattactgaattaaacctccaatttctctctatttatctactaacaactgtgatcccatgctccctgaactccctttttatattttcataatttt

SEQ ID NO: 41258 - DNA, 600 bp, Chicken  19866894276790_1
catggcagtcagacttgtgtaagcctatgaagcctgtgtggaaagacttcaaagccagtgtttacaaagcatattgaaatgaccatattaagtctgtttggatatcagctcatttattctcaggagcaaagcccacactgatgaagtaatcctgcatagctgggcatcctgaatgtcttcttggacacataattatctggctgatatactcaaagttcattttttgtatatccaaaattcattttttgggatcttaaagagatcttgcaaatcttactagctaagtttttcacatcttgyttaagattacttkgcatatttgaaagcttacacatcaaaattaatgtatgcaagaatactttccatccagcgtgtgtttagcatgcttgttactctaatctgggtagccactgttatttagcatttatccagtcttgttttctgccttcacctgttccatcctgtctgagcctgctgtgaaagcttctcaaatcaaagtcagtctgcttgctgtgtgcttacacagggccaactgcagtagagtcttggtttctgcatgagatttttagttctttccataatttcaaatgaagcaagcag

SEQ ID NO: 41259 - DNA, 600 bp, Chicken  19866894276790_2
cttgtgtaagcctatgaagcctgtgtggaaagacttcaaagccagtgtttacaaagcatattgaaatgaccatattaagtctgtttggatatcagctcatttattctcaggagcaaagcccacactgatgaagtaatcctgcatagctgggcatcctgaatgtcttcttggacacataattatctggctgatatactcaaagttcattttttgtatatccaaaattcattttttgggatcttaaagagatcttgcaaatcttactagctaagtttttcacatcttgyttaagattacttkgcatatttgaaagcttacacatcaaaattaatgtatgcaagaatactttccatccagcgtgtgtttagcatgcttgttactctaatctgggtagccactgttatttagcatttatccagtcttgttttctgccttcacctgttccatcctgtctgagcctgctgtgaaagcttctcaaatcaaagtcagtctgcttgctgtgtgcttacacagggccaactgcagtagagtcttggtttctgcatgagatttttagttctttccataatttcaaatgaagcaagcagyagacctgactat

SEQ ID NO: 41260 - DNA, 600 bp, Chicken  19866894276790_3
taagattacttkgcatatttgaaagcttacacatcaaaattaatgtatgcaagaatactttccatccagcgtgtgtttagcatgcttgttactctaatctgggtagccactgttatttagcatttatccagtcttgttttctgccttcacctgttccatcctgtctgagcctgctgtgaaagcttctcaaatcaaagtcagtctgcttgctgtgtgcttacacagggccaactgcagtagagtcttggtttctgcatgagatttttagttctttccataatttcaaatgaagcaagcagyagacctgactataggaacaaatttctgctccatccaaggtataatttttactgtgggatgcatacrgaagtcagcctgcaaaccctctgtgctcagcctcagagatggctgattgacagccataaaagggtatggcgagagaagttgttacaagtggtgttttcttgtcatatcatgagcttctcttctatcaaatcaaagaagaacaamtgctccatttgttgctgagatgctgmacatctgtggctgtgtctaatcagagttaattatgaagagctgagtctctgtgatgctcctggt

SEQ ID NO: 41261 - DNA, 600 bp, Chicken  19866894276790_4
cagcgtgtgtttagcatgcttgttactctaatctgggtagccactgttatttagcatttatccagtcttgttttctgccttcacctgttccatcctgtctgagcctgctgtgaaagcttctcaaatcaaagtcagtctgcttgctgtgtgcttacacagggccaactgcagtagagtcttggtttctgcatgagatttttagttctttccataatttcaaatgaagcaagcagyagacctgactataggaacaaatttctgctccatccaaggtataatttttactgtgggatgcatacrgaagtcagcctgcaaaccctctgtgctcagcctcagagatggctgattgacagccataaaagggtatggcgagagaagttgttacaagtggtgttttcttgtcatatcatgagcttctcttctatcaaatcaaagaagaacaamtgctccatttgttgctgagatgctgmacatctgtggctgtgtctaatcagagttaattatgaagagctgagtctctgtgatgctcctggtccctgggctctgaaggacccattgctttattctatagcttctgcagccaatttctgtagctgccta

SEQ ID NO: 41262 - DNA, 600 bp, Chicken  19866894276790_5
tgtgtgcttacacagggccaactgcagtagagtcttggtttctgcatgagatttttagttctttccataatttcaaatgaagcaagcagyagacctgactataggaacaaatttctgctccatccaaggtataatttttactgtgggatgcatacrgaagtcagcctgcaaaccctctgtgctcagcctcagagatggctgattgacagccataaaagggtatggcgagagaagttgttacaagtggtgttttcttgtcatatcatgagcttctcttctatcaaatcaaagaagaacaamtgctccatttgttgctgagatgctgmacatctgtggctgtgtctaatcagagttaattatgaagagctgagtctctgtgatgctcctggtccctgggctctgaaggacccattgctttattctatagcttctgcagccaatttctgtagctgcctattatcaagcaccaaaaggtagagattgtacagggttcctggcaagcagcacaaagtatcccagcttaattctaaagcaatgagtaatcagggtatcccaggaaggagctttgcaatagctcttgcaagggtaatgaggacagtt

SEQ ID NO: 41263 - DNA, 600 bp, Chicken  19866894276790_6
gtagagtcttggtttctgcatgagatttttagttctttccataatttcaaatgaagcaagcagyagacctgactataggaacaaatttctgctccatccaaggtataatttttactgtgggatgcatacrgaagtcagcctgcaaaccctctgtgctcagcctcagagatggctgattgacagccataaaagggtatggcgagagaagttgttacaagtggtgttttcttgtcatatcatgagcttctcttctatcaaatcaaagaagaacaamtgctccatttgttgctgagatgctgmacatctgtggctgtgtctaatcagagttaattatgaagagctgagtctctgtgatgctcctggtccctgggctctgaaggacccattgctttattctatagcttctgcagccaatttctgtagctgcctattatcaagcaccaaaaggtagagattgtacagggttcctggcaagcagcacaaagtatcccagcttaattctaaagcaatgagtaatcagggtatcccaggaaggagctttgcaatagctcttgcaagggtaatgaggacagttttcatagctatggcattttgagccaa

SEQ ID NO: 41264 - DNA, 600 bp, Chicken  19866894276790_7
gctttgcaatagctcttgcaagggtaatgaggacagttttcatagctatggcattttgagccaagcgaaatgcaagcagtctagtttatttttttgctggtgtgaaagaccatggaagagtaaggcagctctaaactgaaaaggactcttgatgggagaaggattgcaccaagatgggcaatggtattaacagctgtttgttgttttatcatggcaagactaataggtaaattctattagctgtggagtgctgttgtgtggaaaaatgtagatcatggcctgaatgggtgattagcccaygggaaagggctcttcttagcctgggaacacaagtaagctgcctctatcttctgcagaagaaacgtgtttgtgagaaactgctccgtagctctcaggaggtctccttgctttctgtgaatgactttgcttactttgatatgtggtgctttgtctcctgctgatatatgtgtatatatatgtatgcacacacacacacacacrctgtcatggtactaaggatatgtccctgccagtatctgctgggagtaatcccagggtagatactatactggtcagctggtactgagaacttggtggaga

SEQ ID NO: 41265 - DNA, 600 bp, Chicken  19866894276790_8
tgttttatcatggcaagactaataggtaaattctattagctgtggagtgctgttgtgtggaaaaatgtagatcatggcctgaatgggtgattagcccaygggaaagggctcttcttagcctgggaacacaagtaagctgcctctatcttctgcagaagaaacgtgtttgtgagaaactgctccgtagctctcaggaggtctccttgctttctgtgaatgactttgcttactttgatatgtggtgctttgtctcctgctgatatatgtgtatatatatgtatgcacacacacacacacacrctgtcatggtactaaggatatgtccctgccagtatctgctgggagtaatcccagggtagatactatactggtcagctggtactgagaacttggtggagaccaactgacaggctgcccccagtaatgtgagtacctctctatgaaactggtgaatgttaacacagaagcactggcacttctgcgttgcagctgttttgtttggcaaatacaggaagcagtttacatggctacgcagtgctctggttcacagtccttctgaaatagtgttattgtagtgggataatactgattaaggatagt

SEQ ID NO: 41266 - DNA, 600 bp, Chicken  19866894276792_1
gcacatatttaattgccttcctgaatgggggccaaaatagagactatcccaggagtgcatgggaaagaggcttagttttcattattttaataaagatagctgctccactcagaagaatttcacaaatggcttggaaaggtttgggtcttcttgctaggacatcactggagagtgaagctgttataaacaagacaaggattgcctgtgcctgcaccacccaaagggagaggaatcacatacgaattgatcctttcatgttgattttttttctagatggcagccccaaatgggctcagttcyaatgttctccccatccatttgtgaatgtatcagtttttattaacgtcatttgggaaagagctctggattgagagcattcaactgtgcaggtcaaaattgcaaagaaacrtttttgaagtgtctcatctttagaactcttctttccattttaaaaagaarttgaagttagtaggcagaaaaacatacttttaatgttaactctggtaacagactggaggtaaacttgtggtacatttcattagtctaatccaaattgcccctcagatcccacagaccttcactgcatttgaatgaaattgt

SEQ ID NO: 41267 - DNA, 600 bp, Chicken  19866894276792_2
cagaagaatttcacaaatggcttggaaaggtttgggtcttcttgctaggacatcactggagagtgaagctgttataaacaagacaaggattgcctgtgcctgcaccacccaaagggagaggaatcacatacgaattgatcctttcatgttgattttttttctagatggcagccccaaatgggctcagttcyaatgttctccccatccatttgtgaatgtatcagtttttattaacgtcatttgggaaagagctctggattgagagcattcaactgtgcaggtcaaaattgcaaagaaacrtttttgaagtgtctcatctttagaactcttctttccattttaaaaagaarttgaagttagtaggcagaaaaacatacttttaatgttaactctggtaacagactggaggtaaacttgtggtacatttcattagtctaatccaaattgcccctcagatcccacagaccttcactgcatttgaatgaaattgttattaaatgtgaaaaccgcaaaaaatctttagcatttacagccaatttcttgactaagtgttgcagacactctctttagttttccaaatgtctttaaaattttcaatgg

SEQ ID NO: 41268 - DNA, 600 bp, Chicken  19866894276792_3
catcactggagagtgaagctgttataaacaagacaaggattgcctgtgcctgcaccacccaaagggagaggaatcacatacgaattgatcctttcatgttgattttttttctagatggcagccccaaatgggctcagttcyaatgttctccccatccatttgtgaatgtatcagtttttattaacgtcatttgggaaagagctctggattgagagcattcaactgtgcaggtcaaaattgcaaagaaacrtttttgaagtgtctcatctttagaactcttctttccattttaaaaagaarttgaagttagtaggcagaaaaacatacttttaatgttaactctggtaacagactggaggtaaacttgtggtacatttcattagtctaatccaaattgcccctcagatcccacagaccttcactgcatttgaatgaaattgttattaaatgtgaaaaccgcaaaaaatctttagcatttacagccaatttcttgactaagtgttgcagacactctctttagttttccaaatgtctttaaaattttcaatgggttgtttgttagtaccaccagatttaatttatmttttcagttgtaatcaa

SEQ ID NO: 41269 - DNA, 600 bp, Chicken  19866894276792_4
tccattttaaaaagaarttgaagttagtaggcagaaaaacatacttttaatgttaactctggtaacagactggaggtaaacttgtggtacatttcattagtctaatccaaattgcccctcagatcccacagaccttcactgcatttgaatgaaattgttattaaatgtgaaaaccgcaaaaaatctttagcatttacagccaatttcttgactaagtgttgcagacactctctttagttttccaaatgtctttaaaattttcaatgggttgtttgttagtaccaccagatttaatttatmttttcagttgtaatcaacatctgaaatgatgttggattttaaaactgaagctttttgcccaagactctcactcctttatccacttgcagatagctacagtggagtcctccacatctgtgatgagattcatctcatcttaaaacagatgtctttttaaaagaagggaaagcagtatgtatttgagagctgttcagtctggggagtccagctgtgcccacccatacttctgacctcactgcagaggtgataggagtcctacctcacatggctgctttcttcaccaacctaacaatagctaat

SEQ ID NO: 41270 - DNA, 600 bp, Chicken  19866894276796_1
tacccagtgagcaccatcacaagcaccatatttttctttggaaattaaaaataaatacccatcaatatgacacacacttccaatggatgcagaaagagaagaataagctgtccctaatcagaacactctttggggtcccttccaactcagaatattctatgattctatgatactgggccatcagccaacaggtcccacaactcaggatgctctctggacaacagctcaagcctaagaaagttattccaatgtcttagggtctttggaggactgaagctaactccagctttttgttcaacrtacaccgactatgccctgaagtatgggactttctggcttgattggaattataatagtgcctttgtgccatttgaaaccaaatcaaggaaatcgttcataaatagcccacgttcaagatggatccatttatttatctccatcaaatttccattctttccccttgctgcatttgctaattatccagtacgcatttgcttaaagaaagcatttttctagccttcacaatccatcttcccatcctaatggatcttgtggtaaagtcattacggagactttatgaaatcacagttatttccatga

SEQ ID NO: 41271 - DNA, 600 bp, Chicken  19866894276796_2
acaacagtgatgtaataaaggtgggattatgacattactgcaagatcaagctgaaggacaggatggatttgtttaccccagatagggcaagggaaagacttcattcactcaacatttctaaaagtgccttaaggtctgctaatggaagctacgttttataacggattttttcttttcccttttttattactttttgtctcctttattttttttaattttttaattttttttttaatttagttatttattagggaaagagctcttattcaaggacatgctgttgaagaagtttcagaggartatctgtgctgtggctgtgctcatacttcttgcaaaaggcaggaatgtcggacagtgatgcccaggggaagcccttccctctagtgctggaaggacagccaggatggtctatcccctttcaaggctggctgatctaagctgctttctcttcaaatgttttaatatagaaatcacctgccactggatcacagcatgaattggctagccatgaaattaggtttgaaaatggcattaaacccctttcgtctccttaatggaaatacaaccagcctgggtctggccagcaaattctaagtcaaa

SEQ ID NO: 41272 - DNA, 600 bp, Chicken  19866894276802_1
attgatatgtccttcctgcagaccttcccaactgctctgttattctcctgaaccttctttctgacgctgttttgagccactgctgtgtgccaccaggctggtgttgttttacaccctggaggtggctgcagttcagtgacagatctctctgctagcaacgttagcactctggcagcactggaatccagatcttcaggactaatgacaccgtagaggtacttgaggtgaatttacatagtgaaaaatgatgctttgatctgcagttcctttttaacactttccttacttcagttgatcccwgttgccattgcagcccttgcctctttcttgtatactggtcttttgcactggcagttaacagaagcccacacataagaaagtcatttcctcctcctattccagaggcactgtctgcagactagacctacactgagaaacaaaggttgataatggacttatacttaacgaggcaatactggagagctacagattgctcctgctgccactggattccctccatgcaagctcatggcaaaggagcccagcaatacctccgagctatccatgcagggaggggcaggatgggaagggctctctgcc

SEQ ID NO: 41273 - DNA, 600 bp, Chicken  19866894276802_2
aggatgggaagggctctctgccaccacctgcaggcccctccaccacttcagccagaagtttaggggctcttcgctggaagagatctaatggagatgctctgctggttcatccctatgaagaactcccattccatttgggagcacaactgctttccccagcatcccaccctagtcgcttccaaaactaccaaggctatacctgaccagaagcaatggcagctggccatgtggcttgtgcctctctaaagcttccctgtgcgtttctgctctctaagagggtgatctgacagaacaaaccakctgttccccaagtgctccatgacaggctggagcctggatagttcagagcagcacctgaactctacaactagtgcctatagctttgccaagcaatttcctccattatgaagctttgttgtgtaacaacagatactttgcagttattattttttttttaaggtaagccatatttgagctgaatcaaaaataagcaagagctaaaatatctgcagtgctggggctatgccaaacacccacatatcctgtaccctgtactcaagtcttgtcaagtagctcagcacatctttgttctcatcattt

SEQ ID NO: 41274 - DNA, 599 bp, Chicken  19866894276805_1
  misc_feature (1)..(162): n is any nucleotide
nnnnnnnnnnnnnnnnnnnnnnnnnnnnnnnnnnnnnnnnnnnnnnnnnnnnnnnnnnnnnnnnnnnnnnnnnnnnnnnnnnnnnnnnnnnnnnnnnnnnnnnnnnnnnnnnnnnnnnnnnnnnnnnnnnnnnnnnnnnnnnnnnnnnnnnnnnnnnnnnnnaaaaaagattcatcagtaaataaatgacttgcaatatagatcagcacttttggcaggaaatatgatttcaagattggacatactatacccagatgaggtatgcctgactctctgccaaacatttaacatagcctatgyttattttcagaattggacaagctatcatttaaatggtgtaatcagtacttcagattaaacaatattcttgacaagcatggtagatagaaaaatactaattataattattttcagtttcagtaagatttaatagatctttcttctggaattctgttggcttccaaattttttagttaaaagtttgggaaatacagagtcttctattttttcygagtttgcttattaccatggaaatacgaattcttaaagtcataataaataagccatcagtcacagtagactgcaggccctgaatctgt

SEQ ID NO: 41275 - DNA, 600 bp, Chicken  19866894276805_2
ttggcaggaaatatgatttcaagattggacatactatacccagatgaggtatgcctgactctctgccaaacatttaacatagcctatgyttattttcagaattggacaagctatcatttaaatggtgtaatcagtacttcagattaaacaatattcttgacaagcatggtagatagaaaaatactaattataattattttcagtttcagtaagatttaatagatctttcttctggaattctgttggcttccaaattttttagttaaaagtttgggaaatacagagtcttctattttttcygagtttgcttattaccatggaaatacgaattcttaaagtcataataaataagccatcagtcacagtagactgcaggccctgaatctgtccgtagtttctgatagattttctgtgcttgtctcctggagggggaacaataaatgggagcctctccaaaacattcccaacatggcaaaaaaaatgagaytttgcccactgtaaactgcagaaaaatgccatgccctctaggttagaacagctggaagcattaatccttgatcattatcagtgagcaactgaattaagatctcaatgaaatca

SEQ ID NO: 41276 - DNA, 600 bp, Chicken  19866894276805_3
ttataattattttcagtttcagtaagatttaatagatctttcttctggaattctgttggcttccaaattttttagttaaaagtttgggaaatacagagtcttctattttttcygagtttgcttattaccatggaaatacgaattcttaaagtcataataaataagccatcagtcacagtagactgcaggccctgaatctgtccgtagtttctgatagattttctgtgcttgtctcctggagggggaacaataaatgggagcctctccaaaacattcccaacatggcaaaaaaaatgagaytttgcccactgtaaactgcagaaaaatgccatgccctctaggttagaacagctggaagcattaatccttgatcattatcagtgagcaactgaattaagatctcaatgaaatcaataaggaagttgatgctgctcagtaccgttgtgctatgccctctgttaagccatatcaggccagtctacagcaggcaactgaatgcagatagcctgaatattttcttcactaaggtcactgcagtggtataagacaatacattaagtcagtgtaatggttatcagaaaactcattaaatctactaag

SEQ ID NO: 41277 - DNA, 600 bp, Chicken  19866894276823_1
ggaacaatacatatttggtctccaaactgactgattctgactcttagaagtcttcaaaaagaagcaagttggacatccagattagacgggtttgtgtggcaactggatctcctcatgggtgctataggaggagactctgggttcctcaaccttttagttggacaagtagttggcagttggcaaaaaataccatagtttgagtcacatcacaaatctacatagcccagcattcttctctgctgataatcaacactgggaaaagtttacagaagagatagaaatatcttatatgtctcccargatctcttcaactttctgaaattcaagactcaagtatttcctaaccttgctaaccttgctaaccttcctaaataacctaccattatttaggtacttccaacagattcctaaactgatactgtgttgaaatagaagacaaagtcttgagaaaaacaccaggagcaggctatctatttaaaaccacctagctgtacaacccccattgaaacccatggctatgtccacagtacctgaagcagtgctctgcttcccacacatttcctgcatgaacagtcacctcaaaggcatccagtctgagag

SEQ ID NO: 41278 - DNA, 600 bp, Chicken  19866894276831_1
agaagtgagaagagggttctcccatgcataaacattctctgcaggctggctaaactgcattcaagatattgtaatgatctatacctgtgagttaagtgtgaaaattagggaagtagctaaagctgttgggtttcagtccagagacctgaggtgatgtgatctacccggattttgtggcttgttgctacttcatgttcacaaataaggttcaggcttcaaagtctaattttaatggtgtctttaatgcaagatggactttggtgttgcctgtttcttgatgttttttgacttggaattctkgagtttttttcctccattgtaatgtatgttgccaacagcaacaaaagaagcactaaaacttttatctgcaaaagtttgtgttggcttcaaagtccagttgtaatgttaatagttgtgaagacgcttatgtgaagtttgtgcatctttgagcttctcctatttcctggctatacaggcttgttgcagtacactggaccgaagacaaaagtaatagctgcttttcagtagagagttgaaattagagaaagtatgtaaagtattaaagatttttctctataaaatggggggttggctcttagt

SEQ ID NO: 41279 - DNA, 600 bp, Chicken  19866894276838_1
tagacctatctacactgtgggttatccttttatgatttggcattgtgccatgtgaaccttacttctctcatgtctgtgggaacttcgggagtaaaaaaggcaagatgtagtagactgtttgctgatttactttttctgtttcagtatttatttacattttgataagtacatgcatccagtatttacaggattcaagctgtgcattcacactttacaatatatgctctttgttttgggttcagttcatcttcgccagatttaacatcaagcaccaagctgactgcaaaccgaaaaagcacrggccaactgaacgtcaatcctgcaggcagtaacacagccactgctgaacgaagcagacaccagaggagcttctctgtacccaaaaagtttggagacgtggacaagtcctcagatccacctcgcagtgccactctagacagaattcaggcatgcacccagcaaggcctctcctctaaaaccagaagttcatcttctctaaaggacagtctcactgacccatcccatattaacaatccaaccaacctactggccactatcttctgggttgctgtggctttgatggaatctgattttgagttt

SEQ ID NO: 41280 - DNA, 600 bp, Chicken  19866894276844_1
acatgcctttaaaaatctaatttggtgtactgaataatcactttttcttgactgtttctggctttttcttttcctgttgtccttgaagcttctttcttcctgtcttccagatttagcattcagtttgtttcctgttgtgtgtgccgttgttttcctccccccctgaatctcctgatgtaaagcgaatgcactgttgtgacatttgcatgagtagcgtgcaaaccacgcaggtgtttgctgctagcaaacgtgtcagccattaggactgcccgaagtgtctgaggttgtgagagcacattygtcttcatgcttgagcatcaaagcaaccaaagctgcttttctcatttctaaatctctttgtgcctttgctcaaacttttcacagcctctcctgcacatccctctgcagtgggctgaggcagaaccggagcagagctgcaaggagcaccgtgccttgtggctgcccatgctgcattacacatccctcagagctgcaagatgtgtgtcaggcagtgtcagtgctctgctgcactgcagcgtgtgcgtgttcccagcaggcagcgtgggagcagagcacggatgctgctcagggtttgctgta

SEQ ID NO: 41281 - DNA, 600 bp, Chicken  19866894276844_2
gcttttctcatttctaaatctctttgtgcctttgctcaaacttttcacagcctctcctgcacatccctctgcagtgggctgaggcagaaccggagcagagctgcaaggagcaccgtgccttgtggctgcccatgctgcattacacatccctcagagctgcaagatgtgtgtcaggcagtgtcagtgctctgctgcactgcagcgtgtgcgtgttcccagcaggcagcgtgggagcagagcacggatgctgctcagggtttgctgtaaggcaggcttagtttaaaaaccacaagtggaaakaaggttgcgtttggacatcgaaaggcttatttgtgcaaagcacaacacgaaccttggtgtgttattctgactttcaaacaagagcagggttaggaggggctcgtgtgcaygcctgctgtactacggatgtggctgagtctttgttccttcagttttagtccagctgcaatggtagagctgttaaacactctcctgcgtcatacctcaacggtcagcctgctgacagcatcccccgttgggctgtccttgtggctcacacactgctatcagcactcagggcttcctttctgtccttgggca

SEQ ID NO: 41282 - DNA, 600 bp, Chicken  19866894276844_3
caccgtgccttgtggctgcccatgctgcattacacatccctcagagctgcaagatgtgtgtcaggcagtgtcagtgctctgctgcactgcagcgtgtgcgtgttcccagcaggcagcgtgggagcagagcacggatgctgctcagggtttgctgtaaggcaggcttagtttaaaaaccacaagtggaaakaaggttgcgtttggacatcgaaaggcttatttgtgcaaagcacaacacgaaccttggtgtgttattctgactttcaaacaagagcagggttaggaggggctcgtgtgcaygcctgctgtactacggatgtggctgagtctttgttccttcagttttagtccagctgcaatggtagagctgttaaacactctcctgcgtcatacctcaacggtcagcctgctgacagcatcccccgttgggctgtccttgtggctcacacactgctatcagcactcagggcttcctttctgtccttgggcagcatggttgggtgtagtcattcagctgacactggtaccagccatcctgcagttcttgcaaggggaacttgcccgtttattttattagtagagctttaaagataactattt

SEQ ID NO: 41283 - DNA, 600 bp, Chicken  19866894276848_1
taaagaaatgtggagtaatttatttcatcatcctccgggaggatggaatctttccccaaagcatattttctagtgatttgttctgcttacctttacaagatacaagtaatattcttcattcctttcataagaaggctaatagacatcaaataccgtgagttgtttttttcttgaaaacaagccaaatgtcttctttttttttctcaaatctatcgtgctgccattagttaaccatcttgcagcattcctttaccatttctctgctcctcaaggccacagcttcaatttatgtccttcctwttcctgacagatttcagccaacttacaatatccttgttctttaccaacccttgaaggcaaaatctatgttcctgtaggtatcttccatcagctggacactgtagagaagagaatcaaataggtgtcaaagccagtgctctcaaattcctgttctttgccaagcattcagaatcattgtgaggaatctcagtaaatgattcagagtgagagatgtggagaccaagcaactctttttttcagaaatgttaccaaaaaagtatacaggagcagagagcagttggacatgcatrgggttaatct

SEQ ID NO: 41284 - DNA, 600 bp, Chicken  19866894276848_2
gtccttcctwttcctgacagatttcagccaacttacaatatccttgttctttaccaacccttgaaggcaaaatctatgttcctgtaggtatcttccatcagctggacactgtagagaagagaatcaaataggtgtcaaagccagtgctctcaaattcctgttctttgccaagcattcagaatcattgtgaggaatctcagtaaatgattcagagtgagagatgtggagaccaagcaactctttttttcagaaatgttaccaaaaaagtatacaggagcagagagcagttggacatgcatrgggttaatcttgtctgcaaagtaattgagaaaaatacacactggtttctgaggacactctattatcagtctaaggtagaagagcctccagggatttaaaagcagtcaatagtctaaaaaaagatcgagcaagccttttggttctggttgatattaagttagagcaataaatcagtgtatctcttccataccagcaccatgatcagactcatatacacaaagctacttctggtctgcatgaggttggctccaagactgctgaatggtattctaccctggctctgttctctcccacttcact

SEQ ID NO: 41285 - DNA, 600 bp, Chicken  19866894276848_3
ccccatgggtcccccctcagagtgccctgggtgcccttcctctgggtgagccactggcaccctggcccagtgcacagacatccccacgggagccaaagcggtgcagagagaatattctgctgcctgtgatcacttacgttaaaaataaatgcacctacttagcagacagatttattaccagctctgagggattatgaagccaagtcactttgattcattagagtgttcggagagtttgtgtaagttcctggaagctgtctgggatggtctctaaccagcctcatactgttacctggcggygaagggaaagttggaaagcacttgtgctgaatttgtctctccctatgtttggtaatagatgttgacgtgctgtttaaacaactgatcctcctgacttgtgcctcagctacacgtagctctttctattcttttcttccctctctgtaatatttaatcaacaaagccctacctctatttccccgaggccagagcaatgcatctttctgctttagaaacctcctacacatgtgaatgtgtccttggtgcagtgatgttgttgttttaattgcccacatctctttttttggccagaaatacatg

SEQ ID NO: 41286 - DNA, 600 bp, Chicken  19866894276852_1
gttgtttttgataaattgcagctttttcaatccaagaatgaattgaaaactgatttacaagtatcatctgaaacttgtagatgcaattgtctacctgcgtgctggtgatattttgcactaaggtgtagatttttcagttagtgtaatattgagcgtggcataaaaagtaatgtttactccactgctgtagttcttaataagagctatcaagtgccttaaaattgtcatttgagatttgctacaaacaaggatgcaaaaaggtttttattgcaattctttactgccacatttatgcaaatktaagaccttttatgttttaggacagtaaagttcattactttttctatgacgtatatttatacttattacatctacatatatgtgtatggagtttggtagtttgcagacttctgcatctgttttaaggaaagcattttttgtctatttccttattctaaaaacatttaaaggctatcaaaaatgcttgctatgcaaatgtatctttagaaaggcagtttcagaacggggtgatgcgtttttttgggttttgttttgtttttaggaagttgtggcagcttagtgctacatatgaacagttca

SEQ ID NO: 41287 - DNA, 328 bp, Chicken  19866894276859_1
gtagtggcctctcttaaggagcctgtagactcgacccacagggaactgcagaccagccagggctgattttgctttctttggtgcagcttcaggcttgctagccactgtaagtttcttcccacgtccagacattctgaatagcacagagagacaaagaactggagattttcacagtacctaggtgcttaggatacaggtaactggtaacaagaggatagttctactgttctacaccaagaagaaagcttgttcttttcatgagggtaggaagagctacccactaaagctcattaataacakatctaggataactgctactgccccttaa

SEQ ID NO: 41288 - DNA, 600 bp, Chicken  19866894276860_1
ctgccccactctgcttccaaacaccaaacaccaccacaaccaccccgcctcacccccagcactgaggtcaggacaggcagtgccctcctccagtcatcagacatggggagaactgcacagcccacagccattgcccactgctaggggaactacagagtgctccgcttccctgcgccgggtaatgaaccacctccagcagcactgtttgatatttctgtgatgtgaagcatcgatggccacggagaaaatcatccccatctctgcagtacttaatttactgtcacaagcaagcgctgcgcmcaagaagcaaagcaccgatgcactcttattgctctggcagcagccacgttattgttttttgctttcaacatttcttagcaacaacaaatttttcagagggctcttcacggaaattctctttatgccgcaccccatttacatgctcacgttgctgtcggccgcacttggaatggggcctcctcatgctgtggggtggccatttggcagatgccagtggctggaaagattaaatagaaagtgggcaaagcatctccctgagcaaggccgagcagagagggtttgccagctcacaggtctgag

SEQ ID NO: 41289 - DNA, 600 bp, Chicken  19866894276860_2
tcttagcaacaacaaatttttcagagggctcttcacggaaattctctttatgccgcaccccatttacatgctcacgttgctgtcggccgcacttggaatggggcctcctcatgctgtggggtggccatttggcagatgccagtggctggaaagattaaatagaaagtgggcaaagcatctccctgagcaaggccgagcagagagggtttgccagctcacaggtctgagccgcaccctggccctgatcccccagcacagattgctgcagcaccgcgggcaataaatgcgcctgggagcagygtggcctccagctcccatatataggctggaaagaggttgctgctaagaatagctgggcccagctcctccccaccaccagggctgacagagctcttcctgacactgagaggaggtaaggctattttaaacttctatgtggctgggatgttattgaagagctggtcctagaacgtaaacatggaacccagttgggtctatttcaatcaggtgaggaataaacacaagcaaagggatgatgaagggcggcccttccaaaagagcaaaccagacagctcccagcatcccgagacagggaaccrg

SEQ ID NO: 41290 - DNA, 545 bp, Chicken  19866894276860_3
ygtggcctccagctcccatatataggctggaaagaggttgctgctaagaatagctgggcccagctcctccccaccaccagggctgacagagctcttcctgacactgagaggaggtaaggctattttaaacttctatgtggctgggatgttattgaagagctggtcctagaacgtaaacatggaacccagttgggtctatttcaatcaggtgaggaataaacacaagcaaagggatgatgaagggcggcccttccaaaagagcaaaccagacagctcccagcatcccgagacagggaaccrgagccagagggtgctctccgcccccagggatggggctcagccctttacactgaggatgctacactgtgcagccttaccttcagtactttccattaattttatagcagaaataagcgattcccttcggggttctgtatgaattaatgaacactgatggcagcacagctgagtgacttctttaatgcgcaacaagcggtacggaaagtgacacgagcatcacggcgagattccagtgttaaacagta

SEQ ID NO: 41291 - DNA, 599 bp, Chicken  19866894276863_1
  misc_feature (1)..(67): n is any nucleotide
nnnnnnnnnnnnnnnnnnnnnnnnnnnnnnnnnnnnnnnnnnnnnnnnnnnnnnnnnnnnnnnnnnnttttattttacttctctcttattttgtagttgttctatttactttgttctgtgctttctttttgtgctatgcataattcagattagtactgacatattgtcgcaaagcaaatcaggagacaaaaaaggatccacaatggcagaaaccacttccaaacccagcttaactttctacacatggtcaaagcccctctcagcaggactttagccacttcagttcacagttacctgatrtttattcaacaaatatttcataccacgggatctaattttcccctcccactgcagggaaaacatataaaaatatttgtatgataaattctggaatgattttataaaaactggatgatatagtacataaagaattgtggggaatagtgtaaagcttttatccacgctattcattcaagcgggttaggaacataattcagaagaggtgaaagtcctgatcccagcagaagctagtttttaattacaaaaacagcaacgtatccagtattcacaggataacagagctctgaaagaagctgtaa

SEQ ID NO: 41292 - DNA, 600 bp, Chicken  19866894276867_1
cttaaggatagagtgcattttacttctttaagtaaaaatatctcaacagaagtacacagttacaagtatgaagatgaagtactaacaacacccaaatgttggcctttgtctatataccaggctgcagcagaagtccatcctctacagaaaattctgtactcattgaagtgatccactgaccttacttaatatagactatacttcaatattttaaatttgcaattacagcacaaaagtgaagtgtttagaagtacaattttcaggattaaaatattttacctggaatatcctccaaattaraaaaaaaaaaaaaagtttcctgcatttcccggtacaatctatagccatyaagtacacttgtagttctatttacatttctacttctatttagcctcttcttctttatgaaaaaaaaaacaaacctgtcatttcttcatcatgaaagcaaatattaaaacaatacatggcctcacataataaactgctaagaactattccccaaagtagatttagaaaaataaagagaagcaatacagtaacgcctcaagtattcttcaaatggggtggggggaaggaagggaagaaagagataattttacc

SEQ ID NO: 41293 - DNA, 600 bp, Chicken  19866894276867_2
aagtacacagttacaagtatgaagatgaagtactaacaacacccaaatgttggcctttgtctatataccaggctgcagcagaagtccatcctctacagaaaattctgtactcattgaagtgatccactgaccttacttaatatagactatacttcaatattttaaatttgcaattacagcacaaaagtgaagtgtttagaagtacaattttcaggattaaaatattttacctggaatatcctccaaattaaaaaaaaaaaaaaaagtttcctgcatttcccggtacaatctatagccatyaagtacacttgtagttctatttacatttctacttctatttagcctcttcttctttatgaaaaaaaaaacaaacctgtcatttcttcatcatgaaagcaaatattaaaacaatacatggcctcacataataaactgctaagaactattccccaaagtagatttagaaaaataaagagaagcaatacagtaacgcctcaagtattcttcaaatggggtggggggaaggaagggaagaaagagataattttaccagtcttactggtttaaaaatataactgactcaaaccacaaacacactct

SEQ ID NO: 41294 - DNA, 599 bp, Chicken  19866894276872_1
  misc_feature (1)..(72): n is any nucleotide
nnnnnnnnnnnnnnnnnnnnnnnnnnnnnnnnnnnnnnnnnnnnnnnnnnnnnnnnnnnnnnnnnnnnnnnnataaagttagaagtatttttaacaaagctgtgcatcagaaagcaccacagaaggcttacgagtgggagaaaccagtcttccctccatcacttcttagtcagggtccctttggaaatgtgttctccatcctcatgtatagaactacaggcagagggagaggcagaccatttccctctctgggacaaacttaagagacaacactttctttgtaaggaagaacatatcctrtgaaggagcaatcattcatcatgtttaaaaccttacactccacctgccctgctaactcaacaagctaagtgaaacttacacactcctgtgagtaatgcgaaagaatgataagcttgtaaagtcatttgtagctgcactccgagggtgcaactagaagttacccatcatagcaactcccttgttctgtactgaatccatgtagaatttagctgttttacaggagcttatttttttttcaagtatcttgctcccactgagattttgttcagaaaacatacatacctataaacctgtgtata

SEQ ID NO: 41295 - DNA, 599 bp, Chicken  19866894276873_1
  misc_feature (1)..(21): n is any nucleotide
nnnnnnnnnnnnnnnnnnnnntgcttcatgcttatgtgcctgctggggaaaagctttgtcagcagttatgcttttatgcttttaaactgtatcctcatctgcatgtctccaactgcatgcaggaattttgagaagggtttaaaaaaacttggtgatgatcctcttgcattaggccagatctgtgtcctgtagtcccgtcagctcaggatgtggatggtggatgggaatctggagtgaggtgtgggtaaaaactgagaatgaaaaacaattctatgtatgttggcaaaagtcctagcaaakagatggttcttccagcaaatgctcttgccaggatggtttatttagtttggatagctagaatagggtctggtggcttaaagaagtttttctaccctaggagagtttgctagaacagctgcatcagcctgtgtattctgcacagttcacgataaaagcaaagctcaggaattaacagaaaagaaagccatcttcacttgccagtgagatacttagctacttaatcccttcccggccatcctcccaggagctggcggaggcctgctgcacatggggagagcagtgccgacccaatgcagact

SEQ ID NO: 41296 - DNA, 599 bp, Chicken  19866894276879_1
  misc_feature (1)..(31): n is any nucleotide
nnnnnnnnnnnnnnnnnnnnnnnnnnnnnnnattagatatctatacacatttatgaaatcccctctgacatctcttacaaagccttggtggaggtaaggcaaaagaaaccattctcccttgagtcacaaaatagctgtatcttgccttgctgttatgtctagattttccaccaacatcagtactaccaaaatgttgagcagaaaggcacttttcttcctgtggaggcttttaatctcttggtagtaaagcagatggtgcttttcatcttccaagatgttttagagtgggacatacagatkcataagccactgttttctgaatgtaattttgaatgtgtgattgttgaggagtgacttgctttttctgtagtatacgggttttggtctttgaacaagacagacttctgaacagtggctctgtccagtgtaatggaaaagccaagggggcaaagtccattgaatcaacagttatttgtcagaaagttgactgtagtgtttagtcagcaacttgtaagctacctaggtaggacttcatatgaatccaaactgattgctcttgtagtgagtacagattgagttttacactgcagtagttatgg

SEQ ID NO: 41297 - DNA, 599 bp, Chicken  19866894276882_1
  misc_feature (1)..(85): n is any nucleotide
nnnnnnnnnnnnnnnnnnnnnnnnnnnnnnnnnnnnnnnnnnnnnnnnnnnnnnnnnnnnnnnnnnnnnnnnnnnnnnnnnnnnncattcccactgagaatttaacataaacatattagatcagcttatcacgacatcattacttgggtaatatttgcattccttattcagaagtttactaacaatggcaactattgtactgtataatcagatatattctgacaagcagaataagcagagaaaattctgcttccaggtagtctgttgcaatacatggtattctgtacttgagaaaagtcrtttgtcttgagaaacttgtaagtgcatatagttcatactaactctaaatacttcattaagacaagtctctgtcagatttcagatgagtcactcacccttgggccagcaggaccagggacaccaaattcaccatggagaccctagaagagaggagatggattgataaagtttatttcaagagcaacgttattagctcacattgaacttctgaactttgtttcttagcagtaaatagaaatgcttctcaagtttcagcagtatattgaaaatcttcagactaaaatcagtttttttagata

SEQ ID NO: 41298 - DNA, 566 bp, Chicken  19866894276882_2
taaatacttcattaagacaagtctctgtcagatttcagatgagtcactcacccttgggccagcaggaccagggacaccaaattcaccatggagaccctagaagagaggagatggattgataaagtttatttcaagagcaacgttattagctcacattgaacttctgaactttgtttcttagcagtaaatagaaatgcttctcaagtttcagcagtatattgaaaatcttcagactaaaatcagtttttttagatacatcaactgttctcatataactgcagaaaatctcaaagcacacaygctaagagatgcacttctcatgtgaagagagttagctattacatttcaagctctttggtcaggcacatacagtgtaaactctttcacacagagacatggaatgattaactaccaacttaaatggctgatatgatgcacaggatgcacaatttgcagattccatcacacaacaggtgcagagcctgttgcctgaattatcaccaagttatcaccattgaatgctattgtaaacccactgacttcagtggatgagcaaaggcatgcaa

SEQ ID NO: 41299 - DNA, 600 bp, Chicken  19866894276884_1
cataagataatcaaacttgtaataatgctgtcacttattcccactccacttccagatcacttacatatccatcactcagcacacactctgctgaaggttcagctggtagcttgttgtgaagaaacaccatctaaagtcctactttgttagctattctttaagcagttattaactgagggaacacctctatctcttgttctttgacaccttagagaaactttgggggttttgccaccaaaaccttttcaacaatgcaattttaataggtgaaccacattcactacttgataacagctccaragagctcgaggagatccacagrgcatggcctctcttagagaagccacccygccttgggcactacccacctgctctgttcatcatcagcaagcctgccaacatggtattgcaaagctcacactgagctatggttgatcttcacgaacaccacttgaaaataagcacsaactctgcagtgcagaccccagatcacggaactaaaagctttggaaatttagctgcttccttatgataaacaatttggaagctggcagaaggaaaataagcacttttacatctaccttggcagaaaaataaaaa

SEQ ID NO: 41300 - DNA, 600 bp, Chicken  19866894276884_2
taatgctgtcacttattcccactccacttccagatcacttacatatccatcactcagcacacactctgctgaaggttcagctggtagcttgttgtgaagaaacaccatctaaagtcctactttgttagctattctttaagcagttattaactgagggaacacctctatctcttgttctttgacaccttagagaaactttgggggttttgccaccaaaaccttttcaacaatgcaattttaataggtgaaccacattcactacttgataacagctccaragagctcgaggagatccacagrgcatggcctctcttagagaagccacccygccttgggcactacccacctgctctgttcatcatcagcaagcctgccaacatggtattgcaaagctcacactgagctatggttgatcttcacgaacaccacttgaaaataagcacsaactctgcagtgcagaccccagatcacggaactaaaagctttggaaatttagctgcttccttatgataaacaatttggaagctggcagaaggaaaataagcacttttacatctaccttggcagaaaaataaaaaaggaaaaaaaagaaaaaaagac

SEQ ID NO: 41301 - DNA, 600 bp, Chicken  19866894276884_3
tccagatcacttacatatccatcactcagcacacactctgctgaaggttcagctggtagcttgttgtgaagaaacaccatctaaagtcctactttgttagctattctttaagcagttattaactgagggaacacctctatctcttgttctttgacaccttagagaaactttgggggttttgccaccaaaaccttttcaacaatgcaattttaataggtgaaccacattcactacttgataacagctccaragagctcgaggagatccacagrgcatggcctctcttagagaagccacccygccttgggcactacccacctgctctgttcatcatcagcaagcctgccaacatggtattgcaaagctcacactgagctatggttgatcttcacgaacaccacttgaaaataagcacsaactctgcagtgcagaccccagatcacggaactaaaagctttggaaatttagctgcttccttatgataaacaatttggaagctggcagaaggaaaataagcacttttacatctaccttggcagaaaaataaaaaaggaaaaaaaagaaaaaaagaccttgacagcatgacaacccaagcaaagg

SEQ ID NO: 41302 - DNA, 600 bp, Chicken  19866894276884_4
tattaactgagggaacacctctatctcttgttctttgacaccttagagaaactttgggggttttgccaccaaaaccttttcaacaatgcaattttaataggtgaaccacattcactacttgataacagctccaragagctcgaggagatccacagrgcatggcctctcttagagaagccacccygccttgggcactacccacctgctctgttcatcatcagcaagcctgccaacatggtattgcaaagctcacactgagctatggttgatcttcacgaacaccacttgaaaataagcacsaactctgcagtgcagaccccagatcacggaactaaaagctttggaaatttagctgcttccttatgataaacaatttggaagctggcagaaggaaaataagcacttttacatctaccttggcagaaaaataaaaaaggaaaaaaaagaaaaaaagaccttgacagcatgacaacccaagcaaaggctcccaccaaggccttggaagttgtattcaaacatagaatgcaatgaaactggaatagttttgactgagcagccttctcctccacgtttcaaagacctcactctttgcagctgtag

SEQ ID NO: 41303 - DNA, 500 bp, Chicken  19866894276890_1
cttgagcagctttcttctgctagatctctcttttcattatgaatactcgatgccaacttgcaagttgtaggaggaaacttcaatcttgttttcatttgatctttgcataagtttggtaaataaggacagcattggctgacttatatttcaaatacagtcattttattccctcttcacttgctcgtttttgactttgtggacactgtgatactgactcgtaattaaattgttatttgttggttttttttccttttgccaaactgtatcgaccttgcataggctaaataaccctgtgcatgrtgtttctttattcactaaggaaataacagtgtgtacagtcaacaaaatgcagttggaaagagtatcatagtgagatggccaaggaacaaacagaaggaatgctcatctgtatctgaagacttaggctcacaatgaaaagctccacaaaggagggatctccaggaagagatttttccctagtggtagtcagcccttaaatg

SEQ ID NO: 41304 - DNA, 600 bp, Chicken  19866894276892_1
cgttccagtgtgagacgctctgggtgggtacccattctgcagaaagtaatagaatcatagatttgtttgagttggaaggaactcttaaaggtcatctagttcagctcccctgcactgaacagggacatctacagctgtgctgcttgagacctgtctgctgcaccaacgtgggctgggtgggcagctgaagcacgtgagattgcccagggcctctgacatggcttcaccattcctctctctgttccttttttttggcagtaaagaagtgtttgtctgcataggtcttcatgaaggggattyracctggaggaggagttactcgctttggccatggggtacctgtgaaaagttggttcctactgatgctgtctttgacccaggagagtggattcgtctgacaagaaatctctataactggactgaagagtatgggaggtatgaggcagaggcacagctctgtgccttcctgcttgctattcctcatgaccacatccattgcggtgttagagaagtgaaatgtgagctttaatcttagtgctttgtgttttggaacacacgatagctctgcacgtgttttttgttgggttggttttttttttt

SEQ ID NO: 41305 - DNA, 600 bp, Chicken  19866894276892_2
gttccagtgtgagacgctctgggtgggtacccattctgcagaaagtaatagaatcatagatttgtttgagttggaaggaactcttaaaggtcatctagttcagctcccctgcactgaacagggacatctacagctgtgctgcttgagacctgtctgctgcaccaacgtgggctgggtgggcagctgaagcacgtgagattgcccagggcctctgacatggcttcaccattcctctctctgttccttttttttggcagtaaagaagtgtttgtctgcataggtcttcatgaaggggattyracctggaggaggagttactcgctttggccatggggtacctgtgaaaagttggttcctactgatgctgtctttgacccaggagagtggattcgtctgacaagaaatctctataactggactgaagagtatgggaggtatgaggcagaggcacagctctgtgccttcctgcttgctattcctcatgaccacatccattgcggtgttagagaagtgaaatgtgagctttaatcttagtgctttgtgttttggaacacacgatagctctgcacgtgttttttgttgggttggtttttttttttg

SEQ ID NO: 41306 - DNA, 599 bp, Chicken  19866894276894_1
  misc_feature (1)..(164): n is any nucleotide
nnnnnnnnnnnnnnnnnnnnnnnnnnnnnnnnnnnnnnnnnnnnnnnnnnnnnnnnnnnnnnnnnnnnnnnnnnnnnnnnnnnnnnnnnnnnnnnnnnnnnnnnnnnnnnnnnnnnnnnnnnnnnnnnnnnnnnnnnnnnnnnnnnnnnnnnnnnnnnnnnnnntaaacatcccacagtacatcttgcaactgcagcccctctaaaaccagcactgtccctgcagtgcgaggtagaatgcaccctgaaggacacactgccaatgggatgtattcagacatgtcaccagggaggttcaagytggatgttcaaaaaaatttcttctcaggaagtgtgatgaggcactgtaacccagtggtgaggctgctcagggacgtggyggagtcactgtccctggaggtgttcaagaaaagggtaaaygtggcacagagggacatggttagtaggcatggtgaggatgagatggagttggacaagatgatcttagaagacttttccaaccttaatgattctgtgcttctatgacctgagatgcacgtcagctctgccgtgctcaagagatacattgggagccacagacacttcacagtttgatcacca

SEQ ID NO: 41307 - DNA, 599 bp, Chicken  19866894276894_2
  misc_feature (1)..(85): n is any nucleotide
nnnnnnnnnnnnnnnnnnnnnnnnnnnnnnnnnnnnnnnnnnnnnnnnnnnnnnnnnnnnnnnnnnnnnnnnnnnnnnnnnnnnntaaacatcccacagtacatcttgcaactgcagcccctctaaaaccagcactgtccctgcagtgcgaggtagaatgcaccctgaaggacacactgccaatgggatgtattcagacatgtcaccagggaggttcaagytggatgttcaaaaaaatttcttctcaggaagtgtgatgaggcactgtaacccagtggtgaggctgctcagggacgtggyggagtcactgtccctggaggtgttcaagaaaagggtaaaygtggcacagagggacatggttagtaggcatggtgaggatgagatggagttggacaagatgatcttagaagacttttccaaccttaatgattctgtgcttctatgacctgagatgcacgtcagctctgccgtgctcaagagatacattgggagccacagacacttcacagtttgatcaccatttaaattctaacttgatgtacagtcacagctgtggcttgtctgtatgacaagctgttggaaatgaatatctggtatca

SEQ ID NO: 41308 - DNA, 599 bp, Chicken  19866894276894_3
  misc_feature (1)..(45): n is any nucleotide
nnnnnnnnnnnnnnnnnnnnnnnnnnnnnnnnnnnnnnnnnnnnntaaacatcccacagtacatcttgcaactgcagcccctctaaaaccagcactgtccctgcagtgcgaggtagaatgcaccctgaaggacacactgccaatgggatgtattcagacatgtcaccagggaggttcaagytggatgttcaaaaaaatttcttctcaggaagtgtgatgaggcactgtaacccagtggtgaggctgctcagggacgtggyggagtcactgtccctggaggtgttcaagaaaagggtaaaygtggcacagagggacatggttagtaggcatggtgaggatgagatggagttggacaagatgatcttagaagacttttccaaccttaatgattctgtgcttctatgacctgagatgcacgtcagctctgccgtgctcaagagatacattgggagccacagacacttcacagtttgatcaccatttaaattctaacttgatgtacagtcacagctgtggcttgtctgtatgacaagctgttggaaatgaatatctggtatcaccgtatggccttgggaattggtctcctgatcataacccag

SEQ ID NO: 41309 - DNA, 600 bp, Chicken  19866894276894_4
aatctgattcttgtcagtttgggatctgttagcctggagcttctcatcagtatttgatccaagtaaaccagcggactgcaaactgaaaccagactgcagaaaaattctgcatttctgtgagcagcaagccagtcaaatgaatgtaaaagtcaaacaatgcttatttctttaatattttctttattttatctttacaagaatgtaacaggacttggcaaggtatttctccatttagttgtaattctggctgtgataccaagctcctaccaaagtttaatccagtaaacgaacaaaccacaractggaasagcagttttaagctaaagctrttggttatgattctaaaatactttggatataagacatgtgaaacagtttttttgtcaaggtaagtgcttgcaactctaaaaagagtgtgataaagagacaaattatttttaacttgttttatattaacatcaggaatgtaaagactttgtcagtgtcacaacacaaacaatgggttatagtaaaagcagggatgagagtgacagtctttatacaaatttgagacacatttccctccttcaaaagaaaaacacgatgtcagtgcagttaaat

SEQ ID NO: 41310 - DNA, 600 bp, Chicken  19866894276894_5
tcttgtcagtttgggatctgttagcctggagcttctcatcagtatttgatccaagtaaaccagcggactgcaaactgaaaccagactgcagaaaaattctgcatttctgtgagcagcaagccagtcaaatgaatgtaaaagtcaaacaatgcttatttctttaatattttctttattttatctttacaagaatgtaacaggacttggcaaggtatttctccatttagttgtaattctggctgtgataccaagctcctaccaaagtttaatccagtaaacgaacaaaccacaractggaasagcagttttaagctaaagctrttggttatgattctaaaatactttggatataagacatgtgaaacagtttttttgtcaaggtaagtgcttgcaactctaaaaagagtgtgataaagagacaaattatttttaacttgttttatattaacatcaggaatgtaaagactttgtcagtgtcacaacacaaacaatgggttatagtaaaagcagggatgagagtgacagtctttatacaaatttgagacacatttccctccttcaaaagaaaaacacgatgtcagtgcagttaaataattgcag

SEQ ID NO: 41311 - DNA, 600 bp, Chicken  19866894276894_6
tagcctggagcttctcatcagtatttgatccaagtaaaccagcggactgcaaactgaaaccagactgcagaaaaattctgcatttctgtgagcagcaagccagtcaaatgaatgtaaaagtcaaacaatgcttatttctttaatattttctttattttatctttacaagaatgtaacaggacttggcaaggtatttctccatttagttgtaattctggctgtgataccaagctcctaccaaagtttaatccagtaaacgaacaaaccacaractggaasagcagttttaagctaaagctrttggttatgattctaaaatactttggatataagacatgtgaaacagtttttttgtcaaggtaagtgcttgcaactctaaaaagagtgtgataaagagacaaattatttttaacttgttttatattaacatcaggaatgtaaagactttgtcagtgtcacaacacaaacaatgggttatagtaaaagcagggatgagagtgacagtctttatacaaatttgagacacatttccctccttcaaaagaaaaacacgatgtcagtgcagttaaataattgcagtattttgaaaagtttgttgta

SEQ ID NO: 41312 - DNA, 599 bp, Chicken  19866894276898_1
  misc_feature (1)..(154): n is any nucleotide
nnnnnnnnnnnnnnnnnnnnnnnnnnnnnnnnnnnnnnnnnnnnnnnnnnnnnnnnnnnnnnnnnnnnnnnnnnnnnnnnnnnnnnnnnnnnnnnnnnnnnnnnnnnnnnnnnnnnnnnnnnnnnnnnnnnnnnnnnnnnnnnnnnnnnnnnnnctgagcttgaaaaatgctgcctggtgttttaagctcagattcagatctcttcttccctgtgagatatatatggagagtattgcactactgataggctgactatcctgataaaaccctctttaaactctttgttttgggccacagtkctgtgggtgggaagaacatgactggccttgtcctcagtgctgttggtaggtcagggtgtcttgagagaagtgaaaagctgggtttcccctcacagcagtgactttttcctttgcttgcacaaggaatgtgacatcattaagttgctggaataagtacatayggaaggtagaaaaggaggaaggaatttttctttctgttttcttgttaaaagatgagcaaactaatgcttcagtcatgcagggactttcctgtgtgctttaccttaggctctgtcaatagctccattgctgtaagggca

SEQ ID NO: 41313 - DNA, 600 bp, Chicken  19866894276898_2
tgaaaaatgctgcctggtgttttaagctcagattcagatctcttcttccctgtgagatatatatggagagtattgcactactgataggctgactatcctgataaaaccctctttaaactctttgttttgggccacagtkctgtgggtgggaagaacatgactggccttgtcctcagtgctgttggtaggtcagggtgtcttgagagaagtgaaaagctgggtttcccctcacagcagtgactttttcctttgcttgcacaaggaatgtgacatcattaagttgctggaataagtacatayggaaggtagaaaaggaggaaggaatttttctttctgttttcttgttaaaagatgagcaaactaatgcttcagtcatgcagggactttcctgtgtgctttaccttaggctctgtcaatagctccattgctgtaagggcacaaccgagcaaggctaggcagggagagagaacacatgtaaatgagaatatatcaagcataaaatgggaagaaakaatccagaatggactcagttccaaactttaaatttaaaggagaaaaattattctacctattcctcctttcaagtttttgggaggccag

SEQ ID NO: 41314 - DNA, 600 bp, Chicken  19866894276898_3
aaagctgggtttcccctcacagcagtgactttttcctttgcttgcacaaggaatgtgacatcattaagttgctggaataagtacatayggaaggtagaaaaggaggaaggaatttttctttctgttttcttgttaaaagatgagcaaactaatgcttcagtcatgcagggactttcctgtgtgctttaccttaggctctgtcaatagctccattgctgtaagggcacaaccgagcaaggctaggcagggagagagaacacatgtaaatgagaatatatcaagcataaaatgggaagaaakaatccagaatggactcagttccaaactttaaatttaaaggagaaaaattattctacctattcctcctttcaagtttttgggaggccagttctggctatgtattggtcggagcaagaaatgtgccctgatgttaacagaatttatgctttttatttgaacttaaggatgaaatcagagagagagaaaaaaaaaaaaagaaattgaagcacagcagagaagaattttttgctgtgtgaatgcagttgcaggatgcagccacatccggtagacaggaaaaaaaacaatgtgatggtaccatta

SEQ ID NO: 41315 - DNA, 600 bp, Chicken  19866894276898_4
ggaaaagctcagatggaaattgagcaagaaataacaagaatcccctgcctctccctcagaaaattacagctgcagtaaagttgtatgtattagttggttcccatggttttaatcttctaacttgctctgttttttcctattcaaggctgatttctgtttggcagttttacatttaagagagttcccaccggaagaattgcaaatgtgtagcagacagaatgactctcacactcacaggtgggatggggaatacgatttatttagatgcagtgtgaactggtcaggtagcaaaattgtccrtggaaatctctggtgctgcctgtgactattaataatttttccttattggcatcagcccctcagttttttgtctccccttrgtgaggaggagaaatattggcctcgtaaaggatttcttccagtttgaattttgtgccagtacatagtttattaccaacagtatgctttttcacaygggcagcatgtaacacaggagcaagcctgtaggaagtttcaatctgcaatacygtgttatgctgcaacattcagagctctgccttccatttgcagtttgcaggttctcttcagtgggagtggtgt

SEQ ID NO: 41316 - DNA, 600 bp, Chicken  19866894276898_5
ttgtatgtattagttggttcccatggttttaatcttctaacttgctctgttttttcctattcaaggctgatttctgtttggcagttttacatttaagagagttcccaccggaagaattgcaaatgtgtagcagacagaatgactctcacactcacaggtgggatggggaatacgatttatttagatgcagtgtgaactggtcaggtagcaaaattgtccrtggaaatctctggtgctgcctgtgactattaataatttttccttattggcatcagcccctcagttttttgtctccccttrgtgaggaggagaaatattggcctcgtaaaggatttcttccagtttgaattttgtgccagtacatagtttattaccaacagtatgctttttcacaygggcagcatgtaacacaggagcaagcctgtaggaagtttcaatctgcaatacygtgttatgctgcaacattcagagctctgccttccatttgcagtttgcaggttctcttcagtgggagtggtgttcatggcacagaggtgagtgttctcaggaactggcctctttttccaaataaaagcagctggtagcagtgatttgattgta

SEQ ID NO: 41317 - DNA, 600 bp, Chicken  19866894276898_6
agagagttcccaccggaagaattgcaaatgtgtagcagacagaatgactctcacactcacaggtgggatggggaatacgatttatttagatgcagtgtgaactggtcaggtagcaaaattgtccrtggaaatctctggtgctgcctgtgactattaataatttttccttattggcatcagcccctcagttttttgtctccccttrgtgaggaggagaaatattggcctcgtaaaggatttcttccagtttgaattttgtgccagtacatagtttattaccaacagtatgctttttcacaygggcagcatgtaacacaggagcaagcctgtaggaagtttcaatctgcaatacygtgttatgctgcaacattcagagctctgccttccatttgcagtttgcaggttctcttcagtgggagtggtgttcatggcacagaggtgagtgttctcaggaactggcctctttttccaaataaaagcagctggtagcagtgatttgattgtagaacaagaagtgagtgcacagaaagaaacaaatagctgagctagaagcagagcctgaggtcacagccaagtggcacgttgttgcattacattcac

SEQ ID NO: 41318 - DNA, 600 bp, Chicken  19866894276898_7
cactcacaggtgggatggggaatacgatttatttagatgcagtgtgaactggtcaggtagcaaaattgtccrtggaaatctctggtgctgcctgtgactattaataatttttccttattggcatcagcccctcagttttttgtctccccttrgtgaggaggagaaatattggcctcgtaaaggatttcttccagtttgaattttgtgccagtacatagtttattaccaacagtatgctttttcacaygggcagcatgtaacacaggagcaagcctgtaggaagtttcaatctgcaatacygtgttatgctgcaacattcagagctctgccttccatttgcagtttgcaggttctcttcagtgggagtggtgttcatggcacagaggtgagtgttctcaggaactggcctctttttccaaataaaagcagctggtagcagtgatttgattgtagaacaagaagtgagtgcacagaaagaaacaaatagctgagctagaagcagagcctgaggtcacagccaagtggcacgttgttgcattacattcacctttgtgcattccagcccagttgagggaaaggtgactttgtcatctttgtcat

SEQ ID NO: 41319 - DNA, 599 bp, Chicken  19866894276900_1
  misc_feature (1)..(25): n is any nucleotide
nnnnnnnnnnnnnnnnnnnnnnnnnatttgattagaataaagtttgagaccacaaagcagaaactcataaaaatggtactagtttttcctacaaggtattctgcctgtttaggctctcctatacagtgtcaatgcaagaagtacttacaaaagagaaggctatgtgcccatcacagattttacattccagtgatgttgctcaggggaaaatacccatctccaagccattcacagaaacagaatcatttccaatggaagggactttcttaagttacccagtccaacacccccagctagaakaggctgtcctgaactgcacgcaaatgggttttgagtatctccatggatggacacacctctctgagcaaactactcttttgatcaccctcactgtaaacactcttccttttccaaattgtttctccaggcacactctttttaccatttagccaatgtttgtcttcagatccaaattaacaaagtttgtaaaatggcaaagaatttaatcaaagaacagtatgaaaggcatctttctaaatgtgagcaatcgggaagttctaaaaggagatctaaaaattcaaactaaaggcatgcatgag

SEQ ID NO: 41320 - DNA, 558 bp, Chicken  19866894276904_1
gtccctaacttgaggttaatgtatttttaaagcacctgaagatgttaagacgtggacgttcctgtacaaaataaaatgggaatgcagaacttctaaaataagtgggtgcagagtgaaatgataactgaatttccagctttttgctctgtgccgttatgagtgactctttgtggtgatcagtacattcatagaatttttgtttctcgtatttccacttccacctctttgcttcccgttctgtctgttgagtgtgccacattttactaattgcaaataaagtatattttcacattattattwtttttttgctgtgtgtacccacacatgcgtacagttgtgatcccagcagctcctttcccatacattttgcctaccttatttttctgtttgatttgctttcctttggcagtgcatttgccttcagacccaattaccttcttgcagcttttatcagtatgtgtgggttgaatagttaaaagcagtgtaaagattttttccttatagaactcacttttgtgggtagttctttagtttggcataaactgaggtcatatttaa

SEQ ID NO: 41321 - DNA, 599 bp, Chicken  19866894276905_1
  misc_feature (1)..(7): n is any nucleotide
nnnnnnnttttagacttatctataaatatttttgacacttggtgattaagatatatttgttaagactgagttcattagtctaaaaaagttcatagaaaacttctgaacctaattttgctttgtagagtttttgatggtgtgggtgggtcttgtggtttggcttttttcttacccattttgcctgggaagtgtccgtgtgacgcaataggcggaattgaggtttacggataggttgggagacagtattttgtctaaaacttttagggtttttagttgacactgacctgatgtgtgtatgtrttttactagggcaccgtacttataaagaatgctgaagagctgatgaattttagcaagggagaagaaaacctaatggatttgcaagtcaaagctattgctgatagcggtgcaaatgtagttgtaacaggtggcaaagtggcagacatggcacttcattatgccaacaaatacaatcttatgatagtcaggtaagtgctagaagacataagatatttgccccaccagatttatgaaatgcacttggcatagtgtctcttgcctctcaaataaattacaatgcagagaactgcaggcagttt

SEQ ID NO: 41322 - DNA, 600 bp, Chicken  19866894276908_1
tcaagcttcacagcccaatcactctgaccaggaattgctggccgaacgtgctaccccaatggcaggtgaaatgtcagtcagccagtccttccttcatggtgacttctggtgaaaggataacaaacagacaagaagtttctcagcagcagcagcgtacctcttaagtcaaagccctccaagcagctttagtggtcaactacctgaagagcaacactacaaagaaagaaatccattaatatagcagctgatgcatgtagaatcctggactcactacatgaggccactcagctcctccagggkgacaagtctagaaacactcctcacagccacacttagccaattcaggacatgctgccaaaatgagatcttcacagtgggcagaaatttcatcctgaaaaagttcccagagctgggatgccaaccggaggtcagtcagctctcccaagtttacaaaaatgagttgacaattcacccaaggacagtctcccaggactttgcctgattgcagtactgctgcaagcctgaaacacagcagcagtttgttttctcttgaatttgggaacttccaacaaaggtcatgaaattcaaaagcaagtgggt

SEQ ID NO: 41323 - DNA, 600 bp, Chicken  19866894276916_1
ttaaaatcactgctaaagaccagatgattggaaaatcaaaacaaaaccataagtttgtctgtgccccctgtacaatgacttctactgccagccatcactgtatagacaaaaccagaaagttgaacagagctgtcaaattttaaccaagattattctcagtgaaaaggagctttccctttgatagtgaggctgaagactgagtgttgcatttattctgaacacactgacatttaacattcccactcacgttttttgctctgaagacacatataattttccagcgctcacttctgagaaacraaagtcaccttaaaagtagttaaaccaatattaggaattagccccccatggagcaatggaaggccatgataatgcattctactaggacaggagcacacttataaaggtactcattaagacttagtttagaaagcagtacagaagaaggcatctcaccctgtccaaagaccaataacatctcaagaagagcatgatctctaaagagatgctgctccctcagctgctaacccttaaatgagggtaaggaggggtggactcaaggtgcattgcttaaacctgagctctctgggttaactgtgc

SEQ ID NO: 41324 - DNA, 600 bp, Chicken  19866894276921_1
gcggcacgaggagcgggactggcagtgggagggaagcgcccccagtgaggcagcagcagcagccccagcaatgcgggctgagggtcccacagctgcggcgctgccccggcacacggcggcccggccggctgtcagcacacggctccatccagcgccgctgtggccgcacatctgggcaggcctcgaaactaaaatattctataaaacaggattttaattaccatccagagcgattaaagccgagaaatccatacgcgctggtgatgaattatccgcgcggccgcgggaaggttccgggcyggtgacagatgcgccacgtgagcacaactgcctctcgcaccgcgccggcacgcggccgccgcccgtaaccgaaccgccgatttcgctccgtctgaaggcaggttttcatatggcaaaactgttataaatcctcattatcctaaataaaattacagcactttaaacatttccagggagaacattctctcttctaaacaactaccttagcgagtaataggaagcaatatggttgcacttgtgtcacagttggaagtctttttaaactgtcgccctgctagcaaaccaattctacatattaaa

SEQ ID NO: 41325 - DNA, 600 bp, Chicken  19866894276924_1
gatggggatgggagctggtctcccagctactgtgtggagtcctgccccacctgccagtctgtgcagctcctccagggctcatcaccagcctgctgccctataagatgaccagccatcctttcctccttccctcacatatggtttttctgccctcctgtcccttcctcagcaaagatcttttttgtttgtttgtttaaactcccaacagccccatctcaactccccttgtttcagctgggctattagggctcaggcaagtcttgctgggtatgtggcagaaatgttcttgctgtaggtgcygtttttctgcactgaacatgcatcctgcctttccccagaggcacgtgaaacactgaatggagcaggcagcccttgtgcttcaggtacttgtcctgcacttgcaaacaccattttagccacaagtttttggcaggcaagtgaaggataggttccacagcacgtgggctttatagacctgccagactgcaacacacagaagctcaatttagcccaagcccctctggggtcacgcactccagctactcttcagcttttgctcgggtgaggtttctcctgtagttacccaactcaggtgtttct

SEQ ID NO: 41326 - DNA, 432 bp, Chicken  19866894276926_1
aactgttcttctcatgtttatttattcacagtgaatttaatttgtcattctagaaaaatatgttgctttaagaaacagaagacatttatttaaaacagacttctttcataaacaaacttaaaattaaactgcaataaagaagctgatgatctgttttaagacatgaaactatgacaagtgcactgagatataagatctgaaaatctacgtcgacataaatgaaacattatatttaagaatgacattgcttatttccaaagtctgcaaaagaaagagcactaagctcataaaagccaccargcaaacatctaaacctgtttttggtcaaagtaataagacagttttaccactatttcatctcagtgggaatgcagtggggtttttgttccagcgtgttcatctcgttctgctcaatgatgagttaattgaaag

SEQ ID NO: 41327 - DNA, 600 bp, Chicken  19866894276938_1
ttccctccctcaacttgaaaccatttcccctaacaaaatcaccacgtagtaaaaatcattatgaattttctacgtgaatattctattatttgcatcctattcccagtagaaaaaaaaacatctgataaaaaaaacaccctcacccaaatagtggagatggcaaccattcgtttagatggtttcctttgcaatgtgtatagcttataattggcatgaactccaaattacataagtagtgatatgttttctttatagcactgggagcggtaaaaaggtgtgagatacatttctactttcttsaagacttcaaaaaacaacaaaaaaaaaaaaggcaaggaaaaaggaaagacagttgtgattcttatggcttttttcccattaaaaggtctgaagaacaaacgcgccagaaccagcacagggaaacagccttgggagagtaatttttgatccatatagcatagctataactaaaattgggtgcccctgaatgtgagcgactgtgctataggtgaggtttaaaagatgggaaaggtgaagtgacagatcacctgccatagacaaacataggagtcaaaggcagaaataagctttcatttttaa

SEQ ID NO: 41328 - DNA, 599 bp, Chicken  19866894276939_1
  misc_feature (1)..(66): n is any nucleotide
nnnnnnnnnnnnnnnnnnnnnnnnnnnnnnnnnnnnnnnnnnnnnnnnnnnnnnnnnnnnnnnnnngtgtttaaacaggtgtggttcaacacaacccactgctgggggctgtgctcttcaggtgactctcaggttctactttggacagattgtgagagtctaaaaggaccgacgttgccccagaacagctcagcagtgtgagctaccctgagaggcgtcgctcaggaccaaaggaccacagtttgcccaaggccaggaagcttcccatcctgttagaggtagaattggacggaggagagstgtgaatgactcagcctgttgttcctgggtgcccaccagggcgatgccagcagcgatgtcaccacattcacaccccatcgctcctggggtggggcggcagggacgggtcctccccttggtctggcacagtgtgactgtttttcctgtgtgctgtcccattccctcccattgcttttggcaactgcgagccttatcgatgcctggaatctgtcctgagtggagggatgtggtggggtctgactgagaggagttagcgtgtgtaacccagcgcatagggaacagggagaggctgctgggaa

SEQ ID NO: 41329 - DNA, 600 bp, Chicken  19866894276939_2
tcagcctgttgttcctgggtgcccaccagggcgatgccagcagcgatgtcaccacattcacaccccatcgctcctggggtggggcggcagggacgggtcctccccttggtctggcacagtgtgactgtttttcctgtgtgctgtcccattccctcccattgcttttggcaactgcgagccttatcgatgcctggaatctgtcctgagtggagggatgtggtggggtctgactgagaggagttagcgtgtgtaacccagcgcatagggaacagggagaggctgctgggaatattaataacratatattagcacctctgaatccaattttcagaagaactacaagaacttagaagcacaccctgctgttgctgtcaagggatttgtgctagtaggtgagatgttcaagaaattaaagcaacttattattagccaatgataagtattttctttttgtttgtttaaacggggttatcgcgctgctgaaagacaggggtaatcttaaaagtctggctaatgagtttggaaatgcacagacaccacaccctgtgctggatttatttcagtcatacaatggatctgcatgtgatgaagaatgcagat

SEQ ID NO: 41330 - DNA, 600 bp, Chicken  19866894276948_1
gattacacaggcaatacagaggaggtaaaactcatctaactaggttcctttccagcctttaggcttttaatagctaagttaatttcctagaggagtatgggctgattgaaggaaaaactataatcattaattgcagtagatttaatttgtttgaagtataaagggaaggcttcctgagacttggggggaggtaaagagccacgctcctgcaaagttgcacgttccaggcagagcaatatgtttgccgctgcctataacaaattctgctaaaacttttgggccatttatggcttttatacrtttcagtaggagtgatgtccttccatcgcaggattgttatkcrggattcttatagataaattaacagggcctctttacccgcaagccaggagcatgaatttacacttgttcttagcagcgtgttttgtattccagtcaatctacctgatgcttcagggacacaagctctgctccagctaccctctgaaccgtttcctcrctaatgtgcttatagaatatgaaattgctccagttgctttccaagagaaaacagaattttgcatattcaataagggctttttttaattgtcatttaatctc

SEQ ID NO: 41331 - DNA, 600 bp, Chicken  19866894276948_2
aggttcctttccagcctttaggcttttaatagctaagttaatttcctagaggagtatgggctgattgaaggaaaaactataatcattaattgcagtagatttaatttgtttgaagtataaagggaaggcttcctgagacttggggggaggtaaagagccacgctcctgcaaagttgcacgttccaggcagagcaatatgtttgccgctgcctataacaaattctgctaaaacttttgggccatttatggcttttatacrtttcagtaggagtgatgtccttccatcgcaggattgttatkcrggattcttatagataaattaacagggcctctttacccgcaagccaggagcatgaatttacacttgttcttagcagcgtgttttgtattccagtcaatctacctgatgcttcagggacacaagctctgctccagctaccctctgaaccgtttcctcrctaatgtgcttatagaatatgaaattgctccagttgctttccaagagaaaacagaattttgcatattcaataagggctttttttaattgtcatttaatctctttctcactgatgattagagcgtgagacctggtgttctggg

SEQ ID NO: 41332 - DNA, 600 bp, Chicken  19866894276948_3
gttcctttccagcctttaggcttttaatagctaagttaatttcctagaggagtatgggctgattgaaggaaaaactataatcattaattgcagtagatttaatttgtttgaagtataaagggaaggcttcctgagacttggggggaggtaaagagccacgctcctgcaaagttgcacgttccaggcagagcaatatgtttgccgctgcctataacaaattctgctaaaacttttgggccatttatggcttttatacrtttcagtaggagtgatgtccttccatcgcaggattgttatkcrggattcttatagataaattaacagggcctctttacccgcaagccaggagcatgaatttacacttgttcttagcagcgtgttttgtattccagtcaatctacctgatgcttcagggacacaagctctgctccagctaccctctgaaccgtttcctcrctaatgtgcttatagaatatgaaattgctccagttgctttccaagagaaaacagaattttgcatattcaataagggctttttttaattgtcatttaatctctttctcactgatgattagagcgtgagacctggtgttctggggc

SEQ ID NO: 41333 - DNA, 600 bp, Chicken  19866894276948_4
cacgctcctgcaaagttgcacgttccaggcagagcaatatgtttgccgctgcctataacaaattctgctaaaacttttgggccatttatggcttttatacrtttcagtaggagtgatgtccttccatcgcaggattgttatkcrggattcttatagataaattaacagggcctctttacccgcaagccaggagcatgaatttacacttgttcttagcagcgtgttttgtattccagtcaatctacctgatgcttcagggacacaagctctgctccagctaccctctgaaccgtttcctcrctaatgtgcttatagaatatgaaattgctccagttgctttccaagagaaaacagaattttgcatattcaataagggctttttttaattgtcatttaatctctttctcactgatgattagagcgtgagacctggtgttctggggcctgtctctattaattgctactagagaagtcattttaaatagagcttaaaaagatcattcatctttttcttttactgagcagctataaaagcatgctttacctgcctaacagaggcatttatctatagcatgagatgtcatatcctttgacattact

SEQ ID NO: 41334 - DNA, 600 bp, Chicken  19866894276953_1
gactgtgagcacagtgagagaattgctaagatgttttactttctgatttggcttctaaagaaaggctttaaaaaactccaaactgtcaaagttatctcacttccatttttctttttcacatccttaaatggctctgttgtcacaagtctgtggtgtgagctgcagggaatcaaccagctctctctagccttaaactctcagcgatccaggtattgaccctgaagggaaaaagcacagcttccttaaacttctggaggcagtttgctacacacagctttgatagagctcattacatacagygcagtccaccaagtggggacaaggtgacagtgttgtcttcaaattctgggctcyggttgttgggctggctttatacgtttagctgtgctgatggagggaaaggacagcttctactgacaaggtaatgttgcacaggagacagtgttgacatagacaaggatttcttacttcactatgcttgttctcccgtttctgtaggagtagcaataaaagcacctttatgttaccataaagtaacaggggaggaggttatactaatataatataatgtaattttctggagcagagagtcccgagttt

SEQ ID NO: 41335 - DNA, 600 bp, Chicken  19866894276953_2
ctaaagaaaggctttaaaaaactccaaactgtcaaagttatctcacttccatttttctttttcacatccttaaatggctctgttgtcacaagtctgtggtgtgagctgcagggaatcaaccagctctctctagccttaaactctcagcgatccaggtattgaccctgaagggaaaaagcacagcttccttaaacttctggaggcagtttgctacacacagctttgatagagctcattacatacagygcagtccaccaagtggggacaaggtgacagtgttgtcttcaaattctgggctcyggttgttgggctggctttatacgtttagctgtgctgatggagggaaaggacagcttctactgacaaggtaatgttgcacaggagacagtgttgacatagacaaggatttcttacttcactatgcttgttctcccgtttctgtaggagtagcaataaaagcacctttatgttaccataaagtaacaggggaggaggttatactaatataatataatgtaattttctggagcagagagtcccgagtttgaggctcgggtaatattgggccataacttctctcactccatttgcttgctaaga

SEQ ID NO: 41336 - DNA, 600 bp, Chicken  19866894276953_3
taatataatataatgtaattttctggagcagagagtcccgagtttgaggctcgggtaatattgggccataacttctctcactccatttgcttgctaagatcttaaaagagttttgtgaggtttccaaaggagtgtcatcttagccctactgctgtcacagtgcgtgcagtatgacatgatatgcaccaagctcactgctttgttgttttgaatacaaagtgcatgtaggcacttccatccatttgatggcagacagttcatagctgctgcagccagtaaatttgcattcacttacatccygaaaagggttaagagaagtggaaagtgaagaagrgttggagaagttcatggtctctaagcagcctcagaggctgctgatcggttttcttctctagaggatcttgcagcatattactgctggaactatggaaagccttgcaggagttctttcaattatgtgactaactcagttatgggaatctagctcttttaagccaggctcaagtgtggggttcaagtggcttaagagatggtatcctcatgcagacagggacagaccttgatgtaactgataagtctgcaatacattatcaactggat

SEQ ID NO: 41337 - DNA, 600 bp, Chicken  19866894276953_4
gtcccgagtttgaggctcgggtaatattgggccataacttctctcactccatttgcttgctaagatcttaaaagagttttgtgaggtttccaaaggagtgtcatcttagccctactgctgtcacagtgcgtgcagtatgacatgatatgcaccaagctcactgctttgttgttttgaatacaaagtgcatgtaggcacttccatccatttgatggcagacagttcatagctgctgcagccagtaaatttgcattcacttacatccygaaaagggttaagagaagtggaaagtgaagaagrgttggagaagttcatggtctctaagcagcctcagaggctgctgatcggttttcttctctagaggatcttgcagcatattactgctggaactatggaaagccttgcaggagttctttcaattatgtgactaactcagttatgggaatctagctcttttaagccaggctcaagtgtggggttcaagtggcttaagagatggtatcctcatgcagacagggacagaccttgatgtaactgataagtctgcaatacattatcaactggatgtaaagaatcataaaagtttgcttaaaaaattga

SEQ ID NO: 41338 - DNA, 600 bp, Chicken  19866894276954_1
tggctgtgctgcctctaggggctccgcatgtgcccatggggaggagcagccccagagcagcattgcaggctccagctggaaccttggtcaggggcagagatggggcaaggagggcagtcctgtggccaggtgcagttccaggagggatgcagtttgttggctttcttcattttggaagcctacgccaaaacaatatggataaagtggttaaagtaaataatggaaaacaaatgaactctgcttaattgacaaggaaaattttgccatcttgtattgcactccacctgcagctggagtagrgtcctacttagcttagtggagatttccaggccgaggtctaaacgcaggacactgatgtgtgacactgagctctggctcttctctggtactgccacttgattcctactttttcccttctggagtaactttgacctcgcatgaagtttttctctctcttctggagatgtgccgtttgaagaaaatagaaatctttcccccactaattccctacagccaccatgtttctgtttccgttttgatcttttctccaacaaaaagatcaaaatgaaatggttggtgtggggctgtaatgccttaact

SEQ ID NO: 41339 - DNA, 600 bp, Chicken  19866894276954_2
ttccgttttgatcttttctccaacaaaaagatcaaaatgaaatggttggtgtggggctgtaatgccttaactgtatcaagctgagctgaaattctgctttggagacccctctcaacagcggggctgcatgcgagcaccatggcagtgctgctgtgtgcccatcccgtgcccatccccatctccacacccccattcatgaggaaagtgatgaaattctggcattttcctgttggatagaaatcgtatttttgaccatctcaacgacaaaggtaaaggttaagagaaaggttgggatttccrtggtgatgtaacttagatmagaatatggcattgaaggtttttggtgttttctccagcagcccatgacttgtgtgcctcttggctgccgactctgcttttggtatgtattgctgttatttgcatgtggaagtgcctcaggagccccacataaaacactggttcactagttttagtggtttttttagattagacgttaaaatgttgaaatcaaaatatgtggggggtggtagggaggtagcagacgcacaacggtaatctgaataatgtgatttttggggttgctatcttgtgtcttagagc

SEQ ID NO: 41340 - DNA, 600 bp, Chicken  19866894276954_3
ccaacaaaaagatcaaaatgaaatggttggtgtggggctgtaatgccttaactgtatcaagctgagctgaaattctgctttggagacccctctcaacagcggggctgcatgcgagcaccatggcagtgctgctgtgtgcccatcccgtgcccatccccatctccacacccccattcatgaggaaagtgatgaaattctggcattttcctgttggatagaaatcgtatttttgaccatctcaacgacaaaggtaaaggttaagagaaaggttgggatttccrtggtgatgtaacttagatmagaatatggcattgaaggtttttggtgttttctccagcagcccatgacttgtgtgcctcttggctgccgactctgcttttggtatgtattgctgttatttgcatgtggaagtgcctcaggagccccacataaaacactggttcactagttttagtggtttttttagattagacgttaaaatgttgaaatcaaaatatgtggggggtggtagggaggtagcagacgcacaacggtaatctgaataatgtgatttttggggttgctatcttgtgtcttagagctgaaaaacaatcacttata

SEQ ID NO: 41341 - DNA, 599 bp, Chicken  19866894276955_1
ctgcaagcagcccaacctggcactgcttttgctctgctcaagactgcagggcagagcctgggagctgctggccatctggacctctcttgtcattttctcagtgaatccataagaagaagcaggttttcccagcactgcagggacggagtcacaggatgggtcaagtttaatgctgtgctcccatcacggatcatggtcacaatgtcccagtgacacacacacgtgcatatacgtgcaggaaagaatacagcaccatggaggacattttgctgaagcctccacattgcctcagctgccaamcccacaagttatctgagctgtgtgctgtaacacttggaactattggatagctgtgcttggaaataagcaacatcatagcatggcttcaattctctttcatgataaaggacttgtagaagagaaaaaattaaagaatattttaaaatagaatacaatcccatcagtccaaggcagtgtatgggaagaatgtgtatcagcagaaagcagctgccactactctgcagtgcagcaagtggtgaactcctctgcgccttccgcagtgcacagccattgcaacatatatgttagaagaaagatta

SEQ ID NO: 41342 - DNA, 600 bp, Chicken  19866894276960_1
tgtctgtgaggaaataattgatttgacttttaacagacacttaatgagttatagaatagcttagaaatcttcacactgtgaatggaattgttttcacagctgatttatgacatttgtgaagacgggcccagagttctaaaccaaaagtgaacttctcctacatggaaggggtattttggatcattcttcatgctcagcctacttgtagcaattggattaaatgctctacactatatttttctttctcagcttaagagtgtttgagccttaggtattgttgtgagttgccctttggaattytgttttacaagttgtttcacgttgattgacagtatcataccctgttgcatagaaggaaatgaggacaggctatctgcgttttggtgcacagtaaacttctgatggatgcattcagtcattaattagaaattcactatacgatttttatctcagattttaacataatagcatatggatactaatttttgaattgcctagagattrcgacatgcagggagttatcacttttgctgcactccttactctacctctagtcttgttactttaaataggaggggtaaaatgtgtctatcgcaggct

SEQ ID NO: 41343 - DNA, 600 bp, Chicken  19866894276960_2
gtagcaattggattaaatgctctacactatatttttctttctcagcttaagagtgtttgagccttaggtattgttgtgagttgccctttggaattytgttttacaagttgtttcacgttgattgacagtatcataccctgttgcatagaaggaaatgaggacaggctatctgcgttttggtgcacagtaaacttctgatggatgcattcagtcattaattagaaattcactatacgatttttatctcagattttaacataatagcatatggatactaatttttgaattgcctagagattrcgacatgcagggagttatcacttttgctgcactccttactctacctctagtcttgttactttaaataggaggggtaaaatgtgtctatcgcaggctcatgggcttgaaactcactagggaaaatgtgactgtggtcagttgcctggctatggttaatgaatgctgtttcactgaaaattgaaagaaaaacctcctttctccctaacttcaaatataaggaataaactcgatatgtagtcattagagtccaggtgggtttttgcattctctttccattgattaaggctgatttgcaacagg

SEQ ID NO: 41344 - DNA, 600 bp, Chicken  19866894276967_1
tctacacaaataattgtgctgtttccttcacctcatttgcaatgtcaccagaggtctgcagtttcccattttgatcaatccttcttttgaattatcatgctcagttaggactgttgcctggggttaagcaagaacatttcctattgtgcaggtcctcttcccatcgtctagtgtggatggtagacacagtaaccacaggttgcagcaaaacattggatgaacagataatacttgagtattgaagttaaaaacatgaaaattagtctcaatctttcactattaattttcctcccccccccmaaaaaaaaaagaaaaaaagaaaaaaaaagagtttattgagctgcaagctgcaggtgtcttgcttttaaattgagctttcattgcactttatatttgtccttaggtggataacctctttgctccatataaagaccctacaagtgaaattttcacactgtgccattttaaaaaattcttctctctcgtctttcaaatgtctgtttagagctagtcatgctaaagcttctactactaatcaatgcagagagcatgttctggtcattcactgtgtcaccactttaaaaggagaaaaagacaaac

SEQ ID NO: 41345 - DNA, 600 bp, Chicken  19866894276967_2
cattgcactttatatttgtccttaggtggataacctctttgctccatataaagaccctacaagtgaaattttcacactgtgccattttaaaaaattcttctctctcgtctttcaaatgtctgtttagagctagtcatgctaaagcttctactactaatcaatgcagagagcatgttctggtcattcactgtgtcaccactttaaaaggagaaaaagacaaactactgacatcttcataacaagttacaccaaactgtaaatcagaggaaaattattcatgctgtgttctggatgtgacakatttaacttcagcccaggttctctctcatgctccacctgaattgtaaagcagatatctcaaatctaaaaattcttgacagagataaaagagaaaaactactcatgccatcagtgtggaccagaatatcaaaacactttcagatttgcaggataaccaagacgggtatgttctacccattcttattcatttctccaggtaccagcacccagatgcagtaaaggagaaatgagtcatgaaaacccaacccatgaaaacccaacccatgaaaacctaggcattmggacagaacaaagaacagt

SEQ ID NO: 41346 - DNA, 600 bp, Chicken  19866894276967_3
tgtgttctggatgtgacakatttaacttcagcccaggttctctctcatgctccacctgaattgtaaagcagatatctcaaatctaaaaattcttgacagagataaaagagaaaaactactcatgccatcagtgtggaccagaatatcaaaacactttcagatttgcaggataaccaagacgggtatgttctacccattcttattcatttctccaggtaccagcacccagatgcagtaaaggagaaatgagtcatgaaaacccaacccatgaaaacccaacccatgaaaacctaggcattmggacagaacaaagaacagtatttcttttgtactgggaagttagaagagccataactctaatttttgcagccggagtgtcaccaaacaaaagagaaaagaaatgtttatttgttttgttttgtttactttcctaaataagtactggatctgttatttctatctttttttacagtatttgtgtggccttctttgtcattttcgcatcttgaaaatatttacaaatagaaataatatgcactactccatgtgacacagctttcctgttaatgaattgattttcaagatcacacaagatggttt

SEQ ID NO: 41347 - DNA, 600 bp, Chicken  19866894276980_1
caactccaacccttcttcaccatgaaaagcccatagctgcacttggtccttcagccactgctgtgtcatcagccctcatctttattcaatcaatttgagctggtctggggtgaaaaataattgagttttctgcttgctcctaacccagggcactgtgctgctgctggggcatgtttccatttgtctgcagcccaagcagcacatttgttcctgctgcaaacttgtgcagctgtgcaagaaattgctccttgagataacatctccaaccctttccttggctcaaggtccttctccagcagygtgggtgcattcctgtctaacctggagcgtgggaagcaatgcagcagcaaactgcagcgctatggggttgccagcacacggtgcattgtattccaacaacggtgaaaggggaggaaaaaaagatgaagtcatgaagtcaggcatttttggataggaaccacatggggagaggaggggacaggattcaatgggagtggtgcaggaagagtgaaggacgcgacctattaactgctctttgtcctcctataggagcatccttgcactgattttcccatctcccagagctgttctgctgctgct

SEQ ID NO: 41348 - DNA, 584 bp, Chicken  19866894276980_2
cagcagcaaactgcagcgctatggggttgccagcacacggtgcattgtattccaacaacggtgaaaggggaggaaaaaaagatgaagtcatgaagtcaggcatttttggataggaaccacatggggagaggaggggacaggattcaatgggagtggtgcaggaagagtgaaggacgcgacctattaactgctctttgtcctcctataggagcatccttgcactgattttcccatctcccagagctgttctgctgctgctgctgcacagagaagtcagcaattgcaatgtttgcacctaawtctggattatcatataatagcctcatgaattttgcctgctgacactgtagtaaacgatcccacaagctgatgcaatcctttctatggcttcactcaggctctgcatttaacctgcagagctaagcgggttccatggcagctttccagcatgtctctcttttttgggggggggggtgtttctcacactttgctctgcttcttatttatttagttttatgttgtgggaaagtagaaacgtgctgcaggagatgatgggtggtccggcgctcggctttggttggcgg

SEQ ID NO: 41349 - DNA, 600 bp, Chicken  19866894276981_1
ctggaagtaacgcctgctactgcggaaagttgttccatgtcgtgttgataacttggcattgtcagtgccgtacctcaccatgaatgtaaaattagctgtaacatcccatctctggagggttcagggtcaggttgaatggggccatgggcagcttgatctactgggtggtaaccctgcacatggcattacatgttttcatataatcgttgatattttaccttcgattaaaaatacttagcaattaaacaggaagataaaatatttcacagctgactttgtatgctgttaattgtcaatgtktcattgcatggtttatcatttgctatagttgacatccttcaagattagctactgcagaatcattttcctccagctctcacttcagaccctgagctttttctcaaaaacacaatgtcaaagtyaagaactrgccttgacagaagaaaattatttaaatgtrtaaaattctttatacattccatacagtgtattttgttagaaggaatttgattggactagaggcaagcacacatactgtcaagatccagcagtgggatggtagtggtttaattgcgaacttaagtaactgcaacacagtat

SEQ ID NO: 41350 - DNA, 600 bp, Chicken  19866894276981_2
agggtcaggttgaatggggccatgggcagcttgatctactgggtggtaaccctgcacatggcattacatgttttcatataatcgttgatattttaccttcgattaaaaatacttagcaattaaacaggaagataaaatatttcacagctgactttgtatgctgttaattgtcaatgtktcattgcatggtttatcatttgctatagttgacatccttcaagattagctactgcagaatcattttcctccagctctcacttcagaccctgagctttttctcaaaaacacaatgtcaaagtyaagaactrgccttgacagaagaaaattatttaaatgtrtaaaattctttatacattccatacagtgtattttgttagaaggaatttgattggactagaggcaagcacacatactgtcaagatccagcagtgggatggtagtggtttaattgcgaacttaagtaactgcaacacagtatttgttgtatagttcagtgttgtcagctttaaaactagcccttctcagatcagtttcaggtattgtgagtggaattgtttcagatgtggtactccccagagttttcttacaatcatagaatca

SEQ ID NO: 41351 - DNA, 600 bp, Chicken  19866894276981_3
gttgaatggggccatgggcagcttgatctactgggtggtaaccctgcacatggcattacatgttttcatataatcgttgatattttaccttcgattaaaaatacttagcaattaaacaggaagataaaatatttcacagctgactttgtatgctgttaattgtcaatgtktcattgcatggtttatcatttgctatagttgacatccttcaagattagctactgcagaatcattttcctccagctctcacttcagaccctgagctttttctcaaaaacacaatgtcaaagtyaagaactrgccttgacagaagaaaattatttaaatgtrtaaaattctttatacattccatacagtgtattttgttagaaggaatttgattggactagaggcaagcacacatactgtcaagatccagcagtgggatggtagtggtttaattgcgaacttaagtaactgcaacacagtatttgttgtatagttcagtgttgtcagctttaaaactagcccttctcagatcagtttcaggtattgtgagtggaattgtttcagatgtggtactccccagagttttcttacaatcatagaatcatagaatgg

SEQ ID NO: 41352 - DNA, 600 bp, Chicken  19866894276981_4
ctgggtggtaaccctgcacatggcattacatgttttcatataatcgttgatattttaccttcgattaaaaatacttagcaattaaacaggaagataaaatatttcacagctgactttgtatgctgttaattgtcaatgtktcattgcatggtttatcatttgctatagttgacatccttcaagattagctactgcagaatcattttcctccagctctcacttcagaccctgagctttttctcaaaaacacaatgtcaaagtyaagaactrgccttgacagaagaaaattatttaaatgtrtaaaattctttatacattccatacagtgtattttgttagaaggaatttgattggactagaggcaagcacacatactgtcaagatccagcagtgggatggtagtggtttaattgcgaacttaagtaactgcaacacagtatttgttgtatagttcagtgttgtcagctttaaaactagcccttctcagatcagtttcaggtattgtgagtggaattgtttcagatgtggtactccccagagttttcttacaatcatagaatcatagaatggcctgggttgaaaagcaccacgatgatcatg

SEQ ID NO: 41353 - DNA, 600 bp, Chicken  19866894276983_1
agtgcacttttgttaaacttaaagaagtcaatatattagtagaattcaggctcttttattagcaggaaatgaagaggtcatacttccaaacaaacaagactcgagtttcttctgcctgctcaactttaagtggaaaggagatgacaggacttcttatagattcaaatatagctaaatagccaagaccagcatttttggtgtcaagatgtgaaagttgtactgtttggtcaattctcaactaagagtctgcaaactaaccaaaaaaacatattctaattcaataagttggactcagtaatraagttttcatttccacactgaaatagaataggccataagaatagatttttttttttttactagcagcatggtagaaaaaaacagctcaagttttgaaattgaacacaacccttggaagacttataatagagtacagaaggtgaacattaaaaattaatcttcctacaaaaacagaatgtcaaaataactgtttctaatattaaaaatgaaagctggaaaattgaaaaggccctttacaaaataccagctagagcccaatcaattaaagttttaaaaatcaatagactagaaaactaatac

SEQ ID NO: 41354 - DNA, 600 bp, Chicken  19866894276984_1
tgggcagcctggtctggtggttggtgaccctgcacatagcagggggttgaagctcgatgatcattgtggtccttttcaacccaggccattctatgattctatgattttatgattctattaaatgtgtatttacaacttggaggatgaagtgagtctgttgtagggttaaaaattctctgtcatccgaggaatttgataaaagtaatgtagtatacagaaatagtcttattttattgcaaatgacttctctagacactacagggccatggcctttctagaacttaagtctccacttgcaakaattgccaaaactgtygtgtgaactggtggatctcttgatatattcttgtacatkctgctatctttctgtgcaacgggtcactgcctcagatagcccgacaaatctctcctcaagcctgcgattccaggctttgtttctgctctatgaattcagtcaaaagctcacgtgccctgggggtgtttcagggctttgttcatagatgctgcacaaattgcttcagatgctcccatctctggtataacctgtatttgtacaccaggcgtgttctccgctgggatagcatatgtttaaggggaacc

SEQ ID NO: 41355 - DNA, 600 bp, Chicken  19866894276984_2
gtggttggtgaccctgcacatagcagggggttgaagctcgatgatcattgtggtccttttcaacccaggccattctatgattctatgattttatgattctattaaatgtgtatttacaacttggaggatgaagtgagtctgttgtagggttaaaaattctctgtcatccgaggaatttgataaaagtaatgtagtatacagaaatagtcttattttattgcaaatgacttctctagacactacagggccatggcctttctagaacttaagtctccacttgcaakaattgccaaaactgtygtgtgaactggtggatctcttgatatattcttgtacatkctgctatctttctgtgcaacgggtcactgcctcagatagcccgacaaatctctcctcaagcctgcgattccaggctttgtttctgctctatgaattcagtcaaaagctcacgtgccctgggggtgtttcagggctttgttcatagatgctgcacaaattgcttcagatgctcccatctctggtataacctgtatttgtacaccaggcgtgttctccgctgggatagcatatgtttaaggggaaccagtgatgaaatgcaga

SEQ ID NO: 41356 - DNA, 600 bp, Chicken  19866894276984_3
gatgatcattgtggtccttttcaacccaggccattctatgattctatgattttatgattctattaaatgtgtatttacaacttggaggatgaagtgagtctgttgtagggttaaaaattctctgtcatccgaggaatttgataaaagtaatgtagtatacagaaatagtcttattttattgcaaatgacttctctagacactacagggccatggcctttctagaacttaagtctccacttgcaakaattgccaaaactgtygtgtgaactggtggatctcttgatatattcttgtacatkctgctatctttctgtgcaacgggtcactgcctcagatagcccgacaaatctctcctcaagcctgcgattccaggctttgtttctgctctatgaattcagtcaaaagctcacgtgccctgggggtgtttcagggctttgttcatagatgctgcacaaattgcttcagatgctcccatctctggtataacctgtatttgtacaccaggcgtgttctccgctgggatagcatatgtttaaggggaaccagtgatgaaatgcagagagaacctcatggcacgtttccccagcaggtagctatca

SEQ ID NO: 41357 - DNA, 600 bp, Chicken  19866894276987_1
aatattgtataagtgcattgtagaagattcttcctggatattttcaacaaacatagtgggtttttttttgttttttgggtttctgggattttttcattttaaataacttttcaggcctgtaacctacttttagtgtataaatagttcctcttcccacaatccaataacctgtaaattatacatgtgtagtggacacaggagttaagatccagagtcctctcttctctgcctttgatcactcatagcctgcgcaatcttccaggaagaagatcacacctttgatctctacttctgtctcartgctgtacaggttatctgaggatgtttattgttttgaaatgtaggtttcactcacaaaattatgctgattcaaactaaaaaaattaaagcatagccatttacactaaaagatatcaaagaagagaaaatctaggatgaatatttaaaacaaatgaagagttaactgctccaatataaaaattttaaaatctacgtgggatgggtggtacaattgaagtgagattattttgcagaatctaaaattcccattagggaaatagaaaactgggatacgggaagctgttttctgtctaggtttaa

SEQ ID NO: 41358 - DNA, 599 bp, Chicken  19866894276988_1
  misc_feature (1)..(134): n is any nucleotide
nnnnnnnnnnnnnnnnnnnnnnnnnnnnnnnnnnnnnnnnnnnnnnnnnnnnnnnnnnnnnnnnnnnnnnnnnnnnnnnnnnnnnnnnnnnnnnnnnnnnnnnnnnnnnnnnnnnnnnnnnnnnnnnnnnnnnnattatttgcataatgatttagcaggagataaatacaggtaataagaaaaacactgaacatagtaaacacatctggcacagagacatttaccttaaacaatttctgttatgttgaaaaaaagtgaaagctggatcacaacctcttccagcattatcttctacacacycatcatttatggcccctgaatgcttcattttcctactaatgactgaactgttctgctatcaacagggctggaagtgggacagtgagcggcactggagccggacagcactgggctcagctggttccactgctgtgcaagaggctcgctgaccacctctctctgcgtggtacaccaatgtctctcataacagcagcaatctgtcacacgctgcacagactcaggattgcccagcatgtaggaaagtttatctgaagccacaagacagccacccatggcactttgcctcattggagctaaac

SEQ ID NO: 41359 - DNA, 600 bp, Chicken  19866894276991_1
gagcagctgtgtgttcactgcccgtgttgggtgggatggagaaggacagagattgtgcagcagggagcttttatatctcttggcaataggaaaatctcttgtcctggtcttgggcccaagacctcccttctggcaagagcttatttctgtctgcagggggctcttggacagcacagctgccctcatccttcatccacttgctcagagggatctttgcccactccaatggataaagagttccaacccctttctcttcttatcatagaatcatagaatggcttaggaaaggaccttaaataycatctggatccaaccctctgccrtgtgctggttgtatcccaccagatcaggctgcccagggccccatccagcctggccctgaacamctccagggatggggcacccacagctctctgtgcaacctgtgccagggcctcaccactctgtccccctgccctccatggctgcagaagagggtgaatgtgtggccagatgctgagctgggagtggtttccaggcctggcatcactgctgtgctccactcctgcagtgctctgctttgggttcctgtgtgcacgttcaccctgctgacaaatatat

SEQ ID NO: 41360 - DNA, 600 bp, Chicken  19866894276991_2
gtgttgggtgggatggagaaggacagagattgtgcagcagggagcttttatatctcttggcaataggaaaatctcttgtcctggtcttgggcccaagacctcccttctggcaagagcttatttctgtctgcagggggctcttggacagcacagctgccctcatccttcatccacttgctcagagggatctttgcccactccaatggataaagagttccaacccctttctcttcttatcatagaatcatagaatggcttaggaaaggaccttaaataycatctggatccaaccctctgccrtgtgctggttgtatcccaccagatcaggctgcccagggccccatccagcctggccctgaacamctccagggatggggcacccacagctctctgtgcaacctgtgccagggcctcaccactctgtccccctgccctccatggctgcagaagagggtgaatgtgtggccagatgctgagctgggagtggtttccaggcctggcatcactgctgtgctccactcctgcagtgctctgctttgggttcctgtgtgcacgttcaccctgctgacaaatatattgatcctcctgctggctgggagc

SEQ ID NO: 41361 - DNA, 600 bp, Chicken  19866894276991_3
taggaaaatctcttgtcctggtcttgggcccaagacctcccttctggcaagagcttatttctgtctgcagggggctcttggacagcacagctgccctcatccttcatccacttgctcagagggatctttgcccactccaatggataaagagttccaacccctttctcttcttatcatagaatcatagaatggcttaggaaaggaccttaaataycatctggatccaaccctctgccrtgtgctggttgtatcccaccagatcaggctgcccagggccccatccagcctggccctgaacamctccagggatggggcacccacagctctctgtgcaacctgtgccagggcctcaccactctgtccccctgccctccatggctgcagaagagggtgaatgtgtggccagatgctgagctgggagtggtttccaggcctggcatcactgctgtgctccactcctgcagtgctctgctttgggttcctgtgtgcacgttcaccctgctgacaaatatattgatcctcctgctggctgggagctaggtgcaagccagcaacgactatttatatctctcctccttataaggtaccctaaaattatct

SEQ ID NO: 41362 - DNA, 600 bp, Chicken  19866894277006_1
agtcagccgggttgtcacccttcagcctgtgttcgcctggagctctgccaaaaggcctttttaagtggcacctacgggggtcaggtggttcccaaaggaaaccaggtctggaattcaggtttgctcaattcctgcctccattaggagtcgcttaaataaatgcaaacaggagggcctagcccttgtgtttatacgaggcacttggtgataggaatcttctccagacaagctgactctgacttgcaggggtgcagttcagggaccagctcgctgtggaaatgcagtcagctattttatgcmctggaccaatgctctgttgtaattctctcccaggtctggggtacaccatcccaggatttgccaatggattccacagtttccccggagaaagcctgtcatacttggcagcccgccacccctccatcagcagcctgaggcattcctctgtgggtgaagactctactcatgccctcattgggcctgacgatcaggtaaacacaaatgtcccagattctcctgtttccaagcaatgaamaagaagtttgagttgccagcagctccgtgcaattccaggtttctcttactccagcaaagctcaag

SEQ ID NO: 41363 - DNA, 600 bp, Chicken  19866894277006_2
ctgacttgcaggggtgcagttcagggaccagctcgctgtggaaatgcagtcagctattttatgcmctggaccaatgctctgttgtaattctctcccaggtctggggtacaccatcccaggatttgccaatggattccacagtttccccggagaaagcctgtcatacttggcagcccgccacccctccatcagcagcctgaggcattcctctgtgggtgaagactctactcatgccctcattgggcctgacgatcaggtaaacacaaatgtcccagattctcctgtttccaagcaatgaamaagaagtttgagttgccagcagctccgtgcaattccaggtttctcttactccagcaaagctcaagcgatccttgtacctttgccactcttcttctcttttgcttcattttggtcttagggacttcagctctgatgcttccctaaaacaggcactctatttaggtggactgatttggtttccttgatctctgagtgatgcagttgatgtgagagagggaagggacgccatccggagggacctggacaagctttagaagtgggcccacatgaacctaatgaggtctagcaaggccaagtgca

SEQ ID NO: 41364 - DNA, 600 bp, Chicken  19866894277006_3
tgtacctttgccactcttcttctcttttgcttcattttggtcttagggacttcagctctgatgcttccctaaaacaggcactctatttaggtggactgatttggtttccttgatctctgagtgatgcagttgatgtgagagagggaagggacgccatccggagggacctggacaagctttagaagtgggcccacatgaacctaatgaggtctagcaaggccaagtgcaagttgttgcacctgggttggggcagtcccagatatgagtacagactgggagaagaatgctctgagatcagcyctgtggagaaggacctgggrgtcctgttggacaaaaagctgcacatgagccagcagtgtgcgcttgctgcctggaaggccaactgctcctgggctgcattaaaagaggggtggcagcagggagagggagggattgtccccctctgctctgccctcgtgagactccatctggagtactgcatccaggcctgggactcctggcacaagaaagacatggagctgttggaggagggccgtgaagatgctcaggggctggaacacctctgctgtcaagaaaggttgagagagctgagcttgctca

SEQ ID NO: 41365 - DNA, 600 bp, Chicken  19866894277006_4
tctcttttgcttcattttggtcttagggacttcagctctgatgcttccctaaaacaggcactctatttaggtggactgatttggtttccttgatctctgagtgatgcagttgatgtgagagagggaagggacgccatccggagggacctggacaagctttagaagtgggcccacatgaacctaatgaggtctagcaaggccaagtgcaagttgttgcacctgggttggggcagtcccagatatgagtacagactgggagaagaatgctctgagatcagcyctgtggagaaggacctgggrgtcctgttggacaaaaagctgcacatgagccagcagtgtgcgcttgctgcctggaaggccaactgctcctgggctgcattaaaagaggggtggcagcagggagagggagggattgtccccctctgctctgccctcgtgagactccatctggagtactgcatccaggcctgggactcctggcacaagaaagacatggagctgttggaggagggccgtgaagatgctcaggggctggaacacctctgctgtcaagaaaggttgagagagctgagcttgctcagcctggagaagagaaggttc

SEQ ID NO: 41366 - DNA, 423 bp, Chicken  19866894277007_1
ctatgggatgttgctaaatattcttctgtcaaataaagaaggaggctgtgtcaccacacacctcgccagtaggatccaacatggccctcactttaaggcactgaaagcagcctgcttagactttgagtttatttctgtggaatggagggtgactgatacacttcctccccaaccgaaacctgtgtaccaaatgccatgtggaaaggtgagatgccagtaaaacatagaatttaattaggaatcattcatgaactgtgggaagagaaggctgagtcacacatttccacctttacacccaaygatcaacaaaatctcctgtgtgatgtaggagcctggccctcggtattgctctctttgccttgacatggaacagagatgcaagcctactaactgctgtactgagctaaacctttcttacttaca

SEQ ID NO: 41367 - DNA, 599 bp, Chicken  19866894277011_1
  misc_feature (1)..(84): n is any nucleotide
nnnnnnnnnnnnnnnnnnnnnnnnnnnnnnnnnnnnnnnnnnnnnnnnnnnnnnnnnnnnnnnnnnnnnnnnnnnnnnnnnnnntttagggatttttgagtatatttctaagaaaaatggaatatctgcactacttgcctctagatatgtttaaacatgatttaatatttaataaatatattatataaaatgtgtatgtatattgatgcaagtgtaaattatttactttttgaaaatagcagttgtgattccttatatatatatgtatatctatatcttttttttttctttttctgggaraaggcttgcaaaaatagtcaaatatcattaaacatttgtaagaatgtacagagtttttacaagtattagccttggttattaataaaaaagattttttctaacataatwcgttttcaaatggaatcactttatgtatattaagtacagaaagcattctggtgaaccgaattgaattaataatgtcatctaaaatgtttttctccaaactgtctttgaaatttcagatattacttttcctgttcctcagccaagtggcagttgcttcactctgccagggaagaggactgtaaagtatctgg

SEQ ID NO: 41368 - DNA, 600 bp, Chicken  19866894277011_2
taagaaaaatggaatatctgcactacttgcctctagatatgtttaaacatgatttaatatttaataaatatattatataaaatgtgtatgtatattgatgcaagtgtaaattatttactttttgaaaatagcagttgtgattccttatatatatatgtatatctatatcttttttttttctttttctgggaraaggcttgcaaaaatagtcaaatatcattaaacatttgtaagaatgtacagagtttttacaagtattagccttggttattaataaaaaagattttttctaacataatwcgttttcaaatggaatcactttatgtatattaagtacagaaagcattctggtgaaccgaattgaattaataatgtcatctaaaatgtttttctccaaactgtctttgaaatttcagatattacttttcctgttcctcagccaagtggcagttgcttcactctgccagggaagaggactgtaaagtatctggctacaggtagaagcattcactcacctactctgacatttaccattatttacattagattttcatttctttgctttcagtatatgattagcatcatataatgggtacccca

SEQ ID NO: 41369 - DNA, 600 bp, Chicken  19866894277012_1
tgcagtctgtgatacaaagggtgttctgctgcaattaatgggttttatatttaatacagctttggggaaattctccccctttggagcatttctggagcttataataatgtatcagtgcagaaagaagatggtaattattaatctgtgaaaatgatgtgttccttcatgcacacactggggagttgggatgttaggtttcaatatttgttttgggaaaagcaaagtgctgaggctgcagcatttggtgctggctgcagatctctgtggggcagctgaggctctgaccgggctgttggagawgttatctgctgcattcttactgttcatttaatttacaaggtaacttatcaatagagagggctacagtgagtaaacaaatcatgcttttccctattcctgcttactgtccagcttgcccgaactgctacttgtacttgatgcccgtgtagctgctgtagcttggaatcattcagagctgcagtgactggaaatcatgggtgagaaatgcatcttctacgcctgcttttcactgcttggttttgtacacaaactaaagtcagcaaatgctgaagttcttggtcaataagctatagacggtga

SEQ ID NO: 41370 - DNA, 600 bp, Chicken  19866894277014_1
tccagtttgtttcacagacttttggagttctgctcatattgctacttttaatgaagaaatcacttgttgatgggtgtttgaatacacaaaatcccgcttaggctgtttgtgcacatgtgctgatgaatgtatgcacactaggagccagtgcaaaacacagctgttaactctgaaaaattgaattgtttgtaaagtttattctgtttgtggtattaaattctggtatctctccaaagaataaccacagtgctcagactttttgacattttttgctactttatttattagctcagggcatgyttatattcagagctgtactactgaatcttaaatcaagcaattctcacataaatgaggtttgttgagtgcccactgtactacaggtgtccactcaaagatttgctctgctttagttcagttttaaaaaatcactgttgagccagtataacttgaaagaaaggttgagtataagttccccaacctccttaattgggcaatgctgagaacaggggaagagactttttttttttataagtaatgctgacagacctgtagtcacataaagcaagctgtaggctaaaagaattagcaagcttgtgc

SEQ ID NO: 41371 - DNA, 599 bp, Chicken  19866894277016_1
  misc_feature (1)..(168): n is any nucleotide
nnnnnnnnnnnnnnnnnnnnnnnnnnnnnnnnnnnnnnnnnnnnnnnnnnnnnnnnnnnnnnnnnnnnnnnnnnnnnnnnnnnnnnnnnnnnnnnnnnnnnnnnnnnnnnnnnnnnnnnnnnnnnnnnnnnnnnnnnnnnnnnnnnnnnnnnnnnnnnnnnnnnnnnnttactgtgttctcttaaatttttcagcctttagatgatcaaaccaattcttcacactttaatggtagaataaatcagaatttactgtactgcaagggtaaacagttaggttcagcatgtagtatttcagackctgacattcacacattggcacacagtccccaaaaaccagggacattccttgtgtatttaggcacaacagggactttccatactattatcctatgtatgcagtgtagatgatgatggcaagccataccagaaaccaagcttcctgtctgcccactcctcaatcactgtatcatacagctggaggcactgaacatcccctgccacatgatcttatggtacttcctctttgctcttgaagacacctaaaaaacctgacatagagaaatgcaggagaatcaagtcaacttggttctccacagc

SEQ ID NO: 41372 - DNA, 600 bp, Chicken  19866894277019_1
ttggaaggagcctgataggtctgataatccgtttccagctatttgtagctgattgtttactacagccctgagaacagcctctccactcattattacagagaacttctacaagctgccagggaagaacagagcagagccaaagcaacgcttttattctgtttgtcagtaaatgactccccactcaccttatcttttggcagcacactaagaaatcacctgaactgtctgagtacatatttggcattcagaattgacaggaactgatagaaaagcttttctgggatttgttctcaatccacratcctctctgcaggaaactagaggtgagcagactcttccctcccacaagccacgtgaatggaaatgctccatttctgtatgctcctttactaagacaaaaatcacttgtgtgggggtccgggtactttctgcctattctgtagggtttatatctatctagatgactaaatgacttgtcactgatcagggtgatatagaacttggctccatgggtgcggcaggagtgctgctctggcagtagacaacagctggctgcagaggcagcccccaaaatagtgcaagtctctggctggataagct

SEQ ID NO: 41373 - DNA, 600 bp, Chicken  19866894277022_1
acgaagtgtagggagctttctgctcttttttcatttgtccctcttccgtccacatcctgactcatatatgacaatgtcagacattttctttaatactgaaaactcctttacaaagatgctaatgcctcaaaatgaacacacaatcttctctgtaggatttcttttcaagtatcaattgtaattaagaacaaaacagtagactggtgaacgagaattcaattttgaaaaagtatttctggacttttgctctatacaggagcaaaagtaagactttggaaagcctgggtgaggaggaagagrggcaaacatatggrygggatttggaaaacgggtttaaattttaccttctccrattcaaaataagcaccttcagcaatggtttttctacatcctactggaccacctggaccagtcacaagacatatgaggtcaggaaacattgtctccttaagcataaatcctgctctttacagatgaacaactgtgatcaaacattcactgaaatcatccatgtctgtatttgttaacatatgaccatccatcagcaatgacgctcatctccaacaatcaattcaatcaatttttggccagcactagcag

SEQ ID NO: 41374 - DNA, 600 bp, Chicken  19866894277022_2
gctttctgctcttttttcatttgtccctcttccgtccacatcctgactcatatatgacaatgtcagacattttctttaatactgaaaactcctttacaaagatgctaatgcctcaaaatgaacacacaatcttctctgtaggatttcttttcaagtatcaattgtaattaagaacaaaacagtagactggtgaacgagaattcaattttgaaaaagtatttctggacttttgctctatacaggagcaaaagtaagactttggaaagcctgggtgaggaggaagagrggcaaacatatggrygggatttggaaaacgggtttaaattttaccttctccrattcaaaataagcaccttcagcaatggtttttctacatcctactggaccacctggaccagtcacaagacatatgaggtcaggaaacattgtctccttaagcataaatcctgctctttacagatgaacaactgtgatcaaacattcactgaaatcatccatgtctgtatttgttaacatatgaccatccatcagcaatgacgctcatctccaacaatcaattcaatcaatttttggccagcactagcagaaaaatctcaaata

SEQ ID NO: 41375 - DNA, 600 bp, Chicken  19866894277022_3
ctttctgctcttttttcatttgtccctcttccgtccacatcctgactcatatatgacaatgtcagacattttctttaatactgaaaactcctttacaaagatgctaatgcctcaaaatgaacacacaatcttctctgtaggatttcttttcaagtatcaattgtaattaagaacaaaacagtagactggtgaacgagaattcaattttgaaaaagtatttctggacttttgctctatacaggagcaaaagtaagactttggaaagcctgggtgaggaggaagagrggcaaacatatggrygggatttggaaaacgggtttaaattttaccttctccrattcaaaataagcaccttcagcaatggtttttctacatcctactggaccacctggaccagtcacaagacatatgaggtcaggaaacattgtctccttaagcataaatcctgctctttacagatgaacaactgtgatcaaacattcactgaaatcatccatgtctgtatttgttaacatatgaccatccatcagcaatgacgctcatctccaacaatcaattcaatcaatttttggccagcactagcagaaaaatctcaaatat

SEQ ID NO: 41376 - DNA, 600 bp, Chicken  19866894277022_4
catcctgactcatatatgacaatgtcagacattttctttaatactgaaaactcctttacaaagatgctaatgcctcaaaatgaacacacaatcttctctgtaggatttcttttcaagtatcaattgtaattaagaacaaaacagtagactggtgaacgagaattcaattttgaaaaagtatttctggacttttgctctatacaggagcaaaagtaagactttggaaagcctgggtgaggaggaagagrggcaaacatatggrygggatttggaaaacgggtttaaattttaccttctccrattcaaaataagcaccttcagcaatggtttttctacatcctactggaccacctggaccagtcacaagacatatgaggtcaggaaacattgtctccttaagcataaatcctgctctttacagatgaacaactgtgatcaaacattcactgaaatcatccatgtctgtatttgttaacatatgaccatccatcagcaatgacgctcatctccaacaatcaattcaatcaatttttggccagcactagcagaaaaatctcaaatataatttattatttgctagcataaacaccaggtaagcat

SEQ ID NO: 41377 - DNA, 600 bp, Chicken  19866894277029_1
tggaaatcccacacctgcaaaaccgtggcaacactgtcagtaagtgacctacacaaagtttaatagaaaaattttactgaatatcctctgtttaatgtaaacaaggcaggaggcaaaacaaggagcatatatttgatatagttacacgattttacagggcacagaactactgaggattatggtttgaaaacccatggatgatgcacaataccaggtcacccccaggccgagcacatcacttagcattgagacagcgagttacaaaaaaacatcacctgtgaattcacacagcagcttatrggggacattaccatgcattcacaaagccattccgtgatgatagtgccctgtaaaaccatgtgcaacaatctttacactaatcgtagtgtaagcaagctcgggattctggttctcatatatatagaatctatgtatatatatacataggtgatgtacaaccagactcaagctgtgtatcaaatcacagcttttatattgcacagacaaatacatagtaagaacgttacacagacaggatctgaataccaggaatattacagccatatgggagaacgactaaggacaaacttgttctactgg

SEQ ID NO: 41378 - DNA, 599 bp, Chicken  19866894277030_1
  misc_feature (1)..(100): n is any nucleotide
nnnnnnnnnnnnnnnnnnnnnnnnnnnnnnnnnnnnnnnnnnnnnnnnnnnnnnnnnnnnnnnnnnnnnnnnnnnnnnnnnnnnnnnnnnnnnnnnnnnntttaggcttatgctgtacattgagattcattatacaatcttttccccctaaattaatacaaaaatagtaaaaataggttaaaaaagcccaaatgaaaacccccttgacatcttgcaagccatttatgtgacacacagattaagacttcttggagcttatataacctagaattatttatactgactttccttttttttttwattttatttttccccccccagaactggaatagtgatgacctgcagaataccagtggctgccccaggagatgctgagctgctatcccccaggcagggagctgcataggggccacctctgcagaaaccactgccccaacctgtgcacgctgagcaggaacacattccagatccccttctgggtccaagcctttgccatgtcttaaaaaaaagaacccccagatttttctcttgcactttcctggcagaggatgggattcacagatgcccatccctgccaaagtttggaactaaatctcccc

SEQ ID NO: 41379 - DNA, 599 bp, Chicken  19866894277038_1
  misc_feature (1)..(34): n is any nucleotide
nnnnnnnnnnnnnnnnnnnnnnnnnnnnnnnnnntgatggagatgtaggtgtccctgttattgaagagccattggaccgatggccttccgggtcccttccaactcaaatgattctatgagtctacgagatgcaatggattttcctggagcctatgcaagagcctgcaagagcagatttaaatgcttcattaatggtccgtgaggtttggatgccttaacaaatgcaagtgaaagacctggtataatgacaaatttgggggccatttacaaagcaccagcaccttggcagtgtgttggggrctaacccaggtaggcagccccaggctggatgggggatataaccagaaaggaaaaaggaagacgcgtacgttgagacaaagacagttgaataagtgaagtaaatgtggtgcacatgagtaaagcaaattaaggaattcattcaccacttctcgtcagcaggtgcacgttcaaccattttcaggaaagcagggttccattgtgtgtaatagttattaagacaaatgccataatcctgaatgtggcccttttctctttcttttgctggcttttaacgccaagtacaacatagtatgatatga

SEQ ID NO: 41380 - DNA, 599 bp, Chicken  19866894277045_1
  misc_feature (1)..(52): n is any nucleotide
nnnnnnnnnnnnnnnnnnnnnnnnnnnnnnnnnnnnnnnnnnnnnnnnnnnnttttctagctgtctttattgctacgttatgttaccaacgttttctctcacacatgtcactgtaggcaaatgacttgtcagcttgtcacagtgaatcagaaaactccttcctgtgtccctcaccttcagtgttgtattatgatagcaacacacagtccaaatattttgtgaccctttaagtaccagtatcactgcaaacccaaaacccaagggctaattccccaaaagaactcagtctcatgggatgcmttttattagtgcttcagtccatyagctttctgctcattttcagcagtcttcyccttcatctaatacttaacccatggttgccctatgtccctctgcacctcactgataggaagccctaccaatatcttgttgatagcattaggtagccctgaggctgtccgaggttaccttgactccctctctccttggactgacttcatgtcaaccactgcrgacaggtcctgctgctggctgcgtctcttgctgggcctgaccccgagctccccagctggccrtctggtgggcagggtgcaggctga

SEQ ID NO: 41381 - DNA, 599 bp, Chicken  19866894277045_2
  misc_feature (1)..(29): n is any nucleotide
nnnnnnnnnnnnnnnnnnnnnnnnnnnnnttttctagctgtctttattgctacgttatgttaccaacgttttctctcacacatgtcactgtaggcaaatgacttgtcagcttgtcacagtgaatcagaaaactccttcctgtgtccctcaccttcagtgttgtattatgatagcaacacacagtccaaatattttgtgaccctttaagtaccagtatcactgcaaacccaaaacccaagggctaattccccaaaagaactcagtctcatgggatgcmttttattagtgcttcagtccatyagctttctgctcattttcagcagtcttcyccttcatctaatacttaacccatggttgccctatgtccctctgcacctcactgataggaagccctaccaatatcttgttgatagcattaggtagccctgaggctgtccgaggttaccttgactccctctctccttggactgacttcatgtcaaccactgcrgacaggtcctgctgctggctgcgtctcttgctgggcctgaccccgagctccccagctggccrtctggtgggcagggtgcaggctgatggggaargctgcactgcatttc

SEQ ID NO: 41382 - DNA, 600 bp, Chicken  19866894277045_3
ttttctagctgtctttattgctacgttatgttaccaacgttttctctcacacatgtcactgtaggcaaatgacttgtcagcttgtcacagtgaatcagaaaactccttcctgtgtccctcaccttcagtgttgtattatgatagcaacacacagtccaaatattttgtgaccctttaagtaccagtatcactgcaaacccaaaacccaagggctaattccccaaaagaactcagtctcatgggatgcmttttattagtgcttcagtccatyagctttctgctcattttcagcagtcttcyccttcatctaatacttaacccatggttgccctatgtccctctgcacctcactgataggaagccctaccaatatcttgttgatagcattaggtagccctgaggctgtccgaggttaccttgactccctctctccttggactgacttcatgtcaaccactgcrgacaggtcctgctgctggctgcgtctcttgctgggcctgaccccgagctccccagctggccrtctggtgggcagggtgcaggctgatggggaargctgcactgcatttccttggttacagttggcaccatgttctctct

SEQ ID NO: 41383 - DNA, 600 bp, Chicken  19866894277045_4
attttgtgaccctttaagtaccagtatcactgcaaacccaaaacccaagggctaattccccaaaagaactcagtctcatgggatgcmttttattagtgcttcagtccatyagctttctgctcattttcagcagtcttcyccttcatctaatacttaacccatggttgccctatgtccctctgcacctcactgataggaagccctaccaatatcttgttgatagcattaggtagccctgaggctgtccgaggttaccttgactccctctctccttggactgacttcatgtcaaccactgcrgacaggtcctgctgctggctgcgtctcttgctgggcctgaccccgagctccccagctggccrtctggtgggcagggtgcaggctgatggggaargctgcactgcatttccttggttacagttggcaccatgttctctctgccatctccaacaccttcctaaatgacttgcaaggcaaagcattgagccttcttgctgcctgaagtaggctgctctgtcagctcagtcctggcaggatggcttggtcagatgggcattttcactgtgattctgtgacaaatagagaccctgaggactgaga

SEQ ID NO: 41384 - DNA, 576 bp, Chicken  19866894277045_5
aaagaactcagtctcatgggatgcmttttattagtgcttcagtccatyagctttctgctcattttcagcagtcttcyccttcatctaatacttaacccatggttgccctatgtccctctgcacctcactgataggaagccctaccaatatcttgttgatagcattaggtagccctgaggctgtccgaggttaccttgactccctctctccttggactgacttcatgtcaaccactgcrgacaggtcctgctgctggctgcgtctcttgctgggcctgaccccgagctccccagctggccrtctggtgggcagggtgcaggctgatggggaargctgcactgcatttccttggttacagttggcaccatgttctctctgccatctccaacaccttcctaaatgacttgcaaggcaaagcattgagccttcttgctgcctgaagtaggctgctctgtcagctcagtcctggcaggatggcttggtcagatgggcattttcactgtgattctgtgacaaatagagaccctgaggactgagatcaaaggttaaatggctttctgctgccatctcttgata

SEQ ID NO: 41385 - DNA, 544 bp, Chicken  19866894277045_6
agtgcttcagtccatyagctttctgctcattttcagcagtcttcyccttcatctaatacttaacccatggttgccctatgtccctctgcacctcactgataggaagccctaccaatatcttgttgatagcattaggtagccctgaggctgtccgaggttaccttgactccctctctccttggactgacttcatgtcaaccactgcrgacaggtcctgctgctggctgcgtctcttgctgggcctgaccccgagctccccagctggccrtctggtgggcagggtgcaggctgatggggaargctgcactgcatttccttggttacagttggcaccatgttctctctgccatctccaacaccttcctaaatgacttgcaaggcaaagcattgagccttcttgctgcctgaagtaggctgctctgtcagctcagtcctggcaggatggcttggtcagatgggcattttcactgtgattctgtgacaaatagagaccctgaggactgagatcaaaggttaaatggctttctgctgccatctcttgata

SEQ ID NO: 41386 - DNA, 600 bp, Chicken  19866894277050_1
tattgcaggggaattggacttgatgatctttaggggtctcttccagctgaaacgattctatgattctatgttgtggtgattcaaagataacaggaaacaaagaaggcagcagcaagttctacagggctaaggtcagggctggaagcataagggatgggagaaacacattcaagatcaaaaatttttaatcaggcaaagatctctgtgaagagcagttcattcattattgcaataatgggcacacaccccctactgacaagggagaaattgtgcaactagtcagataatccatcttgttakacaccctgggtccaaagcaagtaatgcctctcctggcactcatgggttgagcgtctcaggctcacartcttccgatgctgttgataccttacatttccatacaatgtctgttaccaacccattgtctttgggtatgttctgtacttcttatggcgataggaggacaatattttcaaaaaatggcacasttgttctgtcctgtaccggactctcccctaccctatataattaccttacctagtgcctgtgccaattctacctaggtcagaacgccacagtctcaactttactctgttcacc

SEQ ID NO: 41387 - DNA, 600 bp, Chicken  19866894277050_2
atgttgtggtgattcaaagataacaggaaacaaagaaggcagcagcaagttctacagggctaaggtcagggctggaagcataagggatgggagaaacacattcaagatcaaaaatttttaatcaggcaaagatctctgtgaagagcagttcattcattattgcaataatgggcacacaccccctactgacaagggagaaattgtgcaactagtcagataatccatcttgttakacaccctgggtccaaagcaagtaatgcctctcctggcactcatgggttgagcgtctcaggctcacartcttccgatgctgttgataccttacatttccatacaatgtctgttaccaacccattgtctttgggtatgttctgtacttcttatggcgataggaggacaatattttcaaaaaatggcacasttgttctgtcctgtaccggactctcccctaccctatataattaccttacctagtgcctgtgccaattctacctaggtcagaacgccacagtctcaactttactctgttcacctrttactctgctctctgttactctgcagctttctttgtggaaaaacaacttatcctactctacatac

SEQ ID NO: 41388 - DNA, 600 bp, Chicken  19866894277050_3
tcaggcaaagatctctgtgaagagcagttcattcattattgcaataatgggcacacaccccctactgacaagggagaaattgtgcaactagtcagataatccatcttgttakacaccctgggtccaaagcaagtaatgcctctcctggcactcatgggttgagcgtctcaggctcacartcttccgatgctgttgataccttacatttccatacaatgtctgttaccaacccattgtctttgggtatgttctgtacttcttatggcgataggaggacaatattttcaaaaaatggcacasttgttctgtcctgtaccggactctcccctaccctatataattaccttacctagtgcctgtgccaattctacctaggtcagaacgccacagtctcaactttactctgttcacctrttactctgctctctgttactctgcagctttctttgtggaaaaacaacttatcctactctacatacagaaataccagaaatttccactgcaaaaacacagtctacctctcacagttgtaactccctgcacacctttggaataactcgtaacctcactacacacctcactgtttataggatagaaaac

SEQ ID NO: 41389 - DNA, 600 bp, Chicken  19866894277050_4
accctgggtccaaagcaagtaatgcctctcctggcactcatgggttgagcgtctcaggctcacartcttccgatgctgttgataccttacatttccatacaatgtctgttaccaacccattgtctttgggtatgttctgtacttcttatggcgataggaggacaatattttcaaaaaatggcacasttgttctgtcctgtaccggactctcccctaccctatataattaccttacctagtgcctgtgccaattctacctaggtcagaacgccacagtctcaactttactctgttcacctrttactctgctctctgttactctgcagctttctttgtggaaaaacaacttatcctactctacatacagaaataccagaaatttccactgcaaaaacacagtctacctctcacagttgtaactccctgcacacctttggaataactcgtaacctcactacacacctcactgtttataggatagaaaacctccaaagcctctccttcagaagaaggttatgaggacaagctagctaaccgtatgtttgcaaaaatgcaaaccccaaattgtaatttgcaaataatctggggcaggattccctg

SEQ ID NO: 41390 - DNA, 600 bp, Chicken  19866894277053_1
gcttatgtgtcacctaattatctaatcgtgccttgctgctgttctaggttggatccggtacgcagaaagggttcttaccaaccttgtgactccccacatttgcactgcgaagtctccacagcagatcatgggctctctggtaaagggctactttgccaggcagcaggttagtaattctgctttgtttttacctttatactattgaaaagatgggctaaaatgctttaatacagaaatgtagatcttggtgttttctaaagtgctatagaatcttctgaattttctttcacttggagaatwaatgctgctctactgcwgtgcaagggtccacgatacaaagaatgtacaaagactcttatttaatgtgytgcagtgcgagctggcagtaatccttgtgctgccactggaatgtggatttagatattatggataaattaaatctggggtagataaagagatccttgtaaaatgctgcctgtgtagttctacagcagttgaaatgggagtagagcagagcactgtagaaattgctgggttgtccatgatcagcgtaaagcactgtgtcctagaaaataatccttttatctttccaaattttta

SEQ ID NO: 41391 - DNA, 600 bp, Chicken  19866894277053_2
ttatctaatcgtgccttgctgctgttctaggttggatccggtacgcagaaagggttcttaccaaccttgtgactccccacatttgcactgcgaagtctccacagcagatcatgggctctctggtaaagggctactttgccaggcagcaggttagtaattctgctttgtttttacctttatactattgaaaagatgggctaaaatgctttaatacagaaatgtagatcttggtgttttctaaagtgctatagaatcttctgaattttctttcacttggagaatwaatgctgctctactgcwgtgcaagggtccacgatacaaagaatgtacaaagactcttatttaatgtgytgcagtgcgagctggcagtaatccttgtgctgccactggaatgtggatttagatattatggataaattaaatctggggtagataaagagatccttgtaaaatgctgcctgtgtagttctacagcagttgaaatgggagtagagcagagcactgtagaaattgctgggttgtccatgatcagcgtaaagcactgtgtcctagaaaataatccttttatctttccaaatttttatgttggggaaaaaaaag

SEQ ID NO: 41392 - DNA, 600 bp, Chicken  19866894277053_3
gggttcttaccaaccttgtgactccccacatttgcactgcgaagtctccacagcagatcatgggctctctggtaaagggctactttgccaggcagcaggttagtaattctgctttgtttttacctttatactattgaaaagatgggctaaaatgctttaatacagaaatgtagatcttggtgttttctaaagtgctatagaatcttctgaattttctttcacttggagaatwaatgctgctctactgcwgtgcaagggtccacgatacaaagaatgtacaaagactcttatttaatgtgytgcagtgcgagctggcagtaatccttgtgctgccactggaatgtggatttagatattatggataaattaaatctggggtagataaagagatccttgtaaaatgctgcctgtgtagttctacagcagttgaaatgggagtagagcagagcactgtagaaattgctgggttgtccatgatcagcgtaaagcactgtgtcctagaaaataatccttttatctttccaaatttttatgttggggaaaaaaaagggttgctgctctttttacatattgtacacttacccatatttcaggttatat

SEQ ID NO: 41393 - DNA, 600 bp, Chicken  19866894277053_4
gtgcaagggtccacgatacaaagaatgtacaaagactcttatttaatgtgytgcagtgcgagctggcagtaatccttgtgctgccactggaatgtggatttagatattatggataaattaaatctggggtagataaagagatccttgtaaaatgctgcctgtgtagttctacagcagttgaaatgggagtagagcagagcactgtagaaattgctgggttgtccatgatcagcgtaaagcactgtgtcctagaaaataatccttttatctttccaaatttttatgttggggaaaaaaaayggttgctgctctttttacatattgtacacttacccatatttcaggttatatagaagagtattgctatttttgcatrcagaaacgtcagtggacttgaatatggaaggraatgagtgacagagctagaaaatagaactctgaaacagaaatcttaatttgcactcatctttaatgcagtcaaaagctacaaaagctgcatgttatgtggtgtgaaggaatargtggaagtttcagacagaagactgacttgttgctgacgctttcaacttctggcaagccactcaatctctgtgctgcagc

SEQ ID NO: 41394 - DNA, 600 bp, Chicken  19866894277053_5
tgtgctgccactggaatgtggatttagatattatggataaattaaatctggggtagataaagagatccttgtaaaatgctgcctgtgtagttctacagcagttgaaatgggagtagagcagagcactgtagaaattgctgggttgtccatgatcagcgtaaagcactgtgtcctagaaaataatccttttatctttccaaatttttatgttggggaaaaaaaagggttgctgctctttttacatattgtacacttacccatatttcaggttatatagaagagtattgctatttttgcatrcagaaacgtcagtggacttgaatatggaaggraatgagtgacagagctagaaaatagaactctgaaacagaaatcttaatttgcactcatctttaatgcagtcaaaagctacaaaagctgcatgttatgtggtgtgaaggaatargtggaagtttcagacagaagactgacttgttgctgacgctttcaacttctggcaagccactcaatctctgtgctgcagccctcaaacttattgctggggattgatttctaatattagttgtacgttatttttagcttgtcatccttcaagctgtc

SEQ ID NO: 41395 - DNA, 600 bp, Chicken  19866894277053_6
atggataaattaaatctggggtagataaagagatccttgtaaaatgctgcctgtgtagttctacagcagttgaaatgggagtagagcagagcactgtagaaattgctgggttgtccatgatcagcgtaaagcactgtgtcctagaaaataatccttttatctttccaaatttttatgttggggaaaaaaaagggttgctgctctttttacatattgtacacttacccatatttcaggttatatagaagagtattgctatttttgcatrcagaaacgtcagtggacttgaatatggaaggraatgagtgacagagctagaaaatagaactctgaaacagaaatcttaatttgcactcatctttaatgcagtcaaaagctacaaaagctgcatgttatgtggtgtgaaggaatargtggaagtttcagacagaagactgacttgttgctgacgctttcaacttctggcaagccactcaatctctgtgctgcagccctcaaacttattgctggggattgatttctaatattagttgtacgttatttttagcttgtcatccttcaagctgtcttttgttcttcatgcaattaacacacgctctc

SEQ ID NO: 41396 - DNA, 600 bp, Chicken  19866894277053_7
tccatgatcagcgtaaagcactgtgtcctagaaaataatccttttatctttccaaatttttatgttggggaaaaaaaagggttgctgctctttttacatattgtacacttacccatatttcaggttatatagaagagtattgctatttttgcatrcagaaacgtcagtggacttgaatatggaaggraatgagtgacagagctagaaaatagaactctgaaacagaaatcttaatttgcactcatctttaatgcagtcaaaagctacaaaagctgcatgttatgtggtgtgaaggaatargtggaagtttcagacagaagactgacttgttgctgacgctttcaacttctggcaagccactcaatctctgtgctgcagccctcaaacttattgctggggattgatttctaatattagttgtacgttatttttagcttgtcatccttcaagctgtcttttgttcttcatgcaattaacacacgctctcttttctgcagaatttgtctccagaaaaaatcttccatgtggttgtggcgccttgttacgacaaaaaactggaagccttgagggaggacttttacactgccttgtataactccc

SEQ ID NO: 41397 - DNA, 600 bp, Chicken  19866894277060_1
gttcctttattagaaatacactcaaaccaactaatgcactgtgctttttgcagatagaatacttcagagaacactggagcaggtgtatggaggggctattaatttaacgtaacacttgttaattttgtgattgcttttcaagatttgtcaagaggcacaagctcatattgataaagattatttaaataaagactgagaattcttcacatgtaggagcaaaagacaaagatcttaatacattagtgcctgcaaccaccaggaccttcaatgagttgttttggagtaaaaaattttcacatygtatgccacagaaaagcaatgatgtgcccaacaccacaagtgtcctcagcactgcactgccacagctcattctaaagccccagcagtcaacagcaagtaagcttcattgcacacttactcttttggtcaattcggagatcgtacagaggtgttctataaatgtccacgctggaaagtgcacatcgggagaggggcacatgatgggaaggcccaagaatgaaaatttttcggctacaacaatcaacaaaaaaaaaagcccagaatttagacaacagcaatggtacagagagttggtttaga

SEQ ID NO: 41398 - DNA, 600 bp, Chicken  19866894277064_1
aaagccatgcgtgtccttacttaagatgtgtttattaagtttatgatatttcctcactgaacgaatggtatgacgtatcatattgtagtgactttgtgtttatgtaattgctgtcaaaaaaaaaacaaacaaaaaaacccaaaacaacaatcaaagaactttaaggggaatttagaagattaaaatgcaagttgtaaaaagaactaaggcaaaagcaaaatatctaatgaggaggctgaataacctaagtaaacttaaaacaggaataaaaatgaagaaaaacaggaaggatctcttatytgtgagggaataggcagacactgacttgctaactgtcttcccggagagctaataggggttcagaaggctttttgatgtaatttagggagggtgatctcaattaaccccacccatctctgatttttgttttaaatatcacacctgtatcaatgtttgcttgggtgaattggaagccaagttgacttgccagctccttgttgagcaatacgaaacactcaacgtgtgtggagtgacctccgagggccctgagctgtgctaaaacaaacccagccacgcattcctgtctgagctaaggaccag

SEQ ID NO: 41399 - DNA, 599 bp, Chicken  19866894277065_1
  misc_feature (1)..(125): n is any nucleotide
nnnnnnnnnnnnnnnnnnnnnnnnnnnnnnnnnnnnnnnnnnnnnnnnnnnnnnnnnnnnnnnnnnnnnnnnnnnnnnnnnnnnnnnnnnnnnnnnnnnnnnnnnnnnnnnnnnnnnnnnnnnnntaagcatggaggggggccctgaaaatagggatcccccaccgtaggggcaaaagagtcctggctccactgtctccttgtccctttgcaggagatgcagccactgcggctcttcccgcagcccagccacgccacccgcaccagccctgtccgccatggcaagcgggggctcggcgcwgctgaggagggaagggagagaccaacggagctgagtaaggttctggactccccctgcccccaccctacagcaggaaggggctcacagccgtctgtccctgcagttgagccgctgaaagccggagttctggatgcccctgcaccaccactgctgagccgctgcatctccatgccagtggatatctctggtaggtggggggcttggaggaaagagagggttccttatccctgtgcatcgccccccagggtactgtgtcacttgctgagggttgtgcatcctcccttgggtcacacatttcc

SEQ ID NO: 41400 - DNA, 600 bp, Chicken  19866894277065_2
gtaaggttctggactccccctgcccccaccctacagcaggaaggggctcacagccgtctgtccctgcagttgagccgctgaaagccggagttctggatgcccctgcaccaccactgctgagccgctgcatctccatgccagtggatatctctggtaggtggggggcttggaggaaagagagggttccttatccctgtgcatcgccccccagggtactgtgtcacttgctgagggttgtgcatcctcccttgggtcacacatttccccatgggaccgtgcatcctccatagggtcacacayccccccatgggaccacgcatcctccattgggtcatatatccctccgagggcttgtgcatccctctctggggctgtccgtcctccatggggtgctgtgttcccccgtggagttctccgtcccccatggagttctccatcctccatatggggttgtgcatcccctctgggtcatgcgttccccccttcctcggcctcatgcatgcctccccccagttctctcacccccatgtttgcccaccttgtgctgctggtgaccacctggtcccctccccggtggtacacaggcatccagaagggtcc

SEQ ID NO: 41401 - DNA, 600 bp, Chicken  19866894277068_1
ccctggagaataacgtgcagactcaagacagcaagtgttgatttaaatgtggatacaggaaaaagtcagtgttgtgggttgttgggttttttttttttccacttgacacacttttgagttttgattcatttttagttacaaagaatgaacatttaaatccttctccagtcccttcagtgtgatgggaaaatgctaaacccctactcaccaaactggctgcgggtttctgatgaagagcagaatgaataaagctgctctgcagaagtcatgaaaccagtgcaaagctgcagccatcaattsccatgccacsagtcatcagagatgagctcttttgaatgaagrctttgaccaaaccaatggaaagtgaagaatagtgggacaggagtatgctgcagtgccacaacttacttgcatgattgagtattgtcaagggaatttggcactacatctcatttgcttcaatccctgcaagcatacctaattgtactgtagagcaagctgtaaactggcataggacagaatagctacatttcctgatgagttcagagcggagggaattttactcaggtggtttccaaagagaaaaatgaacgtataatc

SEQ ID NO: 41402 - DNA, 600 bp, Chicken  19866894277068_2
taacgtgcagactcaagacagcaagtgttgatttaaatgtggatacaggaaaaagtcagtgttgtgggttgttgggttttttttttttccacttgacacacttttgagttttgattcatttttagttacaaagaatgaacatttaaatccttctccagtcccttcagtgtgatgggaaaatgctaaacccctactcaccaaactggctgcgggtttctgatgaagagcagaatgaataaagctgctctgcagaagtcatgaaaccagtgcaaagctgcagccatcaattsccatgccacsagtcatcagagatgagctcttttgaatgaagrctttgaccaaaccaatggaaagtgaagaatagtgggacaggagtatgctgcagtgccacaacttacttgcatgattgagtattgtcaagggaatttggcactacatctcatttgcttcaatccctgcaagcatacctaattgtactgtagagcaagctgtaaactggcataggacagaatagctacatttcctgatgagttcagagcggagggaattttactcaggtggtttccaaagagaaaaatgaacgtataatcatgccaacag

SEQ ID NO: 41403 - DNA, 600 bp, Chicken  19866894277068_3
ttaaatgtggatacaggaaaaagtcagtgttgtgggttgttgggttttttttttttccacttgacacacttttgagttttgattcatttttagttacaaagaatgaacatttaaatccttctccagtcccttcagtgtgatgggaaaatgctaaacccctactcaccaaactggctgcgggtttctgatgaagagcagaatgaataaagctgctctgcagaagtcatgaaaccagtgcaaagctgcagccatcaattsccatgccacsagtcatcagagatgagctcttttgaatgaagrctttgaccaaaccaatggaaagtgaagaatagtgggacaggagtatgctgcagtgccacaacttacttgcatgattgagtattgtcaagggaatttggcactacatctcatttgcttcaatccctgcaagcatacctaattgtactgtagagcaagctgtaaactggcataggacagaatagctacatttcctgatgagttcagagcggagggaattttactcaggtggtttccaaagagaaaaatgaacgtataatcatgccaacagcttggccctcaaatatgctgatgtgaatttag

SEQ ID NO: 41404 - DNA, 600 bp, Chicken  19866894277069_1
ggccagaaatttaacaaagctttctcatgttggcaagggtcaaagtgtaccggccagatcttacacttctgattcccatctgcatattttccaggtgatctgctggcatgacaagttctcagcacccggcaatcatttgtcattgtgctttgccagtgggatgcttcaccagggccaaacctggccaacggtgttcatgcttgggcttctgtcaactagcgcctccctttagggagtcagtgtgtcaagtttggctgtggtaagcaggccagcaaaattttgaaatgcttcactttgcaygcattgctggggcttttgacactgttaaagtgaagtgctgctgtgaaagaaatagttttgggttcagctaaagaagtatgactcctccagatagacctttagcacaagaaaggcatacaatccttttcccctaatagctcctgccttgttaaccagaaagtcacaattaggtgcttcagcatcacatgcggagcaactaaaggacaccagcatcctttcagtctttcatacagcccccaggaaagggtcagaagacttccagcagagtgagtgcattgtagccttttccttctttttcta

SEQ ID NO: 41405 - DNA, 600 bp, Chicken  19866894277084_1
gccttcaaattttatttacagcaaaactaaatgacataatggaagagctcagttaatctgaacaggctgtgatccttttgtgatgccaggtatgcaattctgagtgttttcactttcagtgatcttgttttcctcattttggtattagtcaccgtgtctcagttctgagatataagccatctgaatgtagcagggtgaaaatcctaacagttagctccctgtgtataaaatgagtactactctgtagtaattcattcggagagctctgggctttgttactaattcagaccgagccagaaygttttgagtgagccatgtatttttctgatgtaaagtgttttgataagtactacctagaaggatacaaagtaatataaatagcataattkaaaaatcagtgcaagtctatgaagactgcatgcttgtgcttcttaaacttgcactgtttgctccaatcagttttgtttgtcatacatagtggattctgttgccttatttccataattccatctaaaattgttggaaaatgagaaagaaaagttttaagctactgacagcactgtgtagaagctgcaaaacacggaaggagaaaactcatca

SEQ ID NO: 41406 - DNA, 600 bp, Chicken  19866894277084_2
gtatgcaattctgagtgttttcactttcagtgatcttgttttcctcattttggtattagtcaccgtgtctcagttctgagatataagccatctgaatgtagcagggtgaaaatcctaacagttagctccctgtgtataaaatgagtactactctgtagtaattcattcggagagctctgggctttgttactaattcagaccgagccagaaygttttgagtgagccatgtatttttctgatgtaaagtgttttgataagtactacctagaaggatacaaagtaatataaatagcataattkaaaaatcagtgcaagtctatgaagactgcatgcttgtgcttcttaaacttgcactgtttgctccaatcagttttgtttgtcatacatagtggattctgttgccttatttccataattccatctaaaattgttggaaaatgagaaagaaaagttttaagctactgacagcactgtgtagaagctgcaaaacacggaaggagaaaactcatcagggagcaaagacagtatactaactttaatcttggacacgtaccaaactacattctaatggaattttgttggctccagcacagggaaaga

SEQ ID NO: 41407 - DNA, 600 bp, Chicken  19866894277094_1
agtgcaagttctaacagctcagtggagtggaagcctttgcatttggaagtcttgtctaagtgacatagccaaacacaagaaaggacctgggttaagcagataatactaccaagaagggtatgtgtaaaagggcacaatacatagctacatgggcagcagactggttttctttgtaagttcactggtattttatataggttaatttcagtagtttatatgaggtaattatgcattaaaaacaggcatttttccggacaatattaacataatttgccttcaattaaaaaaaaaaaaaaaaawgaataaaaaaggattgcttacaaatccagcacagttgtcacagaaagtaggtcttaagtaagtggtctcctgaaagttgtgagaaaagccaagtcctaatttggaatagattgagctagccctcataaagtaagcggttatttcatccctgctaatcagaccttccctgaaaataaacaagaaaagttgtttgtgaagcatctgttttcttaaaagcatgacaattaaacataccctttcttcacagtttacaatggcaatcccttaattgaccaaaacctacagtgatatcagctattt

SEQ ID NO: 41408 - DNA, 600 bp, Chicken  19866894277094_2
tgagaaaagccaagtcctaatttggaatagattgagctagccctcataaagtaagcggttatttcatccctgctaatcagaccttccctgaaaataaacaagaaaagttgtttgtgaagcatctgttttcttaaaagcatgacaattaaacataccctttcttcacagtttacaatggcaatcccttaattgaccaaaacctacagtgatatcagctattttgtcaactgctcccaaagtttacggaagcttctctgcacattataattgcagtgtgtaaggataattgaataatctgcrtatgagatgcaacttcaaaactatttcatagttttattgatattattataggttttattgttccacgtcttaaggtgctaagaggaatgttcttaattttttcgaaaatatacatttgccaattctctgtttttgaggggcaggttcattttggaaagttattcggtggtgtacactgagtgtcattcaaaaatatttttctttattcttcttgctacagcagccactgctgtaagctcattcacaaaacatctgaaagatgcttttgtcagttatgttttcactttgctgctgaagagg

SEQ ID NO: 41409 - DNA, 600 bp, Chicken  19866894277099_1
aatagcagtgatagtacaaggaaggaaataacggcacatgttgttggcttgcttcatcctggcttaccacaccctgattaaactctgtcttcaaaagcagtcaccatcagcaaagctgtgttttgagagaggaaaatgtcattgatttttaactttccttccgaaggctcaatttctgtgttaaatatgtttttacagccaagtcttccacttgtttggaggttaagagtgtgctgtgagagacagtgctgtctccagtacacagcaaatctcagaggtattttagtacaggcaagattkataagtttctgtgtttgaactgtgcttttcattcacactggaagtcttcaataagcacastgcagacatgtccagaagtaatgttgtctatgcatgacctgagagaaaacagtaatgctgtaatcctagaaccactgtgaactagaggtaaggaatctgaaagatttcttcagataaatccttcagctccacaggaggatcagctttgccaagaaaaagggaaatgcattttgtaggagattttttgtatgcctgttgttttttgaagtttgaacaccctcttcaaatgttactcaagtc

SEQ ID NO: 41410 - DNA, 600 bp, Chicken  19866894277099_2
ggcttaccacaccctgattaaactctgtcttcaaaagcagtcaccatcagcaaagctgtgttttgagagaggaaaatgtcattgatttttaactttccttccgaaggctcaatttctgtgttaaatatgtttttacagccaagtcttccacttgtttggaggttaagagtgtgctgtgagagacagtgctgtctccagtacacagcaaatctcagaggtattttagtacaggcaagattkataagtttctgtgtttgaactgtgcttttcattcacactggaagtcttcaataagcacastgcagacatgtccagaagtaatgttgtctatgcatgacctgagagaaaacagtaatgctgtaatcctagaaccactgtgaactagaggtaaggaatctgaaagatttcttcagataaatccttcagctccacaggaggatcagctttgccaagaaaaagggaaatgcattttgtaggagattttttgtatgcctgttgttttttgaagtttgaacaccctcttcaaatgttactcaagtctaacttttagagaacattacaagataggccaaactataaagctttcatttatgtagcaag

SEQ ID NO: 41411 - DNA, 600 bp, Chicken  19866894277100_1
taacatcccattttagaagtaaagctggtgactagtcagcagtggtgttcccctgaggttgatattgaggcctgtcctattcagtatctttactgattatctggataaggggattgagtgcaccctcagtaagtctacagatgacacttcctcccagcttggtgttgatctgcctggaagtaggatgaccctacagagggatctgaactggctggattgctggactgaggccagcgggatgaagtccaacaagactaagtactgagtcctgcagtttggccacaacaaccccaggcaacrctataggctttgaggtagagtggctagaattctgtgcagaagaaatagacctggaggtattggtcgatgctcacctgagcatgagtcatcagtgtggccaagaaggccaatggtgtcctggattgtgtaagaaacagtgttgccagcaggagcagggaagtaatcatccctttgtactcagcactagtgaggctgcacctcaactgttgcattcagttgtgggctgctcgctagaggccctggagtgtgtccagagaagggcaatgaagctgacgaggtgtctggagcacaagtcttatg

SEQ ID NO: 41412 - DNA, 600 bp, Chicken  19866894277100_2
ctttgaggtagagtggctagaattctgtgcagaagaaatagacctggaggtattggtcgatgctcacctgagcatgagtcatcagtgtggccaagaaggccaatggtgtcctggattgtgtaagaaacagtgttgccagcaggagcagggaagtaatcatccctttgtactcagcactagtgaggctgcacctcaactgttgcattcagttgtgggctgctcgctagaggccctggagtgtgtccagagaagggcaatgaagctgacgaggtgtctggagcacaagtcttatgaggagcrgctgagggaactgggattgtttagtctggagaagaggaggctcaggggagacctcattgctctctacaactccctgaagggaggctgaggtgaggtggggtttggcctctccttccatttaactagcaatagggctagagggaatggcctgttttagtagtcctcacaggttttgtttacatggtgtttttattgatatgaacatcaaatagtttatttcagaattgaatgaaattttagtcgtattacctcccatcaaattttgtattcaaaatcatgtagttggtcaaacatttcagt

SEQ ID NO: 41413 - DNA, 600 bp, Chicken  19866894277111_1
tttcatggttgtggaacctgtctctaaatgtggggtagtctctgagtgtgaaagattgtggttttattttgagattattttgtgcgagtccaaacaatacagaaacttggttaacttaaataggtctgctcaatatgttgagctataaaaggtcagtgaggttcactccgattttcttcttgacttagttaaatatatatagctgtagcttaaggccatctatcttaaatagaaactcattgaaatgagattccaacaagagcagacggggataatggtggttctgctttatgggagctygttggatcccagcaggggaaattcagacttgggatttctggttaacagtaaactttgcacactgtaaatttcgtttccattcctgttcaaaaacaaaattcacatttcctctgctgcagatgaaacaaaactttcaaagcatttacaggtgggaagtaagattctgattttgagactcctgttcctaaaggacttccaattgaaggattttctaatgtaaaattttactttatggcattttttatttttgttatgtttaaaaatggcccaacatactacagactagtattttaaacaata

SEQ ID NO: 41414 - DNA, 600 bp, Chicken  19866894277115_1
ctatggtgttgcagaaatgctaagtcacggcctgaaacagtgtttgagcacctggtgggaaggcaaggccaacccaggagagctcaggtgcatgcagctgggtactttccatcccatgatagcattagatatgggttacaagaagaataagggagtgacactgaatgaacagatgtgttctgattcctgcttcatggaaaaacatagaaatctcattctattattttcttaatttttctataagacattgtcagaattcacaaggaggacaagaagccccgtttactttgagtgtcatcrtcttctccaaatgtaggacctgacctgacatgtgaagcccagtaccttgtagtattccagtgctgcagagatatcactgtaaaaataagtactttctttctccgctgccatttgtagaagataaaggaatatctaatggagcttgtcagtgacataagccaatagagatagacttggaaataaagtaagaaatataagaatttgaagacagttatgtctgagagatagatatctataatttccactgctcctttatatctttaaaagctgttatttttacttcttctagaattagtccca

SEQ ID NO: 41415 - DNA, 599 bp, Chicken  19866894277133_1
  misc_feature (1)..(95): n is any nucleotide
nnnnnnnnnnnnnnnnnnnnnnnnnnnnnnnnnnnnnnnnnnnnnnnnnnnnnnnnnnnnnnnnnnnnnnnnnnnnnnnnnnnnnnnnnnnnnnngtgtcgatttgcttgggggtaggaagccctgacagagggatctggacaggctggatagctgggctgaggccatctgtacgaagttcaacaagagtaagtggcaggtcctgcactttggtcacaataaacccaggcaatgctacaggcttgaggcagagtgactggaaagctgggtggaagaaatagatgtggggctgttggtcartrctcagctgaacatgagccagcagtgtctagctggccaagaaggccatcaacatgctggcttgtatcagaagtagtgttgccagcaggtgatcatccccctgtattcggcactgttgaggctgtaccctgagtgctgtgttcagttttgtgcacctcactactagaaagataaggaggccttggagcatctccagaaaagggcaacaaagaggtgaggcgtccagagcacaggcctyatggggagtggctgagggaactgtgatagttcagtctggcggagactcataaagacttttt

SEQ ID NO: 41416 - DNA, 599 bp, Chicken  19866894277133_2
  misc_feature (1)..(93): n is any nucleotide
nnnnnnnnnnnnnnnnnnnnnnnnnnnnnnnnnnnnnnnnnnnnnnnnnnnnnnnnnnnnnnnnnnnnnnnnnnnnnnnnnnnnnnnnnnnnngtgtcgatttgcttgggggtaggaagccctgacagagggatctggacaggctggatagctgggctgaggccatctgtacgaagttcaacaagagtaagtggcaggtcctgcactttggtcacaataaacccaggcaatgctacaggcttgaggcagagtgactggaaagctgggtggaagaaatagatgtggggctgttggtcartrctcagctgaacatgagccagcagtgtctagctggccaagaaggccatcaacatgctggcttgtatcagaagtagtgttgccagcaggtgatcatccccctgtattcggcactgttgaggctgtaccctgagtgctgtgttcagttttgtgcacctcactactagaaagataaggaggccttggagcatctccagaaaagggcaacaaagaggtgaggcgtccagagcacaggcctyatggggagtggctgagggaactgtgatagttcagtctggcggagactcataaagactttttac

SEQ ID NO: 41417 - DNA, 569 bp, Chicken  19866894277133_3
aggcttgaggcagagtgactggaaagctgggtggaagaaatagatgtggggctgttggtcartrctcagctgaacatgagccagcagtgtctagctggccaagaaggccatcaacatgctggcttgtatcagaagtagtgttgccagcaggtgatcatccccctgtattcggcactgttgaggctgtaccctgagtgctgtgttcagttttgtgcacctcactactagaaagataaggaggccttggagcatctccagaaaagggcaacaaagaggtgaggcgtccagagcacaggcctyatggggagtggctgagggaactgtgatagttcagtctggcggagactcataaagactttttacagctgcctgaaagaagtgagggttggcctcttctcccaygtaactagcgataggacaagaggggatggcctcaagttgtgccatgggaggttcaggttggtcattagcaaaaatttcttctctaaaagcgtggccaggtgctggaacaggctgcccagggaggtggtgcagtcaccatccctgaaggagttcaagaatcattaaga

SEQ ID NO: 41418 - DNA, 467 bp, Chicken  19866894277133_4
gaaggccatcaacatgctggcttgtatcagaagtagtgttgccagcaggtgatcatccccctgtattcggcactgttgaggctgtaccctgagtgctgtgttcagttttgtgcacctcactactagaaagataaggaggccttggagcatctccagaaaagggcaacaaagaggtgaggcgtccagagcacaggcctyatggggagtggctgagggaactgtgatagttcagtctggcggagactcataaagactttttacagctgcctgaaagaagtgagggttggcctcttctcccaygtaactagcgataggacaagaggggatggcctcaagttgtgccatgggaggttcaggttggtcattagcaaaaatttcttctctaaaagcgtggccaggtgctggaacaggctgcccagggaggtggtgcagtcaccatccctgaaggagttcaagaatcattaaga

SEQ ID NO: 41419 - DNA, 600 bp, Chicken  19866894277138_1
aacactgaaacaaaagggactagtgtcaagggtgtggggatgttaccgcctttattacagaggcctgtatggtgagtcagggttcgcaggatccctgcactcatatagagcatgagtctctcactggaatagccacaggtcaagcctgtcttgctttatccatctgtgcacagggatttaagcacctactaccaagcaatgaattataactggccaatttgaagaaccgtaaagatgtgaaataataggaagggacctatcttctgtgacaacagagaaatcaagacattggcagtagckccattacttgcacagtatgcactacagaacgcaccactaacgctaccagacacgcgctgtggtaacgggcacagcgagggcacagcggtggtcacttacggcactccttctcatcgctgtcatcgaagcaatctggcagcccatcacactgccaggcccccgggatacagcgcccattgctgcacatgaagtttccaggtatgttgcattcatttgtgaaattgttcccaggcagcagctggctatctgcaacaacaacgaaaatcaagtttacaccgtattcaaaaaaaaagtctctcc

SEQ ID NO: 41420 - DNA, 600 bp, Chicken  19866894277139_1
gtagttcagtctgttaggtttgctttggagaaaacaaatcactggtttttttggttcttactcctttcatggctgattggtcaatggtatgtgtatatttgcactaattcttcctacatctgccacaactcatgtgtttttcataaataagacgtaaactggttcaattgactgttagtatgcgttaatgagatggacaggatatcagtttgtggactaggaacccatttaaatttaagccttttctagtttttttccattaattgaaagtactaaatgcatgttttaccagagcatcaygtgggatgtgcatgatgggtctgctccggcagccctaatttaggcagaactcaatgaacctgagtgagagcttttctcttgaaggctgtgggaaatgccctgctgtccatccagaactacctacaggatctgcaccgcgagctgctgtaagccctgatgtgtcgaaacttaaatcccccgtagtcctgttgatgccccacatcatgtcagagtctcatgtgttcatttcttgaagtttcacaacccgtgagagctgtaaaattctggctgtatggtaatctctatagggaagatacggac

SEQ ID NO: 41421 - DNA, 600 bp, Chicken  19866894277149_1
ggagtgctgtgctcaattctagacccctcagtacaagagagacatagatatactgaattgattccagcaaagggccatcaagacgatgaaaggactggagaccctcccctatgaggagaggctgagagagctggaactgttcagtctggagaaaaaagaggttcagagggatctcaacaatttatagaaatacctgaagaggtgcagagagaatggagccaggtttttctcagtgatgttcactgtaaagacaagagtctttgtgtgcagactggaacacaggaggtcccatcagaacascaggaaacacttcagtactgtatttggtgatggacaactggtgtatgatgcccagagagtctgtacagtctcctccatggagatcttcagaacctgtgtggacatgacccggagcagcttgctatgggcagctgtgcttatgcagggcttggaccagatggacccagagattcattccaattcagccattctatgattctgattctgtgaagtggaaatgaatgttccaaattgaagacatggagatctatgaagaccatcatgtatatgtaatggaatgctgctctacactgttcttcy

SEQ ID NO: 41422 - DNA, 600 bp, Chicken  19866894277149_2
caggaaacacttcagtactgtatttggtgatggacaactggtgtatgatgcccagagagtctgtacagtctcctccatggagatcttcagaacctgtgtggacatgacccggagcagcttgctatgggcagctgtgcttatgcagggcttggaccagatggacccagagattcattccaattcagccattctatgattctgattctgtgaagtggaaatgaatgttccaaattgaagacatggagatctatgaagaccatcatgtatatgtaatggaatgctgctctacactgttcttcyttatcatctctctacagtccacttctgtgggtgctttatctccattccagataytatgctacaacttcaaccacagtctccacaggagacaatgcttaaaaatgttctttaaaatctatgggggaaaaaaaaaggcccttgctcttttctttgtcatatgacaactgacaaataccaacaaatcaagtaggaaagagtctgagaagtaaataaagcctttataaccttctccagtggttctttttggctgctgacaccttaatatcttctgagctagcaaatggaggtcaaggggaaaga

SEQ ID NO: 41423 - DNA, 600 bp, Chicken  19866894277149_3
gagagtctgtacagtctcctccatggagatcttcagaacctgtgtggacatgacccggagcagcttgctatgggcagctgtgcttatgcagggcttggaccagatggacccagagattcattccaattcagccattctatgattctgattctgtgaagtggaaatgaatgttccaaattgaagacatggagatctatgaagaccatcatgtatatgtaatggaatgctgctctacactgttcttcyttatcatctctctacagtccacttctgtgggtgctttatctccattccagataytatgctacaacttcaaccacagtctccacaggagacaatgcttaaaaatgttctttaaaatctatgggggaaaaaaaaaggcccttgctcttttctttgtcatatgacaactgacaaataccaacaaatcaagtaggaaagagtctgagaagtaaataaagcctttataaccttctccagtggttctttttggctgctgacaccttaatatcttctgagctagcaaatggaggtcaaggggaaagaaaggattgtaagaatatcacggaaggcaatgattttactgcagacattttagca

SEQ ID NO: 41424 - DNA, 600 bp, Chicken  19866894277162_1
gcacttctcatcccagaacatgtcctcccctgcacacactgacaggagctgaactgaaataaaagcagtgcagccttcagatgcaagagatgaggcaaccgctgtgtacctcacaacaaactatgaagcagcagggttggctgttggttgttactgaacttgccattacaaatttaggaatctgaatattttgcagtgttgccatactttgaggttacaagatatatgcagcactatcagtctgccttccctggaacaatcctgatgctttagagcctttcttgtcaagttggttatttytttttcctcctcttgcaaagttttctttcrtccttcaaacctaccatgggtacagagaatctgtcctactaccttccaaatgaaactgatgggattcaatctgaattccaactccaaagaggtttaaatttgatgatgtttaccgtgtgtgaaactcatacaatgctatctaacaggagatgcacttcaggctttcattgcaaaaagagcagcacctccaaatggcagctcaaccagtccttgcaaacagatacaagaaggacaaaacatccttccctgttctgggctatttctgattct

SEQ ID NO: 41425 - DNA, 600 bp, Chicken  19866894277162_2
tgcacacactgacaggagctgaactgaaataaaagcagtgcagccttcagatgcaagagatgaggcaaccgctgtgtacctcacaacaaactatgaagcagcagggttggctgttggttgttactgaacttgccattacaaatttaggaatctgaatattttgcagtgttgccatactttgaggttacaagatatatgcagcactatcagtctgccttccctggaacaatcctgatgctttagagcctttcttgtcaagttggttatttytttttcctcctcttgcaaagttttctttcrtccttcaaacctaccatgggtacagagaatctgtcctactaccttccaaatgaaactgatgggattcaatctgaattccaactccaaagaggtttaaatttgatgatgtttaccgtgtgtgaaactcatacaatgctatctaacaggagatgcacttcaggctttcattgcaaaaagagcagcacctccaaatggcagctcaaccagtccttgcaaacagatacaagaaggacaaaacatccttccctgttctgggctatttctgattctaactgtacaaagtcatgtaagcatgtgcaa

SEQ ID NO: 41426 - DNA, 600 bp, Chicken  19866894277163_1
cacaatttgcattcaatttcttgtaagcacaggttactattcaaagcagcttccttgtaatttctttctagactgttaacatacgcttttagtttaggattcactgagggcactacttcgtttccactccacctattgaaggctgtaaacccattacaacctggctgaagtttcattggaataatactatttgataaagcatattctcagctacaaaacagtttttcaacacagtgaccaccgttggctatgtatttttgccagcaatgactaagagtctgcatgccacattcctaatcygcacctgcagaagtgacgcactgtcactgtccccactgctgaaatgcactacccatcacctcagtaagttcatatccactgtttggtctccacaaatgttcagcaaccattgatgaatgtcaatgagtacagtatttcccacgtggaggaattcagtaagacacctttgcatcacccacactttcatgtcaaaacccatattgtcagactgcccctccggtgccatctatctctcaccgaagtcacataatattgtaaggaaaggttcagtctctactgccataccaccatctgcctctg

SEQ ID NO: 41427 - DNA, 600 bp, Chicken  19866894277172_1
aataatgacatctcagtagggcagccatcaagcatatccatcaggaaaatcctcctgttgtgccagcagaggctttcaggtcagaacacgttttgtcttatgcagcacaagagcacagttgctggagagtacatagaaaggagagcagattcatggatgcacagaataatttcagttggacagaatctcctgaactcaagtccaatctaccagtgaaagccaggccagtataaatctgcatgttcagagccttctccagctgaggtctgagctactcaccctggagatcacagtgccackctgggcccctatggcagtacccaacttttcatcactagcattactaccatgaagatatatgtacctctgagcctcagagcagaaaccakaaattctgagattactgcatattgcaacacaaagggaggaaaaaaatccttgcaacaaaatcactgtctatccagctgagccagcaaatgctcagcctcacaggctgaatgaaggtcccagacagattttacagtccatgaagaactttctgctgctgcagctacatctctgtcagacctaatcattttctgattggttgctggtgttgga

SEQ ID NO: 41428 - DNA, 600 bp, Chicken  19866894277172_2
gttttgtcttatgcagcacaagagcacagttgctggagagtacatagaaaggagagcagattcatggatgcacagaataatttcagttggacagaatctcctgaactcaagtccaatctaccagtgaaagccaggccagtataaatctgcatgttcagagccttctccagctgaggtctgagctactcaccctggagatcacagtgccackctgggcccctatggcagtacccaacttttcatcactagcattactaccatgaagatatatgtacctctgagcctcagagcagaaaccakaaattctgagattactgcatattgcaacacaaagggaggaaaaaaatccttgcaacaaaatcactgtctatccagctgagccagcaaatgctcagcctcacaggctgaatgaaggtcccagacagattttacagtccatgaagaactttctgctgctgcagctacatctctgtcagacctaatcattttctgattggttgctggtgttggaaagctcaaatcctatgattccagactgcccacatccaaaaaaaaaaaacctgtgatgcagcccatattgttctcctgggccagaaatct

SEQ ID NO: 41429 - DNA, 600 bp, Chicken  19866894277175_1
aatggaagcttcagccttaagatgagctgtggtgcagccataggtggacacagaggcaaggctgctgctgggtaacgaatttgccttgcaaaaacagcagcttcacatcttgaaaattattttgtttatttcttagccaaaaaggatggacagcctagcacgagaggagtgatgaagggtggcttagcttcagagcacatctggatgaaaagcagatgctatttttgaagattaaaaattgaattaaaatgttgacgtatttaaacagtaacacacatatatgctttccacagacttcckaatagccaagcataaccagaagtatctgggcagagccaaaaccagcctgaatgctggcatttctaccagatccatcaggaaggagcaaaggaactgaatatgcagtgcttggctgagaatcccttggtggaaggaaaacacacaggtccacaaacatctgtacgtggtaaaagcaaatattagcttaccattaatggaatagaagacaagctgcaggctgtatttaatggaaaattaaaattacatcttttaatcttactcattgcagatacctgtctgtaagttcgattccagcccaac

SEQ ID NO: 41430 - DNA, 586 bp, Chicken  19866894277184_1
gatggtggcatatctgatgatccactgaaacagagtgatgacctttctccagctgttctgacagatcagaaaaattctgttgactcttttgaagactactctgaagaattaactaaagaaacctatactgaatatgacaatgaaacaaagagcctttcagccaatacttcttctttaagtccattgtcttggacttcaggtatacttacagacgaatctataaataaagtagaagagagcaattcccaaaattcaatcattttaccagaagttacctctaaacaagaagatacacataartatgttcttcatcttctaaatgaggaagtactgaaactgccagaaaatgaacatgcaaagcaatcgcctgtcttggagacaacagaaaataaccattgttcattgaatggttccaatctcaaaagccaagaaatgtctacactgctagaaacatctgatgactctctctcagatgtgcccaataatggagaagactcagacagctgtgatgacgatgagtcttcagcagaagcgctactcagttcttcaaaagtatctgtaataccccacgatctcttctactatc

SEQ ID NO: 41431 - DNA, 600 bp, Chicken  19866894277185_1
atccttgcatccctgagcatcccacatcccacagcattcccaaacatcctgcatccctgagcatccctgatcatcccttaatccctcagaatcatttagcatcctgcctccctaagcatcccaaaacatccctgtgtcctggagcatccccacagcctggaacaacccatatccccaatctctaaccatcctgcatcccaaagcatccttgcatccctcagaatcctttagcatcctgcattcctaagcatcccaaagcatccctgtgtcctggagcatccccacatcctggagcatccyawatccccagtctctaagcatcctgcatcctaaagcatctttacagccctgatcatcccagagcatccctgcatcactgagcatccccgagcatccccgagcatcccgcatcccaaagcatccccatgtccaggtgcatccccacatcccaggccatcccatatcccaaccaccccacatccctaagcctgcaggtcccagctgtggggctgagggtgcagcaggagccccgcaggggtggagggctgcggagggtgacggcgacgtagcacctactctaatgggatcctctccacaagt

SEQ ID NO: 41432 - DNA, 600 bp, Chicken  19866894277185_2
ccttgcatccctgagcatcccacatcccacagcattcccaaacatcctgcatccctgagcatccctgatcatcccttaatccctcagaatcatttagcatcctgcctccctaagcatcccaaaacatccctgtgtcctggagcatccccacagcctggaacaacccatatccccaatctctaaccatcctgcatcccaaagcatccttgcatccctcagaatcctttagcatcctgcattcctaagcatcccaaagcatccctgtgtcctggagcatccccacatcctggagcatccyawatccccagtctctaagcatcctgcatcctaaagcatctttacagccctgatcatcccagagcatccctgcatcactgagcatccccgagcatccccgagcatcccgcatcccaaagcatccccatgtccaggtgcatccccacatcccaggccatcccatatcccaaccaccccacatccctaagcctgcaggtcccagctgtggggctgagggtgcagcaggagccccgcaggggtggagggctgcggagggtgacggcgacgtagcacctactctaatgggatcctctccacaagtaa

SEQ ID NO: 41433 - DNA, 600 bp, Chicken  19866894277190_1
cagaagtggtggtgccagatggagccctgcctcgccggggaggagtgcaaagtgctgcccgacctctcaggctggagttgcagcagcggcaacaaagtgaagaccaccaaggtacgtcagcccccagccccctccgccccccacccggggccatcagtggcagagcaccacacgattgttattttcatggcttgctgaacgccccgaagaacaaggtgtaattaaaattgtatcaaacacattagtaattacatatatgtcacggttaatcagttgcataattttgtaatcattgttcaygcagtcgagggtaattwttccttgtgctggagctcttctcaccccgcatcccccgccgtgaaattattgcattaaaaaagcgttgggggcatatctatatatatttttcattattgccattatttcggatcaccaaaaggactttcctgctcaagtgtgtgtgtgtggatatctgaggaggtctccctgccctgggcacccatcgctgcctttggctcttggtgtgcattatttggtcccccaccccccaaccccctccaagctgctgcctcacccctcacctcccagtgcagacagacc

SEQ ID NO: 41434 - DNA, 589 bp, Chicken  19866894277190_2
gatggagccctgcctcgccggggaggagtgcaaagtgctgcccgacctctcaggctggagttgcagcagcggcaacaaagtgaagaccaccaaggtacgtcagcccccagccccctccgccccccacccggggccatcagtggcagagcaccacacgattgttattttcatggcttgctgaacgccccgaagaacaaggtgtaattaaaattgtatcaaacacattagtaattacatatatgtcacggttaatcagttgcataattttgtaatcattgttcaygcagtcgagggtaattwttccttgtgctggagctcttctcaccccgcatcccccgccgtgaaattattgcattaaaaaagcgttgggggcatatctatatatatttttcattattgccattatttcggatcaccaaaaggactttcctgctcaagtgtgtgtgtgtggatatctgaggaggtctccctgccctgggcacccatcgctgcctttggctcttggtgtgcattatttggtcccccaccccccaaccccctccaagctgctgcctcacccctcacctcccagtgcagacagaccccaaag

SEQ ID NO: 41435 - DNA, 447 bp, Chicken  19866894277195_1
gtgacagtatgtgttttataaatgactgagggaaaggaagttacttatgtaggcagtgtatgtgaaaagggttttcatggttaaaactttagttgcaaaaaagtatcaatttattaaaaattaaacttattataaaaaattaattaatattgttcaaattaatttccagaaagaacttttgcccagaatgtcactaagtttcttccaaagtagataaatcatgagactgaattcctctcactcctgaaatcgtggcttttcttcaggagataacacattcgttaggcttcttggtgaaamactcacgaaacacaacctacaaagaaaagaaatatcaacgagaaagctcactgatatcttcaacaaaaggaagttctttgtttccttgtaaattctctggaaatttggagtgatgcaccacaaaccttttgtagacattcagataat

SEQ ID NO: 41436 - DNA, 600 bp, Chicken  19866894277201_1
aaggataacgaggctttgaaggatggctaaaatgtcgccatcaacctgcccttctgctacttagtaattagataattagtcaggccctaattatgggatcaaggtgcaggaaaacaattagcagaaagaattactgcataaaactgaaactcaatttctagcaaaaaatatttaatgttacgatatttgtgattttagaaaccattttgattcctcgctgcattgcacttaccgtccctcagagcgatggctctgggtcagagcagtgagggaatggagttctaatgcatacccgtgcgygtgctccatgcacccacttgtgtaaatgcatgttttgcggtgcgtacattctcctgtttgctgcatccctttcctagctgtatccatcagctcagcacacacacacgtgtgtgccacgtctggctgtcacctgctgccgcatgcacacgcatgcacgcggtgctccacgcctgtccaaaccaacagtgatattctccaaggtgttgtgcagcacaaacgtgcctccagtcagctgcaaagaaaaataggctgggctaataaattcttcttccatatggtaagaaagaataaacaggtaaa

SEQ ID NO: 41437 - DNA, 600 bp, Chicken  19866894277201_2
ttgggatcctttccgtaacgcaatcatttgcataggcatgtttgcgccgtaattccttcagaacattttgctcacatgcgcaattaccttcccctccccagaaaaaaaacaaacgagggagcgcggctgcaccaattaatacccgaaggcagcggggggggaactgcttgttcaagaatatacagaaacagatcattgtggtatgcaaatcccagggacggctccatcccttcgcagcatcacagcacctcgctgcaaaattagtaaccttcagagcgacacgcgcctggcaaacaaagrgaatgctgtaaaataatacgatactgggtcgtaagatagattataaaaatatcgcggtgtctttatttgttaattttcggtggccttgggatgcttctgctttttttgccctggcattgcctcatgcattttctcttgtttttctggtgtcagtttaattgttcactgtcaggggtagagcagcagataacaagcttagcaaatgatgtctgctgttgctacacattgattaatattttacatgttattatcctctgtccattacgacagcaaattaaactataaatcacaccttctgcc

SEQ ID NO: 41438 - DNA, 600 bp, Chicken  19866894277202_1
taatacgccgctacaatagtcagcaaccaagcgtggctaaccatgacccactaatgaaacgaagcagaagctgagctgcacttgtctgtattaccattaaattacaactggacaggttaatatatgacactaattaggcaccttattccttgtgcaatgcagcattaacacataggcagcaagccgtagccaaggcagagcaggccttgactgacgtaaccacccctcacagtgcttgcagacttgggcccaggggcctttcagtgccattttgttacaggcttgtgccctcccaccggygctcggatggcccggtaaaaaacacctgtggagatcttaacagcaagcactgcccccagcagaaccagggtatttatttcccttctgcaccactgctggcttccctgtttcatgcatgaggaacaaataaaaatccatcaccagtgcctgcacagaaacccgcacagcatcccatgaatctatcagctgagaacatacttgagtttttttttattacaacacattaagctaaaaatcaatagattcacttacagaagcaaatttaatatttcaagtaatcaagagaaagtaaaaattttt

SEQ ID NO: 41439 - DNA, 600 bp, Chicken  19866894277203_1
tgcgtgcacacacactttatagaaagtgtttacttatgcgggggcaatagtttaaaaggtaaatgaaatggaggacgcgggctggattggcttagcaacacaaacagtgccaacaggtaaagggcccgggcctgttctttcccaccttggaattgttttaaaatgacacccctccataattaattgtacagcacctgattagtcactattgacagacccagagccaattggatctttcttcttaatctggccggggagaaaacacgaagtgccgtcgccacacacggcgcagctcccggygatgacctcaggcagctgagcaattagagccccgcgcaccagtgctgtgctgagcgggaacacagccccgcgccagcctttaatatgaaaatgaagaagggaaacaacaaatccaataaaccggcgaagtcaaacaaagccaactgggagttcgtttggcgataagagcaaggaagagaggcggctgataaagccgggtgtttctccgctggccctgtctgccacgggtctgtcaggactgagtggctcaggaggcagcctggactcacccaggtgggaaaaccacctcagggaatgagg

SEQ ID NO: 41440 - DNA, 600 bp, Chicken  19866894277216_1
ccgatccccgcagccgatcccattacagctccgcttacggccgatcccattacaggtgatccccttacagccctgcggccatgggggctctccccgagctctccctcctggcctcggccgcgctcggcctcgctgccctcctcatcctcctcaccctcctgccgccaggtcagcgcctgcgagcggcgggggcggcccgggggcggcccggggtcacgggaacgggctgggagcagtgaggggacagacagcagtaaggagcgcagagtgggaccggcaaaggagcggagcctgggagcrgagtgagaatagagactgtgtgggagcagtagggagtgctgactgggaccaacagggaccaacagggaccrgtaagggaacaaggcctgggaccagtaagggaatagagamtggaactggagccattagggartgcagactgggatcagtagggagtagggactgggatcagtaagagaataggaactgggatcagtagggagtagggactgggatcagtaagagaataggcactggggccggaagggaatagggactggaacaaagaagggaatagaggctgggatgaggaaggagttc

SEQ ID NO: 41441 - DNA, 600 bp, Chicken  19866894277216_2
cctgcggccatgggggctctccccgagctctccctcctggcctcggccgcgctcggcctcgctgccctcctcatcctcctcaccctcctgccgccaggtcagcgcctgcgagcggcgggggcggcccgggggcggcccggggtcacgggaacgggctgggagcagtgaggggacagacagcagtaaggagcgcagagtgggaccggcaaaggagcggagcctgggagcrgagtgagaatagagactgtgtgggagcagtagggagtgctgactgggaccaacagggaccaacagggaccrgtaagggaacaaggcctgggaccagtaagggaatagagamtggaactggagccattagggartgcagactgggatcagtagggagtagggactgggatcagtaagagaataggaactgggatcagtagggagtagggactgggatcagtaagagaataggcactggggccggaagggaatagggactggaacaaagaagggaatagaggctgggatgaggaaggagttcagactgggaccagtaggcaatagggactgggaccagtgaggagccagtctgagaccaggatgggaatacag

SEQ ID NO: 41442 - DNA, 600 bp, Chicken  19866894277216_3
cctcggccgcgctcggcctcgctgccctcctcatcctcctcaccctcctgccgccaggtcagcgcctgcgagcggcgggggcggcccgggggcggcccggggtcacgggaacgggctgggagcagtgaggggacagacagcagtaaggagcgcagagtgggaccggcaaaggagcggagcctgggagcrgagtgagaatagagactgtgtgggagcagtagggagtgctgactgggaccaacagggaccaacagggaccrgtaagggaacaaggcctgggaccagtaagggaatagagamtggaactggagccattagggartgcagactgggatcagtagggagtagggactgggatcagtaagagaataggaactgggatcagtagggagtagggactgggatcagtaagagaataggcactggggccggaagggaatagggactggaacaaagaagggaatagaggctgggatgaggaaggagttcagactgggaccagtaggcaatagggactgggaccagtgaggagccagtctgagaccaggatgggaatacagactgggatcataaggaggataatgtgggaccggcagggaa

SEQ ID NO: 41443 - DNA, 600 bp, Chicken  19866894277216_4
tgccctcctcatcctcctcaccctcctgccgccaggtcagcgcctgcgagcggcgggggcggcccgggggcggcccggggtcacgggaacgggctgggagcagtgaggggacagacagcagtaaggagcgcagagtgggaccggcaaaggagcggagcctgggagcrgagtgagaatagagactgtgtgggagcagtagggagtgctgactgggaccaacagggaccaacagggaccrgtaagggaacaaggcctgggaccagtaagggaatagagamtggaactggagccattagggartgcagactgggatcagtagggagtagggactgggatcagtaagagaataggaactgggatcagtagggagtagggactgggatcagtaagagaataggcactggggccggaagggaatagggactggaacaaagaagggaatagaggctgggatgaggaaggagttcagactgggaccagtaggcaatagggactgggaccagtgaggagccagtctgagaccaggatgggaatacagactgggatcataaggaggataatgtgggaccggcagggaatacagacaagcagggccacctc

SEQ ID NO: 41444 - DNA, 600 bp, Chicken  19866894277220_1
tacagggagacctacgtgcttttcatacacttgataaaaaattgttaaaaaaaaaaaaataaaaggttgaaaaaacatagaatcatagaattatgtttacacattgctgttgctttattgtatttctccttactttgtggtaatgagtttattttcatctttcagaaaacaggacagcatttgaaggcttgacaaatgcatcccaggctgaaaaactgctgcgtttctcctcctcttcctcctttagaaaactgacttctttaaagagaggtaaagttggatgttgcatttcaggtggawtttttttccagacaaagtgagctaaaattgaactacwtgtggacttcttcagctttcctgtgttgttttaaattaacttttatgtatctcattctgatgtctgatatctgttcccgatgttgaaaatgatgtcttcagaaaactttgtttgcagagatrtgtttagttgtattgtgttattttatggtattatttattatttataaattatgcagcacttctgsaaagtgagttgtctgtgtgttaattgcatttgagttgatttaatgttacatctgaatctggtatctcttaggatgt

SEQ ID NO: 41445 - DNA, 600 bp, Chicken  19866894277220_2
aaaattgttaaaaaaaaaaaaataaaaggttgaaaaaacatagaatcatagaattatgtttacacattgctgttgctttattgtatttctccttactttgtggtaatgagtttattttcatctttcagaaaacaggacagcatttgaaggcttgacaaatgcatcccaggctgaaaaactgctgcgtttctcctcctcttcctcctttagaaaactgacttctttaaagagaggtaaagttggatgttgcatttcaggtggawtttttttccagacaaagtgagctaaaattgaactacwtgtggacttcttcagctttcctgtgttgttttaaattaacttttatgtatctcattctgatgtctgatatctgttcccgatgttgaaaatgatgtcttcagaaaactttgtttgcagagatrtgtttagttgtattgtgttattttatggtattatttattatttataaattatgcagcacttctgsaaagtgagttgtctgtgtgttaattgcatttgagttgatttaatgttacatctgaatctggtatctcttaggatgtttaaacgtgctttgggaatctaatgttgttccttagt

SEQ ID NO: 41446 - DNA, 600 bp, Chicken  19866894277220_3
tttcagaaaacaggacagcatttgaaggcttgacaaatgcatcccaggctgaaaaactgctgcgtttctcctcctcttcctcctttagaaaactgacttctttaaagagaggtaaagttggatgttgcatttcaggtggawtttttttccagacaaagtgagctaaaattgaactacwtgtggacttcttcagctttcctgtgttgttttaaattaacttttatgtatctcattctgatgtctgatatctgttcccgatgttgaaaatgatgtcttcagaaaactttgtttgcagagatrtgtttagttgtattgtgttattttatggtattatttattatttataaattatgcagcacttctgsaaagtgagttgtctgtgtgttaattgcatttgagttgatttaatgttacatctgaatctggtatctcttaggatgtttaaacgtgctttgggaatctaatgttgttccttagttatcaggagtctgtattctctgactgactttgcttgctgccaaaggctctgctaaattgtgtgtgcagcctcatttatacaaagatgcatgacatggaatctactgcttcccaacacaattt

SEQ ID NO: 41447 - DNA, 600 bp, Chicken  19866894277220_4
ttctcctcctcttcctcctttagaaaactgacttctttaaagagaggtaaagttggatgttgcatttcaggtggawtttttttccagacaaagtgagctaaaattgaactacwtgtggacttcttcagctttcctgtgttgttttaaattaacttttatgtatctcattctgatgtctgatatctgttcccgatgttgaaaatgatgtcttcagaaaactttgtttgcagagatrtgtttagttgtattgtgttattttatggtattatttattatttataaattatgcagcacttctgsaaagtgagttgtctgtgtgttaattgcatttgagttgatttaatgttacatctgaatctggtatctcttaggatgtttaaacgtgctttgggaatctaatgttgttccttagttatcaggagtctgtattctctgactgactttgcttgctgccaaaggctctgctaaattgtgtgtgcagcctcatttatacaaagatgcatgacatggaatctactgcttcccaacacaatttttatgttgcatttcacgtcattttctatttaaaaagcactgacctgttcttaaacgcagttcttt

SEQ ID NO: 41448 - DNA, 600 bp, Chicken  19866894277221_1
acactaaaaaaaatcaactaaatgatccaaaacttcaaggaactgtgaaatccaaagaatttaaggtttcaactgcattatatccacatgctttttcacaacgtgatattacctcacagtatctttagtgatcgttttgcccacctccaatctaatgccttgacactgccagaaaattatgaatgaaagccatcactgggagatacatgaagcatgaagatagaatagatctctgcatttctaaacttgcatccattctgggcttttatttctctgacagatctcagatgtgtgaaaaaygggaacaggatttcacttcttacagtgagggcatgtggcagaagaaaaagatgcttagatatttctcagcaacatacaacrctgcttcctttcmgtgcctgtcatattgcccagtacaggacaaatttcattactgccttttactccatgtgtttacttgcactactctatgggatagatggtggtatggaatcgaaaaagaagacatcaggcacaatcaaaacagttttaaggtgtgtagagcaagcacaagagagctgtatgcaaggtaactacatcttccaaggcaactcgctgaaa

SEQ ID NO: 41449 - DNA, 600 bp, Chicken  19866894277221_2
atccacatgctttttcacaacgtgatattacctcacagtatctttagtgatcgttttgcccacctccaatctaatgccttgacactgccagaaaattatgaatgaaagccatcactgggagatacatgaagcatgaagatagaatagatctctgcatttctaaacttgcatccattctgggcttttatttctctgacagatctcagatgtgtgaaaaaygggaacaggatttcacttcttacagtgagggcatgtggcagaagaaaaagatgcttagatatttctcagcaacatacaacrctgcttcctttcmgtgcctgtcatattgcccagtacaggacaaatttcattactgccttttactccatgtgtttacttgcactactctatgggatagatggtggtatggaatcgaaaaagaagacatcaggcacaatcaaaacagttttaaggtgtgtagagcaagcacaagagagctgtatgcaaggtaactacatcttccaaggcaactcgctgaaagcatagtagcagcactacagcaatttaatttcactcatgttaaattgatttatttataattatattattcttgcatcagga

SEQ ID NO: 41450 - DNA, 600 bp, Chicken  19866894277221_3
ttcacaacgtgatattacctcacagtatctttagtgatcgttttgcccacctccaatctaatgccttgacactgccagaaaattatgaatgaaagccatcactgggagatacatgaagcatgaagatagaatagatctctgcatttctaaacttgcatccattctgggcttttatttctctgacagatctcagatgtgtgaaaaaygggaacaggatttcacttcttacagtgagggcatgtggcagaagaaaaagatgcttagatatttctcagcaacatacaacrctgcttcctttcmgtgcctgtcatattgcccagtacaggacaaatttcattactgccttttactccatgtgtttacttgcactactctatgggatagatggtggtatggaatcgaaaaagaagacatcaggcacaatcaaaacagttttaaggtgtgtagagcaagcacaagagagctgtatgcaaggtaactacatcttccaaggcaactcgctgaaagcatagtagcagcactacagcaatttaatttcactcatgttaaattgatttatttataattatattattcttgcatcaggaggtttaactgaag

SEQ ID NO: 41451 - DNA, 599 bp, Chicken  19866894277235_1
  misc_feature (1)..(76): n is any nucleotide
nnnnnnnnnnnnnnnnnnnnnnnnnnnnnnnnnnnnnnnnnnnnnnnnnnnnnnnnnnnnnnnnnnnnnnnnnnnnctggcagtgattttatgattttaagttcaaaaggactggcccactgaaagctcccaaagccctggacctccttcaggcccttggtgccggtgggacaagagcattcagctgccacctgaactgggtccacaaaaaggagcctatgattgcagcagcttcccaaaggaagctgaactcctgcgtgtaggggaggagctgctggttctgcatacacacacggtaakaactgtctttgtaaacgcacaccgcaaatgagcatattttgctgttccccttgttgctgccgcttcagttgttagcagaacacttggtgacaaggcacattttgtcccagccttcccatagcgtaccactagcacggctacaagctaaaaattgcccactgggagtcagcccacagcaacattggcctcaaccacattaaccgctggccccgagactgcragcacagggtgggccttcaacagcgagaagccatttctccagcaagcttctctcttagaacatactgagaattgatgtt

SEQ ID NO: 41452 - DNA, 600 bp, Chicken  19866894277235_2
gattgcagcagcttcccaaaggaagctgaactcctgcgtgtaggggaggagctgctggttctgcatacacacacggtaakaactgtctttgtaaacgcacaccgcaaatgagcatattttgctgttccccttgttgctgccgcttcagttgttagcagaacacttggtgacaaggcacattttgtcccagccttcccatagcgtaccactagcacggctacaagctaaaaattgcccactgggagtcagcccacagcaacattggcctcaaccacattaaccgctggccccgagactgcragcacagggtgggccttcaacagcgagaagccatttctccagcaagcttctctcttagaacatactgagaattgatgtttgtaaactacttcacaaccccttgctgaaargccctagaggagctcatataatttcacaatagcacattgcaaatgaccgtcatacagggtttcctcatgcattactggcagctttaccaagcagcagatctggcaggggagaaataaacaagcactgcaaaggagaaagctgtttctagttcctgctgctcagaggattgccataaggctttcagccatg

SEQ ID NO: 41453 - DNA, 600 bp, Chicken  19866894277235_3
agcatattttgctgttccccttgttgctgccgcttcagttgttagcagaacacttggtgacaaggcacattttgtcccagccttcccatagcgtaccactagcacggctacaagctaaaaattgcccactgggagtcagcccacagcaacattggcctcaaccacattaaccgctggccccgagactgcragcacagggtgggccttcaacagcgagaagccatttctccagcaagcttctctcttagaacatactgagaattgatgtttgtaaactacttcacaaccccttgctgaaargccctagaggagctcatataatttcacaatagcacattgcaaatgaccgtcatacagggtttcctcatgcattactggcagctttaccaagcagcagatctggcaggggagaaataaacaagcactgcaaaggagaaagctgtttctagttcctgctgctcagaggattgccataaggctttcagccatgtttcacttccccagaaagttcaagtcagtattctcctccgttaggcaccccatcaacaccatcacgtgcatatgtacataagcatcacttacctgagattacgggcaacc

SEQ ID NO: 41454 - DNA, 600 bp, Chicken  19866894277238_1
aagtaaggatttcttcatcagagctgcctctggtatggccagaggtgtttttgggatggaaatggctttggcatggtcaagcacggtcctctgtgcccaccagaccagtgctctgaacttcggcaaggcaattggagccaagctgggaagtcatgtcctgcatacctgacagcagcagattttgcttcccagctcctccttcttccaatgaggagtacctgacatcagtgctaatgtcaggtaggatcaatccccaaacagcttgagcagtgttgctgaaacctgccttttcatcatccrgcataactcacagttgctgtgtatgatctctcaccaccttgcatatgggtgtgaatcccaacctggggctgctttgcaggactttcctgcgttatgctatagaaatacctgagagatggggtgtttcatttggctaaaaggagaaaaaaaaagccccttatcacagagagaggagtgatctgatttatggcaatgcacccattgggtgtacaagctgttgccagccagttagcatgcccaagatcttcctgagctcaacctgccttcaagccccactggtcttcttcatcacccatccaa

SEQ ID NO: 41455 - DNA, 600 bp, Chicken  19866894277254_1
ggagattattaatggctgggaaagaggtgtgggcagcctggtggtgcagcaattaaagcgaggaggcagcgtgcagtgagccggcccagccgtctgcgttaggtgctgctgtgctgctaatgaactcaaacggctttcttcgtctattccacacgtaatcatattacatcaatttaatgccaggccggtgggggccggcggtgtgggaagagaggttagttctattctcgtttcctagcagaataatcgcagaattcctgctgcatggaagctccaggaaaggaggggtgctgatcctawggagtaacggagcacccaaagcagtgtctgttggagcctgaccggctgygctcctacctgaggctcaacttctgcctgcagaatgcaccaggacccgcgtgcaaaaggatgcgtgctccaagctcaggggtgtgcaggcacagcccggctcctctccctgcccacagctgctctctctgcgtgctcccagccgagctgtcggcgctgccgccggccctgcctgatggatgggcgcgcaccgctgccggagctctcaggtgcccatcaatatgctcggcgccggcagcggcgctgccatcc

SEQ ID NO: 41456 - DNA, 600 bp, Chicken  19866894277254_2
aggtgtgggcagcctggtggtgcagcaattaaagcgaggaggcagcgtgcagtgagccggcccagccgtctgcgttaggtgctgctgtgctgctaatgaactcaaacggctttcttcgtctattccacacgtaatcatattacatcaatttaatgccaggccggtgggggccggcggtgtgggaagagaggttagttctattctcgtttcctagcagaataatcgcagaattcctgctgcatggaagctccaggaaaggaggggtgctgatcctawggagtaacggagcacccaaagcawtgtctgttggagcctgaccggctgygctcctacctgaggctcaacttctgcctgcagaatgcaccaggacccgcgtgcaaaaggatgcgtgctccaagctcaggggtgtgcaggcacagcccggctcctctccctgcccacagctgctctctctgcgtgctcccagccgagctgtcggcgctgccgccggccctgcctgatggatgggcgcgcaccgctgccggagctctcaggtgcccatcaatatgctcggcgccggcagcggcgctgccatccatctccgcagctctccgcatggct

SEQ ID NO: 41457 - DNA, 600 bp, Chicken  19866894277254_3
caattaaagcgaggaggcagcgtgcagtgagccggcccagccgtctgcgttaggtgctgctgtgctgctaatgaactcaaacggctttcttcgtctattccacacgtaatcatattacatcaatttaatgccaggccggtgggggccggcggtgtgggaagagaggttagttctattctcgtttcctagcagaataatcgcagaattcctgctgcatggaagctccaggaaaggaggggtgctgatcctawggagtaacggagcacccaaagcagtgtctgttggagcctgaccggctgygctcctacctgaggctcaacttctgcctgcagaatgcaccaggacccgcgtgcaaaaggatgcgtgctccaagctcaggggtgtgcaggcacagcccggctcctctccctgcccacagctgctctctctgcgtgctcccagccgagctgtcggcgctgccgccggccctgcctgatggatgggcgcgcaccgctgccggagctctcaggtgcccatcaatatgctcggcgccggcagcggcgctgccatccatctccgcagctctccgcatggctgcccgggaggctcccgctgcgagat

SEQ ID NO: 41458 - DNA, 600 bp, Chicken  19866894277254_4
cagaatgcaccaggacccgcgtgcaaaaggatgcgtgctccaagctcaggggtgtgcaggcacagcccggctcctctccctgcccacagctgctctctctgcgtgctcccagccgagctgtcggcgctgccgccggccctgcctgatggatgggcgcgcaccgctgccggagctctcaggtgcccatcaatatgctcggcgccggcagcggcgctgccatccatctccgcagctctccgcatggctgcccgggaggctcccgctgcgagatgtggctgaggctgcccctggggccgcggygctgacggatggcagtgagcagtgagctggcagccagcttatggatggctcagcggccagcccagccagatcggctgctgggaagggaggaagaagcaaaagaaagggatgccaaaatgagaaggatgtgcaccggtttcttagcggagggactgactgatgcgtgggtaaatggcaattttggatgcagggaaaggggggttgcagctgtgagctgggattagcttgggaatgaaaggaggtgagcagggtctgtggctgcgctccctctgtgcagaatgcctctgccatttagacgtg

SEQ ID NO: 41459 - DNA, 600 bp, Chicken  19866894277254_5
ctgccttggacctggttaggaggggatttgcagtgacatctggttctggacctttctgctgtgactgttggagagaatgaagctcagagggtttatgacgatgccctgaaccacgcagcccctgtctgcagttgtgtatagcagctgagggatggatgctgtacactattgctccaaggaaccagtccttctcttggcccagcttcatgacttgtcctcttgctatgtctgttcagcagccccatttctcctcattgtgctcttctgtccatctccctctcccagcactcatgtctcccygagcagggcaggaaggtgttttcctggccgtcccaaatacctatccagcaagagcagagcagtgaggtcccctccagcacggggaggtgaactttggggtgttggtgctgtgccctttgtgtgcgctgcctgctcttgtgctcctctttgtgtttccactgacacagtacaaatacttccaggtaaagccaaaggcaaggtggcatcagacgacagctcagaagccagcagcaaggaggactatggtgaagatgatgaggatgaagagggagagtacgaagtcgaggaggacgaggaaga

SEQ ID NO: 41460 - DNA, 600 bp, Chicken  19866894277254_6
gccctttgtgtgcgctgcctgctcttgtgctcctctttgtgtttccactgacacagtacaaatacttccaggtaaagccaaaggcaaggtggcatcagacgacagctcagaagccagcagcaaggaggactatggtgaagatgatgaggatgaagagggagagtacgaagtcgaggaggacgaggaagatttagaggaagacagtgactcagatggtgagtagtgcacctgggcaaagggagaaggaattattgatggccagaggctcctctgtatcctggggtctttcctacaaaggarctgtcttctctgttcttgctctgctgctgttttgagctgcagggtgtcaggagggcttttctcatgcacactgcatggacggggagacctgtcagttccgtgctcacactgggaagagagctaaagggttaaggtgtctgcagccactgctctaacaagccaccagcccttttcatctccgtgcaggagcctcatgcagcgaggctcaaacaaacgcttgaagtagagcccacccagcaggctttgcttgaaggctccccgtgggttactcgtgcaggggagggtggtgggggtacctca

SEQ ID NO: 41461 - DNA, 565 bp, Chicken  19866894277255_1
caaaagttctgcttaccaggactcttagcatttctgatgtagaaagttaccatataatttcagcatctgactgaaagaaaacagtaatgcttagtttgaggcatgatatgcaataaatttctaccaaactgataggagacttaacaactttttgctgtaggaaaactaggaacataaatggagacagcaattgatttttctacttgcaatccttttttctttctttttttctccacaatttctgaagttagaatgccagaatatatatagcccaaggcataaggtccttctaccagccamaggatgaagtgtagaagattgaatgagatgatgtatctaaagttataaagtctagaaatagtgatgtagaataaagggtcctcaagatctttaaccaaaataatatcagctgtgctcctgagatttagttaccctgtgccaacaacctctgtgactgagtgacattggacatagtggacacaggagcaactatgaagtggaacatatcaactcctccaactggaacccctaagacaaaacaagcatgatccatggatttttttta

SEQ ID NO: 41462 - DNA, 600 bp, Chicken  19866894277259_1
acttgttagggaagcagacagcagctccttcttaggcattctctggatcctttgccagtggacggagaagaacctgctgcgctgccagcggtacccacagaatggcagagcatttctctgctgctcagcaccttttgggctggtgacagaatatacccagtcctgaagaaagcagcaggacagttatccacgtgagggatagaagataggaatttatgcttaactaggttggaatatggagatttagaagtattccgtttgactatagccagtaatcagtgttataaaaggggatacagraaaaaaaaaaaaaaaaatgcccgtccaacagtattttttgccacccttatcaatggtggccttattgcctgcaacattytttgtttgctcccaacattttgagtttgctcccccaactctcccaggtgggaaagaacggttttgtcactgctgagcaccaccccacttcacatagaggaaccaggtgtctcatggcaagtttgtggtattccaaatgatgttttgactgcaccatttggcgtagagagtagcttgtgatggttctgtgtctcttccagaactgcttgctctaatgctgca

SEQ ID NO: 41463 - DNA, 600 bp, Chicken  19866894277259_2
cgctgccagcggtacccacagaatggcagagcatttctctgctgctcagcaccttttgggctggtgacagaatatacccagtcctgaagaaagcagcaggacagttatccacgtgagggatagaagataggaatttatgcttaactaggttggaatatggagatttagaagtattccgtttgactatagccagtaatcagtgttataaaaggggatacagraaaaaaaaaaaaaaaaatgcccgtccaacagtattttttgccacccttatcaatggtggccttattgcctgcaacattytttgtttgctcccaacattttgagtttgctcccccaactctcccaggtgggaaagaacggttttgtcactgctgagcaccaccccacttcacatagaggaaccaggtgtctcatggcaagtttgtggtattccaaatgatgttttgactgcaccatttggcgtagagagtagcttgtgatggttctgtgtctcttccagaactgcttgctctaatgctgcatttgtaattaaagaaacccatttgacatttcagcccctgggagacctgcagcttggaaatttaaagcaggtccctgggc

SEQ ID NO: 41464 - DNA, 482 bp, Chicken  19866894277259_3
ctcccaggtgggaaagaacggttttgtcactgctgagcaccaccccacttcacatagaggaaccaggtgtctcatggcaagtttgtggtattccaaatgatgttttgactgcaccatttggcgtagagagtagcttgtgatggttctgtgtctcttccagaactgcttgctctaatgctgcatttgtaattaaagaaacccatttgacatttcagcccctgggagacctgcagcttggaaatttaaagcaggtccctgggctctacttaactaccagcttgcttgcaaggatatcttttwagaacgtacatctcttgcctcattcagaagagctagtggttgagctcaggtggatgggaacacgtggcaggttatgttctccttcattgctctattgaaggcttcatcaaatgaagtgattacagtcgggatacagcgtgaatcttcaatctgatctgcctgcaaatttctgcatgcacggt

SEQ ID NO: 41465 - DNA, 599 bp, Chicken  19866894277265_1
  misc_feature (1)..(72): n is any nucleotide
nnnnnnnnnnnnnnnnnnnnnnnnnnnnnnnnnnnnnnnnnnnnnnnnnnnnnnnnnnnnnnnnnnnnnnnnttcccctgcctgccctccccaacagcacatccttcttcataccaaagagaggagcatgtcctgctcaggatgtgctcgaatgcccaaacattcccaaattatcctaaagaaaaataaagtcattgggacagaccccttgctaaatgttttgagtttcttccactgcactaaaaagcaagaaaagttcctgtagaaatacaaggtaaattcttgatgtttttgagggargacttggaggtctgctgtgaaaaagcaggaaagcattggggaggaaccatatgttagtgtcaggtaagaattcaagcagtgggtctccaggggaatatgcgtctccaggagtccatgcagctgaagcttactgagcaactgaagaaagagttcaagataaacaaaacatgccaatgttcagcgtcaggtttgggagcagctccatcacttcactgctctcgaaaacagcagtaggaaagatgcactcatttataaatgtttcaccaccacttattacgtgacagcatataaccacccct

SEQ ID NO: 41466 - DNA, 542 bp, Chicken  19866894277265_2
tataaccacccctcgaaggaatccatttcggacctgggacaaaattagatgtgttacagcaagagtcttcttctgaacatctacacactgcttcctgccagcacagcttggctgccataaaagaaggatatgctgcaatacagtggcatttactgcagttatccgtttgcctcaaaatactggcttcttcaaaacatcttggctggaggagggaggtgacaaatcgtcacatcaagggggtggtaggaggaggatgggaatttccattaccaactacatgttaggtaattccatccctcyaaaaaaatccaattctggaaaatgatgctatattagtatgtaagaaaagaaagatcctgatttttgtgtgtcaaattataagagcaacacttgcattgcttctgggtaaatccaatcctcagcctgcatggacactatcgactctggtagaagttcagctccttacgtccttacaaacgacccttctatttcagccctgcttgatcatcagttctgatcagatattacttcagtaaatcaaa

SEQ ID NO: 41467 - DNA, 599 bp, Chicken  19866894277270_1
  misc_feature (1)..(1): n is any nucleotide
natccccagacacccactgctatgggccccaaccctctgtgctggggcagttcctttgctacccacgttcccaacaatgcaggctctgttctgcagcgcccaaccccagcagcccacctacacacatgggcacggtgacagatcttgtgctgctgcacccacagctgccccggaacgagcctggctgttgctcccctaaaggcagggatgatctttgggcatgctttgttgtgagttttgttatttgttcacgttcctttggattagcagcgctcagctgacagtgctctgcgtggatgygaggtcacacgtgccatacaggctgttctccctgagccattcccacgtggtccccactttgctcccgtgttgctctgccctcttcctttggcctccatcagctgagtccccatggctcccatcccctcagcgcascactgctgcagatctcccttctgattcttgtttctccactccaagcacatgtgatgatgggtgggatgtacccatcagttggatgcacagctgcctgcttggtatactctatgtagtcagtgtttgggctcagttatagattcatagaatgccttaggttggaa

SEQ ID NO: 41468 - DNA, 600 bp, Chicken  19866894277270_2
tgacagatcttgtgctgctgcacccacagctgccccggaacgagcctggctgttgctcccctaaaggcagggatgatctttgggcatgctttgttgtgagttttgttatttgttcacgttcctttggattagcagcgctcagctgacagtgctctgcgtggatgygaggtcacacgtgccatacaggctgttctccctgagccattcccacgtggtccccactttgctcccgtgttgctctgccctcttcctttggcctccatcagctgagtccccatggctcccatcccctcagcgcascactgctgcagatctcccttctgattcttgtttctccactccaagcacatgtgatgatgggtgggatgtacccatcagttggatgcacagctgcctgcttggtatactctatgtagtcagtgtttgggctcagttatagattcatagaatgccttaggttggaagggaccctgaagtcctgtctgcacttctatttaatgcatatgtgtgtgtagacatctcccatgcctctgccaggtccattcttcatgtcacagacattgcttgcactgtggctgacacctgatctcaaagcagtac

SEQ ID NO: 41469 - DNA, 599 bp, Chicken  19866894277274_1
  misc_feature (1)..(44): n is any nucleotide
nnnnnnnnnnnnnnnnnnnnnnnnnnnnnnnnnnnnnnnnnnnnagaagaggttgctgaggtgaaattggctggagttctggctaaaaatgaagtttgatgtccaaaaccccaagggaaactgggcttatagtgctgtagcaatgggaatggatcccatgagagccaaatggatttggggcttctgagctcatggaactttttccagttcttgtttttgaagaagtttgaataatttggatatatatggagaacattgctaaggacaaagaaacaggaggggaagagatttctaaggacytttctctggtcattcaggccttgcactgctgtaggacacgggtttccaaagatacatgattttgagactcctgcattcttcagcagagttttgttacacattttttcttagttctagacaaggatttggactggaatgtaaaggtgtgctgaacagactgttctcaaatgcatcattattcaacagcacctggaaayagccccttgctgtgctaggtgctgtacaaatatggaagaaatagacaatctccagttgctcaatagcaacatttccttcttacagatactaaacaggccaac

SEQ ID NO: 41470 - DNA, 600 bp, Chicken  19866894277274_2
ctttttccagttcttgtttttgaagaagtttgaataatttggatatatatggagaacattgctaaggacaaagaaacaggaggggaagagatttctaaggacytttctctggtcattcaggccttgcactgctgtaggacacgggtttccaaagatacatgattttgagactcctgcattcttcagcagagttttgttacacattttttcttagttctagacaaggatttggactggaatgtaaaggtgtgctgaacagactgttctcaaatgcatcattattcaacagcacctggaaayagccccttgctgtgctaggtgctgtacaaatatggaagaaatagacaatctccagttgctcaatagcaacatttccttcttacagatactaaacaggccaacaggtggccaagacagtgtgtttaaagttaacgaatagaacgctgaacagtgaaggagaccatttactgtatgaatatcatagtgtcttggttttttaaacctagcaaatactaaatgaaaaaaaatatactaatactgaccacaaaaatctttttcttctttttgcttacttttccttcttttacttacagactggca

SEQ ID NO: 41471 - DNA, 600 bp, Chicken  19866894277276_1
tctgtagtgctttttctggcttgtgtgcaactttggtggagtgatccccttgcacccggctggccgaataaacatacctgctttataacctaactgggttatagagtttgattacacccatcagtggaacgggactactgccagaccctggtggtgatcattcccgctttacacagttcttgcttctttctatcttttctatcgcccgtcttcccttctctatcaccccaatccgtaacaatgtctgtctgtctgtcctccccttccccatctcccttattaagttttgtaataaactgkccggaccaacatctggactgttgtttcttaatctcacgctgggtatacatatttcaaagaacctcttctccctcctataaattggagcgagacaaattctaagtacgttttatttgtttttgtggtattcatagaacagagatagtgtcactgtcttcagatctagactttcatgtctytggtcagatccctgtaaagcctaatcaaatctcttccgagatcactggtgtcataggcaaaatttcatgtcaatcaaatcttaagttttttttttcctctttcttcttcttcaaaataaac

SEQ ID NO: 41472 - DNA, 600 bp, Chicken  19866894277276_2
ttgcttctttctatcttttctatcgcccgtcttcccttctctatcaccccaatccgtaacaatgtctgtctgtctgtcctccccttccccatctcccttattaagttttgtaataaactgkccggaccaacatctggactgttgtttcttaatctcacgctgggtatacatatttcaaagaacctcttctccctcctataaattggagcgagacaaattctaagtacgttttatttgtttttgtggtattcatagaacagagatagtgtcactgtcttcagatctagactttcatgtctytggtcagatccctgtaaagcctaatcaaatctcttccgagatcactggtgtcataggcaaaatttcatgtcaatcaaatcttaagttttttttttcctctttcttcttcttcaaaataaacattaagattatataatgtattcaagacatttctgaacatttttttttaattgcaggtgatttttctatcttaaaaagacatttttaaaattccacattttgtaacactcgcagagaagtgagtaaatgtttgtaaaactcaaaaatgtttataagtgcttgtaagtaaaaattagtagt

SEQ ID NO: 41473 - DNA, 600 bp, Chicken  19866894277277_1
aaaaatttggccctacatctgcccaaaaggtgggaactgggagggaaataattacaccaaacctcctccttcttcctcacaaatattattgctatttgttttcccactgctttgctgcttctaaatatttaatgggcttgaaattgcatttttttattaagttgatgtattatgtgcatggtgtgtgtgttaccatctgcagaaataaagacttttcatcatagaatcatagaacggttggggttgggaccccccagaggccgtctgctcccactgcctgcagtgcacggggacacccayggctccatcagtgctcacagccctccagcctgaccctccttgcaccgtgccrcggaggtctcacaccttgtccaccrcaagcatctgggctgaatattgcctgagatcccagctgctgggattgaaacacacaccgtccccaatgcctgcagggatgggctcaggggcygcacacctggagcrcaggggcacatctgcaggggatggatgtgaaaaaaccctcaagtctttttgcaagaaatcaccctggctcctttcagtgcttccatgaggytgaagggagagcagcgacggagcgcc

SEQ ID NO: 41474 - DNA, 600 bp, Chicken  19866894277277_2
tacaccaaacctcctccttcttcctcacaaatattattgctatttgttttcccactgctttgctgcttctaaatatttaatgggcttgaaattgcatttttttattaagttgatgtattatgtgcatggtgtgtgtgttaccatctgcagaaataaagacttttcatcatagaatcatagaacggttggggttgggaccccccagaggccgtctgctcccactgcctgcagtgcacggggacacccayggctccatcagtgctcacagccctccagcctgaccctccttgcaccgtgccrcggaggtctcacaccttgtccaccrcaagcatctgggctgaatattgcctgagatcccagctgctgggattgaaacacacaccgtccccaatgcctgcagggatgggctcaggggcygcacacctggagcrcaggggcacatctgcaggggatggatgtgaaaaaaccctcaagtctttttgcaagaaatcaccctggctcctttcagtgcttccatgaggytgaagggagagcagcgacggagcgccgcacggccacagctgccgattcaccccgcagcccaattcatctcgtaaaaaa

SEQ ID NO: 41475 - DNA, 600 bp, Chicken  19866894277277_3
cacaaatattattgctatttgttttcccactgctttgctgcttctaaatatttaatgggcttgaaattgcatttttttattaagttgatgtattatgtgcatggtgtgtgtgttaccatctgcagaaataaagacttttcatcatagaatcatagaacggttggggttgggaccccccagaggccgtctgctcccactgcctgcagtgcacggggacacccayggctccatcagtgctcacagccctccagcctgaccctccttgcaccgtgccrcggaggtctcacaccttgtccaccrcaagcatctgggctgaatattgcctgagatcccagctgctgggattgaaacacacaccgtccccaatgcctgcagggatgggctcaggggcygcacacctggagcrcaggggcacatctgcaggggatggatgtgaaaaaaccctcaagtctttttgcaagaaatcaccctggctcctttcagtgcttccatgaggytgaagggagagcagcgacggagcgccgcacggccacagctgccgattcaccccgcagcccaattcatctcgtaaaaaaacatccagttttgatagttcagatt

SEQ ID NO: 41476 - DNA, 600 bp, Chicken  19866894277277_4
ttatgtgcatggtgtgtgtgttaccatctgcagaaataaagacttttcatcatagaatcatagaacggttggggttgggaccccccagaggccgtctgctcccactgcctgcagtgcacggggacacccayggctccatcagtgctcacagccctccagcctgaccctccttgcaccgtgccrcggaggtctcacaccttgtccaccrcaagcatctgggctgaatattgcctgagatcccagctgctgggattgaaacacacaccgtccccaatgcctgcagggatgggctcaggggcygcacacctggagcrcaggggcacatctgcaggggatggatgtgaaaaaaccctcaagtctttttgcaagaaatcaccctggctcctttcagtgcttccatgaggytgaagggagagcagcgacggagcgccgcacggccacagctgccgattcaccccgcagcccaattcatctcgtaaaaaaacatccagttttgatagttcagatttccagtaatggaaaattcacggcagccccggggccgaggagccaggagcccattggaggaacttgttgaaagagcgtccctcgagctctttt

SEQ ID NO: 41477 - DNA, 600 bp, Chicken  19866894277277_5
tgtgtgttaccatctgcagaaataaagacttttcatcatagaatcatagaacggttggggttgggaccccccagaggccgtctgctcccactgcctgcagtgcacggggacacccayggctccatcagtgctcacagccctccagcctgaccctccttgcaccgtgccrcggaggtctcacaccttgtccaccrcaagcatctgggctgaatattgcctgagatcccagctgctgggattgaaacacacaccgtccccaatgcctgcagggatgggctcaggggcygcacacctggagcrcaggggcacatctgcaggggatggatgtgaaaaaaccctcaagtctttttgcaagaaatcaccctggctcctttcagtgcttccatgaggytgaagggagagcagcgacggagcgccgcacggccacagctgccgattcaccccgcagcccaattcatctcgtaaaaaaacatccagttttgatagttcagatttccagtaatggaaaattcacggcagccccggggccgaggagccaggagcccattggaggaacttgttgaaagagcgtccctcgagctcttttccactggaaaatcc

SEQ ID NO: 41478 - DNA, 588 bp, Chicken  19866894277277_6
tgcctgcagtgcacggggacacccayggctccatcagtgctcacagccctccagcctgaccctccttgcaccgtgccrcggaggtctcacaccttgtccaccrcaagcatctgggctgaatattgcctgagatcccagctgctgggattgaaacacacaccgtccccaatgcctgcagggatgggctcaggggcygcacacctggagcrcaggggcacatctgcaggggatggatgtgaaaaaaccctcaagtctttttgcaagaaatcaccctggctcctttcagtgcttccatgaggytgaagggagagcagcgacggagcgccgcacggccacagctgccgattcaccccgcagcccaattcatctcgtaaaaaaacatccagttttgatagttcagatttccagtaatggaaaattcacggcagccccggggccgaggagccaggagcccattggaggaacttgttgaaagagcgtccctcgagctcttttccactggaaaatccaaaagctttctaaaactgttgatttctcataaaacctgaagcagaacacactcggggggggtttacaggggcgagaaga

SEQ ID NO: 41479 - DNA, 600 bp, Chicken  19866894277281_1
ttttgagtttcaaacagacataatagtgcaacaactttcaacactttgccagttgctaaaggagaaatgagatatgcataggactctgatttgtagtatcatgaagtggaaatagtaccactggatttttaggttagactatgccagaatttctttcctgtgttacacctttgaagtaaagctgttttaatcatgaatgtgagtagtagcattcaaaatatgattaaaggacctttctagtctcaaacaacctaactaaactaaaacaatggaaatgataaacataggtatgtgatcatrctgggttggagaaacaactacatctgtttttctgttcaacttttttttttttttttttttttttttaagtgatagaattaacctaagatcttctgtgatcatatttgctttctaaaagaagaaataatttctaacattttagacaaactgaggccctgatttcatggctgttctttggctttgcaggccctgagcctgccatgaatctgcagagagtcagggttcatttggggtccaagagcttgaagagcctggagagcagcagatagaaaatcagagttttacatatggataattaag

SEQ ID NO: 41480 - DNA, 511 bp, Chicken  19866894277284_1
caactgttgactgatggttgaccaggggttaactaatggttgaccagtggttggccagctgttgactgatggttgaccaggcgttaactaaatggttgaccaatggttggccaactgttgactgatggttgaccagtggttggctaactgttgaccagttgttgaccattatttcaccactggttgactaatggtttaccaattattgaccaacggttggccaacagttgcccgtgagccagcactgtgccccggtggccaaaaccaaccgggccaggggggtgggcagctgacccaacsccacgtggtgcctctccctgctcccccaggaggacaagagcctggtgcacggcaacgtgtgtgccaagaacgtcctgctggcgcggacggggttgtgcgacggcacgctgcccttcatcaaactcagtgaccccggggtcagcttcactgcgctgtcccgggaaggtgcggtgttcctgttgtcctccctgtgtcatgggggttgggaagg

SEQ ID NO: 41481 - DNA, 600 bp, Chicken  19866894277287_1
agtacctcatagccaccaaccagcaaactcccctgtctgctaagatcagtctctcatttgtgccagcaatgagattctgaaggcaagaatgggccacacacgagctgtatgaagaccaggaccttacctcacttttcagacatcttctggtaaatttaaattaagtgcatcagccctaattctataacactgatctcctttgtagagaatttcccccactgatttcttcagtatttttaatactagtctccacacaatagaagtgcttaatcctaaattttcaatacagatgtagcattmtttgtggtttttgaaaatgtacacacatttactagagagagttgtgtttgacatgtctttcctccttggcatgtctctgttaagacagatgagcatactcttgcattaccagggagacactaactgtactgtggttatcagaattagcttaatgtccatcatactaagtctcttacacagcaaaaggctattgggtgagggtttatctcacccaatttaagttctcttggaagaactcttctgagctaagcatttaatgccttttaaaaacacagatgctaaatgaaatattttatgttt

SEQ ID NO: 41482 - DNA, 599 bp, Chicken  19866894277292_1
  misc_feature (1)..(6): n is any nucleotide
nnnnnnagctccccagcaccgggaggatgaagggcagagggagaccgggctgagaaggggacagcgtgtgggtctgcggcgtttgctcacctccacagcgatccctgagccaacctcactgagcatcagcgtggaattttgggactggaggagtcagggtaccctctccgagacagcgatctctccttcctcgctgccattccctgctccatccccatggcctcctcggaggggctgcagtaccgcgcgctctacgaataccagaaggaccgggacgaggacctggcgctgagccccggrgatgtgctgactgtcagcagggctgcactgctctctgcccccaactacaaggacggggatgagcgcagcccccagggctggctgcacggcctcaacgagcgcaccaaggagcgcggacacttccccggcacctacgtggagtacctgggccccgtgtgcatcaccagcaccaaggccaagacacggcctttgcccccgccgcccgctgggacccccgtgcccaccggccagccctggggtgagtgtggggatggggggaatcctaggatgaatcacagaatggctggggttggaaggga

SEQ ID NO: 41483 - DNA, 600 bp, Chicken  19866894277292_2
tgtgctgactgtcagcagggctgcactgctctctgcccccaactacaaggacggggatgagcgcagcccccagggctggctgcacggcctcaacgagcgcaccaaggagcgcggacacttccccggcacctacgtggagtacctgggccccgtgtgcatcaccagcaccaaggccaagacacggcctttgcccccgccgcccgctgggacccccgtgcccaccggccagccctggggtgagtgtggggatggggggaatcctaggatgaatcacagaatggctggggttggaagggaccwcaaagatcgtctagttccaactcctgcacgccgtgatcctctcttcctctgggatgtggcagaggagaaatcgctgctgtgcagggctgggggagcagcacgggcacctggtggtgaggagtctgtcccccccccgaaatatggttccagacagcagcagtgggaccactcagccctcgggttgagcaggatatgagtctgggggtgcacccgctagaagggcccaggtggacctcaataagatgctgggagctgcttttttgcatccctctgaagcagagggatgggatcaggaatagc

SEQ ID NO: 41484 - DNA, 600 bp, Chicken  19866894277293_1
attggtgactatccagatttctatgtaagcatttggtgtgatgctgtgtgtttgtgtgtgtatgcatatatctatgtttatctgtatcttgtcttaactgatataatgtagacagcacaatgcattttcctccaaagacctataaactgagctctattgaatagcttatgatcccagaaccatcttttctgtttaatggtgtaatgtatcttctgtagacacgaaaatctggaaaatcacattaatgctaggtttaattagagtaatgatcaaatttggaggttaggcttgaaaaatacrtatccagattgtcaaaatttcttcatcaaaggttcctattggatgcctgtgctcgctaacttactgtcttcggaggtctatcaaatttggactatgacctagtttgatggttaaaactgactgtaatattgacaagtttttggtatgacatgaaaagtattgaagtttattgttctacagacttctttctaggctttagctgagacacatataggaattattttctttctttagacatcttcacaaaacgtgcagtaataaaattttgtcttaaacacctctacttttctttgaatctgt

SEQ ID NO: 41485 - DNA, 600 bp, Chicken  19866894277293_2
ttttctttctttagacatcttcacaaaacgtgcagtaataaaattttgtcttaaacacctctacttttctttgaatctgtgtagaaatttgaattattaggaacaagagatgaaaagggatagaaaacatagccataagtttccttccccaagaaaataggtttaaagtgtttgctaacagttgctaagacaaacaattataaaaaaaaaatagtttattgccatttcttgcctgagaaccaaaaagccaattaatatttaagcagtcactttccatctgcctagtcctgatttgtccayctgtcagcagtgatctccatcaaarcttaccaggaggatgagcatctctcagcagactctccaagactgaaggaagyctatttcactagcatggatagcactgttgtagcttttgtcttcagtgccyattgcgctcttggacagggtaacataaacgaatatgcttcctctcactagtgagtggagagcagctgctgataaggggaatcatacagtgggaagggaatgagattttaagtaatctgggcaatgacagccctgagggttctgcagcttgtaagcagcatggacactctctga

SEQ ID NO: 41486 - DNA, 600 bp, Chicken  19866894277293_3
aaacgtgcagtaataaaattttgtcttaaacacctctacttttctttgaatctgtgtagaaatttgaattattaggaacaagagatgaaaagggatagaaaacatagccataagtttccttccccaagaaaataggtttaaagtgtttgctaacagttgctaagacaaacaattataaaaaaaaaatagtttattgccatttcttgcctgagaaccaaaaagccaattaatatttaagcagtcactttccatctgcctagtcctgatttgtccayctgtcagcagtgatctccatcaaarcttaccaggaggatgagcatctctcagcagactctccaagactgaaggaagyctatttcactagcatggatagcactgttgtagcttttgtcttcagtgccyattgcgctcttggacagggtaacataaacgaatatgcttcctctcactagtgagtggagagcagctgctgataaggggaatcatacagtgggaagggaatgagattttaagtaatctgggcaatgacagccctgagggttctgcagcttgtaagcagcatggacactctctgaccttgctttctttgcctcatttcac

SEQ ID NO: 41487 - DNA, 600 bp, Chicken  19866894277293_4
tgtgtagaaatttgaattattaggaacaagagatgaaaagggatagaaaacatagccataagtttccttccccaagaaaataggtttaaagtgtttgctaacagttgctaagacaaacaattataaaaaaaaaatagtttattgccatttcttgcctgagaaccaaaaagccaattaatatttaagcagtcactttccatctgcctagtcctgatttgtccayctgtcagcagtgatctccatcaaarcttaccaggaggatgagcatctctcagcagactctccaagactgaaggaagyctatttcactagcatggatagcactgttgtagcttttgtcttcagtgccyattgcgctcttggacagggtaacataaacgaatatgcttcctctcactagtgagtggagagcagctgctgataaggggaatcatacagtgggaagggaatgagattttaagtaatctgggcaatgacagccctgagggttctgcagcttgtaagcagcatggacactctctgaccttgctttctttgcctcatttcacctgataaatgagtgtggtgcactgggagttcgggtctacccgcccacagcag

SEQ ID NO: 41488 - DNA, 600 bp, Chicken  19866894277293_5
catagccataagtttccttccccaagaaaataggtttaaagtgtttgctaacagttgctaagacaaacaattataaaaaaaaaatagtttattgccatttcttgcctgagaaccaaaaagccaattaatatttaagcagtcactttccatctgcctagtcctgatttgtccayctgtcagcagtgatctccatcaaarcttaccaggaggatgagcatctctcagcagactctccaagactgaaggaagyctatttcactagcatggatagcactgttgtagcttttgtcttcagtgccyattgcgctcttggacagggtaacataaacgaatatgcttcctctcactagtgagtggagagcagctgctgataaggggaatcatacagtgggaagggaatgagattttaagtaatctgggcaatgacagccctgagggttctgcagcttgtaagcagcatggacactctctgaccttgctttctttgcctcatttcacctgataaatgagtgtggtgcactgggagttcgggtctacccgcccacagcagtgcaaatcacttcactgaagggataattgagtatgtgagaggctctgctc

SEQ ID NO: 41489 - DNA, 600 bp, Chicken  19866894277295_1
ccgtactttgaagtttgatggaagcacatgtagtgagaagtaaatatgtgagttttcaggatcacaaaaaaagcgtgattataaaaatatacactaagtttagctattcctcttctcctgtactgttaaagggacaccaataggcctgcttgtcctgacatcatacctgctagatatcttttgatttaaacacgaatgctattttctgcttcttatccatccttatcaacagtcaggatactctggccttattccactgttcttgttatatgtctacacctatatctacaaggtgagcargatacaagaatgactgaattcatatatacttctttctcaacaaatcctgagcacgttccccagccaagaagagcagggagacatgagggataaggaaactgtatctctacggtgtaatgatgggaactgcgtctgtgtctgaacaacagctgtttcagaattgataatgacattctttctttcctttttttttttttaaatttttttttaatttttaacaaaaaacagatatttacttagaacttttgggcttygtcaatttaatctatatttttaacaagrttctttcactgtgtcatt

SEQ ID NO: 41490 - DNA, 600 bp, Chicken  19866894277295_2
ctattttctgcttcttatccatccttatcaacagtcaggatactctggccttattccactgttcttgttatatgtctacacctatatctacaaggtgagcargatacaagaatgactgaattcatatatacttctttctcaacaaatcctgagcacgttccccagccaagaagagcagggagacatgagggataaggaaactgtatctctacggtgtaatgatgggaactgcgtctgtgtctgaacaacagctgtttcagaattgataatgacattctttctttcctttttttttttttraatttttttttaatttttaacaaaaaacagatatttacttagaacttttgggcttygtcaatttaatctatatttttaacaagrttctttcactgtgtcattttcttctctcttagctaatctactcagtgcagggctgacttaaaagcactaactatacttctgtgggctcttccatggagagcctygcattgcagaaggcacctctatgaacattttttgcaaatgcttttggaaacactttcccatcccttctgctggaacaatgcaaataaggttaattattgtgaatttcttcaa

SEQ ID NO: 41491 - DNA, 600 bp, Chicken  19866894277295_3
cactgttcttgttatatgtctacacctatatctacaaggtgagcargatacaagaatgactgaattcatatatacttctttctcaacaaatcctgagcacgttccccagccaagaagagcagggagacatgagggataaggaaactgtatctctacggtgtaatgatgggaactgcgtctgtgtctgaacaacagctgtttcagaattgataatgacattctttctttcctttttttttttttaaatttttttttaatttttaacaaaaaacagatatttacttagaacttttgggcttygtcaatttaatctatatttttaacaagrttctttcactgtgtcattttcttctctcttagctaatctactcagtgcagggctgacttaaaagcactaactatacttctgtgggctcttccatggagagcctygcattgcagaaggcacctctatgaacattttttgcaaatgcttttggaaacactttcccatcccttctgctggaacaatgcaaataaggttaattattgtgaatttcttcaatttcttgtatgtatacagggtgtgaactgcacagtttaaagttccagtgttattca

SEQ ID NO: 41492 - DNA, 600 bp, Chicken  19866894277295_4
tatctacaaggtgagcargatacaagaatgactgaattcatatatacttctttctcaacaaatcctgagcacgttccccagccaagaagagcagggagacatgagggataaggaaactgtatctctacggtgtaatgatgggaactgcgtctgtgtctgaacaacagctgtttcagaattgataatgacattctttctttcctttttttttttttaaatttttttttaatttttaacaaaaaacagatatttacttagaacttttgggcttygtcaatttaatctatatttttaacaagrttctttcactgtgtcattttcttctctcttagctaatctactcagtgcagggctgacttaaaagcactaactatacttctgtgggctcttccatggagagcctygcattgcagaaggcacctctatgaacattttttgcaaatgcttttggaaacactttcccatcccttctgctggaacaatgcaaataaggttaattattgtgaatttcttcaatttcttgtatgtatacagggtgtgaactgcacagtttaaagttccagtgttattcacatagcagtcctggggacagactttgac

SEQ ID NO: 41493 - DNA, 600 bp, Chicken  19866894277295_5
gggataaggaaactgtatctctacggtgtaatgatgggaactgcgtctgtgtctgaacaacagctgtttcagaattgataatgacattctttctttcctttttttttttttaaatttttttttaatttttaacaaaaaacagatatttacttagaacttttgggcttygtcaatttaatctatatttttaacaagrttctttcactgtgtcattttcttctctcttagctaatctactcagtgcagggctgacttaaaagcactaactatacttctgtgggctcttccatggagagcctygcattgcagaaggcacctctatgaacattttttgcaaatgcttttggaaacactttcccatcccttctgctggaacaatgcaaataaggttaattattgtgaatttcttcaatttcttgtatgtatacagggtgtgaactgcacagtttaaagttccagtgttattcacatagcagtcctggggacagactttgactttatgttgatagatgcattatggcttggcagagtgatgctctgacctttgctgatggtcctcaaaatcacggtaggtttggctgtagctctggggaggcacat

SEQ ID NO: 41494 - DNA, 600 bp, Chicken  19866894277298_1
atgctctttgggagcttatcacttccagtgacctaaatacagaggggtttgttgcgtttcattgaaaaacaggattgagatccttatctgtctgtacagaaacaaagtgctgcatgaaagcatcaggacctgcctggctctgagcagcgtatccccagagcaggtgctgagcagctgtgggaaggcgcagtgaatatcttccagtgccctgagaggtggtatgtccctgctggaaggctgaagacgaaggacagagagcaaggttgctatggcgcatcctgaggctgggtttcagcaggrcacgatgtgtgcagctgtgggatgagggctctgcagctgttctgctgccgagaaatgctgagaagagcaaggagttgggaatggagcccggtgagatcagagaggtggaacagaacctgcggccatcatggggacagccaggcagcaagagagcctgtgctgcaggggatgaggtcaccgtatggcagggggacaggaggtgaccgtgctgccctgtccgcgggcaggacacctggtgagagatgggctcctgctcagctcctaccctgagaaaaatgcacagccggagagagcagacag

SEQ ID NO: 41495 - DNA, 599 bp, Chicken  19866894277304_1
  misc_feature (1)..(50): n is any nucleotide
nnnnnnnnnnnnnnnnnnnnnnnnnnnnnnnnnnnnnnnnnnnnnnnnnntaattttaagtcctgttggctttacgtgtgattttttggagtaacataactgacgcaaaggataaaggttaaaaaatcatctttagcaatggcaggctggtgcttgatcactccctgctccactctgcagtgcgatggcccacgagatgctgagtaccctcaggtcccatgtatagggcctcaagagagcacagcccttggcgggattgtgcctttctgtgtggagcagagataattcggctgacaaagwttttctggagtatttgtagggaagcatcctggctcttctcctgccgtggtgtgtgtgaggattcttgttccctagggcagaatcaggccctgagctttggctgcagcagtgcggctttggatctggtgtctagctgtgtctgcagagcagcagcaaagacaggcatgtcctcagcagtgcatcgatagcaaggttatgcccatttagccaggtgtttctcaggtgtggaaatagcatggatacattactgtaagctgaggactcaaacacagaccttcatttacagcctggtgkagtgt

SEQ ID NO: 41496 - DNA, 600 bp, Chicken  19866894277304_2
caaagwttttctggagtatttgtagggaagcatcctggctcttctcctgccgtggtgtgtgtgaggattcttgttccctagggcagaatcaggccctgagctttggctgcagcagtgcggctttggatctggtgtctagctgtgtctgcagagcagcagcaaagacaggcatgtcctcagcagtgcatcgatagcaaggttatgcccatttagccaggtgtttctcaggtgtggaaatagcatggatacattactgtaagctgaggactcaaacacagaccttcatttacagcctggtgkagtgttaatgattggaaaggattgcacagaaatccttaaactctgggaaatttccacacagctagtctgcagtagagctttaaaatcctttctatcccctgctagacccttaagaaaggaaaacttttggcttggttccagcagcaatagattgacagaataacactggcctgatttcacagaacaacctcccaccccccccccccccacacacacacacacaactaactgtgcattattttagctgctcccagcttccaaagcgtgagagcttgcactaatggtggagaaggcacattg

SEQ ID NO: 41497 - DNA, 599 bp, Chicken  19866894277305_1
  misc_feature (1)..(2): n is any nucleotide
nnattcattcactgctgtgataattgatctcccaatctgtctcggggagttagcagctggtaagaaataaaatgtaatttagacttctgttatttgaaaagaaactttcacctaagcacagcaaccaaataaggaacctgagctctcctcctcccctcatttgccagtcttaataagaaagattgatacagcaaaacaaaggatgagtgcacgggtatctgagaaacgcactgtacatcattagcattaagcaccgtgggtggactctgcaccctcaaaagtcactgctgagtttggacygcgttctgttcagccccgcaaggagaagcaaagcagacccaaacctggctgttctcatcagcctcctctgtcagcccacctctgctcgcgctgcacacacagatggagacaggatttgatttttatattgagatcagctgaaagcaaatgcatttttatctgccgggagtagaacgaaaggactccataattcacaataacccaatgaattagaaagtgatcagccaaacagtgttttcaggtggctgaaaaatattgtgctgtcaccgctaatagcacaagaatgataatgctgttcc

SEQ ID NO: 41498 - DNA, 580 bp, Chicken  19866894277305_2
catcagcctcctctgtcagcccacctctgctcgcgctgcacacacagatggagacaggatttgatttttatattgagatcagctgaaagcaaatgcatttttatctgccgggagtagaacgaaaggactccataattcacaataacccaatgaattagaaagtgatcagccaaacagtgttttcaggtggctgaaaaatattgtgctgtcaccgctaatagcacaagaatgataatgctgttccttggctgaagtgggccgtcctgagcgacggaatggacgtgatgtcattatgaagcygagataaccgtgcaagtctgatgggaagatcctggctggagccagctcagtctgccagccccactgggaagcaacagataaacacaataagctcttaattggtgtcatgcctttaacattcagtatggagcacctcttacactgctaccctctgtccctcctgggatgagcagggctgggaggcagctcatggctcagcacatggcagtgagacaggcaggggttgactcccagtctttagttaagcaggttggactgcaaaaacttcagtaattcacaa

SEQ ID NO: 41499 - DNA, 600 bp, Chicken  19866894277325_1
ttcctctacaagatggccaggaatgtgctatctagtgccaccaggaacctgcaggagaggccctatcctactcctggcagcttgtgcactttgctcacatctccttgtgttgtgttgtctgcacatccagaaactaggctgcgcctcaggtagctcctgagaagccactgaagaagaaacccttaaggtacataaatgataggaaggtcttcatccccagggctcccaagtgctccagcatctccagcccggtgtgcaacagctctgtctccacaaacaggtgtcatccccagagtgggmagcagccagggcaggcagtgggcttccacagggagaaggcagctcggctctgctgcaaccccctcgcctgaggagaaccgcagacccttatcaggattcagcccctcgctgtgaggaggagcgattgttttcctttctgggtctcccagctctccctctaatgctctgctctctttctctctcatctatttcctttgacgcgggtcccaggcccactgccaagtctcagatccattagcgaggtgcctcgctgactgaagcacaaatcaggacggatccgggtgcaattagcagcttcta

SEQ ID NO: 41500 - DNA, 599 bp, Chicken  19866894277328_1
  misc_feature (1)..(39): n is any nucleotide
nnnnnnnnnnnnnnnnnnnnnnnnnnnnnnnnnnnnnnncaacttgaacataatcaattctttatttctaagcacacttctacagaagaatgcttctattcctttaccacaaactgcattttaccagcgttaacaaagatcacccataagttgcatgcagttcatccgtgatcatattatgtacttgtacaccacaggtggtgactttcattctataaagaaaacaaaaatatcctgccagcttgacctgctttttgaaaaggtaagcaaagctctagcaaagacacataaacacttcasattcaagtgaaaatctgacccagttttttaggcacagtcacaaacacatcaaatgaaaatgtacagagggaagaggaaagatgggatttccttacctctcagactaggatttcaggtaattctttccttcttctataatgcagtattcacaaaggaaatataaaaaggtaaataagtctaattgatactggtctaataaagtgagattttgaaaactgaaaagcattaaaaaaatctgatttttctgtcattctccaaacgttaccaggtatgcacctctgcagctgaactgctgtgcc

SEQ ID NO: 41501 - DNA, 600 bp, Chicken  19866894277329_1
attcagaaactgcttatgcatgaagacttcactcatgacctttaaaaggattttcttagacaatgagtgttctcagggtacatgaatcatccccagattctcattctggggatgagttcagtgacaacttatttgccagtcaacagcatcagatagaattttcttacctaaatgatacaattaaaaaacattatatgtttctctttttacctttagtcccagcttctcagtcacagtcttttaatcactggttcctgagcttctgcttagcattggaactgggtaaggtattttgagtaytagcaagtgatcacaccatgcacttaaagcacatatcgttggaatgttggcattaacggcctgcctcccacatccactaacacttagtgatggtaatttctgatttttaaaggtacactttacatttcagactcattaacatatgctttcaatgtcatgaaagttattcattaaagtgacaaaaacttttattaataaccaccacaaagtgactgcataaattgttatgcatatgcacgatcctgcagtggcaaaaatgaagcaattaacttaaaatgcaatcctgcagcaggctgaggc

SEQ ID NO: 41502 - DNA, 600 bp, Chicken  19866894277330_1
agcctcactagttgttctctaaggagacagatgaaattttaagaactgttgattctgccatcataaggtaacacacatacattatgtctacaatcagtgaaaaagaaggactcttctggatttctcaaaagtcttaggcatagattagaagcccaactccttcctccccgccacaggtggcccttcccaatgccagaacaatttacctactcagcataagtagcacaagtaaaagtagcagcactaaggaatcagtgattaaaggagtcacagtaagcaaaacaagagcctagttacagkcttcagggctgtgctgctcacaactcactgcaaaggctgacaggtgttggcaatatacagtgtgagtctgaggcaatggagctgagggatggatgtgttaatgcatctgagcaattgctgacttctcacacgctgaatagattacaacctctctagctcaacaaacttcccagtaatacaccttctgccaaaagacatttctttacatcatgactgaagaatatgaactacaggagagacccagcatcccagatcaatgcttaccagctttccagctggaagaaccataaaggaagaatg

SEQ ID NO: 41503 - DNA, 600 bp, Chicken  19866894277332_1
gattccagtctgcttttctttccttttactttattatttattttaacagttttaggaaatcacacatcactgtacagttttaagggatcttggattttccttcttttccccccccagacatctccaactgaacagaaaagtgtctgtctatatgatcttgttcatgtaaatccaagggacagaatcagacttgccctatttcctgtacaatccagttcctaggtgctgcacagattatgaacatcaggacagacctaacaccaagataaggtgggatcttttcttcaagcagaaaatacrtaaaaagaaaaaaaattggttacaaaaaagaagaattaaataaagtttctgagtggcagtggattatgttcatttctaatttgtaaccatatcagagattgaggaaagaaatttcagtcagtagatgaggccctcagatatcaatacttgtttgactgccagagaagagcaaggaatagcggccaaaggggatgcatttcttgaattacagcacttttcattagctaatgcccaggaggatttccttggatatgcagaaatgctaaccatgatcacatgagagcagggaatcagagagaa

SEQ ID NO: 41504 - DNA, 600 bp, Chicken  19866894277332_2
tcagtagatgaggccctcagatatcaatacttgtttgactgccagagaagagcaaggaatagcggccaaaggggatgcatttcttgaattacagcacttttcattagctaatgcccaggaggatttccttggatatgcagaaatgctaaccatgatcacatgagagcagggaatcagagagaataaagtctttacgaacacaacaacatttcagctgctggataatccagattcagagggctgtttccaaatcagagagaaagcaatatatcacaaagccaaagctttcccctggaaccmtaactgattcatttttgtaatatattatttataaaaaacaaacactgcttttgtcatctactgcctgcaactccttcagcggagttttatgtggttcatttcagactcccagcatcacttttgagaggagaatgatactctctgtgaaagcatacataggtggtccaagttctgtgccctctgcactatatgccatgggcaaagtaatttggagtgagatggaacatgatgctgaatatgctgcacctgtcagcaaacatgatgctaaaaggttggtagtatataatgactgaggaggaa

SEQ ID NO: 41505 - DNA, 600 bp, Chicken  19866894277334_1
ggagcagcttaatgtaggtaaataattcctagtgagagattctatcttaaattacaacgcatgaagtgcataagtagtctttgttggaagaaagcagttcttttcctttaggttctggataggttcttgagacttacctttcaaaggacaaggaaggcaataccatttgtaatgcattcataaggtatttaaatgcaatggtttagatgttagagcactctcctaggatatgagatgcctcagttcaattccttccactgtttatggaaattcaaaccttaactcccacatctcagtggraaaatgtcttaaatggcatgctatgggatatttaaaagggaagagtgctctctctctcgcaccttttcaataattaaagaaccactaaaccacrgggactacaaacatgaacatggccaactatcaaaacactttcttgggagaggaagaaactgagttccacatctgttatatttagtactaagtactccttggatcaagatttttagcagcaaacccagagaaccaaacagctgatagactttgatgaggctgagatggaacagcattgctgtgtacttgcaagcctgtcatggaata

SEQ ID NO: 41506 - DNA, 600 bp, Chicken  19866894277334_2
cagttcttttcctttaggttctggataggttcttgagacttacctttcaaaggacaaggaaggcaataccatttgtaatgcattcataaggtatttaaatgcaatggtttagatgttagagcactctcctaggatatgagatgcctcagttcaattccttccactgtttatggaaattcaaaccttaactcccacatctcagtggraaaatgtcttaaatggcatgctatgggatatttaaaagggaagagtgctctctctctcgcaccttttcaataattaaagaaccactaaaccacrgggactacaaacatgaacatggccaactatcaaaacactttcttgggagaggaagaaactgagttccacatctgttatatttagtactaagtactccttggatcaagatttttagcagcaaacccagagaaccaaacagctgatagactttgatgaggctgagatggaacagcattgctgtgtacttgcaagcctgtcatggaatagagttgcctcaccagagtgaggaagcagctatgtcaggatatyragcatttaaattgaatctaaagagtttagaatacaaaatactctgtggac

SEQ ID NO: 41507 - DNA, 600 bp, Chicken  19866894277334_3
agtgctctctctctcgcaccttttcaataattaaagaaccactaaaccacrgggactacaaacatgaacatggccaactatcaaaacactttcttgggagaggaagaaactgagttccacatctgttatatttagtactaagtactccttggatcaagatttttagcagcaaacccagagaaccaaacagctgatagactttgatgaggctgagatggaacagcattgctgtgtacttgcaagcctgtcatggaatagagttgcctcaccagagtgaggaagcagctatgtcaggatatyragcatttaaattgaatctaaagagtttagaatacaaaatactctgtggactgagatgtccattagtacaattaacatttaaacttygaggaattatcatctcattaaacaagtgtgataaaaaacagttaataatgattataaaaaattaaaaagcatcaaataaaaatatccccttgtgcaatatttaaagtatcaaaacactgaatggattaaacttaagcatggcatttaatcagtcaaaagatagcacaagggtttttttatagtgggagatttcgttgtttttcaaaacatagt

SEQ ID NO: 41508 - DNA, 600 bp, Chicken  19866894277334_4
gtgctctctctctcgcaccttttcaataattaaagaaccactaaaccacrgggactacaaacatgaacatggccaactatcaaaacactttcttgggagaggaagaaactgagttccacatctgttatatttagtactaagtactccttggatcaagatttttagcagcaaacccagagaaccaaacagctgatagactttgatgaggctgagatggaacagcattgctgtgtacttgcaagcctgtcatggaatagagttgcctcaccagagtgaggaagcagctatgtcaggatatyragcatttaaattgaatctaaagagtttagaatacaaaatactctgtggactgagatgtccattagtacaattaacatttaaacttygaggaattatcatctcattaaacaagtgtgataaaaaacagttaataatgattataaaaaattaaaaagcatcaaataaaaatatccccttgtgcaatatttaaagtatcaaaacactgaatggattaaacttaagcatggcatttaatcagtcaaaagatagcacaagggtttttttatagtgggagatttcgttgtttttcaaaacatagtc

SEQ ID NO: 41509 - DNA, 600 bp, Chicken  19866894277334_5
actttcttgggagaggaagaaactgagttccacatctgttatatttagtactaagtactccttggatcaagatttttagcagcaaacccagagaaccaaacagctgatagactttgatgaggctgagatggaacagcattgctgtgtacttgcaagcctgtcatggaatagagttgcctcaccagagtgaggaagcagctatgtcaggatatyragcatttaaattgaatctaaagagtttagaatacaaaatactctgtggactgagatgtccattagtacaattaacatttaaacttygaggaattatcatctcattaaacaagtgtgataaaaaacagttaataatgattataaaaaattaaaaagcatcaaataaaaatatccccttgtgcaatatttaaagtatcaaaacactgaatggattaaacttaagcatggcatttaatcagtcaaaagatagcacaagggtttttttatagtgggagatttcgttgtttttcaaaacatagtcacattgaagtaattgtcttgttaaacatttctttttgaataattgtcttgctatttattattattattattattattattattatt

SEQ ID NO: 41510 - DNA, 599 bp, Chicken  19866894277339_1
  misc_feature (1)..(7): n is any nucleotide
nnnnnnnttcatggctacttcctactttcccttttgtaaaggggagaaacaaatttggtatcatctaaagaacatggataattgtgaagtattgagtatacaccagatgctgattatgcttcagttctgttactaataagactgaactatattaaggaaaaaaagttaaagcattcagcaatggaactcacaggtattacaaaccaggaagagtttgggaaaaagcctagccctaacagattcaaataaccctcagagcatccaatcttagctgcagtcatttcttaaccctgcactgakgctccttcaccagctgaggcagaacartgtgaacataaaatgcagyctcgtagctctgttctttgccagtccacctgtcctgcagcactcacacctcatcccatgctcctcaggctgctgagttctgcagtgtcaggccaaagcccttaaatccatccctgtttaagagatgtaaatccattatccaaactggaaattcagacatcgcttacattttactgaatataatagtaattatgggatgaataagactgatcaaagaagccagtactcatgaaggaccatcagcacattgatgt

SEQ ID NO: 41511 - DNA, 600 bp, Chicken  19866894277339_2
tcccttttgtaaaggggagaaacaaatttggtatcatctaaagaacatggataattgtgaagtattgagtatacaccagatgctgattatgcttcagttctgttactaataagactgaactatattaaggaaaaaaagttaaagcattcagcaatggaactcacaggtattacaaaccaggaagagtttgggaaaaagcctagccctaacagattcaaataaccctcagagcatccaatcttagctgcagtcatttcttaaccctgcactgakgctccttcaccagctgaggcagaacartgtgaacataaaatgcagyctcgtagctctgttctttgccagtccacctgtcctgcagcactcacacctcatcccatgctcctcaggctgctgagttctgcagtgtcaggccaaagcccttaaatccatccctgtttaagagatgtaaatccattatccaaactggaaattcagacatcgcttacattttactgaatataatagtaattatgggatgaataagactgatcaaagaagccagtactcatgaaggaccatcagcacattgatgtgcttctgcagcataacatgccacatcct

SEQ ID NO: 41512 - DNA, 600 bp, Chicken  19866894277339_3
aaacaaatttggtatcatctaaagaacatggataattgtgaagtattgagtatacaccagatgctgattatgcttcagttctgttactaataagactgaactatattaaggaaaaaaagttaaagcattcagcaatggaactcacaggtattacaaaccaggaagagtttgggaaaaagcctagccctaacagattcaaataaccctcagagcatccaatcttagctgcagtcatttcttaaccctgcactgakgctccttcaccagctgaggcagaacartgtgaacataaaatgcagyctcgtagctctgttctttgccagtccacctgtcctgcagcactcacacctcatcccatgctcctcaggctgctgagttctgcagtgtcaggccaaagcccttaaatccatccctgtttaagagatgtaaatccattatccaaactggaaattcagacatcgcttacattttactgaatataatagtaattatgggatgaataagactgatcaaagaagccagtactcatgaaggaccatcagcacattgatgtgcttctgcagcataacatgccacatcctctcacctagaagcttttac

SEQ ID NO: 41513 - DNA, 600 bp, Chicken  19866894277339_4
acatcacgcatggagacggcatttaatttatgaaatacagatgtttcagcaggttctttctggattgagctattaaaatgagttaaatagtacctctggattgaatagcattaatgaatgtcaaagcaatggagaagctgtctgtaaaatgagtatatagttatctgctattaatgtgtggtcattaacagaactcattcactgtagacattttagaatttagaaagaagagaaagaaaagggaataaatatgaaaaagcaaagcaaaccgtacagcatatttgccagcatcacccccaratctgccaattgaggcttggggaaaggaaagagcccgtgaaataataaataataaataaaaagtggggctagtctgatctgttaatcaattgaggaaaattcagaagaaaatggaatgttatttcctgtggttcagtaatagatatactggtagtaaacaaaggtgtacagatttctgactacttctgatggttcaggactagcgcagaacatgctggtgcagctgaamtgtaagtactactgctgggacrgcctcagcaaagctcttaacatcagcactgatacaaaattgtagcactg

SEQ ID NO: 41514 - DNA, 600 bp, Chicken  19866894277339_5
gagaaagaaaagggaataaatatgaaaaagcaaagcaaaccgtacagcatatttgccagcatcacccccaratctgccaattgaggcttggggaaaggaaagagcccgtgaaataataaataataaataaaaagtggggctagtctgatctgttaatcaattgaggaaaattcagaagaaaatggaatgttatttcctgtggttcagtaatagatatactggtagtaaacaaaggtgtacagatttctgactacttctgatggttcaggactagcgcagaacatgctggtgcagctgaamtgtaagtactactgctgggacrgcctcagcaaagctcttaacatcagcactgatacaaaattgtagcactggaacagtcttgagtttattcacattgtgggaatcattctttcatttcctctttccactttccctctacttatccacctaggtggataaaggagaaagcttttaatcttctgaactgccactaatgttttgtctcagaccagagttttggaagattataagcccccaaatcaactatcacacgaatgaatgcacaaattatgctttaaaagtaaataattaaaaaaaaaa

SEQ ID NO: 41515 - DNA, 600 bp, Chicken  19866894277339_6
tgaaaaagcaaagcaaaccgtacagcatatttgccagcatcacccccaratctgccaattgaggcttggggaaaggaaagagcccgtgaaataataaataataaataaaaagtggggctagtctgatctgttaatcaattgaggaaaattcagaagaaaatggaatgttatttcctgtggttcagtaatagatatactggtagtaaacaaaggtgtacagatttctgactacttctgatggttcaggactagcgcagaacatgctggtgcagctgaamtgtaagtactactgctgggacrgcctcagcaaagctcttaacatcagcactgatacaaaattgtagcactggaacagtcttgagtttattcacattgtgggaatcattctttcatttcctctttccactttccctctacttatccacctaggtggataaaggagaaagcttttaatcttctgaactgccactaatgttttgtctcagaccagagttttggaagattataagcccccaaatcaactatcacacgaatgaatgcacaaattatgctttaaaagtaaataattaaaaaaaaaaaagaagcatctttaattgctag

SEQ ID NO: 41516 - DNA, 600 bp, Chicken  19866894277339_7
cagctgaamtgtaagtactactgctgggacrgcctcagcaaagctcttaacatcagcactgatacaaaattgtagcactggaacagtcttgagtttattcacattgtgggaatcattctttcatttcctctttccactttccctctacttatccacctaggtggataaaggagaaagcttttaatcttctgaactgccactaatgttttgtctcagaccagagttttggaagattataagcccccaaatcaactatcacacgaatgaatgcacaaattatgctttaaaagtaaataattraaaaaaaaaaagaagcatctttaattgctagcttttgcagcaaattacttcatagctttaaattctctgctacagggaattcaaattgtaacaccgaaaccaaactgggtgaagtggactgctgtatgcctgcagcttatgcagtggttggagtgggtcctaaacaaaacatactaccacaaacaacaaaatgatgagttttgtcagaaggacacaaaatgcatatatttttcttttaaaagaagtgtcatatatacagtgcttgttcagcattacctgctgaaagcagatggagagaaa

SEQ ID NO: 41517 - DNA, 600 bp, Chicken  19866894277342_1
tcgcatgggttgcaaatcctttgccttgcttgctggatccctcgtgcagctctgctttctgccccgggtgcaggatgtaggatcaggttgatggtgctgaaagccctaatttgcactcgagatcatcaggactgccaaactgaggatttccagtcaagaggggcactggcacaggttgcccagaggaatggtggatgtcccatccctgcagacacccaaggtcaggctgcaggggctctgagcacctgatcagctgtgggtgtccctgtgcattgcagggggttggaccagatggccttygggggcccttccaactcaaatcattctatgattctgtgactcaatctttttgctgagcagagcataacattggctaggcacatctctctttcttggtgcaaagaacatttcaggggctcagcgacttgggtattgcttctgtgtttcttcttggatattcagacctgaatttgcattagcgagcacctcagccccacatctctgcacatacccatgggtgagagcatgtggtttaacaagtgtgcacatttcatactgggaggagagcagcatgttcatcatcttaagtgatgcttagtg

SEQ ID NO: 41518 - DNA, 599 bp, Chicken  19866894277360_1
  misc_feature (1)..(219): n is any nucleotide
nnnnnnnnnnnnnnnnnnnnnnnnnnnnnnnnnnnnnnnnnnnnnnnnnnnnnnnnnnnnnnnnnnnnnnnnnnnnnnnnnnnnnnnnnnnnnnnnnnnnnnnnnnnnnnnnnnnnnnnnnnnnnnnnnnnnnnnnnnnnnnnnnnnnnnnnnnnnnnnnnnnnnnnnnnnnnnnnnnnnnnnnnnnnnnnnnnnnnnnnnnnnnnnnnnnnnnnnnnnatccttgggatgccatgaacacaggaagaagcaaaggacaaaatctgcaaaaaaaaaagaaagaaagaaattccaaccgtrggtgcaaagcatttaaaacagataaaccacttctgcagtttgtacctcaggaaaagacagcccacctggagtctggtttgtctagccagacacggtgcatttttgtgtccaagagtcttcctcatttgctttcagtctgcytttctaacgaatcgagatgtgcacgatcacattgccactatgytccccttaactttcaaatctagttcaagcaaatttaatgcagggggaggggtcttaatggcattaagtcctacatgtttcatgaaaatcggcagctgggcagagatcctgttaat

SEQ ID NO: 41519 - DNA, 599 bp, Chicken  19866894277360_2
  misc_feature (1)..(78): n is any nucleotide
nnnnnnnnnnnnnnnnnnnnnnnnnnnnnnnnnnnnnnnnnnnnnnnnnnnnnnnnnnnnnnnnnnnnnnnnnnnnnnatccttgggatgccatgaacacaggaagaagcaaaggacaaaatctgcaaaaaaaaaagaaagaaagaaattccaaccgtrggtgcaaagcatttaaaacagataaaccacttctgcagtttgtacctcaggaaaagacagcccacctggagtctggtttgtctagccagacacggtgcatttttgtgtccaagagtcttcctcatttgctttcagtctgcytttctaacgaatcgagatgtgcacgatcacattgccactatgytccccttaactttcaaatctagttcaagcaaatttaatgcagggggaggggtcttaatggcattaagtcctacatgtttcatgaaaatcggcagctgggcagagatcctgttaatgcatgccccgggggaaaggctgccgtgtcagcttgcctcttaatgtgctgctgcaagagcagctccgtacagggagctccggtctgaggccctggtccgtagggagccagactcttttcattctgctgctcgcagaagcac

SEQ ID NO: 41520 - DNA, 599 bp, Chicken  19866894277360_3
  misc_feature (1)..(35): n is any nucleotide
nnnnnnnnnnnnnnnnnnnnnnnnnnnnnnnnnnnatccttgggatgccatgaacacaggaagaagcaaaggacaaaatctgcaaaaaaaaaagaaagaaagaaattccaaccgtrggtgcaaagcatttaaaacagataaaccacttctgcagtttgtacctcaggaaaagacagcccacctggagtctggtttgtctagccagacacggtgcatttttgtgtccaagagtcttcctcatttgctttcagtctgcytttctaacgaatcgagatgtgcacgatcacattgccactatgytccccttaactttcaaatctagttcaagcaaatttaatgcagggggaggggtcttaatggcattaagtcctacatgtttcatgaaaatcggcagctgggcagagatcctgttaatgcatgccccgggggaaaggctgccgtgtcagcttgcctcttaatgtgctgctgcaagagcagctccgtacagggagctccggtctgaggccctggtccgtagggagccagactcttttcattctgctgctcgcagaagcactcggttaaggcacaagtcttcccgtggcctttttcttttttct

SEQ ID NO: 41521 - DNA, 600 bp, Chicken  19866894277360_4
tggagtcctggtgggtctgctgctgctgctccacaccagatcgcatggctctggttcgcctcgctgttctttgtttctctagcaagtaaataaataatggaattaagaaacaaccaggagatgtcccccagtgcatattccacagctgatgggtaactcgccgacctgaaaacactgtaaattgacttaattgaaaggggaagaaaattcccattgttcgacctgtacacagtagatctccaaattttcctagaaattgacttaaaaacaattagggctcttcttttcccggagcccctkaggatcttgtgggcattttcaaaatcagaagcttcagacgtctcctgatccagttcccctgcttggctggcaagctgtgttcaggaaagatgttggtcttattgctgacacsragagctgagctggaggtgcgcacagctgggacgtctgtcacaagccatctcgtgctgctttcctgagggcttggcaaagggaggcttcctctgagtgcagtagggrctaccagcctctgggagttgtgtagagaaagggcttggcactcagcatgtaaagggagatgttttgtatggcacctctgga

SEQ ID NO: 41522 - DNA, 591 bp, Chicken  19866894277360_5
accaggagatgtcccccagtgcatattccacagctgatgggtaactcgccgacctgaaaacactgtaaattgacttaattgaaaggggaagaaaattcccattgttcgacctgtacacagtagatctccaaattttcctagaaattgacttaaaaacaattagggctcttcttttcccggagcccctkaggatcttgtgggcattttcaaaatcagaagcttcagacgtctcctgatccagttcccctgcttggctggcaagctgtgttcaggaaagatgttggtcttattgctgacacsragagctgagctggaggtgcgcacagctgggacgtctgtcacaagccatctcgtgctgctttcctgagggcttggcaaagggaggcttcctctgagtgcagtagggrctaccagcctctgggagttgtgtagagaaagggcttggcactcagcatgtaaagggagatgttttgtatggcacctctggaacatgggagccaaggtacgctgtgatccacgctgcttttttccaccatcttcttcattgtccactgtggatgcagctcagaggtagaactctgggaatggctg

SEQ ID NO: 41523 - DNA, 590 bp, Chicken  19866894277360_6
ccaggagatgtcccccagtgcatattccacagctgatgggtaactcgccgacctgaaaacactgtaaattgacttaattgaaaggggaagaaaattcccattgttcgacctgtacacagtagatctccaaattttcctagaaattgacttaaaaacaattagggctcttcttttcccggagcccctkaggatcttgtgggcattttcaaaatcagaagcttcagacgtctcctgatccagttcccctgcttggctggcaagctgtgttcaggaaagatgttggtcttattgctgacacsragagctgagctggaggtgcgcacagctgggacgtctgtcacaagccatctcgtgctgctttcctgagggcttggcaaagggaggcttcctctgagtgcagtagggrctaccagcctctgggagttgtgtagagaaagggcttggcactcagcatgtaaagggagatgttttgtatggcacctctggaacatgggagccaaggtacgctgtgatccacgctgcttttttccaccatcttcttcattgtccactgtggatgcagctcagaggtagaactctgggaatggctg

SEQ ID NO: 41524 - DNA, 484 bp, Chicken  19866894277360_7
gacctgtacacagtagatctccaaattttcctagaaattgacttaaaaacaattagggctcttcttttcccggagcccctkaggatcttgtgggcattttcaaaatcagaagcttcagacgtctcctgatccagttcccctgcttggctggcaagctgtgttcaggaaagatgttggtcttattgctgacacsragagctgagctggaggtgcgcacagctgggacgtctgtcacaagccatctcgtgctgctttcctgagggcttggcaaagggaggcttcctctgagtgcagtagggrctaccagcctctgggagttgtgtagagaaagggcttggcactcagcatgtaaagggagatgttttgtatggcacctctggaacatgggagccaaggtacgctgtgatccacgctgcttttttccaccatcttcttcattgtccactgtggatgcagctcagaggtagaactctgggaatggctg

SEQ ID NO: 41525 - DNA, 600 bp, Chicken  19866894277363_1
tgtcatcatcctgacggcagtggtctatgtataatatctctggggcactagttggtgtctagaaaagaccttttatcaaaaccttgttatgtacaatgggaggatctctttatgcctcgattgtaggcacttaaatgttattgtttcccaagattctatgtgctttgattttctgttcatcccactgggacctggtgtgccgcagcatctctagaaagtaggttgttttttcctggactaaaatctgggttgatttccaagtgttttaagtgttacctgaacacactgcttccacatgcrcctgatgagtcacagaatcatggaagacttgatgtggaagggtccttgaaggttgtctcattcagcagccttgcttccagcagggaggttggaacttagatgatctttgatgccccttccaacccaggccttttatgatcaccagcctatgccttttatggttgccaggcactagctgaggttgcccagtgccccatccaaccagacactgaatgcctgcagggacagggtaacctaaaccactctaggcaargcagcctgttccagtgcctcaccaccctctcagtgagaaaccttctc

SEQ ID NO: 41526 - DNA, 600 bp, Chicken  19866894277363_2
tttccaagtgttttaagtgttacctgaacacactgcttccacatgcrcctgatgagtcacagaatcatggaagacttgatgtggaagggtccttgaaggttgtctcattcagcagccttgcttccagcagggaggttggaacttagatgatctttgatgccccttccaacccaggccttttatgatcaccagcctatgccttttatggttgccaggcactagctgaggttgcccagtgccccatccaaccagacactgaatgcctgcagggacagggtaacctaaaccactctaggcaargcagcctgttccagtgcctcaccaccctctcagtgagaaaccttctcctgacatctgatttaaagtctcccctcctttagtttaaaaccatgctcccttgtcctatcactatctacccatataaaaagtttatttccctcttgtttatgatcttcctttaaatataggaaggctgcagtgaggtcccccagcgccttcttttctccagactgaaccttattcttcagcctgtctgtctaggagaggtgcttcagccttctgatcatctttgtggccctcctctggaccactccaaaagct

SEQ ID NO: 41527 - DNA, 600 bp, Chicken  19866894277365_1
ttaacagcacagtttctaaggcacaatggtaatagcacacagtatgcaaggagatagcaatgttacaggaaaagatttaaaaggcacagatatccaggaggtcctagaggacaaaggcacctgttcagctgtcttttttattgtgataatacacttttttttcttcttacactagcaagaagaggacatgataaaactatcctattaaacagtgattcaagtgcttggcaacactcttttcaaggcctctggagcccctcagagagagcaatccatcctccatcctttttattccagccycacagattcaaacagtgacagcactaatgaagtcatcagatgcagagcctagccacacttcaccattggcccctttcacagctacttccttcttaacattcttctccataaagagctggtgttggtatcaggtatgaaatagaggagtccttgagagttagcttttactttcatactattaactataactgaacttggtgttgttctcrctttacaaatagagaacaagttgggaaacaaagcacaagtctaaaagaaaccacataaaaataactgcttttcagttctgtgcattggcct

SEQ ID NO: 41528 - DNA, 600 bp, Chicken  19866894277365_2
cagtgattcaagtgcttggcaacactcttttcaaggcctctggagcccctcagagagagcaatccatcctccatcctttttattccagccycacagattcaaacagtgacagcactaatgaagtcatcagatgcagagcctagccacacttcaccattggcccctttcacagctacttccttcttaacattcttctccataaagagctggtgttggtatcaggtatgaaatagaggagtccttgagagttagcttttactttcatactattaactataactgaacttggtgttgttctcrctttacaaatagagaacaagttgggaaacaaagcacaagtctaaaagaaaccacataaaaataactgcttttcagttctgtgcattggcctttggagcgagcwttatatctcttgctatttaaaatactcaccagaaactgaaattttaaatagtgttgtttcagacaccaggacagtaatgcatttcaatttgtttcctgtgtctattgccctggtgtgcttgtgagtgccagctaagtttagtaactaattagactggagtcacaattccatttagaggtcttgatcagtaattcact

SEQ ID NO: 41529 - DNA, 600 bp, Chicken  19866894277365_3
cagtgacagcactaatgaagtcatcagatgcagagcctagccacacttcaccattggcccctttcacagctacttccttcttaacattcttctccataaagagctggtgttggtatcaggtatgaaatagaggagtccttgagagttagcttttactttcatactattaactataactgaacttggtgttgttctcrctttacaaatagagaacaagttgggaaacaaagcacaagtctaaaagaaaccacataaaaataactgcttttcagttctgtgcattggcctttggagcgagcwttatatctcttgctatttaaaatactcaccagaaactgaaattttaaatagtgttgtttcagacaccaggacagtaatgcatttcaatttgtttcctgtgtctattgccctggtgtgcttgtgagtgccagctaagtttagtaactaattagactggagtcacaattccatttagaggtcttgatcagtaattcactaagcgggaaacaaaacatctcttgttgaaataactgtagctttatttgaaggacttaaaaaaaaaaaataatagaaaagagtttaaagaggggagaagtcatc

SEQ ID NO: 41530 - DNA, 600 bp, Chicken  19866894277373_1
aggtatttcacattaccagtgggatgacagaatatgttacaacaatctgttgtactataaaaataataaaaatatatataataaatatataaatataaaaataaataaaactgttatacttggttacctttgttttaactaatgtgatagtgcaggtaaaaggcattcagttaattagtatgactgaaaactaaaaatttaaaatagagtacttcatattaaacagaaatcaaaacatttataacacatcgtcctcagaaaaaaacatgactttacaattaaaactatgaaagcttatgstgcttttaatagagyagtaagcccsatccatgtgctctacagtggaaagagaactctgtgctccagcctacactagtgtgggctgatccaaaagtaatgccttctattttattatgttagcccatgacaacagaagttggaggtgtggtagtagagattaaactttcccatcaatatttcatgttatgctgtgtgatagatggcagcaaagtggcagcctgaccacatggagtctgatgtggaagtgcatataaagcaaaggtgtatcactgaatttcgccatgcagaaaaattgcagaa

SEQ ID NO: 41531 - DNA, 600 bp, Chicken  19866894277373_2
ccagtgggatgacagaatatgttacaacaatctgttgtactataaaaataataaaaatatatataataaatatataaatataaaaataaataaaactgttatacttggttacctttgttttaactaatgtgatagtgcaggtaaaaggcattcagttaattagtatgactgaaaactaaaaatttaaaatagagtacttcatattaaacagaaatcaaaacatttataacacatcgtcctcagaaaaaaacatgactttacaattaaaactatgaaagcttatgstgcttttaatagagyagtaagcccsatccatgtgctctacagtggaaagagaactctgtgctccagcctacactagtgtgggctgatccaaaagtaatgccttctattttattatgttagcccatgacaacagaagttggaggtgtggtagtagagattaaactttcccatcaatatttcatgttatgctgtgtgatagatggcagcaaagtggcagcctgaccacatggagtctgatgtggaagtgcatataaagcaaaggtgtatcactgaatttcgccatgcagaaaaattgcagaaaaattcatygatgct

SEQ ID NO: 41532 - DNA, 600 bp, Chicken  19866894277373_3
gacagaatatgttacaacaatctgttgtactataaaaataataaaaatatatataataaatatataaatataaaaataaataaaactgttatacttggttacctttgttttaactaatgtgatagtgcaggtaaaaggcattcagttaattagtatgactgaaaactaaaaatttaaaatagagtacttcatattaaacagaaatcaaaacatttataacacatcgtcctcagaaaaaaacatgactttacaattaaaactatgaaagcttatgstgcttttaatagagyagtaagcccsatccatgtgctctacagtggaaagagaactctgtgctccagcctacactagtgtgggctgatccaaaagtaatgccttctattttattatgttagcccatgacaacagaagttggaggtgtggtagtagagattaaactttcccatcaatatttcatgttatgctgtgtgatagatggcagcaaagtggcagcctgaccacatggagtctgatgtggaagtgcatataaagcaaaggtgtatcactgaatttcgccatgcagaaaaattgcagaaaaattcatygatgcttgctgaatgt

SEQ ID NO: 41533 - DNA, 429 bp, Chicken  19866894277373_4
tagagyagtaagcccsatccatgtgctctacagtggaaagagaactctgtgctccagcctacactagtgtgggctgatccaaaagtaatgccttctattttattatgttagcccatgacaacagaagttggaggtgtggtagtagagattaaactttcccatcaatatttcatgttatgctgtgtgatagatggcagcaaagtggcagcctgaccacatggagtctgatgtggaagtgcatataaagcaaaggtgtatcactgaatttcgccatgcagaaaaattgcagaaaaattcatygatgcttgctgaatgtttctggagaccagactgggtgtgaacacactgaggcagtgggtgatgtgtttcaccataggtgacagcaacagtgggtcatctacactggagcaattttttacaagcacggca

SEQ ID NO: 41534 - DNA, 599 bp, Chicken  19866894277378_1
  misc_feature (1)..(99): n is any nucleotide
nnnnnnnnnnnnnnnnnnnnnnnnnnnnnnnnnnnnnnnnnnnnnnnnnnnnnnnnnnnnnnnnnnnnnnnnnnnnnnnnnnnnnnnnnnnnnnnnnnntctcaaaatattgcaaaaacaattgaacaatcaagaggttgttcacctgttacaatatgcagacaaagtagaagaattttttttactggtagtgatcacgctgggcatagaatttaagatacagattgattgatctctttaatctaatatttgttcatggggaggctgttatctttatagtggtgacacctgctagtgtcrttatagttaaaggctttctgtatttctaccacaaatgctggtttggggtttaatatatcagcaggtttgcattgcactgggctaaagactggcctaggagttgtcaatcctagacacatgtggaatttttttcttaaactaaaaattgattcaattctttagtagaattgctaaaatagaaagcagttaaagtagcatgggttttaacaagcagctgacaccaagtctcactgtcagagctttatattcaatataaattaaaagccacatgcaaagatgctgttacccgatgtgacaaa

SEQ ID NO: 41535 - DNA, 600 bp, Chicken  19866894277382_1
tttttaaccccatttgataccagaaaaatatgatgcggtttaactgcaactattgttgatcattttccagagaactaagtagagcagaggaaaagcaacatatggcaccgttttctttattgaatgtttattatgtactgttgtgacctcatcagtgcctttgactgtactgctgcaggttaaagaaaaacacttgtgtgtttttccccttaagctttcagacaaaagcaaatgtgacctgaaggtaaatagcgtgcattgcacaccacacacagaagagcataattttttggctgggaraatgaaatagactttttagtattgtgtttctaattgattttttgtttgtttctatcaagttggtctcagctttctgtgtcactgttgtgcttgcgatgggagctcacatttttatcatggcaaaaaaataaccccacagctgaattcagctaacggcctctgaatttaatattggtatttgtgcccgtaacaccataacaggattgtttctaaggtaattattattggaactgttctgttattccagcrtggagtagaatagcatacaatagaataacgtgaatacagttaaaacttcca

SEQ ID NO: 41536 - DNA, 600 bp, Chicken  19866894277382_2
tagcgtgcattgcacaccacacacagaagagcataattttttggctgggaraatgaaatagactttttagtattgtgtttctaattgattttttgtttgtttctatcaagttggtctcagctttctgtgtcactgttgtgcttgcgatgggagctcacatttttatcatggcaaaaaaataaccccacagctgaattcagctaacggcctctgaatttaatattggtatttgtgcccgtaacaccataacaggattgtttctaaggtaattattattggaactgttctgttattccagcrtggagtagaatagcatacaatagaataacgtgaatacagttaaaacttccaaaattcctttgacttctttaatatggtgatgaaattttacccctttaaataaacaggcaagcatccactcccagaggatgcacacagatgcacagacaaatatttctatgttcccttttggtagggaatgaaacaaaacctcgttgaagccgaagggcagaaaggactgcctacatctggaattagctcttcagtgcagtgatgagcgcagtgcagcacctgccttgggtttcagtggggtgaaacaag

SEQ ID NO: 41537 - DNA, 600 bp, Chicken  19866894277391_1
acctaatagaccttttatttgtttcttttttaagcgtacttgggatggtgcatgtgttgtgttgtgcatatcctttatgtgaggagcagaactatgttggaaaactgctgtagttcatttcacagctagatattgccaggtgtaactaatgctgataaatagcaaacagaataaaagtgtggttaatatcgcaaaggttgaccaatgtcaccttcctttcaaggtgtaattagttaggaagtaggggatctggaaagccctatttaacaggggcaaataataagtctgcatctgtgaaargttagatacagagtgcttgggaatgagggactctgtccaggaaaccactgtgcacaaatttcaggtgaatctgaaggagagcaggctccagagtttgggaaacacaggcaggtaggaaagtgtgggagatggattttgtgggcagctctgggatgtaaatggtcaaatgtgatttttttaaaacactggatgtgttctatgctctggaacttgcacaggattgtatccactgctgtattaggtcatggagttaacacatcatctaaaattattgttcacactgtatttttcctctttaca

SEQ ID NO: 41538 - DNA, 600 bp, Chicken  19866894277395_1
agaaagacacctgaacatgagttttgtaaatttgctaaagagccccaaagcgacagagggtcttgagatgaagcttcgggtgccatcccttgaactcagtcagctaagcagtatctttcacaagaagataagagctggggaagtcgccttagcagtgggatgcaacagtaggcaactgtgctgatggctgtccttaacagggttgttttgaacggtccccttggtgcccccacagcttgttttagaagttttgtcttcaccattccacctaatcagaatttgttatcatcatttgtctcygttgtgtctttgtttctcaatctttctgtcctctttctccattaaacatgtttcagactgaacaaggatcccattcttttccatccaagagaagcatctccatgaatttccacttagagttttcactacggcttttacaggattcagtctctcagctattttcctttctaaataacaacttgtaatcccagcatttctgaattcccagtatgggtccatttagaaattagtaacagtaaaattacccaaatcctaatatgaaagaaaattggcctcttccttaaaactattgttgttgca

SEQ ID NO: 41539 - DNA, 599 bp, Chicken  19866894277396_1
  misc_feature (1)..(69): n is any nucleotide
nnnnnnnnnnnnnnnnnnnnnnnnnnnnnnnnnnnnnnnnnnnnnnnnnnnnnnnnnnnnnnnnnnnnnaagctttccagtttgtggctgacttactcagggaaactggcatgagacagtagaggtgcctgtcaggaagacatgctgctctctgcaggcacttttcccatcccagaggcacttttttcatcctttttcctcccttgtactgtctctgtcacatgtctgactcctgagttgagctgattcagctcactgatgtggtaaagaaagaagcatccaacttgcgttctaggagawaccaacgtgatcaaagttgctgcatataatgttaaaatctggacagatgatagatggatagtaccgcatgcagcacttagaagtctacctgccttatcacagttacagacattgaagcacattgcacatgtgggcacctacagcactttctaagcactscattgcagacatactsatggcacacagyacatgggattcttgtgtattcttttgtcactacttcaagtgcaggggactagataaaagtgaggggatagcagaaccttttgcaattgccagcagttagtagtgctgcagac

SEQ ID NO: 41540 - DNA, 600 bp, Chicken  19866894277396_2
acttttcccatcccagaggcacttttttcatcctttttcctcccttgtactgtctctgtcacatgtctgactcctgagttgagctgattcagctcactgatgtggtaaagaaagaagcatccaacttgcgttctaggagawaccaacgtgatcaaagttgctgcatataatgttaaaatctggacagatgatagatggatagtaccgcatgcagcacttagaagtctacctgccttatcacagttacagacattgaagcacattgcacatgtgggcacctacagcactttctaagcactscattgcagacatactsatggcacacagyacatgggattcttgtgtattcttttgtcactacttcaagtgcaggggactagataaaagtgaggggatagcagaaccttttgcaattgccagcagttagtagtgctgcagaccagcagtctgccactacctgtcagggaccagtgaccagccaggccacagacactgaggcccagctctctggcgctgctggtgctgcattctgccctgtgtgtgacttcggctgtaaaagtacagtctgacccactgtcttcttgccaaggagtcatcaaa

SEQ ID NO: 41541 - DNA, 600 bp, Chicken  19866894277396_3
aggcacttttttcatcctttttcctcccttgtactgtctctgtcacatgtctgactcctgagttgagctgattcagctcactgatgtggtaaagaaagaagcatccaacttgcgttctaggagawaccaacgtgatcaaagttgctgcatataatgttaaaatctggacagatgatagatggatagtaccgcatgcagcacttagaagtctacctgccttatcacagttacagacattgaagcacattgcacatgtgggcacctacagcactttctaagcactscattgcagacatactsatggcacacagyacatgggattcttgtgtattcttttgtcactacttcaagtgcaggggactagataaaagtgaggggatagcagaaccttttgcaattgccagcagttagtagtgctgcagaccagcagtctgccactacctgtcagggaccagtgaccagccaggccacagacactgaggcccagctctctggcgctgctggtgctgcattctgccctgtgtgtgacttcggctgtaaaagtacagtctgacccactgtcttcttgccaaggagtcatcaaatcactacagcttcaca

SEQ ID NO: 41542 - DNA, 600 bp, Chicken  19866894277396_4
catcctttttcctcccttgtactgtctctgtcacatgtctgactcctgagttgagctgattcagctcactgatgtggtaaagaaagaagcatccaacttgcgttctaggagawaccaacgtgatcaaagttgctgcatataatgttaaaatctggacagatgatagatggatagtaccgcatgcagcacttagaagtctacctgccttatcacagttacagacattgaagcacattgcacatgtgggcacctacagcactttctaagcactscattgcagacatactsatggcacacagyacatgggattcttgtgtattcttttgtcactacttcaagtgcaggggactagataaaagtgaggggatagcagaaccttttgcaattgccagcagttagtagtgctgcagaccagcagtctgccactacctgtcagggaccagtgaccagccaggccacagacactgaggcccagctctctggcgctgctggtgctgcattctgccctgtgtgtgacttcggctgtaaaagtacagtctgacccactgtcttcttgccaaggagtcatcaaatcactacagcttcacagcagttaagaac

SEQ ID NO: 41543 - DNA, 600 bp, Chicken  19866894277397_1
aagctctgacttgcagagaagtcgaaccacagctcagtgggtgcaagggtggaacgacgcctctactgccccatcctttggggcagcacatctcccagctcctaccctttgccatacacagcgcacaagggctgggctgcagacctcagccccaccagggcccttagccccatcacagagccctcctggatcctggcagaagacatttcatcttcgttaattagtgctgagcaattactgccttgccctgagcacatccaggcatggaggacctgcccacatctccttctcctgagcacraggaagggaaactcccttttcttttgagtgctgagcacagccataggccaagaggtgctgcaaaccctccaccccaacctcttctctccaagcagggccccaacccrttccactttccttccccccccctccacctctttccaaacgaaggggaaaaaawaaamcccaaagataaaaagaaaaccacaacaaaacccaaacccaaaacacatgttccattttccctataacacaaacgccgcgctcttaataactcccctatttgacaatttgtttggcaacatatggaaagctctcgta

SEQ ID NO: 41544 - DNA, 600 bp, Chicken  19866894277397_2
tttgccatacacagcgcacaagggctgggctgcagacctcagccccaccagggcccttagccccatcacagagccctcctggatcctggcagaagacatttcatcttcgttaattagtgctgagcaattactgccttgccctgagcacatccaggcatggaggacctgcccacatctccttctcctgagcacraggaagggaaactcccttttcttttgagtgctgagcacagccataggccaagaggtgctgcaaaccctccaccccaacctcttctctccaagcagggccccaacccrttccactttccttccccccccctccacctctttccaaacgaaggggaaaaaawaaamcccaaagataaaaagaaaaccacaacaaaacccaaacccaaaacacatgttccattttccctataacacaaacgccgcgctcttaataactcccctatttgacaatttgtttggcaacatatggaaagctctcgtaaactcgccccttcataatgcaccaacagatggcaaacacaatcctcaacgcccggccccgatgtgctgcgctgagctcccgtggccccacacctcaccatccccgcg

SEQ ID NO: 41545 - DNA, 600 bp, Chicken  19866894277397_3
cccttagccccatcacagagccctcctggatcctggcagaagacatttcatcttcgttaattagtgctgagcaattactgccttgccctgagcacatccaggcatggaggacctgcccacatctccttctcctgagcacraggaagggaaactcccttttcttttgagtgctgagcacagccataggccaagaggtgctgcaaaccctccaccccaacctcttctctccaagcagggccccaacccrttccactttccttccccccccctccacctctttccaaacgaaggggaaaaaawaaamcccaaagataaaaagaaaaccacaacaaaacccaaacccaaaacacatgttccattttccctataacacaaacgccgcgctcttaataactcccctatttgacaatttgtttggcaacatatggaaagctctcgtaaactcgccccttcataatgcaccaacagatggcaaacacaatcctcaacgcccggccccgatgtgctgcgctgagctcccgtggccccacacctcaccatccccgcgctgccaggcagcctggatggcagctatttaaaaactgaagcaattttctggtg

SEQ ID NO: 41546 - DNA, 600 bp, Chicken  19866894277397_4
tagccccatcacagagccctcctggatcctggcagaagacatttcatcttcgttaattagtgctgagcaattactgccttgccctgagcacatccaggcatggaggacctgcccacatctccttctcctgagcacraggaagggaaactcccttttcttttgagtgctgagcacagccataggccaagaggtgctgcaaaccctccaccccaacctcttctctccaagcagggccccaacccrttccactttccttccccccccctccacctctttccaaacgaaggggaaaaaawaaamcccaaagataaaaagaaaaccacaacaaaacccaaacccaaaacacatgttccattttccctataacacaaacgccgcgctcttaataactcccctatttgacaatttgtttggcaacatatggaaagctctcgtaaactcgccccttcataatgcaccaacagatggcaaacacaatcctcaacgcccggccccgatgtgctgcgctgagctcccgtggccccacacctcaccatccccgcgctgccaggcagcctggatggcagctatttaaaaactgaagcaattttctggtgtatg

SEQ ID NO: 41547 - DNA, 541 bp, Chicken  19866894277399_1
tattggtacttatcacttcaagaaggctgatggatgtcaaagaccttctaaagatgtttctcagatcatttattctaagttttcttcaaaagattttttttctttctttctttttgaaaaataataataatccaataacttctacaactccaacaaacataatcagccacctaagttacttcacaaattcatttatttatatctgtcattgaagatgaaatagaattactacccacagcacttacactcaagtctttgattacgttaaactataggtacatggaaaacagactccacttrtccatgctgcagaaagaacatctacggagttggtgaagaggccaaaaagtacacagaaaaattgagtcatccttacrtaacagttatgtatagataagtttgtttcaaaataatatttacatagctatcactcaaaattgcgaagactgaagttaccacttccaactcaggacagtcatactacgtttgtagcaagcccaaaggacacagcatccagcttctaaatctcactatttttttt

SEQ ID NO: 41548 - DNA, 464 bp, Chicken  19866894277399_2
agttttcttcaaaagattttttttctttctttctttttgaaaaataataataatccaataacttctacaactccaacaaacataatcagccacctaagttacttcacaaattcatttatttatatctgtcattgaagatgaaatagaattactacccacagcacttacactcaagtctttgattacgttaaactataggtacatggaaaacagactccacttrtccatgctgcagaaagaacatctacggagttggtgaagaggccaaaaagtacacagaaaaattgagtcatccttacrtaacagttatgtatagataagtttgtttcaaaataatatttacatagctatcactcaaaattgcgaagactgaagttaccacttccaactcaggacagtcatactacgtttgtagcaagcccaaaggacacagcatccagcttctaaatctcactatttttttt

SEQ ID NO: 41549 - DNA, 600 bp, Chicken  19866894277406_1
cgttgtattatttggactcatcagcaaggcttccatgcggttaacacccgccctgctccagagtcgggacccagtgtgccagacagatccatccctgacctaaaaagtggggctgggagaacagagtgtggctctaccattggccctgctgtatggcaagggctttcctgagcccgcggggaggaggcatggtggtgcgcccatggtcaccacacacagctcacctggatgtggacagaggaggcatccccagagcagccaaggcaggaggagagcctggaggaaggcaggggagctgcrccccatccctgcccagcctccaggtgaggctgtgggaagggtttgtcaccttccctcggtgacagggacacggagagggtggtgctgcgtcctcccggcgggcccggagacatccattatttatggagcacttggggatgctcagaagcgaggcgccacacaagcatgaaatgtcattacaaaggatatgatttagggctgggaagggctgggaggggagggggatccagtttgcatggaagactatacaaaataaatcctgtccgaaaggcttcccgcctccgcagcggagagcggagc

SEQ ID NO: 41550 - DNA, 600 bp, Chicken  19866894277407_1
actgagctttttcttattataaacacggcattgttttaatcttttttattattattattttctttgcagaaaatagggggaggttttctgcagaactttcccctgctcatatgcttttacttcctctgaaactcagtttacccctgcttcagaattaaggatgttgcctcaagccttgtgtaggtatttgtaacataaaggaaagtttatcatggctcaaacaaacaaacaaacaaatcaaagcaggaaaccattgatagaagagcattatttggaataggaaatccaattaggtagcaygaaaagcaaagctggagactgatggagaagtctgccactgaattcaaagtaatttggatgaggctgagggatagcacacctctttgcacacatgcaagaaaaagaagtctgtaagtagtcaaaagtagaaaggaatggctgaataaatactttggttaaatttgtgtgtaagatttgaaacagtaaccaaatcacctgttccttcagttcattaaagtctgcacaaaggatagaactgtattgttggtctatgggatgtagaagaggtgactgtaataacatggatatggggaattagat

SEQ ID NO: 41551 - DNA, 599 bp, Chicken  19866894277418_1
  misc_feature (1)..(79): n is any nucleotide
nnnnnnnnnnnnnnnnnnnnnnnnnnnnnnnnnnnnnnnnnnnnnnnnnnnnnnnnnnnnnnnnnnnnnnnnnnnnnnntgtttttttcatctgtccagttctgctgatgtccacatgcctcctagataaacccattcaaggcctcaaagagaactgcttcactttgagaagccagctaagtgaatgttgattaaattccatgtgcttagtgctgtggatggaaaggcaggattagaaatgaacagacttacaattctaagcatctggagaatgttaagtttaaaactaaggtaacatartttaaaatgttttactttagatagcaattaaatgaaggatttccaggacacagtgctgtatgtaggtatctaattctgctttagtcctgatttggaaatctctgtattctttgacactgtatacttttaatgtccaagttaatttagccatggaaaatgaatggggaaatttcttaataagtatcattttaattccttggaaaaacaagtatctaacattcacagaagaaatcctttgaataacttatttgggaattcaaaggaaaatacacatacaaaagaggttgaggggaagcctg

SEQ ID NO: 41552 - DNA, 600 bp, Chicken  19866894277419_1
ggcccatgtttgtagatgcttgtttggatagtagctttagctgcattatattgtttacataaattcaaagataattgaagtcttttcctctgttgcaccactgctgtccccagcttcagtgtgtgtctgcaaggcatcacacctctgcttccctgcagcaccggggcaatgcgtttgctccagccaggcacacttgtgcacaagccctggttctggtgaagtattttcattatctatgaaacatgctacacagagtctacattttttttccctaaagcagtggtacaagagccaagattmttcgcagtaggaatgctttttaaaattacccttgtggctctcctgcaagtggcccttaggctctgggggcagygcaaagcgcagctggtaaagctttgagttagttgagggaaaccagcttattttctwcaagtcactgaaaaaaatgagacatgagttacctaattctttgcargaagtataaacacttctccctgctagcagctacgagtgtagaacttctgtgctacttttatttgctcttgggtcccattctttaccgatttattaargctcttgattgtccttgtttaagcaatg

SEQ ID NO: 41553 - DNA, 600 bp, Chicken  19866894277419_2
attgaagtcttttcctctgttgcaccactgctgtccccagcttcagtgtgtgtctgcaaggcatcacacctctgcttccctgcagcaccggggcaatgcgtttgctccagccaggcacacttgtgcacaagccctggttctggtgaagtattttcattatctatgaaacatgctacacagagtctacattttttttccctaaagcagtggtacaagagccaagattmttcgcagtaggaatgctttttaaaattacccttgtggctctcctgcaagtggcccttaggctctgggggcagygcaaagcgcagctggtaaagctttgagttagttgagggaaaccagcttattttctwcaagtcactgaaaaaaatgagacatgagttacctaattctttgcargaagtataaacacttctccctgctagcagctacgagtgtagaacttctgtgctacttttatttgctcttgggtcccattctttaccgatttattaargctcttgattgtccttgtttaagcaatgtattcattatgggtcatcgtcctcttgcagtgctatctgtagctgtaggtgtgagattgcatcttttgtggtt

SEQ ID NO: 41554 - DNA, 600 bp, Chicken  19866894277419_3
caaggcatcacacctctgcttccctgcagcaccggggcaatgcgtttgctccagccaggcacacttgtgcacaagccctggttctggtgaagtattttcattatctatgaaacatgctacacagagtctacattttttttccctaaagcagtggtacaagagccaagattmttcgcagtaggaatgctttttaaaattacccttgtggctctcctgcaagtggcccttaggctctgggggcagygcaaagcgcagctggtaaagctttgagttagttgagggaaaccagcttattttctwcaagtcactgaaaaaaatgagacatgagttacctaattctttgcargaagtataaacacttctccctgctagcagctacgagtgtagaacttctgtgctacttttatttgctcttgggtcccattctttaccgatttattaargctcttgattgtccttgtttaagcaatgtattcattatgggtcatcgtcctcttgcagtgctatctgtagctgtaggtgtgagattgcatcttttgtggtttggagaactgagcattctttattcttcagtatgtttgggatatctgayattcgggt

SEQ ID NO: 41555 - DNA, 600 bp, Chicken  19866894277419_4
tgctccagccaggcacacttgtgcacaagccctggttctggtgaagtattttcattatctatgaaacatgctacacagagtctacattttttttccctaaagcagtggtacaagagccaagattmttcgcagtaggaatgctttttaaaattacccttgtggctctcctgcaagtggcccttaggctctgggggcagygcaaagcgcagctggtaaagctttgagttagttgagggaaaccagcttattttctwcaagtcactgaaaaaaatgagacatgagttacctaattctttgcargaagtataaacacttctccctgctagcagctacgagtgtagaacttctgtgctacttttatttgctcttgggtcccattctttaccgatttattaargctcttgattgtccttgtttaagcaatgtattcattatgggtcatcgtcctcttgcagtgctatctgtagctgtaggtgtgagattgcatcttttgtggtttggagaactgagcattctttattcttcagtatgtttgggatatctgayattcgggttcaaacaatgaaatgttgagaggcttggacaacatttagcttcctg

SEQ ID NO: 41556 - DNA, 600 bp, Chicken  19866894277419_5
taaagcagtggtacaagagccaagattmttcgcagtaggaatgctttttaaaattacccttgtggctctcctgcaagtggcccttaggctctgggggcagygcaaagcgcagctggtaaagctttgagttagttgagggaaaccagcttattttctwcaagtcactgaaaaaaatgagacatgagttacctaattctttgcargaagtataaacacttctccctgctagcagctacgagtgtagaacttctgtgctacttttatttgctcttgggtcccattctttaccgatttattaargctcttgattgtccttgtttaagcaatgtattcattatgggtcatcgtcctcttgcagtgctatctgtagctgtaggtgtgagattgcatcttttgtggtttggagaactgagcattctttattcttcagtatgtttgggatatctgayattcgggttcaaacaatgaaatgttgagaggcttggacaacatttagcttcctgcttcctgaaatgatgtgtaagctcacctgttcagtcatgaattcatcaatttgcattgtgaatatttagtgataagattctattctctcttggatac

SEQ ID NO: 41557 - DNA, 600 bp, Chicken  19866894277419_6
attttctwcaagtcactgaaaaaaatgagacatgagttacctaattctttgcargaagtataaacacttctccctgctagcagctacgagtgtagaacttctgtgctacttttatttgctcttgggtcccattctttaccgatttattaargctcttgattgtccttgtttaagcaatgtattcattatgggtcatcgtcctcttgcagtgctatctgtagctgtaggtgtgagattgcatcttttgtggtttggagaactgagcattctttattcttcagtatgtttgggatatctgayattcgggttcaaacaatgaaatgttgagaggcttggacaacatttagcttcctgcttcctgaaatgatgtgtaagctcacctgttcagtcatgaattcatcaatttgcattgtgaatatttagtgataagattctattctctcttggatactgggaagtgaacgagacattgggttttatgaactaagattaaagagaatgagaggtaaaagcaactactgagatgtttgctttaatactggccatcagttccaactgagaacttaatttaattagtaaaacaaagagggaaacaacaat

SEQ ID NO: 41558 - DNA, 600 bp, Chicken  19866894277423_1
ccttgaatggaagaatgtggataatctctttagagagaggtggtttggagagaacaaacattccaaagagaactgaatacttgacaaagggagatgagactactggtgtatttgtaaagggtcaactgggaagcaatgtctttcagcagaaaggtatcagagaaatcgaagttagctgtgtataaaaatgcaaaagatgcatgagaacagcatgtgttttggagagagaactgtgtatgcaactatggcagttccagagggcgagatgctactcactgttgaaaacttcaaactcaattmtgggtcctaatttgaactaggcatggcttggcattctacagtgtatgtttttgaagattttctcataacttccattcaaaagacagaaaatcttcaaaaattaagcttttgatttctagtttagcttaaaactcagccttttgcattattagtgaaaatgaaaagcagatttctaataaaggagctaattactgttaaaattctagtgtcagcataacacttcatcctcacggacaggaatggaatagtagttcagatatttgttctaagtttccaatgagaagttggcaaaaattcaat

SEQ ID NO: 41559 - DNA, 449 bp, Chicken  19866894277423_2
tttctagtttagcttaaaactcagccttttgcattattagtgaaaatgaaaagcagatttctaataaaggagctaattactgttaaaattctagtgtcagcataacacttcatcctcacggacaggaatggaatagtagttcagatatttgttctaagtttccaatgagaagttggcaaaaattcaataatattcattaaatacataaatggaaatattaaaaataaagattttcccttgtgatttattatacagtgtgcttgaaaagcaaaattgaagaaagaagtcattatctgtttwwwaaaaaaaaaaaaagctataaaaatgttaattaaattgtgtagtcctaagtaagctagtgaacaagaaaaagatttccctgcttagaattggaagccatatttgttctgactggctgggtaaagacatgaaaagattatctttaaata

SEQ ID NO: 41560 - DNA, 448 bp, Chicken  19866894277423_3
ttctagtttagcttaaaactcagccttttgcattattagtgaaaatgaaaagcagatttctaataaaggagctaattactgttaaaattctagtgtcagcataacacttcatcctcacggacaggaatggaatagtagttcagatatttgttctaagtttccaatgagaagttggcaaaaattcaataatattcattaaatacataaatggaaatattaaaaataaagattttcccttgtgatttattatacagtgtgcttgaaaagcaaaattgaagaaagaagtcattatctgtttwwwaaaaaaaaaaaaagctataaaaatgttaattaaattgtgtagtcctaagtaagctagtgaacaagaaaaagatttccctgcttagaattggaagccatatttgttctgactggctgggtaaagacatgaaaagattatctttaaata

SEQ ID NO: 41561 - DNA, 447 bp, Chicken  19866894277423_4
tctagtttagcttaaaactcagccttttgcattattagtgaaaatgaaaagcagatttctaataaaggagctaattactgttaaaattctagtgtcagcataacacttcatcctcacggacaggaatggaatagtagttcagatatttgttctaagtttccaatgagaagttggcaaaaattcaataatattcattaaatacataaatggaaatattaaaaataaagattttcccttgtgatttattatacagtgtgcttgaaaagcaaaattgaagaaagaagtcattatctgtttwwwaaaaaaaaaaaaagctataaaaatgttaattaaattgtgtagtcctaagtaagctagtgaacaagaaaaagatttccctgcttagaattggaagccatatttgttctgactggctgggtaaagacatgaaaagattatctttaaata

SEQ ID NO: 41562 - DNA, 600 bp, Chicken  19866894277424_1
ttctctcctttatgtgttggctggcattagctagcctcactgcttctttgtatcttaaaagtgtctgtgctgtgtgtggtgttttgtttttgtttcgttccagttgtacaaacacagcaagtgaacggggcccatagtgatatcagccttgcatttatgcagagagggaaaaccccagccaaagtggctattagagagtcagccagctgattgattaatgtccagtgcaagagctgtgcagaatgtttgcactaagcgcttcgattaattattcattctgccctactaaaacttatcttyggctcaacaccctaaggttgcagggaggctgcagtctcctgtgggcagaggagagaggtgatggaagaggtagcacctcatgttttatggtctcctgctgccatggaggatcttgacagggtcaagttgccgtttagcttctgtgcttttgagccgttttgttgcagggaaagatttattagctgggggtaaacatttcacgtgcacctcctctggcagcagtcatagatggggttttctgggatgatttttttttctccttgattgttaatgagaggatgcaagtatatgctgaacttc

SEQ ID NO: 41563 - DNA, 600 bp, Chicken  19866894277427_1
acgtgacagggtcccatcagcctgagcaggcttgtaccctgcagggctaatagccaccagcttaacaagcgtgagccaggactgctcggctgggccctttccagctgcagggaggagcgacagggagagctttgcagtgggcagtgaaatctaggtcagggctttctctaaaaggggcacagagcccagcttgtgtcagcttccaagtgaagcagcagagctgcagcgcctgcctgagcacggaacagccgggaaatgtccgtgccctcctggtgtatccaggactggggcaagcaggcrtggtgggggccttgggacacggttccctktgcagggctggccacagcttatggctttgctgggaaacagccacgttttgtgacttgggcactgtgggcaatgtgctgccagcggacgtgtccttgctgtgacatagagaggtgtccaggcatggggatgatgctgcttgccccccaaacacaacgtccctgcagccatcacaaccatccacgtccctccccactrcctctgtgtgggagccaaagcagctcggagggggcatcagtgatgggaactgactccaggctgacgtttcaacag

SEQ ID NO: 41564 - DNA, 600 bp, Chicken  19866894277427_2
gcttgtaccctgcagggctaatagccaccagcttaacaagcgtgagccaggactgctcggctgggccctttccagctgcagggaggagcgacagggagagctttgcagtgggcagtgaaatctaggtcagggctttctctaaaaggggcacagagcccagcttgtgtcagcttccaagtgaagcagcagagctgcagcgcctgcctgagcacggaacagccgggaaatgtccgtgccctcctggtgtatccaggactggggcaagcaggcrtggtgggggccttgggacacggttccctktgcagggctggccacagcttatggctttgctgggaaacagccacgttttgtgacttgggcactgtgggcaatgtgctgccagcggacgtgtccttgctgtgacatagagaggtgtccaggcatggggatgatgctgcttgccccccaaacacaacgtccctgcagccatcacaaccatccacgtccctccccactrcctctgtgtgggagccaaagcagctcggagggggcatcagtgatgggaactgactccaggctgacgtttcaacagaaaacccccgagagagtgaaagtcccaac

SEQ ID NO: 41565 - DNA, 600 bp, Chicken  19866894277427_3
gcgcctgcctgagcacggaacagccgggaaatgtccgtgccctcctggtgtatccaggactggggcaagcaggcrtggtgggggccttgggacacggttccctktgcagggctggccacagcttatggctttgctgggaaacagccacgttttgtgacttgggcactgtgggcaatgtgctgccagcggacgtgtccttgctgtgacatagagaggtgtccaggcatggggatgatgctgcttgccccccaaacacaacgtccctgcagccatcacaaccatccacgtccctccccactrcctctgtgtgggagccaaagcagctcggagggggcatcagtgatgggaactgactccaggctgacgtttcaacagaaaacccccgagagagtgaaagtcccaacagcaaaaggagaactgggggcagcatggagggcacaagctgtggccgaaacctcaggaaggctctgctggcagcttggggatgacagcagccagagccattctcagcccctgttacagggaatccagcatgctgcctgctgccccacattcctgcccggccccacatcctggccctcacagagccacagccgtttt

SEQ ID NO: 41566 - DNA, 600 bp, Chicken  19866894277435_1
tgtaacagcattttgcttggctttctttccagacatcttctaactacataattattattaataataaagagctgtgaatcagatatctggcccacatcccctctctttagctgaagaaggggcaagggactgctgcctgctgcaccaaacagtgcaggtggggatggcatcctgacaaatttgctttcactagtgatatttttccatgtgcttcacccacgacaggcagctacttactaggcagcactggaagtaatattctgaattgctgaaagaagctttcctggttgatcaaactcratgtattttttatactgatcaaagattctctgcatgttgaacgtatcctaaagcacaaaagaatgaatgaaaaaagatagttactcttctgagctggtagacaatgaaatgatgattggtgagattatgccttgactctgctgtcagcacaatgtcagtaaaggcaatggtatagagagagtaccttttgagacattagtaccaaatccacatctctagaaggaacagaaaagccccagggtggaggaaaatgtctggctttattattatttttatatttatcggagaataaaacaaatc

SEQ ID NO: 41567 - DNA, 509 bp, Chicken  19866894277436_1
acagcttcaccacaaggccgagtgaagctccctgcaaaggaaatctcttacaggaaggactgggcctgtagcagaatctgcagcttggaattctgggtcttctgtatctcttcaacatgaagactgttggttttttatcagtgattagacgctcctgtaaaagaaaacctgcaattacttttacttctcatttttctttcctttaacgttgaatagtggccactaacccatcctgtagctgacacagtcaggacttttcatcacgaccactactgcatccacaacatttacatgagcacrgtttgcacaagcaggcctggacataagcacacaggcagaattaccctatctgaatgcaaacgtgggttttcaggggcagccattttccatcacaacgttacaagtaaaaagtgcattcaaatacaggcccatttttactaatttgttcccgaatgagtaataggaatgaaggtttacttcataaaacaatccgacagtactgcttgtca

SEQ ID NO: 41568 - DNA, 600 bp, Chicken  19866894277437_1
agacaccattgcagatcagtgaggaggacgctgctgggaccagtcgatgagctgaatctctcttcccacacaggaacacctcttaggtgaaatttgcattctctgttgtacagagtacttccttgggaaacttagaaatctctatgggactattccatgatttaacacattttcagctggctgtattatttacattattgatgctcacacatgctctgcagacagtatatttatcaccagaaatccagaagaatttgcagtcttttgcttcaacaaacagctctactcactaatccagcyctgagagttcccagtgagtgtgaccaagagaagggatccgaccttgcacaagatcccaagtacgcagagtggccgtgctgcccagctgtgtgctaatgcacaactaaccttttgatggcagagcctttaacataaaacaaagcatgttgaaacaagcacacgtttcctgtgcaacacctcaacctgcattactgcatgattcttgcattgattttctgctcttcaaccctttggcagcgttttggattcatcttttcctcaaagcttcaggagcttatcccccagcaaatgcaatagctg

SEQ ID NO: 41569 - DNA, 436 bp, Chicken  19866894277441_1
ttaggtcagattttattttttattttacttataaatgaagaacaacttaatttcctgtatgttaaataaacccctactaacactttggggggaaaataaaaagtctacggattgaaatttatcaggctgataactgataaaataagaaccttttgtacaatgtgctattagtttctggagctcactacaatgaagtattggagccaagagcatttaaaaaatagctttttatagagataaaaatattcacagcactagcaagatatgaatgctttattatgacaatgtcagccaaccctkgtggagattgattgaggtgtttcctgcaacagtccctcaacragtatgacagagtatagtactgcctgcaacaatagcttagatatgatgcaatgctgcttttatgacgtgagagctctcactgtcagaattaaag

SEQ ID NO: 41570 - DNA, 394 bp, Chicken  19866894277441_2
caacttaatttcctgtatgttaaataaacccctactaacactttggggggaaaataaaaagtctacggattgaaatttatcaggctgataactgataaaataagaaccttttgtacaatgtgctattagtttctggagctcactacaatgaagtattggagccaagagcatttaaaaaatagctttttatagagataaaaatattcacagcactagcaagatatgaatgctttattatgacaatgtcagccaaccctkgtggagattgattgaggtgtttcctgcaacagtccctcaacragtatgacagagtatagtactgcctgcaacaatagcttagatatgatgcaatgctgcttttatgacgtgagagctctcactgtcagaattaaag

SEQ ID NO: 41571 - DNA, 600 bp, Chicken  19866894277444_1
tctcccaaactacttacatactatatttctctttcaaaatatcacaataaatgtttaaatttaaaaaaatcaccttgcactccaaaatctgactgtagacatgtgtgtatggcaaacaggtatacagattgtaaggtatacaggtatagaaccagagagatgatcgcgtttacaaaggagtaatgggcttgcagaagggctccaagaggggtgatctccaaatagagatccttctttgttgggagtaagcccttaaatggggtctaggagtagtccctagtagaagaatttcaccttccrgtcactcaggtgaaattgcattcacctgtacccctgtggctgattcagcactcgtctcaagtggtcaatcagaggttcaggccgtgattcaacagttcccatacacatgtggatcatacttattgatacactattattacagatggtaatacctaatttgaattttatatttactttttgtttttgtatgtcaaaagatgaagaataaaggaagggataattcctaaggcattgaagccacttgcaaagccyatttaagtactttagatttagaatcacagaaggactctttcactgcac

SEQ ID NO: 41572 - DNA, 600 bp, Chicken  19866894277444_2
ttaaatggggtctaggagtagtccctagtagaagaatttcaccttccrgtcactcaggtgaaattgcattcacctgtacccctgtggctgattcagcactcgtctcaagtggtcaatcagaggttcaggccgtgattcaacagttcccatacacatgtggatcatacttattgatacactattattacagatggtaatacctaatttgaattttatatttactttttgtttttgtatgtcaaaagatgaagaataaaggaagggataattcctaaggcattgaagccacttgcaaagccyatttaagtactttagatttagaatcacagaaggactctttcactgcacaggaaagcactgtaaygttctctgtttagtagcagaaataatagtgccactgctaagtaagctcaaggaaaagcaacttctgttctcagatgaaaactggatgagccatccactggcaaaccaggcatttgaaatttgccacagaactcctagagtccattatccagtgtgtctttctgtgttgagaatttcacaattccagaattttcatgtgaaataggaagatatatgactgaaagaattgcccggtgt

SEQ ID NO: 41573 - DNA, 600 bp, Chicken  19866894277444_3
tgcattcacctgtacccctgtggctgattcagcactcgtctcaagtggtcaatcagaggttcaggccgtgattcaacagttcccatacacatgtggatcatacttattgatacactattattacagatggtaatacctaatttgaattttatatttactttttgtttttgtatgtcaaaagatgaagaataaaggaagggataattcctaaggcattgaagccacttgcaaagccyatttaagtactttagatttagaatcacagaaggactctttcactgcacaggaaagcactgtaaygttctctgtttagtagcagaaataatagtgccactgctaagtaagctcaaggaaaagcaacttctgttctcagatgaaaactggatgagccatccactggcaaaccaggcatttgaaatttgccacagaactcctagagtccattatccagtgtgtctttctgtgttgagaatttcacaattccagaattttcatgtgaaataggaagatatatgactgaaagaattgcccggtgtactaccgtgtacctggtgtactaatattaccggtgtaccagtgtaccggtaatattagacagaa

SEQ ID NO: 41574 - DNA, 599 bp, Chicken  19866894277455_1
  misc_feature (1)..(242): n is any nucleotide
nnnnnnnnnnnnnnnnnnnnnnnnnnnnnnnnnnnnnnnnnnnnnnnnnnnnnnnnnnnnnnnnnnnnnnnnnnnnnnnnnnnnnnnnnnnnnnnnnnnnnnnnnnnnnnnnnnnnnnnnnnnnnnnnnnnnnnnnnnnnnnnnnnnnnnnnnnnnnnnnnnnnnnnnnnnnnnnnnnnnnnnnnnnnnnnnnnnnnnnnnnnnnnnnnnnnnnnnnnnnnnnnnnnnnnnnnnnnnnnnnnattcccagttttgtctatgaaatgatcatttattacatgagcaatatgctgatttccscttatggttactgcatcttctgttcataaatcgggaattaatttgtcctttttgggttcttttgcttaatagccaagtatatctggtctgtgtaatctaaggcatcctatgaaaaataggaataacagctggtgaaagaagtgatgtctccagcatcctcttatcttcatcagatcctacgggacccccccctttttctccattttctgtcctagagccccacttgcmtctgtcatttgctgataagggtctcctgtgctgtttggtggctaagagataggcaggggcaggaggggagg

SEQ ID NO: 41575 - DNA, 599 bp, Chicken  19866894277455_2
  misc_feature (1)..(14): n is any nucleotide
nnnnnnnnnnnnnnattcccagttttgtctatgaaatgatcatttattacatgagcaatatgctgatttccscttatggttactgcatcttctgttcataaatcgggaattaatttgtcctttttgggttcttttgcttaatagccaagtatatctggtctgtgtaatctaaggcatcctatgaaaaataggaataacagctggtgaaagaagtgatgtctccagcatcctcttatcttcatcagatcctacgggacccccccctttttctccattttctgtcctagagccccacttgcmtctgtcatttgctgataagggtctcctgtgctgtttggtggctaagagataggcaggggcaggaggggaggagggattggctgtcagtcacctgggatctgtctacagccctgccactaaattgttccatgaccttcacctcctcgcatactagaataattgaaatcagatataaagtaactctaaccgatccagtcagtccatttcacagctggctcagtcccacactgctgctctgtaaggcgtatgcattttgctttgttaagtttgaaaggtcttaagtgatgttctctgaatga

SEQ ID NO: 41576 - DNA, 600 bp, Chicken  19866894277458_1
ttgttggttttgcaaacagcagaagtgaaagcaatgagccgtagcaatgcacgcagtactggcagcctggggagagcagggcatcacaagcagcatgtatggacaaaggggagtacactgcacggagaaaaccatttgttcattaatcttacatggaaaaaacaagcatcatttacattctcagccacatctagtcccatgttaacttctggttagaaatggaagagaagaacggggaaaagagaagtggattgactgaaatggggatcccatcagtcagcatcaaaaggaattccatgsagtgagcctgtggggtcggggctgcaggcagcagatggatgtgcccatgacaaagtgcctcagttgtggtgcaccagctctgaactacacatgctgctctgctataggatattctgggagctccagacctctgtgttcttggagtgttagcagctacctaaccgagcgtctgcaggacagtgctcagcactgcaaaggttggcaggctgctgagaggaacagctttcatacttcactgactacaaaaagctctaattaattagggagaaaaaaaagccratcacttaattcaagcagaga

SEQ ID NO: 41577 - DNA, 600 bp, Chicken  19866894277458_2
gcatcaaaaggaattccatgsagtgagcctgtggggtcggggctgcaggcagcagatggatgtgcccatgacaaagtgcctcagttgtggtgcaccagctctgaactacacatgctgctctgctataggatattctgggagctccagacctctgtgttcttggagtgttagcagctacctaaccgagcgtctgcaggacagtgctcagcactgcaaaggttggcaggctgctgagaggaacagctttcatacttcactgactacaaaaagctctaattaattagggagaaaaaaaagccratcacttaattcaagcagagaatattacatcaaaccaattgtccttggggttttggctcccacattacatgatacttatctcatatttcctttcagctgtaattagaaaaataagcagcgaaacataaaaatgtcaactgagagaacagctctgtaaatcagctcagaacggtgatctgcaaggaacgtcctttggatgatctgccgtgattaaggcaggctgctctgcagaaaaaaaaggagaggaaaactaataacattaaaagagggcaatgggaaagcaaggctacgacgtggcgt

SEQ ID NO: 41578 - DNA, 600 bp, Chicken  19866894277472_1
cagggaacagggtacaaccgtagcctgaagatctcaggaaaagacacagatagtgaggggtatgagaattctgggaaaaagaaaaaaaagaaaaaaaaatgttgaaactgaacagaaaaatgattatgtactctgtcacatgaaagtcaaaaaaaaaaaaaaaaaagatgactgaaattatcaagcaagaaatttagagcacacaaaattggttaacttgtgcctgatgtataattacactgtggagctcatgactgccaaatgttgcaaatgttagaattgtaaataggtttttaaaargattaagcaaattcagagagaataagtcttggttatctattaaaaacagaagttaggtatagtctctattatgagaagtatttaaatcattgattgccatatctggagaactgcatcagtcaaaaaacttgtgacattaagtctgttatttataattccttgtctacctttatttttaatgtctaccctgtctgcaaccaaaaaagaattaaaataggtaaaatcaaacattctctttttcccaataaaggagttcttatgtttttatagaagaagacagaataaaaactgttaagtaca

SEQ ID NO: 41579 - DNA, 600 bp, Chicken  19866894277477_1
ttccttatagggctgaaatgacagtcagcagcagactttttggctgtaaatgatgctcttattatagcaatgtctccactggagacaacatgctaaggactgaggtgcttagcaactgctaaggtgctgagggacagcacttgctagtctcccaaatccttctcaatactgccactaatctgcaccttcagcagaattttttcaccttcactaagactgtttgtttagtctcaggcttataacgatgaagtttttcacttcccgaattaaacaatttgtttgggggagaaggcagcatgyggtaaaggaaacgtcttttcagctgttcctcttttaattctcttcactcacatacaaattaaattgcaatcgtgagtcattctggggtttggtttcccatttttttcttcacatgctcactgcagtatcacccagctttaaaaccagcaggagggaaggcaactaagccatctgcagttattacagcaaaattaagcactggcactaatattcaacagatgaaagagaataatcagaagcaatctgtgttccaaagagttatgcatgagtcatatattgagaaataaagctaatccaaaa

SEQ ID NO: 41580 - DNA, 600 bp, Chicken  19866894277480_1
ggggatgtttcttcttgcaggttttaataccctagctttccattttgtttgcttttcttccctaaactcagaaatcagcagtttgctcaggttgaatgggttattttgtgcagaaaagaatgctttcttttggttttgatttttttttccctcccagaagaagggaatttgaaatctttcataacttatttcactccagagggattttcagctgatttgctttgtttggctgatgttctgaaaaatcacttctattttcttagccctaagcagcatccagtgagctcttcagaattgctytgtatctcgtctcattatttaatgatgaataggaagaattaaaaagataaagggacattcttctcttgcaactatacttacagttttcctgtttttctgttgagaataatacagaacccaaatcatccctacaattaacctatgtgtccactctgaaattctcatctcatgaaaatagtaaagtaacaagaaaccggagtggcattggttatgaaaacaaatcagaatttccatcatgctcgagcaccagtgaaatagtgagactttcaaggtgaaatatgtgaagtttatgccatttgt

SEQ ID NO: 41581 - DNA, 600 bp, Chicken  19866894277481_1
gcagcacaggaagagctcagaaacaatccccagcaaataacagggcggaggagccccagctgctgccagccagactccattttgcccatttcaagcaagcctggaacacaatttgtgctctgacagtttccagcccatgatacgattttttttttcctcctaactcgattttgcgctaaaatgaactgcccccaaaaaagacacttcatattttttgggagcggggatggatttttgggacgctttagcagcacaccatgtgatgcccacaaagagctgctgcacccagcagggtgatgytctgggtgctccccaaagtggctgcaatggggtggagctgtcccaggtgcccccagcacagcatgagggtcccatcatctgcttggagcacacagtgccaaatggcaaaaacagyaaaatttggcttttttttttctttttttcctttggctttgatcaaatcaataggaaaaaaagaaaaaacagaaataaaatgtgtctatttgcattttattttattttaataagattaactataccggtgctatccaaatgtctgtttcaacatttcccagctaaagaatttctgtctttgtttaa

SEQ ID NO: 41582 - DNA, 600 bp, Chicken  19866894277481_2
tgctctgacagtttccagcccatgatacgattttttttttcctcctaactcgattttgcgctaaaatgaactgcccccaaaaaagacacttcatattttttgggagcggggatggatttttgggacgctttagcagcacaccatgtgatgcccacaaagagctgctgcacccagcagggtgatgytctgggtgctccccaaagtggctgcaatggggtggagctgtcccaggtgcccccagcacagcatgagggtcccatcatctgcttggagcacacagtgccaaatggcaaaaacagyaaaatttggcttttttttttctttttttcctttggctttgatcaaatcaataggaaaaaaagaaaaaacagaaataaaatgtgtctatttgcattttattttattttaataagattaactataccggtgctatccaaatgtctgtttcaacatttcccagctaaagaatttctgtctttgtttaaaatgacatttaggaacaaatttaatttcagagttctgtctacttctgtttgaaaaagcccaaattgcaatggaatatttcggctttactgacactgaacattcgctctgatccaa

SEQ ID NO: 41583 - DNA, 599 bp, Chicken  19866894277503_1
  misc_feature (1)..(52): n is any nucleotide
nnnnnnnnnnnnnnnnnnnnnnnnnnnnnnnnnnnnnnnnnnnnnnnnnnnntattatcaactgttatactttacatacctgtcttcttagggaagcagcatctacaacagtcatgtcatctggtgttccctcaagtgtggtatccatgttggaaaggccgtacctatcaggttaaagagatcaattagcttctcctccgtacaaagtttagcaagtgctgcattttatgaacattcttgtagatgtatttttggtggcgacaggcagaagaattctcagactttttagcttttactgasttatgtactttcaataggaagatgactgaatcaagcatgaagatgtatgaagtgggtgactgactaaatctgagcccactgttctccacatctaaatatttctggaatttctccatacagacagacttcttagtatcacctggtctctcagaataccatttctagttattccactgcttagtgactgctgaaaattgcctgagctaaaacaccacagttgcaagagatctgccatagatctgaactgaccacatgaagatttggaaagaactgggtatcttatgctcagtatctattca

SEQ ID NO: 41584 - DNA, 600 bp, Chicken  19866894277504_1
aggcatttctaggttcttgaatgcttctctgtgctacctgaaatgaagatgtcagtgcatataagcttgaattagctgcaagatctctgagatgggctccatcgcttctgacacacaacttccacaccccacacaagggcccaggcagagcactgccacggcagaaaccctcagattgacttcccttgaagcactcagtgttgtcagctcacccagagtacagtgagtgccattagcagcagtgggactcccctccccttcaacagcaactggttatcctgctgcactcttggctctcargatgggctcggtaggagggaaggcaacagattgcctcactctcatccctgctcccagcctggccttagctgtgccaatactcagccttgggaaggcagcagcccactccctgctagcctgtaaacaagacgggagcgggtacaggagataaaggaggattcacactgcactgggtgctgcaaatactccttccctctccagcaaaacagcctctgggggaatgcagacctcatggtgattttctctgatttctccccyagttggtattcctccttctgtttacctgagagcagagctatg

SEQ ID NO: 41585 - DNA, 600 bp, Chicken  19866894277504_2
ttcaacagcaactggttatcctgctgcactcttggctctcargatgggctcggtaggagggaaggcaacagattgcctcactctcatccctgctcccagcctggccttagctgtgccaatactcagccttgggaaggcagcagcccactccctgctagcctgtaaacaagacgggagcgggtacaggagataaaggaggattcacactgcactgggtgctgcaaatactccttccctctccagcaaaacagcctctgggggaatgcagacctcatggtgattttctctgatttctccccyagttggtattcctccttctgtttacctgagagcagagctatggacagagggaaggagccacctacatggcaggctgaaaaatggaaaaaaagaacaggatgcaacttgttcttaaggcaaccacaacctattaatagcttgaaataggctttttaattacaggataccctgcaacctctgaacactgactgatcaatccttcaaaactgttttgcttgctctaagttcctcaacaggcagagatgtgtggtggggagcaacaggcacatgggagcacagcacagccatctcagccctccc

SEQ ID NO: 41586 - DNA, 600 bp, Chicken  19866894277504_3
acaggatgcaacttgttcttaaggcaaccacaacctattaatagcttgaaataggctttttaattacaggataccctgcaacctctgaacactgactgatcaatccttcaaaactgttttgcttgctctaagttcctcaacaggcagagatgtgtggtggggagcaacaggcacatgggagcacagcacagccatctcagccctcccacagcaaagggagtgcaggagaggcactgcttagaaaggaggtagttctggtacaaagagtctctatcggcaaagtgaatcttcccgtcaaayagtgataaaaaaatgacaactttgcttggaatacaagctcagttcatatagatccccacagagagatggaaaaagatgtatatagatagagatccagagttaattttaaatccagttcccagttttctttacaaaggttgggaaagacragaagagtatacctacaatggagaacaagttccagactacctgggaacaggctttcctagcaaaggagtttactaacagcttgtttctcacctatcatagttaaaaggcggtttcaaaaggcagataagaaagctccccactggtcaggga

SEQ ID NO: 41587 - DNA, 600 bp, Chicken  19866894277504_4
atgtgtggtggggagcaacaggcacatgggagcacagcacagccatctcagccctcccacagcaaagggagtgcaggagaggcactgcttagaaaggaggtagttctggtacaaagagtctctatcggcaaagtgaatcttcccgtcaaayagtgataaaaaaatgacaactttgcttggaatacaagctcagttcatatagatccccacagagagatggaaaaagatgtatatagatagagatccagagttaattttaaatccagttcccagttttctttacaaaggttgggaaagacragaagagtatacctacaatggagaacaagttccagactacctgggaacaggctttcctagcaaaggagtttactaacagcttgtttctcacctatcatagttaaaaggcggtttcaaaaggcagataagaaagctccccactggtcagggaggagctgtggcctgaaggcagcctgcgcaactcctcacagccagtgcagcaagccatcagttatctaaagcacactgcaatatgcctaatgatgactaatcgcttctttatttataaatggatcattaaaaataattgggaaaaaaaaa

SEQ ID NO: 41588 - DNA, 600 bp, Chicken  19866894277508_1
taacattttatcaaggtttttgcatatctcagcagctgagatgtatggaatataaaaaaatatcccagagcttgtggttcttggctcacaagttgtgcaacttctgttacctattttctgctctgtctggggtcatgtctttttattttattttactttcattttaaatattgtattactttacaggcatagcatctgcgcaagaactggacaaagaaagtgcacatgagaatgactctgtagctgactccagtacttttcagtccaaaggacagcttctgtgctttacttgaaaaaatkagtcgttgtgaagttcgctatcatggtgcctaaatctctttacacttttgagcttagaatttttctactgtagtttctcatctgcaaatgaagattacaacatttccttaccttgcaggaaaactgtgacatatttatggacagatggatgtattactgcatagagtgcacagatactataaagaacaaatacaaaagcctcccgaattcacatcacatgattgtaaaaacatgaatggaacaaagttagtatgtggaccattgaatgatccttgttacacagctatttacgtccttggt

SEQ ID NO: 41589 - DNA, 471 bp, Chicken  19866894277508_2
tgcacagatactataaagaacaaatacaaaagcctcccgaattcacatcacatgattgtaaaaacatgaatggaacaaagttagtatgtggaccattgaatgatccttgttacacagctatttacgtccttggtctattaagattactgtgaaatggagtgaaggagctgtgacttagacaggctgctcatggtgattctctttcgctccacacagaccaaaggccaaatctcaaatgtgctctgacttaggctggctgcagactggtaggaaaggttacgtgtccccatatccactacmtaaataatttatgtttcattcytcttttctcagacatcatatctgtgacagttaaatgaaatcttcagctgaggtatggcagttctaatatatgtcatgatgtccttgtggacaatacatagctactctgctctgcaacttgaggtagataatggtattaaaagaaatcat

SEQ ID NO: 41590 - DNA, 449 bp, Chicken  19866894277508_3
aatacaaaagcctcccgaattcacatcacatgattgtaaaaacatgaatggaacaaagttagtatgtggaccattgaatgatccttgttacacagctatttacgtccttggtctattaagattactgtgaaatggagtgaaggagctgtgacttagacaggctgctcatggtgattctctttcgctccacacagaccaaaggccaaatctcaaatgtgctctgacttaggctggctgcagactggtaggaaaggttacgtgtccccatatccactacmtaaataatttatgtttcattcytcttttctcagacatcatatctgtgacagttaaatgaaatcttcagctgaggtatggcagttctaatatatgtcatgatgtccttgtggacaatacatagctactctgctctgcaacttgaggtagataatggtattaaaagaaatcat

SEQ ID NO: 41591 - DNA, 599 bp, Chicken  19866894277515_1
  misc_feature (1)..(9): n is any nucleotide
nnnnnnnnntgcacggtcacaacacgtgccgtgccagggctgctggttcctgtgttctacagggaagaaataaagccctggaagcacagagcctcacaaaggaggctcattttacattatgataaatgttaaggacttccccgaggaaaaaagtcaccacagagggtcatgcagagccgtggcagaggcaggtcacagccccaggactgcagcatcaggctctgccttgcactcagcagctgagcattttcacatctctgagaaatgaaatacaattaacattgagaaaacggcaaaacraagagcaaaggtattacctggtaatatcatctaccttcctaaaggcttcctttaggttttctacacctctttaacgccccacgcagacggctccttggacaaggtggtattggagagatgtcagcactgatcccacccgggcagcctcaactcctgcaaacaccctgatggagagcccagtgcccagggcaggaagcactgcatccacactgcgctctgatttattgacgctattagaagcagcagcagaaacgtcaaacagattcctaggacctaagtcagcatttttttcaaggcag

SEQ ID NO: 41592 - DNA, 599 bp, Chicken  19866894277526_1
  misc_feature (1)..(96): n is any nucleotide
nnnnnnnnnnnnnnnnnnnnnnnnnnnnnnnnnnnnnnnnnnnnnnnnnnnnnnnnnnnnnnnnnnnnnnnnnnnnnnnnnnnnnnnnnnnnnnnncaatatgtcgtgttatatagtgttagagagtgggtttcccttagctcctactcaaccagccttgtgcaggcaactcaaggccatagagcatttcaaacagctgtggttctctggtgcagaatttagtgtcctctctgtctactttatgatgagtctatatcctggaagtaccagttcctctctagttactataaagaggactcrataatcacactagattagattttttgaatggcaaaacctagcagggctgacatgcacctttagcctgtgacaattattgmcactggaagaatcaaaattaaaaggctgtaccaatttttagaagaatcatagaatgtcctaggttgaaaaggaccacaatgatcatccagtttcaamccccctgctatgtgcagggtctccaaccactagaccaggctgcccagagccacattcagcctggccttgaatgcctccagggatggggcatccacaaccaccttgagcaacctgttccagtg

SEQ ID NO: 41593 - DNA, 599 bp, Chicken  19866894277526_2
  misc_feature (1)..(16): n is any nucleotide
nnnnnnnnnnnnnnnncaatatgtcgtgttatatagtgttagagagtgggtttcccttagctcctactcaaccagccttgtgcaggcaactcaaggccatagagcatttcaaacagctgtggttctctggtgcagaatttagtgtcctctctgtctactttatgatgagtctatatcctggaagtaccagttcctctctagttactataaagaggactcrataatcacactagattagattttttgaatggcaaaacctagcagggctgacatgcacctttagcctgtgacaattattgmcactggaagaatcaaaattaaaaggctgtaccaatttttagaagaatcatagaatgtcctaggttgaaaaggaccacaatgatcatccagtttcaamccccctgctatgtgcagggtctccaaccactagaccaggctgcccagagccacattcagcctggccttgaatgcctccagggatggggcatccacaaccaccttgagcaacctgttccagtgcgccaccaccctctgggtgaaagacttcttcctaatatctaacctaaacctcccgtctttgtttaaaaccacctctccct

SEQ ID NO: 41594 - DNA, 600 bp, Chicken  19866894277526_3
catagagcatttcaaacagctgtggttctctggtgcagaatttagtgtcctctctgtctactttatgatgagtctatatcctggaagtaccagttcctctctagttactataaagaggactcrataatcacactagattagattttttgaatggcaaaacctagcagggctgacatgcacctttagcctgtgacaattattgmcactggaagaatcaaaattaaaaggctgtaccaatttttagaagaatcatagaatgtcctaggttgaaaaggaccacaatgatcatccagtttcaamccccctgctatgtgcagggtctccaaccactagaccaggctgcccagagccacattcagcctggccttgaatgcctccagggatggggcatccacaaccaccttgagcaacctgttccagtgcgccaccaccctctgggtgaaagacttcttcctaatatctaacctaaacctcccgtctttgtttaaaaccacctctccctgccccccccccctgtaaggttaatttaaattatccaagagcattaaaagaaaagaataaacaactcacacacctgacatttgttacagatgagtttta

SEQ ID NO: 41595 - DNA, 600 bp, Chicken  19866894277534_1
tccagtgatgaatgaattaggtggaacatgaagagaaattttcctaccatccagggctgggctcaggaataattttcatgggattagggggattaaagaaataataattgagttatttttaaaaaaggatccccattagacaaggactgttatacagaaagtagtggacatgagcgtggtgaccagaatggattgttacagaaataaattcccttgccgcatcatggatttctggagagtatgctttgtgtcctggtgaatgctggctagctacaaagactgtagaagggttttaggccygacagccccaggcgagcctgccactagcaaaaactgtgcactgactcaaattgcaacacaaaggagaaatgaatcggggcttttacaataagtgtaattcaggaagcaattcagactctctagctttagaccacagcatgggcttgtgctacagtgcagtgtccaaacagaatgaggaattcccttctgccttctcaggatcctctctctttccaagggaactaggtcgctggcatwacaaaaatctgctctcaaatgggcagtccagtccttctctctctgtggtgattcctcattttc

SEQ ID NO: 41596 - DNA, 600 bp, Chicken  19866894277534_2
agtatgctttgtgtcctggtgaatgctggctagctacaaagactgtagaagggttttaggccygacagccccaggcgagcctgccactagcaaaaactgtgcactgactcaaattgcaacacaaaggagaaatgaatcggggcttttacaataagtgtaattcaggaagcaattcagactctctagctttagaccacagcatgggcttgtgctacagtgcagtgtccaaacagaatgaggaattcccttctgccttctcaggatcctctctctttccaagggaactaggtcgctggcatwacaaaaatctgctctcaaatgggcagtccagtccttctctctctgtggtgattcctcattttctcatgcctgtatgcatctrtgagcagtaatgagtaattgtctggattaaccttccttcgttccttcaagcagtagttgagttcactttatggttttcagcgctttaaattcatgtctgcacaacactgatttttgtggatttgggctgatcactgtggcagtgattctctgggaactgctatctcccaggctgacatacatggtgcttcacatgcctgattctctctcttccaagaa

SEQ ID NO: 41597 - DNA, 600 bp, Chicken  19866894277534_3
gccactagcaaaaactgtgcactgactcaaattgcaacacaaaggagaaatgaatcggggcttttacaataagtgtaattcaggaagcaattcagactctctagctttagaccacagcatgggcttgtgctacagtgcagtgtccaaacagaatgaggaattcccttctgccttctcaggatcctctctctttccaagggaactaggtcgctggcatwacaaaaatctgctctcaaatgggcagtccagtccttctctctctgtggtgattcctcattttctcatgcctgtatgcatctrtgagcagtaatgagtaattgtctggattaaccttccttcgttccttcaagcagtagttgagttcactttatggttttcagcgctttaaattcatgtctgcacaacactgatttttgtggatttgggctgatcactgtggcagtgattctctgggaactgctatctcccaggctgacatacatggtgcttcacatgcctgattctctctcttccaagaactggggtaacctcccatggttaataaactgccagctttcctactaacttcagccaaaaacttctgaggacctttttttgact

SEQ ID NO: 41598 - DNA, 556 bp, Chicken  19866894277540_1
gttgccatctctggaggtgttcaagaaatgcttagatgttgcactgaggaacatgggttagtgggaaaatattggtgataggtgcacagttggactggatgatcttggaggtcttttccagccctagtgaatctgtgattctatgaaaaaagatctgaccctaagagcaggccatattttttgtcacaaacttatatacataacaacaaagttggatagtacaagggtttaatagagcttaatggttatctccagttaacgaaatttatgctgcattaccagccagagtaagagtaagtmtgcttgctactccatacacaaatatatttcttgttaatcgttccattcagataaatgggactgttctaaagacaccttctgatgcttatttgctttgtcgactgtaaggatacacaatcattaaacaggaaaaatgtattggagctaagaatactcagtggagcatccaaagaaatgtgggaggtgatcctgcccttctgctctgtgctggtgagaccttacctggagtactgcatccaactatggagtcctcagt

SEQ ID NO: 41599 - DNA, 600 bp, Chicken  19866894277541_1
tcagtataaaagcaccctaacagatagatgcagatccatcccctagcctcagcctcagtataccaggcttaaaacacatgctgatgtttttttgcatcagtggcatctgtcacttttgtgctatgcaattgcttttggcagaaccagaccatacacaaatttcctcctctgcggcgacatttcacttcccttcattctgatggacaggtatttacaggctcctggcaaatgcctgtttctcctctgttatgtcagctttaaagtgatttcaaggtaaaattgaatatgcaggagtgaccyagccatgatctcctgggtttaaaatcagttcaaaattgctgtaagaacgaatggaaaaacatactacaagttataacagatagatgtyaaccrttctccccctgcacacacactcatgcatgatactcagtctgtgattatttctttgattgaagatcaagttatacggaacaactgcggtgtaactgaagcccctggccatgggaaacacttgcctttttttttccagctaacaagatgaagtcatcgctcataaacaggagcacattacaggtgggctttgctatctgtgttctcaaa

SEQ ID NO: 41600 - DNA, 541 bp, Chicken  19866894277541_2
tttttgcatcagtggcatctgtcacttttgtgctatgcaattgcttttggcagaaccagaccatacacaaatttcctcctctgcggcgacatttcacttcccttcattctgatggacaggtatttacaggctcctggcaaatgcctgtttctcctctgttatgtcagctttaaagtgatttcaaggtaaaattgaatatgcaggagtgaccyagccatgatctcctgggtttaaaatcagttcaaaattgctgtaagaacgaatggaaaaacatactacaagttataacagatagatgtyaaccrttctccccctgcacacacactcatgcatgatactcagtctgtgattatttctttgattgaagatcaagttatacggaacaactgcggtgtaactgaagcccctggccatgggaaacacttgcctttttttttccagctaacaagatgaagtcatcgctcataaacaggagcacattacaggtgggctttgctatctgtgttctcaaaaagagcaacgcctgctcttcctgcagggg

SEQ ID NO: 41601 - DNA, 536 bp, Chicken  19866894277541_3
gcatcagtggcatctgtcacttttgtgctatgcaattgcttttggcagaaccagaccatacacaaatttcctcctctgcggcgacatttcacttcccttcattctgatggacaggtatttacaggctcctggcaaatgcctgtttctcctctgttatgtcagctttaaagtgatttcaaggtaaaattgaatatgcaggagtgaccyagccatgatctcctgggtttaaaatcagttcaaaattgctgtaagaacgaatggaaaaacatactacaagttataacagatagatgtyaaccrttctccccctgcacacacactcatgcatgatactcagtctgtgattatttctttgattgaagatcaagttatacggaacaactgcggtgtaactgaagcccctggccatgggaaacacttgcctttttttttccagctaacaagatgaagtcatcgctcataaacaggagcacattacaggtgggctttgctatctgtgttctcaaaaagagcaacgcctgctcttcctgcagggg

SEQ ID NO: 41602 - DNA, 600 bp, Chicken  19866894277544_1
attctcagctacaaaacattatttttcaatatagtcaccaccattagctatgcattttcatcagtgatgagcaagaactcgtatgttgcactaatgaaaatttgcaatttcatccagaacatggtttatctttcaggtcactgcctctactactgaaacacaccacccactgcctcactgtgctcatatccattttttggtatccataagccttcagcaaacatgaatgaatgtcaatgggtgcattttccacatggaggaattcagttccacacctttgcttcatgtgcatttctataycagatsccattttgtcagactgcccctctgctgcaatctgtcatatggcaacaaaatgtaattgtatactgcaggatgactcagcctctactgtcataccaccaacatccacctctgaaattgtgagccaacataataaaataagaagcattacttttggagcaagtctcatacacacatatgtatataattattattagatgtataatctttagtaatttcagaggaatgtattgtataggaatacagcagccagaaattttaattctttagaatgaggaagtgtttaaatacaagtat

SEQ ID NO: 41603 - DNA, 600 bp, Chicken  19866894277544_10
attgctgctataaatcacagattatggttcataataacaataatattctcaaaatcagtaattrctatagttagttactcraatgttacagtatctttcatcctttacttgaaaatacttattaaaaaataaaccaataatttaagtaatcaaaygaatttattcagaaaactccatcactaaagattaatatatcataaatacattgtgactaacaaaacactgcatgttcaactagcatattgtcatggtttcacatttttcattggtattccacatcacaatgtcatgtagtgcacygggagttaaggagttaaagctacagttccatggattgttgataaacttcctgagttccagtttcttggactcagaagagaagaatgaactacaactcacagaagacttcatttttctgtttctattttctgtttggaaacaggagaatgtataaaaagttgtcaaatgctatcaaaaagtcatatgcatctggattctatgactttataattattcataacactacaacagcattaactgacaatgtaatattagtcagcctaagctagatgctgaaagatatttaggtgcttaaggatg

SEQ ID NO: 41604 - DNA, 600 bp, Chicken  19866894277544_2
agctacaaaacattatttttcaatatagtcaccaccattagctatgcattttcatcagtgatgagcaagaactcgtatgttgcactaatgaaaatttgcaatttcatccagaacatggtttatctttcaggtcactgcctctactactgaaacacaccacccactgcctcactgtgctcatatccattttttggtatccataagccttcagcaaacatgaatgaatgtcaatgggtgcattttccacatggaggaattcagttccacacctttgcttcatgtgcatttctataycagatsccattttgtcagactgcccctctgctgcaatctgtcatatggcaacaaaatgtaattgtatactgcaggatgactcagcctctactgtcataccaccaacatccacctctgaaattgtgagccaacataataaaataagaagcattacttttggagcaagtctcatacacacatatgtatataattattattagatgtataatctttagtaatttcagaggaatgtattgtataggaatacagcagccagaaattttaattctttagaatgaggaagtgtttaaatacaagtattatgta

SEQ ID NO: 41605 - DNA, 600 bp, Chicken  19866894277544_3
tctcatacacacatatgtatataattattattagatgtataatctttagtaatttcagaggaatgtattgtataggaatacagcagccagaaattttaattctttagaatgaggaagtgtttaaatacaagtattatgtacatagacatgtggacagactaataatcaaattgaatcaaacaggcatcagttgcttcacgtcaagtagattgcaaatagcacaagatttttatgcacagtactatttttatgcacttgtactgttaggatatcaaagtagaatttattcctccagtcaarggatttcaggaaaagaagatgagtttttcattaagacaaaatagaatgacattctaagagtacaggcaacaagaacagttggcgcacattctcttctgttaccaaacctttcactgtacacagaactaattactagaaattggaagtttttaagagcaaagagaaaaagtaaaccatttagaacttttgcatgcttctgcagccaagacaatgtgaacagtagttcacattgagacagttgagcagccaaatggcaaagtttgtgtttgaacttcagcaaatccacaargtgatttgctg

SEQ ID NO: 41606 - DNA, 600 bp, Chicken  19866894277544_4
ctccagtcaarggatttcaggaaaagaagatgagtttttcattaagacaaaatagaatgacattctaagagtacaggcaacaagaacagttggcgcacattctcttctgttaccaaacctttcactgtacacagaactaattactagaaattggaagtttttaagagcaaagagaaaaagtaaaccatttagaacttttgcatgcttctgcagccaagacaatgtgaacagtagttcacattgagacagttgagcagccaaatggcaaagtttgtgtttgaacttcagcaaatccacaargtgatttgctgtgaacaacaaaagatctaaaagcaactacaaaattcctgccctgcaatagctttttctcatgtggaatttgaattccagagaaatagaagttattttaaaaaacaaaagagattcatgggaaagggtgatatctatgaagaataacttgtttcttcaaaaacaaaagtaataattatctgtcaaaactctgtgttttacaacgcattacagttttaaataacttgggtttttttttttttttttcagcttctttcaagaaacttacactcaatattttgtgtcattttt

SEQ ID NO: 41607 - DNA, 600 bp, Chicken  19866894277544_5
tgtaatgtatgtattcttggtgatgtatgttcagtgttatgacagaatatttcagcaatttactaagtgtaccatatgtaataccatatgaacaaggaaagagttaatcatgaatactttggagctaatgctgttgcatgaattttattttagatctaatttaaggaaaaaagcaggaagatgtcaaaattctgcttcaactttgtcttagaggtactgaatgagctagcaaactcctgtcgttattaccttcctgtgtgacttctgagttctgattggtaggagttttcattcgacatwggaagcaattgatttcaccagtgtaggtgctaaatgtattgcatcttttaacttaaataawaaaaaaaaataataattaaaaaatccccaaacattattgctgctataaatcacagattatggttcataataacaataatattctcaaaatcagtaattrctatagttagttactcraatgttacagtatctttcatcctttacttgaaaatacttattaaaaaataaaccaataatttaagtaatcaaaygaatttattcagaaaactccatcactaaagattaatatatcataaatac

SEQ ID NO: 41608 - DNA, 600 bp, Chicken  19866894277544_6
actaagtgtaccatatgtaataccatatgaacaaggaaagagttaatcatgaatactttggagctaatgctgttgcatgaattttattttagatctaatttaaggaaaaaagcaggaagatgtcaaaattctgcttcaactttgtcttagaggtactgaatgagctagcaaactcctgtcgttattaccttcctgtgtgacttctgagttctgattggtaggagttttcattcgacatwggaagcaattgatttcaccagtgtaggtgctaaatgtattgcatcttttaacttaaataawaaaaaaaaataataattaaaaaatccccaaacattattgctgctataaatcacagattatggttcataataacaataatattctcaaaatcagtaattrctatagttagttactcraatgttacagtatctttcatcctttacttgaaaatacttattaaaaaataaaccaataatttaagtaatcaaaygaatttattcagaaaactccatcactaaagattaatatatcataaatacattgtgactaacaaaacactgcatgttcaactagcatattgtcatggtttcacatttttca

SEQ ID NO: 41609 - DNA, 600 bp, Chicken  19866894277544_7
ttaaggaaaaaagcaggaagatgtcaaaattctgcttcaactttgtcttagaggtactgaatgagctagcaaactcctgtcgttattaccttcctgtgtgacttctgagttctgattggtaggagttttcattcgacatwggaagcaattgatttcaccagtgtaggtgctaaatgtattgcatcttttaacttaaataawaaaaaaaaataataattaaaaaatccccaaacattattgctgctataaatcacagattatggttcataataacaataatattctcaaaatcagtaattrctatagttagttactcraatgttacagtatctttcatcctttacttgaaaatacttattaaaaaataaaccaataatttaagtaatcaaaygaatttattcagaaaactccatcactaaagattaatatatcataaatacattgtgactaacaaaacactgcatgttcaactagcatattgtcatggtttcacatttttcattggtattccacatcacaatgtcatgtagtgcacygggagttaaggagttaaagctacagttccatggattgttgataaacttcctgagttccagtttc

SEQ ID NO: 41610 - DNA, 600 bp, Chicken  19866894277544_8
aagatgtcaaaattctgcttcaactttgtcttagaggtactgaatgagctagcaaactcctgtcgttattaccttcctgtgtgacttctgagttctgattggtaggagttttcattcgacatwggaagcaattgatttcaccagtgtaggtgctaaatgtattgcatcttttaacttaaataawaaaaaaaaataataattaaaaaatccccaaacattattgctgctataaatcacagattatggttcataataacaataatattctcaaaatcagtaattrctatagttagttactcraatgttacagtatctttcatcctttacttgaaaatacttattaaaaaataaaccaataatttaagtaatcaaaygaatttattcagaaaactccatcactaaagattaatatatcataaatacattgtgactaacaaaacactgcatgttcaactagcatattgtcatggtttcacatttttcattggtattccacatcacaatgtcatgtagtgcacygggagttaaggagttaaagctacagttccatggattgttgataaacttcctgagttccagtttcttggactcagaagagaa

SEQ ID NO: 41611 - DNA, 600 bp, Chicken  19866894277544_9
tcctgtgtgacttctgagttctgattggtaggagttttcattcgacatwggaagcaattgatttcaccagtgtaggtgctaaatgtattgcatcttttaacttaaataawaaaaaaaaataataattaaaaaatccccaaacattattgctgctataaatcacagattatggttcataataacaataatattctcaaaatcagtaattrctatagttagttactcraatgttacagtatctttcatcctttacttgaaaatacttattaaaaaataaaccaataatttaagtaatcaaaygaatttattcagaaaactccatcactaaagattaatatatcataaatacattgtgactaacaaaacactgcatgttcaactagcatattgtcatggtttcacatttttcattggtattccacatcacaatgtcatgtagtgcacygggagttaaggagttaaagctacagttccatggattgttgataaacttcctgagttccagtttcttggactcagaagagaagaatgaactacaactcacagaagacttcatttttctgtttctattttctgtttggaaacaggagaatgtataaa

SEQ ID NO: 41612 - DNA, 600 bp, Chicken  19866894277550_1
ggagccgaaggagtcaatcccattcccagggggtggaaatgggtcctgctgccgctgccagcatctctgctgcagcacagggtgagtgagagcaggtccaagcctccctgaggctcctgcatgtcacttccccctcctgcagccttttggaaagctctgggaacctcacaccatgtttgtccccccttaggataaatttagattaacccaaagcacaaatgaaaagcaattgcctcctctactatcttccagctctgcaacacatgcacaaagtcactccatcccagcacctcccagtayagcacaaacagctgcagrtggggccatggaatggatctgcaaaggctgagctctgctggttcaggtggtagcaagcaggatgcagcccagctgcttcctagcattcctgtcaagctttgctctcaatgtgaggaaaataagatgaaatgacctgcctgaggagcaggctgtctccctgacatatttgcattagcttcaaataggaagagcttcccatcagcctattagcactgcactaaaacaagcggactcggtgtcaaatggctgaataaaaccacatctcggggcagcgctgagctc

SEQ ID NO: 41613 - DNA, 600 bp, Chicken  19866894277550_2
cccattcccagggggtggaaatgggtcctgctgccgctgccagcatctctgctgcagcacagggtgagtgagagcaggtccaagcctccctgaggctcctgcatgtcacttccccctcctgcagccttttggaaagctctgggaacctcacaccatgtttgtccccccttaggataaatttagattaacccaaagcacaaatgaaaagcaattgcctcctctactatcttccagctctgcaacacatgcacaaagtcactccatcccagcacctcccagtayagcacaaacagctgcagrtggggccatggaatggatctgcaaaggctgagctctgctggttcaggtggtagcaagcaggatgcagcccagctgcttcctagcattcctgtcaagctttgctctcaatgtgaggaaaataagatgaaatgacctgcctgaggagcaggctgtctccctgacatatttgcattagcttcaaataggaagagcttcccatcagcctattagcactgcactaaaacaagcggactcggtgtcaaatggctgaataaaaccacatctcggggcagcgctgagctccccgctgcgatccgcagt

SEQ ID NO: 41614 - DNA, 600 bp, Chicken  19866894277555_1
gtaagggaacacatggaattaagctgcctagggagctatattttcttgagaattctcactggggatttgaaatgcacatattattattaattatcattattattatcatcatcatcattttgcaagtaactgtgattttgttagcacttggagagagatgccgcattctgggaacagaaactcgtcattaggatccccaagtccaatcccacccctccatgcccactgcccacgtccctcagtgccacatctccatagctcatgaacacctccagggacggtgaccccaccactccctgkgcagctgtgccactgcatcaccactctcatagagcagaaatgtttcctagcatccatcatgaacctccccttgyacaactcaaygccattgcctctcatcctcccttttgccaaggagtaactggagcccagaggtttttcatcaatgtttcccactggaggagagatgaagacctctgaagttttcccagctgcctgaagcagctcccaagcacagccacgtctccgtgtgtgttcagatatcttcacgttggggcaggaggggagagcacgggggtggcactgacagggtgacaacag

SEQ ID NO: 41615 - DNA, 600 bp, Chicken  19866894277555_2
cacatattattattaattatcattattattatcatcatcatcattttgcaagtaactgtgattttgttagcacttggagagagatgccgcattctgggaacagaaactcgtcattaggatccccaagtccaatcccacccctccatgcccactgcccacgtccctcagtgccacatctccatagctcatgaacacctccagggacggtgaccccaccactccctgkgcagctgtgccactgcatcaccactctcatagagcagaaatgtttcctagcatccatcatgaacctccccttgyacaactcaaygccattgcctctcatcctcccttttgccaaggagtaactggagcccagaggtttttcatcaatgtttcccactggaggagagatgaagacctctgaagttttcccagctgcctgaagcagctcccaagcacagccacgtctccgtgtgtgttcagatatcttcacgttggggcaggaggggagagcacgggggtggcactgacagggtgacaacagcactgcctgtgctgatttcccccatgctcctaactgcttcccatgcagagtaatttatcaacaagattaatcgg

SEQ ID NO: 41616 - DNA, 600 bp, Chicken  19866894277555_3
tattaattatcattattattatcatcatcatcattttgcaagtaactgtgattttgttagcacttggagagagatgccgcattctgggaacagaaactcgtcattaggatccccaagtccaatcccacccctccatgcccactgcccacgtccctcagtgccacatctccatagctcatgaacacctccagggacggtgaccccaccactccctgkgcagctgtgccactgcatcaccactctcatagagcagaaatgtttcctagcatccatcatgaacctccccttgyacaactcaaygccattgcctctcatcctcccttttgccaaggagtaactggagcccagaggtttttcatcaatgtttcccactggaggagagatgaagacctctgaagttttcccagctgcctgaagcagctcccaagcacagccacgtctccgtgtgtgttcagatatcttcacgttggggcaggaggggagagcacgggggtggcactgacagggtgacaacagcactgcctgtgctgatttcccccatgctcctaactgcttcccatgcagagtaatttatcaacaagattaatcggagccatcgga

SEQ ID NO: 41617 - DNA, 600 bp, Chicken  19866894277555_4
ctctaaccttcattttgctgcacaccagctgtttaggcacgtgtgtgtgtcagtctgaatgaagcctctgccccaccacctaatggatgcacatgcgtacatgagatgaagctgcacctgctgaagcctctgctggccaagccacatttgggaaatttggctaagtcttcttgtttaatcaagataaaaaccgggaacttcgttcaatcagttcagcttcattatcaatacctgatcagaagtctcacgtgaagttcccactccatgctggcctcttgcatctgatctctgacatctcaygtggaacagggcctctcctgcagcacaggcatcaagcagggcttcctctctttacttaacaactaactactcacggaacttataggaccttaatactaatttggaggatttaataacataataatctaataacaagatctggatctaacttccttgcaatgaggcgatggagtaaaaaagttactaagaacaaaaagaactatacttgcacacaatcttagtcatcaccagggaaactgtgttaaaatatagcaaggaaagaaattcccacaatatcaacatcagtctgaagccaggaat

SEQ ID NO: 41618 - DNA, 600 bp, Chicken  19866894277562_1
ccttatgagaagaagtttttcctaatatccaatcttaaccccccccccccggcacaacttaaggccattacctcttgtcctatcactagcacaataaaaccatagtgatgcattagaagaacgtcagctgtatgagctattggtccagctattttaggacagaagcccaagagcaaaccactttttcttcctttatattcccctccctcctttctctcctcgcttctttcacaggactcaaaagacaacttcaacaaactgaatggctggcacagaactgcagctaggtgcacactgcamccgcacaaagccagcagctcacatggagctgagttcaccagttattattcagcagcatcagtgacaagactccgtttccatccagtgattacacgttactgttgaaaattattttcaaaaggacaggtaaagagtagacccaggtgttgcctgataaaatgattacttataaaatggatcaaaagttgaaaaacagtcatctgtgacaatgcaatggcgtgtttctacaatttatacaagcccatccaaagatttccctctgagcacctcattaaatctaggctcaaaagctagaattga

SEQ ID NO: 41619 - DNA, 600 bp, Chicken  19866894277565_1
aggcagcactaagggttgcttgtaagtaaagaggagaaggctactgcagtaaaaggcatcttcactatgttgaactccagggctgttagtagacacagctctactcatctgtaagtcatcacaaagatgactaagaacagcctcttcggaatagatcttgacaatagtaacaacactctcttcagcatctttcacagctgacttgaattgcagcaactacaatgtcttaccaaaagtgactttttctgttctatatacatcacattttaattctgagaacagaaggttttttatagacarctatttcctatgcaagagcctatgttgctgtagtgtttggtatgaagcagtgtatccagtattagagtgcttcagcagtaaacagacttctgcttgcccagtactatcaacaattcctttcttaaaaaacaaactctaggctgtggcctgctgactgcagaggcagggagaacattttttttcccttattccctctttctacctcaaaacaagaccaagtggattagactaaagagtaaagtactgtgttcttctctgtactgtaacctttgcttaagccacttcatttacttgaaataa

SEQ ID NO: 41620 - DNA, 600 bp, Chicken  19866894277565_2
caaactctaggctgtggcctgctgactgcagaggcagggagaacattttttttcccttattccctctttctacctcaaaacaagaccaagtggattagactaaagagtaaagtactgtgttcttctctgtactgtaacctttgcttaagccacttcatttacttgaaataaactattcaagtcttgaagaaactaatcaacacatttccaaatctttgatatgcattcaatcccattatttcgtttccagaaccagtgggactaaacacactacttgttttttttccttgaaaaaaaaawgattttacagacgatcatctccttgatagcttcttgctgcgtgaaccctcgtgcacttcggggcagctgtccggagacggagtggtgctgaactggacagctgcctcctgccagcagagctccacgtacctgtgcaggagctatgggagcagccagcagagatctctgcaaacccagcagagaccttttccaacccagcagaccttctccagcatttgggagagaaactccagtttgaagtggcacgcttttagggctggtggttttatcagctgtttactcacacattgactaacggct

SEQ ID NO: 41621 - DNA, 520 bp, Chicken  19866894277572_1
cctactactctaacaggtttgactcctacttataattctaactgggttgcttctacttttattgtaagaaaacaaaacaaaacaaaagaacacgttgcattcctttataaatgactgtaatttgatatttgctaaagatgctggtgcatttaggcaagacttcagggttatcctctgtagccactgtttctcattcactccttaaagcagatacttgcttgtcaactggggttttgactggactgactgaggcttcatagtcacctacatctcaaaatgcactctgaaaatagcaaagtytaacttccaagtctatggactatggacaaaagtctaaatgctcagcaccagaaacctaagttctttatctgccttgaattatcatattgattatcaaaccctttgtagcagcagatgtcttctgattgtttttaataagaatgaactcacatagtttcacaaagtgattgtacaaattggtgtaaaatgatggaaataaatttactaatcccacagtgca

SEQ ID NO: 41622 - DNA, 600 bp, Chicken  19866894277576_1
agaccaaacagtggatgttccacccactgcctctctgtgctcacattttagcagtggctgcagcattggtggatcacctcccctggtgcagatttagacaggtgaggcacacaggctcttcaccattgctggtggacttgcacagctgatggtggtggactactggtttaggcaccttgatcttacaactacttaaatacaaacacacagacaaaactaagcttctgctctgtgcctgctgtgtgtagctggtagcaggactgttttgtctcctgtctctggcctcatttgtacaggccsaagtgagaatctaagcaccattccttcccgatgacagtgctgtgtgtgcccagtccctgactggccatcarcagcacacagcagtgtgaggtgtgttagctctgggagcactcctgtgattgctctccaactcacacagactgagctgcagtagaccttctgttccatatgtgtgacctatgttttcacccgagccttacctctaaaaatatgcactgttatttggcagcagacagtagaagatactccataggcgttgtgccacctttctgtcctgctgttaattaaaaacatagawtc

SEQ ID NO: 41623 - DNA, 600 bp, Chicken  19866894277576_2
gatcacctcccctggtgcagatttagacaggtgaggcacacaggctcttcaccattgctggtggacttgcacagctgatggtggtggactactggtttaggcaccttgatcttacaactacttaaatacaaacacacagacaaaactaagcttctgctctgtgcctgctgtgtgtagctggtagcaggactgttttgtctcctgtctctggcctcatttgtacaggccsaagtgagaatctaagcaccattccttcccgatgacagtgctgtgtgtgcccagtccctgactggccatcarcagcacacagcagtgtgaggtgtgttagctctgggagcactcctgtgattgctctccaactcacacagactgagctgcagtagaccttctgttccatatgtgtgacctatgttttcacccgagccttacctctaaaaatatgcactgttatttggcagcagacagtagaagatactccataggcgttgtgccacctttctgtcctgctgttaattaaaaacatagawtctaactttgtccaacaggcacttacaccagagcataaaaacagatacaaaacgtctcacagccttggaataa

SEQ ID NO: 41624 - DNA, 600 bp, Chicken  19866894277576_3
csaagtgagaatctaagcaccattccttcccgatgacagtgctgtgtgtgcccagtccctgactggccatcarcagcacacagcagtgtgaggtgtgttagctctgggagcactcctgtgattgctctccaactcacacagactgagctgcagtagaccttctgttccatatgtgtgacctatgttttcacccgagccttacctctaaaaatatgcactgttatttggcagcagacagtagaagatactccataggcgttgtgccacctttctgtcctgctgttaattaaaaacatagawtctaactttgtccaacaggcacttacaccagagcataaaaacagatacaaaacgtctcacagccttggaataatgttacaagcagagagagatgcttgaggtatcagttgtcaggtctagacatgaagaattgtctaggattactggcatacagaaagcacctgtttatcccagcagagaacttcacagccactgttccatgcagtaattttgcctgggaaaaaaacagaggctgaacattgctgtcatcaaatctactggcactgcatgtgcctccctgggcatgttggccacagctga

SEQ ID NO: 41625 - DNA, 600 bp, Chicken  19866894277579_1
actgctcatccccagccctttgctctggagacatccaaggaggacacccagttttgttttccttccccctctttgttaaccacgacttgggaaacaacgcatcccacatcccacacactgaaggctctgccaagccctgcagctcacccagccccagctggtccctcactccctgcccatctggctgccccagtgagcgccggctccatcccatgcaccgcagcccccggtgcattgctgcttggaacacagcgcctgctcattaagtgcagccgttatcgtgcacctgagcaaacaggratcgtcctgtgtgtgcatcaagtcttgtctctggggaatctgggactgggaaagccacctgccctccgcatcctcacccgaaatagaacattttcctactataaaggaaagaaaccgcagcccaggccctcgttttcaccttgctgggctcaggggcgggatgtcagcctccccacacagcactgagagcagagcccaacctgacactcaggttaaaygctcctatggcagagccctaaataatacggcagagctgggggaggaggacatgccctgaagcagtratggtcacagggtgtc

SEQ ID NO: 41626 - DNA, 600 bp, Chicken  19866894277579_2
cgcagcccccggtgcattgctgcttggaacacagcgcctgctcattaagtgcagccgttatcgtgcacctgagcaaacaggratcgtcctgtgtgtgcatcaagtcttgtctctggggaatctgggactgggaaagccacctgccctccgcatcctcacccgaaatagaacattttcctactataaaggaaagaaaccgcagcccaggccctcgttttcaccttgctgggctcaggggcgggatgtcagcctccccacacagcactgagagcagagcccaacctgacactcaggttaaaygctcctatggcagagccctaaataatacggcagagctgggggaggaggacatgccctgaagcagtratggtcacagggtgtcagagagggacagcatgaggacagagcagagatgggcatgatgtcctttccctgaggctgccccatgccgtgtgttccatccagcagctctggggtgagtcaggatgatgaaatcacttgatgtcaatcagcatcatgccccaaacagtgtcctgaacccacggccttccagcaaacactgccacattgttcacccgctgcctgcttctccctcatgtg

SEQ ID NO: 41627 - DNA, 600 bp, Chicken  19866894277579_3
acctgagcaaacaggratcgtcctgtgtgtgcatcaagtcttgtctctggggaatctgggactgggaaagccacctgccctccgcatcctcacccgaaatagaacattttcctactataaaggaaagaaaccgcagcccaggccctcgttttcaccttgctgggctcaggggcgggatgtcagcctccccacacagcactgagagcagagcccaacctgacactcaggttaaaygctcctatggcagagccctaaataatacggcagagctgggggaggaggacatgccctgaagcagtratggtcacagggtgtcagagagggacagcatgaggacagagcagagatgggcatgatgtcctttccctgaggctgccccatgccgtgtgttccatccagcagctctggggtgagtcaggatgatgaaatcacttgatgtcaatcagcatcatgccccaaacagtgtcctgaacccacggccttccagcaaacactgccacattgttcacccgctgcctgcttctccctcatgtgtctcatgctcccagcgtaagcactttaggacaaggagcagctttttgctcggtctgtttttgcatg

SEQ ID NO: 41628 - DNA, 600 bp, Chicken  19866894277579_4
tcactcgagagccttctgttgtactgaaaggggatctgtcatccccgctaatggatgctgtcattaatacctccagcagcatgggcacacttggagacatgtgcatgggttgcattagcgctgtgctggagcccctgggagcagagagagatccgctgtcaccaagaccgagttcttgggtaagagctatggagaagtttgggatcctcctcagccttggggacagccctcatgcctcatgccaggacagcaccactgggaggtgatggccccaggagggctgaagtgcaatgggaatgygatggctccaaatccatgcagccgtggcacaggacaggggaacagccaatggcaccacgctggcactgccatctcccagctcatggtgggacacrggcagcagggagagctgtcacrgccagcacaacctctcatagatcaatgaatgcgattcagtcctccggggttggttatgagatgagaaattaggcttctgctgcaacatyctccacggaaggagagctgccgagggtgggtgacacagtgtgccctgtgctgtgtgttcctttcattaaggagcatctctgaggctggaatgag

SEQ ID NO: 41629 - DNA, 600 bp, Chicken  19866894277579_5
gacatgtgcatgggttgcattagcgctgtgctggagcccctgggagcagagagagatccgctgtcaccaagaccgagttcttgggtaagagctatggagaagtttgggatcctcctcagccttggggacagccctcatgcctcatgccaggacagcaccactgggaggtgatggccccaggagggctgaagtgcaatgggaatgygatggctccaaatccatgcagccgtggcacaggacaggggaacagccaatggcaccacgctggcactgccatctcccagctcatggtgggacacrggcagcagggagagctgtcacrgccagcacaacctctcatagatcaatgaatgcgattcagtcctccggggttggttatgagatgagaaattaggcttctgctgcaacatyctccacggaaggagagctgccgagggtgggtgacacagtgtgccctgtgctgtgtgttcctttcattaaggagcatctctgaggctggaatgagcacacttctgatctttgctggatttttcttgcaaatctgctcaatgtcaggtacgttttgtccacttccagaacagaatgtctcagtgagttgaa

SEQ ID NO: 41630 - DNA, 580 bp, Chicken  19866894277579_6
gcgctgtgctggagcccctgggagcagagagagatccgctgtcaccaagaccgagttcttgggtaagagctatggagaagtttgggatcctcctcagccttggggacagccctcatgcctcatgccaggacagcaccactgggaggtgatggccccaggagggctgaagtgcaatgggaatgygatggctccaaatccatgcagccgtggcacaggacaggggaacagccaatggcaccacgctggcactgccatctcccagctcatggtgggacacrggcagcagggagagctgtcacrgccagcacaacctctcatagatcaatgaatgcgattcagtcctccggggttggttatgagatgagaaattaggcttctgctgcaacatyctccacggaaggagagctgccgagggtgggtgacacagtgtgccctgtgctgtgtgttcctttcattaaggagcatctctgaggctggaatgagcacacttctgatctttgctggatttttcttgcaaatctgctcaatgtcaggtacgttttgtccacttccagaacagaatgtctcagtgagttgaaag

SEQ ID NO: 41631 - DNA, 491 bp, Chicken  19866894277579_7
ctcctcagccttggggacagccctcatgcctcatgccaggacagcaccactgggaggtgatggccccaggagggctgaagtgcaatgggaatgygatggctccaaatccatgcagccgtggcacaggacaggggaacagccaatggcaccacgctggcactgccatctcccagctcatggtgggacacrggcagcagggagagctgtcacrgccagcacaacctctcatagatcaatgaatgcgattcagtcctccggggttggttatgagatgagaaattaggcttctgctgcaacatyctccacggaaggagagctgccgagggtgggtgacacagtgtgccctgtgctgtgtgttcctttcattaaggagcatctctgaggctggaatgagcacacttctgatctttgctggatttttcttgcaaatctgctcaatgtcaggtacgttttgtccacttccagaacagaatgtctcagtgagttgaaag

SEQ ID NO: 41632 - DNA, 600 bp, Chicken  19866894277581_1
cccatccagcctgaccttgaatgtctccagggacagggcatccaccacatctatgggcagcctgttccagcgcctcaccaccctcattgtaaaaaataatctaaatctcccctcggtttttttgaaaccattttcctttgtcctatcacaacagactctgctaaagagcctgtcccctttcttcttaacgctctcctttagatactgaaacatgtcttccaatttcactgcacacacagaaaaatcccttcttagggtgcagtccagaggcagccaggtgtgagctcccactccacgcaytggtgagggtgggccaaactgcacagtgtcagcactctgtgcccccacacctggctctccccagctgccccactcctccagccagagccccagatgcagaggcagmagagcagagcaggtagctgcctgcccaggaggacagctgggctctgaaagccactgtcgttcacaaactcctcgggcacaggagagttttgaaaagatttttaagggatgaattctgtttttactgttttcccccagtttcatgtcaagcacgggatgcaggtttcttttaactcacacatcatttaggccaac

SEQ ID NO: 41633 - DNA, 600 bp, Chicken  19866894277581_2
ctcccctcggtttttttgaaaccattttcctttgtcctatcacaacagactctgctaaagagcctgtcccctttcttcttaacgctctcctttagatactgaaacatgtcttccaatttcactgcacacacagaaaaatcccttcttagggtgcagtccagaggcagccaggtgtgagctcccactccacgcaytggtgagggtgggccaaactgcacagtgtcagcactctgtgcccccacacctggctctccccagctgccccactcctccagccagagccccagatgcagaggcagmagagcagagcaggtagctgcctgcccaggaggacagctgggctctgaaagccactgtcgttcacaaactcctcgggcacaggagagttttgaaaagatttttaagggatgaattctgtttttactgttttcccccagtttcatgtcaagcacgggatgcaggtttcttttaactcacacatcatttaggccaactgctattgctgaattgagatgttttatctcggtttccagattcaatcttttccttgatatgtcatcaaagcatcgactattacaaacaggaagacacgttgttctg

SEQ ID NO: 41634 - DNA, 600 bp, Chicken  19866894277581_3
agctgcctgcccaggaggacagctgggctctgaaagccactgtcgttcacaaactcctcgggcacaggagagttttgaaaagatttttaagggatgaattctgtttttactgttttcccccagtttcatgtcaagcacgggatgcaggtttcttttaactcacacatcatttaggccaactgctattgctgaattgagatgttttatctcggtttccagattcaatcttttccttgatatgtcatcaaagcatcgactattacaaacaggaagacacgttgttctgaaaagcaaatgttrtggcacacgcgaagctagcagtgttgtcagtctgaaaagaaaatccaagcataaaatgaaaagaaaaaaaaaaaaaacccagaatgaagtttcagaattttatcagaaaaaatgtggaaacgttttctaaagattaaaaaaactgcagcaacaaaaacaacaatctttttttgttgttgttcacatggaattttccgtgcttcatttctgtatgataataatagcaaaagcgaaatccccctggccctgctaggtgggctgagcaaagaagcaatgaggtagccatgggatgactctgct

SEQ ID NO: 41635 - DNA, 526 bp, Chicken  19866894277583_1
tgacttggaagattaaagtccaagagaaacccaagaattcaataaacaaagtatcacagagtcagtgcagaagaacatttcaatgatactacttagtttattgaattaaattctataaatatatgcagtatctgttctgagatcatatgtaataaataaaaacagaacagactcgctcttgcagtctactaagctcattttctttttaatgcttaaatatttcattggtgacaacatttcttgcttttccatcaaaatggtgtaaaaatagactggaaagtcagaatgtgcgatattttygtctcacatcactgcttcttccaagtggtctttctctgagttaacataaatgaccttcgagacaagtagtcaaaaatattttgtgtaggaaaaagggctcattatgctagtaattatctgtttgttactaacagttgagagagtgctttttcctgaagcagtctctttatctggtgacatttccaaataagtaattatttcattcccagaatgatttcttgttatt

SEQ ID NO: 41636 - DNA, 600 bp, Chicken  19866894277586_1
tgacttggcatagcattctacatttcacattgcaggagcatttccttccttcttcactacagaaagcttacctgcaaggatcagtagggtagggtacccccctcaaaaagtaatgctaataaattcccactgctacagtgctgaagaagaaacaaggggctgggagctaagtactgttcattttgacttcaacagaaaagccttcctcacctaccaggtttacatgtctcagcaaactaaaaaccattcacctctcatccttggaaactcaccttcaaactcagtgcatatttttaatayactctaccctatgtgctgcaaacggtcacaaagtaaacggaccatcctcagcagcagcccatttactaaygcacaagggtgaataaactgccctgaactggcattcaataagcagatacctttgagaagcaccaagactgagtctggacagaagacaggtctcactggtgccaaaagcacttgtcccatcagtttatgatgcataaatggataaacaggagcagagtcagatcgtcaattgtctcatgctacacttcagcttgctgatggcctagaacaagacaattaaaatgttccatt

SEQ ID NO: 41637 - DNA, 600 bp, Chicken  19866894277586_2
cctgcaaggatcagtagggtagggtacccccctcaaaaagtaatgctaataaattcccactgctacagtgctgaagaagaaacaaggggctgggagctaagtactgttcattttgacttcaacagaaaagccttcctcacctaccaggtttacatgtctcagcaaactaaaaaccattcacctctcatccttggaaactcaccttcaaactcagtgcatatttttaatayactctaccctatgtgctgcaaacggtcacaaagtaaacggaccatcctcagcagcagcccatttactaaygcacaagggtgaataaactgccctgaactggcattcaataagcagatacctttgagaagcaccaagactgagtctggacagaagacaggtctcactggtgccaaaagcacttgtcccatcagtttatgatgcataaatggataaacaggagcagagtcagatcgtcaattgtctcatgctacacttcagcttgctgatggcctagaacaagacaattaaaatgttccattctacaaaactaccactccttaccttgcatggtctttactgataagtcgaacttggttagattatttataa

SEQ ID NO: 41638 - DNA, 600 bp, Chicken  19866894277586_3
ttcctttgctgctgctgtacacaaacacattacagtggtgggggtggaactctgcagcagtgatcacttcagtcagctcctccatgttggcaggcttaatatctacaatatctgggaaggttttggtaaaggcatgtaacatctcacattcaaatcatttctaataagtaaccatcttaaaagatgttaaaaacacagcatagaaaactggggcaaatgtataagcttctaccgtcagcaacctacacaaagtagctttttatttacagaacaacagtttttaaaaggaaaaaaaaaatsaataagatattgttccaagaagactaattaaaatcacatagactaaattaagctcacagctggaaatttcaggttcctctcgaacctccttttcaacacatcttatcaaacaccgtactttatttacttaaagccttagaaagyttgtatatcatttttttaatacataatctttctgtaacatctgttttgttgcatatttgccartataggacatcctattacagttttggtcaagcttcctaaaagatctagaaattatttctacagttagcaataccctttggtatggaaaagcaa

SEQ ID NO: 41639 - DNA, 600 bp, Chicken  19866894277586_4
cacattcaaatcatttctaataagtaaccatcttaaaagatgttaaaaacacagcatagaaaactggggcaaatgtataagcttctaccgtcagcaacctacacaaagtagctttttatttacagaacaacagtttttaaaaggaaaaaaaaaatsaataagatattgttccaagaagactaattaaaatcacatagactaaattaagctcacagctggaaatttcaggttcctctcgaacctccttttcaacacatcttatcaaacaccgtactttatttacttaaagccttagaaagyttgtatatcatttttttaatacataatctttctgtaacatctgttttgttgcatatttgccartataggacatcctattacagttttggtcaagcttcctaaaagatctagaaattatttctacagttagcaataccctttggtatggaaaagcaactgttttcaagagaaatgttattttagacagttaagagaccttaagctttggaaagaagtatccacttctcraatctttttgttcttatttaaagtatagactaaactcaataaataaaggatgcttccaacatttaaaccatc

SEQ ID NO: 41640 - DNA, 600 bp, Chicken  19866894277586_5
ctggggcaaatgtataagcttctaccgtcagcaacctacacaaagtagctttttatttacagaacaacagtttttaaaaggaaaaaaaaaatsaataagatattgttccaagaagactaattaaaatcacatagactaaattaagctcacagctggaaatttcaggttcctctcgaacctccttttcaacacatcttatcaaacaccgtactttatttacttaaagccttagaaagyttgtatatcatttttttaatacataatctttctgtaacatctgttttgttgcatatttgccartataggacatcctattacagttttggtcaagcttcctaaaagatctagaaattatttctacagttagcaataccctttggtatggaaaagcaactgttttcaagagaaatgttattttagacagttaagagaccttaagctttggaaagaagtatccacttctcraatctttttgttcttatttaaagtatagactaaactcaataaataaaggatgcttccaacatttaaaccatctacagtattcctgctggtagttttccactgaaagaatgcttgcacttgatgactgagaccatt

SEQ ID NO: 41641 - DNA, 600 bp, Chicken  19866894277586_6
gttcctctcgaacctccttttcaacacatcttatcaaacaccgtactttatttacttaaagccttagaaagyttgtatatcatttttttaatacataatctttctgtaacatctgttttgttgcatatttgccartataggacatcctattacagttttggtcaagcttcctaaaagatctagaaattatttctacagttagcaataccctttggtatggaaaagcaactgttttcaagagaaatgttattttagacagttaagagaccttaagctttggaaagaagtatccacttctcraatctttttgttcttatttaaagtatagactaaactcaataaataaaggatgcttccaacatttaaaccatctacagtattcctgctggtagttttccactgaaagaatgcttgcacttgatgactgagaccattctgaaagctgctttcaccacattaaatctctacatttttaaatcctgtactttaatccacagattcaaaaactactatarttagtaaaattaagataattctcttcagcatacatagcctacatgcaccctagtgttcawagaagatttaagaaaaggatactaa

SEQ ID NO: 41642 - DNA, 600 bp, Chicken  19866894277586_7
tatggaaaagcaactgttttcaagagaaatgttattttagacagttaagagaccttaagctttggaaagaagtatccacttctcraatctttttgttcttatttaaagtatagactaaactcaataaataaaggatgcttccaacatttaaaccatctacagtattcctgctggtagttttccactgaaagaatgcttgcacttgatgactgagaccattctgaaagctgctttcaccacattaaatctctacatttttaaatcctgtactttaatccacagattcaaaaactactatarttagtaaaattaagataattctcttcagcatacatagcctacatgcaccctagtgttcawagaagatttaagaaaaggatactaaaacttctatctgtgatttctaaatgccataggttaattcttaggtcatctgctgaaaggtacgtttcatgatcactatttactgaaatagagtttatatggtaagtatgtgcatttgcaaatatccttctgggacttgcttcaaccattagatccatgggtttcagtattggcacctgaaacataaaagaacagtcaagttgggcataaaattga

SEQ ID NO: 41643 - DNA, 600 bp, Chicken  19866894277586_8
tttggaaagaagtatccacttctcraatctttttgttcttatttaaagtatagactaaactcaataaataaaggatgcttccaacatttaaaccatctacagtattcctgctggtagttttccactgaaagaatgcttgcacttgatgactgagaccattctgaaagctgctttcaccacattaaatctctacatttttaaatcctgtactttaatccacagattcaaaaactactatarttagtaaaattaagataattctcttcagcatacatagcctacatgcaccctagtgttcawagaagatttaagaaaaggatactaaaacttctatctgtgatttctaaatgccataggttaattcttaggtcatctgctgaaaggtacgtttcatgatcactatttactgaaatagagtttatatggtaagtatgtgcatttgcaaatatccttctgggacttgcttcaaccattagatccatgggtttcagtattggcacctgaaacataaaagaacagtcaagttgggcataaaattgatttctgattcaaaatatgttaattaattgcaccccacctatttctgttttaatttactga

SEQ ID NO: 41644 - DNA, 600 bp, Chicken  19866894277592_1
attaagaatcactagtcttaacatctgttttactctctatctttgttaatacaacttccctcctcttattcatcaggcaaccataatcccatgaaggcagatgaaagcacagcatagaacctgaagtactcaagaaatctttcatctatagatcttgaaaattaacactgtttatttggacgggggttttttggtgtttattttacttttccttttaattttcaccacagtctttataggagctctaaggtcagaattatataaataattatgcagctgcacaaagattttattcacacrtccctaagctagcaaaacatgatcctatacataaaaaaaaaaaccaaaaataaaatgttatgccaacatatattattgacttcattaaacagggtaagaaagttctgtaattctacttcattgcttcaagctactgcattactagcaagtacacttacctgggaatgggtggtactgtgatcaacatgggtttcaccacagccaacatacgtacatctgttctgttgaacaagatatgaagaagtatatagaattaaaaagtggcatcaaatatgtttacacaataggaacacactgcca

SEQ ID NO: 41645 - DNA, 600 bp, Chicken  19866894277592_2
gttaatacaacttccctcctcttattcatcaggcaaccataatcccatgaaggcagatgaaagcacagcatagaacctgaagtactcaagaaatctttcatctatagatcttgaaaattaacactgtttatttggacgggggttttttggtgtttattttacttttccttttaattttcaccacagtctttataggagctctaaggtcagaattatataaataattatgcagctgcacaaagattttattcacacrtccctaagctagcaaaacatgatcctatacataaaaaaaaaaarcaaaaataaaatgttatgccaacatatattattgacttcattaaacagggtaagaaagttctgtaattctacttcattgcttcaagctactgcattactagcaagtacacttacctgggaatgggtggtactgtgatcaacatgggtttcaccacagccaacatacgtacatctgttctgttgaacaagatatgaagaagtatatagaattaaaaagtggcatcaaatatgtttacacaataggaacacactgccaatccattttagatgcactaatatttcaaactcgcaggttcctac

SEQ ID NO: 41646 - DNA, 600 bp, Chicken  19866894277596_1
cagacagggcagctaagctaattaatgatttggccaattaaactgattctcatacaagtgaaagctactgttatggacactccttgccaaggtgtgctagataaagggaaaacattttactttcactatggttttcctaccttccaggtggtgtcatttcctaacagcttttagcatggaatttcctcagtattgcagtctgtagacttcagtacagtacacacaaacccaatatgtcttcggtaagcctcagaaattaagactccagagattccagatttcaaagggatcaaaccattwtcagaaccaaccctactgcaataaagtgccccagtcttttttccccatttctctcccagcagagtacaactgtcctgatcaccttctgcacggtcagcaggtgctaagagacaatcagtcagaagrgaagcagtgaaaggaactcagaggaataagaatcatatgggaaaaggtgtgaaatgctgcagatggggcaggaactccgaagacccaactatctttattgcccatagaaatacacaatctgaacgtttccactcagtgtcttagaaacacacccctgtgaactgaatgatgaac

SEQ ID NO: 41647 - DNA, 600 bp, Chicken  19866894277596_2
tatggttttcctaccttccaggtggtgtcatttcctaacagcttttagcatggaatttcctcagtattgcagtctgtagacttcagtacagtacacacaaacccaatatgtcttcggtaagcctcagaaattaagactccagagattccagatttcaaagggatcaaaccattwtcagaaccaaccctactgcaataaagtgccccagtcttttttccccatttctctcccagcagagtacaactgtcctgatcaccttctgcacggtcagcaggtgctaagagacaatcagtcagaagrgaagcagtgaaaggaactcagaggaataagaatcatatgggaaaaggtgtgaaatgctgcagatggggcaggaactccgaagacccaactatctttattgcccatagaaatacacaatctgaacgtttccactcagtgtcttagaaacacacccctgtgaactgaatgatgaacttttgtgggttttggattccaaaaaaatcaaaaaccacttccatgaatagtgttctgaatcatttgggagctacaacaagaacatcaaatatttatttttaaagccatttacattatcagctctgc

SEQ ID NO: 41648 - DNA, 599 bp, Chicken  19866894277607_1
  misc_feature (1)..(76): n is any nucleotide
nnnnnnnnnnnnnnnnnnnnnnnnnnnnnnnnnnnnnnnnnnnnnnnnnnnnnnnnnnnnnnnnnnnnnnnnnnnntaaatgtagtcctattttactcatatcttctcatcagcttgtattatttaaaacatgtgggacattcagacagatgaaaaaaaataggtcaggctcaaaacaaaagccacaacattcctttttattagcagattaaacatgcagaactgtaattgtaaattccaagtaaaagccacttaatgaaaacatccctaatgcagaaatagaagctatttgggattgtygtgatctttaattgccacgtcgccaaacaccttaaagaaaacagaacttataagtgagtttgtcagtctcatttggaaatacattaaaaaaggccacatcgattagtgtccacgtgggaatttgtgtgagaatctaggattctgaaagaagattacaactggaagaccttgcttgaaatactactgggtggtgagtatttgtaaaatctcrtctcttcactttcaaagattctgcttttaagcaaacgtattccttcttgacactgagtttacattacgaaactcagaaacacatttat

SEQ ID NO: 41649 - DNA, 600 bp, Chicken  19866894277607_2
aacatgcagaactgtaattgtaaattccaagtaaaagccacttaatgaaaacatccctaatgcagaaatagaagctatttgggattgtygtgatctttaattgccacgtcgccaaacaccttaaagaaaacagaacttataagtgagtttgtcagtctcatttggaaatacattaaaaaaggccacatcgattagtgtccacgtgggaatttgtgtgagaatctaggattctgaaagaagattacaactggaagaccttgcttgaaatactactgggtggtgagtatttgtaaaatctcrtctcttcactttcaaagattctgcttttaagcaaacgtattccttcttgacactgagtttacattacgaaactcagaaacacatttattcatcttccttttaacttctgcataaccacagtaattattaccaaaatatgtaaaatccaaatacaagttcagtgcactaaatatagtcacgcaaactgaaagtcctaaaaatcatwcgactgctgccacctaacgttgttccaaacrttgcaaggagataaccattttctgctgcctcagtctaacactaggactcaactacagaaagctc

SEQ ID NO: 41650 - DNA, 600 bp, Chicken  19866894277607_3
ggaatttgtgtgagaatctaggattctgaaagaagattacaactggaagaccttgcttgaaatactactgggtggtgagtatttgtaaaatctcrtctcttcactttcaaagattctgcttttaagcaaacgtattccttcttgacactgagtttacattacgaaactcagaaacacatttattcatcttccttttaacttctgcataaccacagtaattattaccaaaatatgtaaaatccaaatacaagttcagtgcactaaatatagtcacgcaaactgaaagtcctaaaaatcatwcgactgctgccacctaacgttgttccaaacrttgcaaggagataaccattttctgctgcctcagtctaacactaggactcaactacagaaagctcaggaagtcaccagctcttcacatactacrtgctctgaaaagagcaagttaatgaagatatagttgtttttttcttgtgactgcttttgtttggtgattctactgtaatttcaattaagcacaggacagaaacacttcgtttctggacagaaaccaactaaagcaaatcagagatgcacaatcgcacccgataacagcaccaaagg

SEQ ID NO: 41651 - DNA, 600 bp, Chicken  19866894277607_4
gaagattacaactggaagaccttgcttgaaatactactgggtggtgagtatttgtaaaatctcrtctcttcactttcaaagattctgcttttaagcaaacgtattccttcttgacactgagtttacattacgaaactcagaaacacatttattcatcttccttttaacttctgcataaccacagtaattattaccaaaatatgtaaaatccaaatacaagttcagtgcactaaatatagtcacgcaaactgaaagtcctaaaaatcatwcgactgctgccacctaacgttgttccaaacrttgcaaggagataaccattttctgctgcctcagtctaacactaggactcaactacagaaagctcaggaagtcaccagctcttcacatactacrtgctctgaaaagagcaagttaatgaagatatagttgtttttttcttgtgactgcttttgtttggtgattctactgtaatttcaattaagcacaggacagaaacacttcgtttctggacagaaaccaactaaagcaaatcagagatgcacaatcgcacccgataacagcaccaaagggttgtaacaacgatcatttcatagcctatca

SEQ ID NO: 41652 - DNA, 597 bp, Chicken  19866894277607_5
agcaaacgtattccttcttgacactgagtttacattacgaaactcagaaacacatttattcatcttccttttaacttctgcataaccacagtaattattaccaaaatatgtaaaatccaaatacaagttcagtgcactaaatatagtcacgcaaactgaaagtcctaaaaatcatwcgactgctgccacctaacgttgttccaaacrttgcaaggagataaccattttctgctgcctcagtctaacactaggactcaactacagaaagctcaggaagtcaccagctcttcacatactacrtgctctgaaaagagcaagttaatgaagatatagttgtttttttcttgtgactgcttttgtttggtgattctactgtaatttcaattaagcacaggacagaaacacttcgtttctggacagaaaccaactaaagcaaatcagagatgcacaatcgcacccgataacagcaccaaagggttgtaacaacgatcatttcatagcctatcaattcaggcattgccacttcaagatatttcaaagcttaagacttccagcagcattaatattaattgtgtatttgttatttctaaatacaca

SEQ ID NO: 41653 - DNA, 600 bp, Chicken  19866894277613_1
gaaggcaaacaataaaagaaaaaaagaaatgttttcattttcccagttgccttatttttacttttgcttcatagttttgaaaggccttgtgaatgttgcatcctgcaagctgtgtggtgcagtcaacagaccgaaggatgggatatcattcagagggacctagtcaggctccatcagtggacccaggtgaacttcatgaggttcaacatcaagtgcaaggttttccagctcgatattggcaacccccactatctgtataagcaggaggatgaaagaacagtgcatagttctgtcaaaaaygacttaggagtatttgtgcatggcaagctgaacataagccagaaatgtgcccttgcascccaaaagccaactgtactctgggctgcatcaaaagaagagagaccaataggttgagggaggtgatcttgcccctctagtctgcactggtgagacctcacctggagtattctgttcaaatgtggactcttcagtatagaagggacatagacctgttagactatgtccagaggagggccacagaaatgatccaagggatggaacacctcccttatgaagacaggccgagagagctgtgactgt

SEQ ID NO: 41654 - DNA, 600 bp, Chicken  19866894277613_2
tacttttgcttcatagttttgaaaggccttgtgaatgttgcatcctgcaagctgtgtggtgcagtcaacagaccgaaggatgggatatcattcagagggacctagtcaggctccatcagtggacccaggtgaacttcatgaggttcaacatcaagtgcaaggttttccagctcgatattggcaacccccactatctgtataagcaggaggatgaaagaacagtgcatagttctgtcaaaaaygacttaggagtatttgtgcatggcaagctgaacataagccagaaatgtgcccttgcascccaaaagccaactgtactctgggctgcatcaaaagaagagagaccaataggttgagggaggtgatcttgcccctctagtctgcactggtgagacctcacctggagtattctgttcaaatgtggactcttcagtatagaagggacatagacctgttagactatgtccagaggagggccacagaaatgatccaagggatggaacacctcccttatgaagacaggccgagagagctgtgactgttcagccttcagaagagaaggctccagaaacctgatatcagcctttcagtatgtacaga

SEQ ID NO: 41655 - DNA, 599 bp, Chicken  19866894277628_1
  misc_feature (1)..(124): n is any nucleotide
nnnnnnnnnnnnnnnnnnnnnnnnnnnnnnnnnnnnnnnnnnnnnnnnnnnnnnnnnnnnnnnnnnnnnnnnnnnnnnnnnnnnnnnnnnnnnnnnnnnnnnnnnnnnnnnnnnnnnnnnnnnntaccagccatattcccagcacaaggagctttgccccttgaaaggacaagaaaatttgcccttagcttggcaatttgcactgaggaatagctgcctgggtgcgtagctgttgcttttgtgagaggaaattgctctctctcttatctgtagatgcttgcagtatcctccatgagaaarctgtggttgctaggactttggtcctgaatttctcctgtctggaaacaacatatcatagaaccatcatatcatatcatcatatcatatactgaaattaattcagttcgggaaaaaaaaaaaaacaaaaaaaagaaaattaatgagttataaaacatttgttttctttgcaaagytgtgttaggcaagcgcttgtccacatctcgacacatcacagagagagacccgcgggagctaacaatatccaagctatttgatgttgtacttcctggcagacacctatcggggatgacaggggagta

SEQ ID NO: 41656 - DNA, 600 bp, Chicken  19866894277628_2
aaaatttgcccttagcttggcaatttgcactgaggaatagctgcctgggtgcgtagctgttgcttttgtgagaggaaattgctctctctcttatctgtagatgcttgcagtatcctccatgagaaarctgtggttgctaggactttggtcctgaatttctcctgtctggaaacaacatatcatagaaccatcatatcatatcatcatatcatatactgaaattaattcagttcgggaaaaaaaaaaaaacaaaaaaaagaaaattaatgagttataaaacatttgttttctttgcaaagytgtgttaggcaagcgcttgtccacatctcgacacatcacagagagagacccgcgggagctaacaatatccaagctatttgatgttgtacttcctggcagacacctatcggggatgacaggggagtatcatttttacattacggtgtttctaccaaactgctgatagagcccttcacaagatcacaggagggtccatatcatctgattagcatttagagaagctggtgggccgggagggaaccacaggagaccagagcctgccaccctcaagggctgagagaggaaagactcaatcagtgg

SEQ ID NO: 41657 - DNA, 600 bp, Chicken  19866894277630_1
gccctgtgggggctgctgggggacacctctgaacggccgcattttgctgcgtgcaggcaaactgtcagaggccctgcagcaggcagaagtgaggctgatcagcatgcagagctgcaacctgcaggcgtaccatggcaaggtgacacagaagatgctgtgcgccgggctgctcgagggcggggtggacacctgccaggtgaggggcagcaccgggtgtcccaccacgctgggggtgcccgctcctgaactgggacaggttgttctatggaacggccccgtggaggggatgcgtgcccggcrcgatgctcacagccagcgttggtctttggcagggggacagcggagggcctctgctgtatgcaaacaggcactggcaggtggtgggcatcgtcagctggggcttcggctgcggcacccccagcacaccccggtgtctacaccagcgtccgagcgtacctcgactggatctacgccgtccgcagggtcagtgccctttgcmccttatggtcaccgctctgccgtggcttccctttgccattcctctcctctctccccttgcagtcggagctctgagacctgccaggacatcggtgctgtgcc

SEQ ID NO: 41658 - DNA, 600 bp, Chicken  19866894277630_2
aggggcagcaccgggtgtcccaccacgctgggggtgcccgctcctgaactgggacaggttgttctatggaacggccccgtggaggggatgcgtgcccggcrcgatgctcacagccagcgttggtctttggcagggggacagcggagggcctctgctgtatgcaaacaggcactggcaggtggtgggcatcgtcagctggggcttcggctgcggcacccccagcacaccccggtgtctacaccagcgtccgagcgtacctcgactggatctacgccgtccgcagggtcagtgccctttgcmccttatggtcaccgctctgccgtggcttccctttgccattcctctcctctctccccttgcagtcggagctctgagacctgccaggacatcggtgctgtgccagcggccggacgaggaggcaaagggcagctcaggcagcggccacagcctcggaatgcacccagctggagctcccttccagagagagattaatttattgccctgtgctgatcctgctgtgtcagggtctacgctgctctttgctcattactgttttacagagataaatgatgtttgtgctttagtgtatcgcctttaaaa

SEQ ID NO: 41659 - DNA, 600 bp, Chicken  19866894277637_1
cctgccaatcggctgcctagcgtgctgagcagagcagataatggtgcctttattttgctgctttttgcacagtgagggcacttctttgagtctctcttctctacttggctgctgattactgctaaactgattgaaatttagttcctgttgaaggactacatcttcatcaaatttagttggaataatcccacaatttcataagttaacagggaggtgatggagttggaggttaaaaaaaaaaatgcccaaaactagatatccatctttcctttgtggctgacctaaatccttttaaacacyactgttttcattcccattatttgtttccatggatttgcactgaaatatatttgamgttagattcattcactttttctctttcagtcttgctaaccataacctgtctattaattatactatagacagacatcagataagaattttttgcttttgttcttggtaagttttattttatttcattttatgtaagttctgtaagtccctccaaaattcttagatagcattttcctccttttgcaaagacaaatctaatggaaaggctgtcaggtcttaaataactcccagaagaaccagacaaac

SEQ ID NO: 41660 - DNA, 600 bp, Chicken  19866894277637_2
tgctgctttttgcacagtgagggcacttctttgagtctctcttctctacttggctgctgattactgctaaactgattgaaatttagttcctgttgaaggactacatcttcatcaaatttagttggaataatcccacaatttcataagttaacagggaggtgatggagttggaggttaaaaaaaaaaatgcccaaaactagatatccatctttcctttgtggctgacctaaatccttttaaacacyactgttttcattcccattatttgtttccatggatttgcactgaaatatatttgamgttagattcattcactttttctctttcagtcttgctaaccataacctgtctattaattatactatagacagacatcagataagaattttttgcttttgttcttggtaagttttattttatttcattttatgtaagttctgtaagtccctccaaaattcttagatagcattttcctccttttgcaaagacaaatctaatggaaaggctgtcaggtcttaaataactcccagaagaaccagacaaacagaataaaaactctttaagaagaaattctgatatcacaaagtatgcttaaaagtg

SEQ ID NO: 41661 - DNA, 600 bp, Chicken  19866894277643_1
gacccacctttgcagaggtaagtctccaatgcctgagcttgcagaacacctctcacagctccacgagccactagatggccggcgtgcacacccagggatgcttggccagcgactgcagctccttctaggaaacaacaggaggggacccagccacgcttcttgccgcaaccagaacgtgctgtttgttcacgaacccgcccagtaaagcgacataaacgtcaccttccagcaaagaaatctctccttgaaagcaactgtgttcagacagactggaaagactgacatcagctgggcatctgytgtgctgcttcgtccagcaggcaggctgagggcttaatggcaacagcctggagcctggggagggtccagagcagcaaatccagctttttctggcccatggaaaacagcaaacaagtaacatgctgcaggcagaaggcggtcttggctgttttgaactgggaagcccataggcttaggctcctctggttcacaacagaagtttcactaaggagagcagtgcagctccttaaagctcaatttaaacacaaaattgttgtccaatccacgttacttagagtaatggagcaggaaggggatcca

SEQ ID NO: 41662 - DNA, 600 bp, Chicken  19866894277646_1
agcagcacctgaaaagcatcctgctctccaaacagtttctcggtgtagtggactgaaaggaagtctacctctgggctaatgaacgcaatcacacagttacatgacaaatgagcaaactgaagacaacttcattctaagtacctctgcttcagtggtactcctgtaaaaacgagaacaactgatgaacacctctaagtcaagcaggacatagcctactgctaatcatgaaatacagtttcttgaaagaactaacgtacttgcacatcctcaggaggtagacagaccagaaacaaagcaatwggataaaaaaaggagagctacattgaataaaaagggggaaaaaaccacacagcatgccagtcatttacataaataacagagcagtaaatggagctagcaaatatatatatatctaactcaaaaaactataggagcaatctacccatctgtgggctcaggtgatgcactcaagcactttactgtgaatatttgttcmtgtcaattttcttaccccaattaaaaaagcccaacatagaaatcagtaggaaaaaaacccaccaagacaatcaagttcaacacggtaaatgaattttcagccta

SEQ ID NO: 41663 - DNA, 600 bp, Chicken  19866894277646_2
tcaagcaggacatagcctactgctaatcatgaaatacagtttcttgaaagaactaacgtacttgcacatcctcaggaggtagacagaccagaaacaaagcaatwggataaaaaaaggagagctacattgaataaaaagggggaaaaaaccacacagcatgccagtcatttacataaataacagagcagtaaatggagctagcaaatatatatatatctaactcaaaaaactataggagcaatctacccatctgtgggctcaggtgatgcactcaagcactttactgtgaatatttgttcmtgtcaattttcttaccccaattaaaaaagcccaacatagaaatcagtaggaaaaaaacccaccaagacaatcaagttcaacacggtaaatgaattttcagcctagagcatcactaagcctttccaaatccctataagatgagatggtccctgcaacatgattaagaatgcacaaaccaagacacaacatcaggaaaagaaaccgacacattttcaaaccatcaattctcaaaggacatgcaaaaatgcagagtaaaagcaggtcaactgtaagagcagacagttttatctagcataccaa

SEQ ID NO: 41664 - DNA, 599 bp, Chicken  19866894277651_1
  misc_feature (1)..(238): n is any nucleotide
nnnnnnnnnnnnnnnnnnnnnnnnnnnnnnnnnnnnnnnnnnnnnnnnnnnnnnnnnnnnnnnnnnnnnnnnnnnnnnnnnnnnnnnnnnnnnnnnnnnnnnnnnnnnnnnnnnnnnnnnnnnnnnnnnnnnnnnnnnnnnnnnnnnnnnnnnnnnnnnnnnnnnnnnnnnnnnnnnnnnnnnnnnnnnnnnnnnnnnnnnnnnnnnnnnnnnnnnnnnnnnnnnnnnnnnnnnnnnnctgaaggctggattttctgctttgtagttctgtagccttggtcaacttgaataaatgcagcrtatgaagattaaatgtttcgaagaattgcattaaacagttgcaggaagcagaaataatgaacagagctcaatagaaaaggatggtgaggtgattaaaagatgagactaactcggaagtatgaataaggtacttgtgtctgatactgttttgaagcaccaacaaaagtttgaattgagggtctcaatttatgctacgacgaattctgactcagttgcctcttctttgaagtttacctctatgatttccaatggagtgttttgagaaaaagatcaaaatmatctttttctcagtgctgcca

SEQ ID NO: 41665 - DNA, 600 bp, Chicken  19866894277651_2
gtcaacttgaataaatgcagcrtatgaagattaaatgtttcgaagaattgcattaaacagttgcaggaagcagaaataatgaacagagctcaatagaaaaggatggtgaggtgattaaaagatgagactaactcggaagtatgaataaggtacttgtgtctgatactgttttgaagcaccaacaaaagtttgaattgagggtctcaatttatgctacgacgaattctgactcagttgcctcttctttgaagtttacctctatgatttccaatggagtgttttgagaaaaagatcaaaatmatctttttctcagtgctgccaagttaagaaagcccagttactcaaggctgctttcagcaagaccgagtcatgtcctgtggcgtaaagatgttattcatccttgtctcttgctgtcaggccaagttaacacctctcataaagtgttttcattcttcttatgggctcattcaaggctttagcatcagcgttttcgagaaataagtaaaataaatcctagcacttttactcagaaggcccatcaagtgggtagaagagtcttggttctaagcggctgtgatctcacttggaacaaaggtattt

SEQ ID NO: 41666 - DNA, 600 bp, Chicken  19866894277653_1
ctctggcctcaaatggaacatatggttctataatgggtaatggatgtgtgagatgggtattaactgtacataatggctaaaaataccttcatttttcttaaagcaaaacaaagaatacaataaattattgatatataaaaaaacaaattagctgtccaattaagtaaattactaagctttggacaagggaagcacttaagctcaaaaagaaaagaaaagtttagaaatgtatatgtgcaaaatattttgaataatatttaacagcaaatttttagatgtttctacaaaacttttagtctrcagattactaacagtttaactattagctaacttggaatgtgcttaagatgtcagagaaccacaactacaaatattaataagagtacttattcttttaatgagattttaatctcattagaatctgagattagtcttttcctcacacttgcacatctttacttcatttcagacaatacttataatgattccaactttcttgacaagaaacgtttgtgtttattttgtatccctatatagmagaaatggtctcattttgttgaacyttttccacatacacagaagtgaaacacagatgcatga

SEQ ID NO: 41667 - DNA, 600 bp, Chicken  19866894277653_2
aaaatattttgaataatatttaacagcaaatttttagatgtttctacaaaacttttagtctrcagattactaacagtttaactattagctaacttggaatgtgcttaagatgtcagagaaccacaactacaaatattaataagagtacttattcttttaatgagattttaatctcattagaatctgagattagtcttttcctcacacttgcacatctttacttcatttcagacaatacttataatgattccaactttcttgacaagaaacgtttgtgtttattttgtatccctatatagmagaaatggtctcattttgttgaacyttttccacatacacagaagtgaaacacagatgcatgactctattgtttgtgcctagaacgcacagcaaaaagtacacttaaaaatcagttttgaaacactacaacagtttctagtgaaattttcaatgcatttacctgcacaggcgaggcattggagtatcctcccatggttattggaacagaaaattgctccatgaacacaggtagtgttcccagtttccctgggaatacaaagtcaaagagggaccagagttccttcaagttattttgcatag

SEQ ID NO: 41668 - DNA, 600 bp, Chicken  19866894277653_3
gcaaatttttagatgtttctacaaaacttttagtctrcagattactaacagtttaactattagctaacttggaatgtgcttaagatgtcagagaaccacaactacaaatattaataagagtacttattcttttaatgagattttaatctcattagaatctgagattagtcttttcctcacacttgcacatctttacttcatttcagacaatacttataatgattccaactttcttgacaagaaacgtttgtgtttattttgtatccctatatagmagaaatggtctcattttgttgaacyttttccacatacacagaagtgaaacacagatgcatgactctattgtttgtgcctagaacgcacagcaaaaagtacacttaaaaatcagttttgaaacactacaacagtttctagtgaaattttcaatgcatttacctgcacaggcgaggcattggagtatcctcccatggttattggaacagaaaattgctccatgaacacaggtagtgttcccagtttccctgggaatacaaagtcaaagagggaccagagttccttcaagttattttgcataggggaaccagacaggatgatgcgatg

SEQ ID NO: 41669 - DNA, 600 bp, Chicken  19866894277663_1
tgctttaatactcaagacctatatgcaaaaaatacacagtatatgaacaccaagattgaaaatgcaggcattcagattttaggtactacctcaggttaaattttcctgttcatgtttcattcattctcatttgtacagacacagactcagtcctcaatgaaaagtttgtatgccatttttattttggagcaaatttcgtaggagatttcatcaagcattgactaaattagcaaaagctaagcaaagcatgcagaaaatgaagcaaacgcaatagcaggaattgcactgaaattaaatttygcaacctgtttttttcagcaagctggaaacctttaatttttgtctcccttttataaaaacagctttataaaaacagtttgcaytgcttttgtgaggcatactggtaatgcaaagactgatgaaaagaaaagcatatgaattaaacccaacttgaaaaagctgatgggtctccaagttcctctggtgattagaagaaaatatttctctttttttgattaatggaaattctttcattgactttaatgacaggtagatataatctcacaggacataatgactcatttctctgtaacgttcatg

SEQ ID NO: 41670 - DNA, 600 bp, Chicken  19866894277663_2
tactacctcaggttaaattttcctgttcatgtttcattcattctcatttgtacagacacagactcagtcctcaatgaaaagtttgtatgccatttttattttggagcaaatttcgtaggagatttcatcaagcattgactaaattagcaaaagctaagcaaagcatgcagaaaatgaagcaaacgcaatagcaggaattgcactgaaattaaatttygcaacctgtttttttcagcaagctggaaacctttaatttttgtctcccttttataaaaacagctttataaaaacagtttgcaytgcttttgtgaggcatactggtaatgcaaagactgatgaaaagaaaagcatatgaattaaacccaacttgaaaaagctgatgggtctccaagttcctctggtgattagaagaaaatatttctctttttttgattaatggaaattctttcattgactttaatgacaggtagatataatctcacaggacataatgactcatttctctgtaacgttcatgcttatttaatttaatagagacttattagaaagccaaatctcttacaaagttttcttagaaacctccccaccacccaacattgt

SEQ ID NO: 41671 - DNA, 576 bp, Chicken  19866894277663_3
gttcctctggtgattagaagaaaatatttctctttttttgattaatggaaattctttcattgactttaatgacaggtagatataatctcacaggacataatgactcatttctctgtaacgttcatgcttatttaatttaatagagacttattagaaagccaaatctcttacaaagttttcttagaaacctccccaccacccaacattgtcattttttttaatgaaggctttcacatctccctttttcaaattgctcagattgaaatgtcactctacttcccagtaatgaattgcattgcrctacaatggctgaagggaaagacatttgaattgcaagagcaataaattcacatttataacaagccacccactgcactcttacttcctccagacttgcagcttattagatgccttggcaaaaacttaacgtcttgtgtcatctctaatgcatggtaaggtattttctcaacttgcatcttctaagtgagctactctctttttggagtactttcaggtttctttttgaagctaggatgtgttcagtgcttaagggctctgggctgggcagcttctgca

SEQ ID NO: 41672 - DNA, 599 bp, Chicken  19866894277664_1
  misc_feature (1)..(177): n is any nucleotide
nnnnnnnnnnnnnnnnnnnnnnnnnnnnnnnnnnnnnnnnnnnnnnnnnnnnnnnnnnnnnnnnnnnnnnnnnnnnnnnnnnnnnnnnnnnnnnnnnnnnnnnnnnnnnnnnnnnnnnnnnnnnnnnnnnnnnnnnnnnnnnnnnnnnnnnnnnnnnnnnnnnnnnnnnnnnnnnnnttttgtcttttttcagtgggaacttacacccaaattacagtataatatgcttgaagcccatggttgcatcaccaatgcatcagcacgcattgctgctgggtgcttgttttggtgagctgtaaktgaaccagattatcagtttaggaaagttttcatttagctatgatatttgttggtagcgtatggcatttaggaattgttcatttttgccccacagctaattccacattattaggacactcttctccctgtgcacgccatttactgtcataacatcactcctttatcccccttttcttcccatttgcatcatttgatgagttcaaacgattttgttcttttttcatctaaggtagaggctgcaagaagacccagtacatgaaattctgctctatctttagagaaggatatctccaaatata

SEQ ID NO: 41673 - DNA, 600 bp, Chicken  19866894277664_2
gaattgttcatttttgccccacagctaattccacattattaggacactcttctccctgtgcacgccatttactgtcataacatcactcctttatcccccttttcttcccatttgcatcatttgatgagttcaaacgattttgttcttttttcatctaaggtagaggctgcaagaagacccagtacatgaaattctgctctatctttagagaaggatatctccaaatatatctgtagacatagagaaaatgtagagactgacagctgatagatcctgtagacttctcattgttttgtaccrtggtggtcatgccaaatctgtcaaaacacagagaaaccaatctgtatatgaaggaagtggctttttttttgttctctgggaacaccatgcaacatccacagccctagttttaaggcatcccctataaccattttgttacgtgccgcatatctttgcaggagcccaagattattacatttgctttttaaaaagttttgctcttgcgttttgccctttaaattactataattacatagggaggcttagtttgagtctaaccatcggttttcctgtatgtcattagaagttgttaggggatca

SEQ ID NO: 41674 - DNA, 599 bp, Chicken  19866894277669_1
  misc_feature (1)..(131): n is any nucleotide
nnnnnnnnnnnnnnnnnnnnnnnnnnnnnnnnnnnnnnnnnnnnnnnnnnnnnnnnnnnnnnnnnnnnnnnnnnnnnnnnnnnnnnnnnnnnnnnnnnnnnnnnnnnnnnnnnnnnnnnnnnnnnnnnnnnccccgaaatacacagagctgactggtcaaaataagccacaaatagaccaggctggtgggaaatagagcatgtcatcagaatcatagaatggcttaggttgggagggtccttaaagaactcgaaccccctgctgtgagcagggctgccacccaccagatcaggctgcccrgggggtatagggcatcygtaacttctctgggcagcctcttcaagcactgggggtgctgggagctggagctcagtcatgctcgcccattgctgccagtgggagtgagatggtggggagagggccctctgctcccctggacctgctgtccacagctgtgctgttggccagtcctctagtgcttgttttccactctgaaagtagtctcagctttatcttacagtgctattggaatttgaaagaaatgcagctatgagtgatatctctgtaatgcagttatcaagtgaaatgaaaaacaaaca

SEQ ID NO: 41675 - DNA, 599 bp, Chicken  19866894277669_2
  misc_feature (1)..(114): n is any nucleotide
nnnnnnnnnnnnnnnnnnnnnnnnnnnnnnnnnnnnnnnnnnnnnnnnnnnnnnnnnnnnnnnnnnnnnnnnnnnnnnnnnnnnnnnnnnnnnnnnnnnnnnnnnnnnnnnnnnccccgaaatacacagagctgactggtcaaaataagccacaaatagaccaggctggtgggaaatagagcatgtcatcagaatcatagaatggcttaggttgggagggtccttaaagaactcgaaccccctgctgtgagcagggctgccacccaccagatcaggctgcccrgggggtatagggcatcygtaacttctctgggcagcctcttcaagcactgggggtgctgggagctggagctcagtcatgctcgcccattgctgccagtgggagtgagatggtggggagagggccctctgctcccctggacctgctgtccacagctgtgctgttggccagtcctctagtgcttgttttccactctgaaagtagtctcagctttatcttacagtgctattggaatttgaaagaaatgcagctatgagtgatatctctgtaatgcagttatcaagtgaaatgaaaaacaaacaaacaaaagaagtttctg

SEQ ID NO: 41676 - DNA, 518 bp, Chicken  19866894277669_3
tgctgccagtgggagtgagatggtggggagagggccctctgctcccctggacctgctgtccacagctgtgctgttggccagtcctctagtgcttgttttccactctgaaagtagtctcagctttatcttacagtgctattggaatttgaaagaaatgcagctatgagtgatatctctgtaatgcagttatcaagtgaaatgaaaaacaaacaaacaaaagaagtttctgtatgaatacacaaggaccttgttttttcttgttccccgaaagtgacttttttttctgtccctgttttcttytatgtttttgtttctacggctgtcttgtgaagatacttatttttagcttttgggaactcattaggtcaagtcattgggagctgacagagtgttgggaagagawaatatatttatcgtcttcatgtcagtacaggaaataacatgacagcagtgttagtatcatgttcactgcctgctcatgttaaccaactcactgggctcagcttctcccaaattag

SEQ ID NO: 41677 - DNA, 415 bp, Chicken  19866894277669_4
tctgaaagtagtctcagctttatcttacagtgctattggaatttgaaagaaatgcagctatgagtgatatctctgtaatgcagttatcaagtgaaatgaaaaacaaacaaacaaaagaagtttctgtatgaatacacaaggaccttgttttttcttgttccccgaaagtgacttttttttctgtccctgttttcttytatgtttttgtttctacggctgtcttgtgaagatacttatttttagcttttgggaactcattaggtcaagtcattgggagctgacagagtgttgggaagagawaatatatttatcgtcttcatgtcagtacaggaaataacatgacagcagtgttagtatcatgttcactgcctgctcatgttaaccaactcactgggctcagcttctcccaaattag

SEQ ID NO: 41678 - DNA, 600 bp, Chicken  19866894277671_1
ttctgcaggaacaggggttaaatgaattggaccataggtgagaaaccaagtggcagtatagatctgctcatatgcattagcaaactattagttcagagccacacaataccttggagacattcataaattagagtacggagtacaatacatactgacctaaaacaaaagagaagcttacagaaatcacgaggaatgctaatggatagtcacaggaccaaatacttagagtaatcagaaagtcacttgattaagacccaagctgcttaaacatcatttttttgtagcattcttagctcttastgtaaaatgtaaccaagatttctgacataacagaaataaaaatgggtttcttcatatataagctccgcaaaataatgggtaagttgataactggatttctaaaaacaaagatttcattctcaattggagttttagtgttatgcaatgttatctactatacagttatctaccatacttgggctttttcccattcacttctctatttgcttcctcaatttactgtgttggcctttgtctccgtaactgtaagtccagcttataatggcagtaaaatctgaacatctgaatgtgcatccttga

SEQ ID NO: 41679 - DNA, 600 bp, Chicken  19866894277674_1
ctgggggtgaattggggctttacagtgaaggaggcacagctgcagtgtcactgcatttgtgagtgagtgatgaggagccattcagtgggtgagaaagtgatgtctgcatgttaagactgtttggtttggcaggcggtgctgtacttgggcactggtctgtaatgtttcctgcttacagtcaggaatctaaggcaaacagctcaaaccaggctccaaaaagaagtcactaacttagtcttcatttctgaatgctgtattcgatatcttgtcatttgtgtagtgtgagtgcttgcagctgtrtctgaagcgctgcaccagtacttttctgagggattgggtctaggttctctccacatacacaactcaagagttttcttccaattctcatcccttaattrgaatttaattggaaccacttaacggatcataagtgtatttattttctgtttcataaacatacagaaaattcatctattgtggttcagctggagatcaaatctctccttggagacagatttaggttacattttgttataaaatgtgaccgtcagggagcaaataaaggacatctgttactacggtaaagtttgaaggaaattt

SEQ ID NO: 41680 - DNA, 600 bp, Chicken  19866894277674_2
gatgtctgcatgttaagactgtttggtttggcaggcggtgctgtacttgggcactggtctgtaatgtttcctgcttacagtcaggaatctaaggcaaacagctcaaaccaggctccaaaaagaagtcactaacttagtcttcatttctgaatgctgtattcgatatcttgtcatttgtgtagtgtgagtgcttgcagctgtrtctgaagcgctgcaccagtacttttctgagggattgggtctaggttctctccacatacacaactcaagagttttcttccaattctcatcccttaattrgaatttaattggaaccacttaacggatcataagtgtatttattttctgtttcataaacatacagaaaattcatctattgtggttcagctggagatcaaatctctccttggagacagatttaggttacattttgttataaaatgtgaccgtcagggagcaaataaaggacatctgttactacggtaaagtttgaaggaaatttgctatgttgcaaggccactttctgagcaatgagaaagcagttaactaacatgtttgactagaaatcttccgtgttcactaaatttgcatgtaaaaatg

SEQ ID NO: 41681 - DNA, 600 bp, Chicken  19866894277675_1
agaaactttgtgctgtttctgtacctgtactgtgtgtttaccatctgctgctacagagaaaaaggtttataagaccataatgtttccctccacgtttaacagaagagcatgcattaaggcatggcctgacaaagggtgagacacctcctcccacattaagagttcctcactagggcactgttttcatacaaggacaaatttatttaactaatacaaataaatgccaggtagctgaaacacaaaataccacaggaattcagagctaactagcactcattttgccctcggagaagacaaaayaggagcagatacatactgtgttccaggaagtgtgctaatccaggcagatcttcaggatcagagaagctgccaacagcaacgcaaagggctgctgcagactgaggaaatacaacagtttcagtaaaagctgcttcaagaaacrtttcaggaaaatgacagatgtataagacaaatcaacaggcataataaaaagaatgagtttgaatacctaatcatgaggtttcacagtacaaggaagctctctataacacttttttcactctattgctttaaaaacacacctgcttttctgtgcagcct

SEQ ID NO: 41682 - DNA, 600 bp, Chicken  19866894277675_2
acctcctcccacattaagagttcctcactagggcactgttttcatacaaggacaaatttatttaactaatacaaataaatgccaggtagctgaaacacaaaataccacaggaattcagagctaactagcactcattttgccctcggagaagacaaaayaggagcagatacatactgtgttccaggaagtgtgctaatccaggcagatcttcaggatcagagaagctgccaacagcaacgcaaagggctgctgcagactgaggaaatacaacagtttcagtaaaagctgcttcaagaaacrtttcaggaaaatgacagatgtataagacaaatcaacaggcataataaaaagaatgagtttgaatacctaatcatgaggtttcacagtacaaggaagctctctataacacttttttcactctattgctttaaaaacacacctgcttttctgtgcagcctctctttctcgtctcttccttttcagccagctcttctaattcgctgtcatcaggatcattgaaatcctcattatcttcttcatcgtcatcatcctcatccccctcatcacagtcctcatcaaaaccttctctcccatcttcga

SEQ ID NO: 41683 - DNA, 600 bp, Chicken  19866894277681_1
taagctaatagattagaagtcttcagcctgaaaaagaacataaaagtctgtaaagtaacatgggacacgtagaaagcagatctggaatgtctgatcattccatatttgaaaataagaagtagggcattatatgaatataatatattctgggtagaaatcaaacaaaacctctcattcttcacacaacacataacaaagctgttgaagttatcacagaatgtcatggatgttaaaaattcaaaatataactgaatttttcacagaagagatacacatcaattctaattcaattttgaatarttaagggaaaaatataaattaagcaaataaacagggacttttccctaaaactcttctaaaatcctgatttcttagactaattcttagcacccacaaagtgtccataaaaagaaaaaaaagcaccataagagactccctgctcatgctgttgaacatccattcatgtatatgttttagcacacaacaccaagaatgcagagaaaatggtgcttggcaaatttatatacaaacaagacagaacaaatttagcattaaaacatacagccctagaacagcataatataccaaaaagacaattta

SEQ ID NO: 41684 - DNA, 599 bp, Chicken  19866894277691_1
  misc_feature (1)..(96): n is any nucleotide
nnnnnnnnnnnnnnnnnnnnnnnnnnnnnnnnnnnnnnnnnnnnnnnnnnnnnnnnnnnnnnnnnnnnnnnnnnnnnnnnnnnnnnnnnnnnnnnntacctggaaattctcctttttcctgaattagatctccaaacttccttaaagttggtcatatgtattaggagctgaatactttaactcaacacagtgaagtgaactatcttaaggaaaccttactttggaacataatcctgaactgtagttgaaactaaccaagtagagcacaatcttgctttgagcttgagagaagtcaaaaascctaatcccacactatggacctaattgccatgcaatggtagggcccttataatgtgagcaatctgctacaaatgacattgcaacatatacaaagattatttctggaatgttaacacacatagaacttttaatacccattttatgcctccttcatgcaaaagtaaactgtatttaaaggcactatacatgcttgctatgtaattacattaatcagagaaagcttcttctctgtgttcctctggtgttgccatggcagcatccccatgtttgcaaagtgcagagcacccattcttaattat

SEQ ID NO: 41685 - DNA, 600 bp, Chicken  19866894277692_1
ggactttggccctcccttcatgccatttatgtagctaggcctagatcttgttccacagaagacctatcagtagccaactgagctgcttgagatggttgctttggcatgtcaggctctagaacattctccaaattccatggttgggtgagaagtcttcccattcttcttatatcctcctttctcattggtaagggcttaaaatgttattaaatttttgccataaatttagtaaaatgtgatttgattatttatcagttttgttatatgggacccctgcttttattaggtcgttccacagayactctcactggccctgactgtgaagcctttckgattggtttgcaaagatgaatctctctagattcyacaaagcatagattttgtccagatcttaagcattctgtttctcctaagtcagctactatttgtgctgactgttggactattgcatctgcagccaccaaaaagattagaatagctactagagcaaaattgtttatgacaagttcttcatgatagcgggggggggaggaggttaggatgaatggtcacatgggaagcacagttaaattgtgtgcacctgtgctccctggaccagcc

SEQ ID NO: 41686 - DNA, 600 bp, Chicken  19866894277692_2
agctaggcctagatcttgttccacagaagacctatcagtagccaactgagctgcttgagatggttgctttggcatgtcaggctctagaacattctccaaattccatggttgggtgagaagtcttcccattcttcttatatcctcctttctcattggtaagggcttaaaatgttattaaatttttgccataaatttagtaaaatgtgatttgattatttatcagttttgttatatgggacccctgcttttattaggtcgttccacagayactctcactggccctgactgtgaagcctttckgattggtttgcaaagatgaatctctctagattcyacaaagcatagattttgtccagatcttaagcattctgtttctcctaagtcagctactatttgtgctgactgttggactattgcatctgcagccaccaaaaagattagaatagctactagagcaaaattgtttatgacaagttcttcatgatagcgggggggggaggaggttaggatgaatggtcacatgggaagcacagttaaattgtgtgcacctgtgctccctggaccagccatagccctttactatgtgctcaatcatcagtt

SEQ ID NO: 41687 - DNA, 600 bp, Chicken  19866894277692_3
tcagtagccaactgagctgcttgagatggttgctttggcatgtcaggctctagaacattctccaaattccatggttgggtgagaagtcttcccattcttcttatatcctcctttctcattggtaagggcttaaaatgttattaaatttttgccataaatttagtaaaatgtgatttgattatttatcagttttgttatatgggacccctgcttttattaggtcgttccacagayactctcactggccctgactgtgaagcctttckgattggtttgcaaagatgaatctctctagattcyacaaagcatagattttgtccagatcttaagcattctgtttctcctaagtcagctactatttgtgctgactgttggactattgcatctgcagccaccaaaaagattagaatagctactagagcaaaattgtttatgacaagttcttcatgatagcgggggggggaggaggttaggatgaatggtcacatgggaagcacagttaaattgtgtgcacctgtgctccctggaccagccatagccctttactatgtgctcaatcatcagttcagattgtgacctagcagttcccctacatggttt

SEQ ID NO: 41688 - DNA, 600 bp, Chicken  19866894277693_1
gctgctcaatgatgagggccgacttcatttttacaaagtgctcatagtctgctaagttctcctcactcaagtagttcgccaaaatgtcaaagacaatgcgctctcggcgatccaggttctccttcagttctttcgcatcttcatgttgctgggtcagcagcttctgcttctctaccaacgtccgcttaggagagaagaaaaacagttaaaaattcactgggttcaccagcttgagacaacagcttcagtgtttaggtcgtcttgtctgttttaattgcaaagacaaagattttcctaaaygcatagagaggtggaataagattgctccctaaggattattctaataagatatgttaataaacagggataagacttagaagatgcaccatgacttttaattggccttagcaacacaaactttaaagagtactttacttcttagtagtttgaaatagttgtccaagctctccaaaatgagatttaactcatctacattttacatctccaatacacagcactgaacttccatgctgtaataactgtgtttaggaaacacagaagcattctatttaatggagcgatctattcttgcacaacttg

SEQ ID NO: 41689 - DNA, 600 bp, Chicken  19866894277697_1
taggaactcctgaatttggggttcctgcccctcggggcacccccctctacagcacacttaccactggagaagttgacaatgccctcttccaccaccaaggtgggcatcgcccccgctgccctgaagcatcgataccaccttgtcatgagagcagttcctgcagggcacagagagctgggtcagggccaccccattccctgcagacagacagcccctactgtgctccggctgcagctccatggctctgttcttgcatcaccgcacctgcagtgagcaatgggcacagggtgtgcacccagrgtgggcaatgggcatgcagtgtgcatccacagtgagcatgggtgcagggtatgcacccacagccccagcaggtgagcttcacatttaggccatagcgctgggggactctgcttgtcctaactctgcatggagaggatgcaaagatgcaaaatggatgggaaatacatccctgggaaaggcacgggttgacccagggcactgctgtttcaatgtgggctcagagaacagcctctgggtgggtatgctctgttctggggctgctgcatcagccaacagtttgctggatcagctgaaatgtga

SEQ ID NO: 41690 - DNA, 514 bp, Chicken  19866894277697_2
catgcagtgtgcatccacagtgagcatgggtgcagggtatgcacccacagccccagcaggtgagcttcacatttaggccatagcgctgggggactctgcttgtcctaactctgcatggagaggatgcaaagatgcaaaatggatgggaaatacatccctgggaaaggcacgggttgacccagggcactgctgtttcaatgtgggctcagagaacagcctctgggtgggtatgctctgttctggggctgctgcatcagccaacagtttgctggatcagctgaaatgtgagagtctgagcaytgccagcagcagcatcggatgtttaacctttaaatattcatcactctctcttatcatgtagcccatccttaccctttgctcttgcttttctttgcagaaagcccaagctggtgaaatacaggctactgccactgtactagttatgtaagaggacaagcaaggctgggctgaaatactcctctggtattcagttttcataaagaatattacagga

SEQ ID NO: 41691 - DNA, 600 bp, Chicken  19866894277701_1
atgcaggtctgcacatatattttattatccttttaaaatctgtgaccctttgatgtttcatttatgtacatatagccacactgaggcttcagtcaggccaaggcatttccagaatcactccatgattttctgtatggagttattgagaatagaacccattatttagtacagtaacattgtgttcttttctctctttcaagcaccatttccatataacaatcttggcagttaataactccataaaaaggaacaagccagactgtgactcatattccagaactttgcactccagttttcccygtgtgacaaaacaaaatgtttggggtttctggctwtactgcagagagaaaaggatcccagtagaaaatgcaaacatcagcgaatgtcagaactagttatggtgagaagttgtggacccacaaaaacaacrcatttctttataaatcacaagccaggagaaaccatattggcttcaaactgcatccactctgccctgggaagtgctgcagatgaagtaactgtggtgtctggaggagggcagggatttgctggtagtttgttccttgttttattggttatcttcacttgtgatcccatcag

SEQ ID NO: 41692 - DNA, 600 bp, Chicken  19866894277701_2
aaatctgtgaccctttgatgtttcatttatgtacatatagccacactgaggcttcagtcaggccaaggcatttccagaatcactccatgattttctgtatggagttattgagaatagaacccattatttagtacagtaacattgtgttcttttctctctttcaagcaccatttccatataacaatcttggcagttaataactccataaaaaggaacaagccagactgtgactcatattccagaactttgcactccagttttcccygtgtgacaaaacaaaatgtttggggtttctggctwtactgcagagagaaaaggatcccagtagaaaatgcaaacatcagcgaatgtcagaactagttatggtgagaagttgtggacccacaaaaacaacrcatttctttataaatcacaagccaggagaaaccatattggcttcaaactgcatccactctgccctgggaagtgctgcagatgaagtaactgtggtgtctggaggagggcagggatttgctggtagtttgttccttgttttattggttatcttcacttgtgatcccatcagatattctctttcattaaatgagcttagttggttgg

SEQ ID NO: 41693 - DNA, 600 bp, Chicken  19866894277701_3
tgtatggagttattgagaatagaacccattatttagtacagtaacattgtgttcttttctctctttcaagcaccatttccatataacaatcttggcagttaataactccataaaaaggaacaagccagactgtgactcatattccagaactttgcactccagttttcccygtgtgacaaaacaaaatgtttggggtttctggctwtactgcagagagaaaaggatcccagtagaaaatgcaaacatcagcgaatgtcagaactagttatggtgagaagttgtggacccacaaaaacaacrcatttctttataaatcacaagccaggagaaaccatattggcttcaaactgcatccactctgccctgggaagtgctgcagatgaagtaactgtggtgtctggaggagggcagggatttgctggtagtttgttccttgttttattggttatcttcacttgtgatcccatcagatattctctttcattaaatgagcttagttggttggagaaatgaaatatcgtgatagactaaagtggctttttagtaataagtgcttattggatgcagtagttgccttttgaatttttcatcacactcata

SEQ ID NO: 41694 - DNA, 600 bp, Chicken  19866894277707_1
gctccttccgacaatcccaaatacctactggctcctcctcttcctcatggagcgagaacgtcgagcgcaaggacatgttggactcagagtgcaatgaacggacggagatagcggagtcagagcggcgtggggtgctgatcggaggcttcaaagagataaaaaccaattcttgttattgcaaataactccccctgctccaaaaccctacgcacagagagttcaattcagcccccccctccaccaaactcagctgctccatttgttcatccactctgccaagctgcactgaatggtctctgygtgcctccctgctggggacaccacgccgcgcagggacaggacggccaccatccagctccaactcgctccactaagccgacatccagattccaagcacgtcactttctcaaaggtgcatttgtttggrtacttactgcgcccacccgcaaagaaatggcttggaagaattaatcctgcgcagaaagctctgtaaatctcccccagagacagctaccagctcctgcaatttctctaatctctgcagcagcacttgttgtttcgttcacgatccaacttctgccaattttttttgcgtaagtg

SEQ ID NO: 41695 - DNA, 600 bp, Chicken  19866894277707_2
tggggtgctgatcggaggcttcaaagagataaaaaccaattcttgttattgcaaataactccccctgctccaaaaccctacgcacagagagttcaattcagcccccccctccaccaaactcagctgctccatttgttcatccactctgccaagctgcactgaatggtctctgygtgcctccctgctggggacaccacgccgcgcagggacaggacggccaccatccagctccaactcgctccactaagccgacatccagattccaagcacgtcactttctcaaaggtgcatttgtttggrtacttactgcgcccacccgcaaagaaatggcttggaagaattaatcctgcgcagaaagctctgtaaatctcccccagagacagctaccagctcctgcaatttctctaatctctgcagcagcacttgttgtttcgttcacgatccaacttctgccaattttttttgcgtaagtgtggagacttccttctattcaattcagcaacaggctgactttgtcgcttcctgctcgggaggggagagctcagtggacactgcgtgcaccaatcaagaaaaatcccactggttacggcggccttgggg

SEQ ID NO: 41696 - DNA, 600 bp, Chicken  19866894277710_1
gtttcatgatttcacaaagtcttctaactggcctcaaaaacttttcaagtgggagcaggtttgccaggagctcaatcaaagggcttcaccctcatgagtggacacagcatggaaacataagagcagttctcaaatcccctctgagccttcctgtagcacactacttacgtgctctcctgaacatgctgaagaagaatgaaagaacaaagtgtttcagaataatcaagagaaatcatcttgaaaccagacaaagaacaaacattttgcacattcaccaatcattagtctatcataccacaytatctttgccactgaatttttcaatttacaagataacagtatgcaaaaatctaaatttcaatatacataccttactctcaaaggctatttaacataaccaaacaaccagtagttgtgatactagccaatcactctgtttaatcttaataagcaagtcagaatcactgcttactgctttcaccaaatagtagagcaatctctgcagattcttgctagacagcttaccttcccatgaatgttaaaattgctgtttcttggtgcactgacattcagaaagtcgtttttatactgcggagcagc

SEQ ID NO: 41697 - DNA, 600 bp, Chicken  19866894277715_1
gaagcactcacttgaaaaaccctgcagcaggtactgtcaggtactttgtcagatggctcagacttgtctggtgactgccataacccagttgtgtcacagccttcggaacttcatggtatctgtaggttctagtcccctcttctgtctccttccttggcctctgacttacgaggttgctgtcactggctggtaaaggctagcagtcttgtttattgtggactggaaggttcatcttgtgttagcaaacagagtaggccagaagaagcagatctgtagagcataacagttgatgatgaggawctgacctccacactgtatgctgcagtctttcacatcaaactctagtcttctacttggaaccaagtcacaccatggctgcagtgtgttaggtgaatcccagggcacattctccagttggattttggctgaaagaaatctagatgccagattccaagacctcaccgtggtgcaaattgaagtgtagtaactgtgaactatagagtaattcaccccgaaagctatttcctagtcctcataggcacaacagagtacacaaaccccgcatacacagccaagcagctttcctgggattgttgttgt

SEQ ID NO: 41698 - DNA, 600 bp, Chicken  19866894277718_1
ctttgttgatgaatccacttattatatgcctgtgtttttctacagagaatattatttccaggcagtagtaaaaactgttattcttttaaacatctaattgttactgtttttatcaacatagaggataatccacatataaaataaaagacaaacatatatgtgttttgtatgtgaataagaagactattttttaattatttttatttaaattaaagctttatactctaaacacatgctgaataggaatatatgacaaaaaataacttcagattcctaactgcagggtatttccaacaattygttttattgataacattttgaagcagaaattgaggtctgattgtttatttccttttgagagttatgttactgaaatggaaaaaaaacaaaacatacttaagaaaagacactacttcacagtgcaatcctcatcccattgcatcagtctctctgtagagctgatacttcattctagctctaaaagtcctggctaccaaaaaatgtttctcaaatctgttctcaccaaattaggaacattcaaatacatgagaagacaatccagcagaaataaagaagcayacaaatagagaaggagtgcag

SEQ ID NO: 41699 - DNA, 470 bp, Chicken  19866894277718_2
gcagggtatttccaacaattygttttattgataacattttgaagcagaaattgaggtctgattgtttatttccttttgagagttatgttactgaaatggaaaaaaaacaaaacatacttaagaaaagacactacttcacagtgcaatcctcatcccattgcatcagtctctctgtagagctgatacttcattctagctctaaaagtcctggctaccaaaaaatgtttctcaaatctgttctcaccaaattaggaacattcaaatacatgagaagacaatccagcagaaataaagaagcayacaaatagagaaggagtgcagtatgatttatattctgaacacccataccttctgctttctgaactcttattacaacatatatgtgaaagctttacaaaaagactggtttcagtcagtaatggagctgactgggctttgattcttacacattttgtttcttaatatagaga

SEQ ID NO: 41700 - DNA, 600 bp, Chicken  19866894277736_1
tcaacttaagggtctgaggagcaccagctcctcccaagtcccatggaggtgagtagaagcctcctcccccagccacgcagctaacctcaactgggagaagagaaggctccagggagacatgagaacagcctttcagtacctaaaggggggctggaagaaagtaggggacagactctttagaaggtgacgggacaaggggaaatggtttcaaactaaaagagcagagatttagattggatataaggaaaagattttttacaataacggagtgaggtactagtacaggttgcacagagaggwggtggtgccccatccctgcagacagccaaggtcaggctggatggggctctgagcactgatggagctgtgggtgtccctgttcagtgcagggagtgggacagatggcctttaagggtcccttccaactcaaatgattctgtgattctatgattcattcctctcatgtcccaaaacctgctgcccatcagccatgctgctgcattgtccataaaaatcyctctggtatagaaaaaggaaaaaaaatcaacctaaaaaggaacacagaggaacactgcagtgatccagtactgctacagactg

SEQ ID NO: 41701 - DNA, 600 bp, Chicken  19866894277736_2
agagcagagatttagattggatataaggaaaagattttttacaataacggagtgaggtactagtacaggttgcacagagaggwggtggtgccccatccctgcagacagccaaggtcaggctggatggggctctgagcactgatggagctgtgggtgtccctgttcagtgcagggagtgggacagatggcctttaagggtcccttccaactcaaatgattctgtgattctatgattcattcctctcatgtcccaaaacctgctgcccatcagccatgctgctgcattgtccataaaaatcyctctggtatagaaaaaggaaaaaaaatcaacctaaaaaggaacacagaggaacactgcagtgatccagtactgctacagactgaagtcagtctgattcaagtgaggtactgtaaaacttacagcttttcatacaatatacaaaggagtatgcagggccgggctggagcaagtagaaaaggaatagcagctgtgttctgggtccattcagccctgacatgcttgggctcaccagcaccaccaaaaacaggaccaggtctgtttcagccacctttgaagcgacagacaccagcagaaacaaa

SEQ ID NO: 41702 - DNA, 551 bp, Chicken  19866894277736_3
ggtagtggaggggctgagcatccatgatactcctttgctattgctataaaaaggaaaacaattaaccagctagcagaggtccagtttagaaccagatcagtccttcttccccaggtctgcctgcagcacggaagtccctgcagcacggagatgctgtcatgttaacacctcatctcctgcaaagcaaagagcagcttccaggcctggctgcagcatcctggtgacccagctcaccctggggcccagtgatgaggtgagaacaggaacaggctccacaggcagaggacaaaggctggaggygaggtttatgggagcaagagggtggtgaaggctggcaggcacacaggacgtcaaatttccttatattatttagggtctcccctaaatcttccttggatctgccttgactaaggctggccctgccagagacactaattttccctgccccatctgtttggatttgcttacttactaatttacacaacgtctatctccatggggctaagcattttaatcacagtgattaacacactagcaagaacaaaacaaaa

SEQ ID NO: 41703 - DNA, 600 bp, Chicken  19866894277742_1
tattacaacagcttggtttttattattacttttatgtctacatctacagcttttctaaaggcagtgtttgtgatcactgaatttaggaggagtttgtatgcagaccttatacttaataagaaaggattccttcttcgagtgcacagtgtaaataatttttattttttaaaggtataaaaaatgggaatatttgaaaacttgcaaatttattagctgctctgaatttccagtagtctctaggccttgtaagaggagagcatttgccaaaccttcagaggtgcagcacatgagatgggtatsgaaatgaaatacaactgagctgcttactaatactggaggaaaatgagtttggaattaagtatttttaatgattatattccattgtgagcttcaggggaggaagaataataactagacagatcacaaagtataacacatagtaaaacagtcccaaggggattattaaaaagtactgtgatactttaaattgttggtcttcttccaagcttggtatgacactctacctaatacttatagtaaacatktacagaaatactttttggcctaatgctctaactcaaggtatgcgacagatatatt

SEQ ID NO: 41704 - DNA, 600 bp, Chicken  19866894277742_2
gtaagaggagagcatttgccaaaccttcagaggtgcagcacatgagatgggtatsgaaatgaaatacaactgagctgcttactaatactggaggaaaatgagtttggaattaagtatttttaatgattatattccattgtgagcttcaggggaggaagaataataactagacagatcacaaagtataacacatagtaaaacagtcccaaggggattattaaaaagtactgtgatactttaaattgttggtcttcttccaagcttggtatgacactctacctaatacttatagtaaacatktacagaaatactttttggcctaatgctctaactcaaggtatgcgacagatatattattttacaagctctcagttttctcatataaattcctcagagacacaaagaacttgacctgtcaacacgsacactagattttcatctagaaccaggtgacaagaaggcaacaatcctccttgaatatgttgttatttttggaactttgaaacttgtctttgaaacttgaaatgcacacggtatctgaaatctgccaacattcagtgacagaagatagtaaagatttttctaatatcctattttttt

SEQ ID NO: 41705 - DNA, 600 bp, Chicken  19866894277742_3
gattatattccattgtgagcttcaggggaggaagaataataactagacagatcacaaagtataacacatagtaaaacagtcccaaggggattattaaaaagtactgtgatactttaaattgttggtcttcttccaagcttggtatgacactctacctaatacttatagtaaacatktacagaaatactttttggcctaatgctctaactcaaggtatgcgacagatatattattttacaagctctcagttttctcatataaattcctcagagacacaaagaacttgacctgtcaacacgsacactagattttcatctagaaccaggtgacaagaaggcaacaatcctccttgaatatgttgttatttttggaactttgaaacttgtctttgaaacttgaaatgcacacggtatctgaaatctgccaacattcagtgacagaagatagtaaagatttttctaatatcctatttttttctatcatttgaaatgattggaatgaatttttcaatcatttttcaattgatagaaaaactaggatatcaaacactattagacaaacaaataaataaaaagaacataaaagaataagaaaaagctc

SEQ ID NO: 41706 - DNA, 600 bp, Chicken  19866894277742_4
tggacctctacagaattaaaaagtgaaaaatgttagtcactggataggccagccaatcactggttcctgtgcagctcctactgccatcagtatctgacaaatcgattctttggttgaatcttaggaacaacagaaatgagcaagcagtgttcctgaagaaaacaatgcacaacaaatggcaacatagcctaaaaaacaattgtttattttttgagatgggaacattcttcccatatcatgtgaatatacaggtagtctgtttatgcacacatgggcttagcatgaaatattactcccaartctgtctctcctgacaagcttaaaagagtctacttcaagttacacaaaccaaagttctgctcaacctaagcccttgcgagttttatgcaaggttgtgttaagagcaagaatataccactagctaatgcmacagctgctacacatggagaaacttgagttgtgagccataaagaaacctatacagacactgcacttcccagaaacataaataaatcaattttaccacatatattgagtcatctttctctgcatatggtttcagaccagaacagatagatgtgtccttcaccagttatagaa

SEQ ID NO: 41707 - DNA, 600 bp, Chicken  19866894277742_5
acagaaatgagcaagcagtgttcctgaagaaaacaatgcacaacaaatggcaacatagcctaaaaaacaattgtttattttttgagatgggaacattcttcccatatcatgtgaatatacaggtagtctgtttatgcacacatgggcttagcatgaaatattactcccaartctgtctctcctgacaagcttaaaagagtctacttcaagttacacaaaccaaagttctgctcaacctaagcccttgcgagttttatgcaaggttgtgttaagagcaagaatataccactagctaatgcmacagctgctacacatggagaaacttgagttgtgagccataaagaaacctatacagacactgcacttcccagaaacataaataaatcaattttaccacatatattgagtcatctttctctgcatatggtttcagaccagaacagatagatgtgtccttcaccagttatagaaagaccactgtaaaaacactaactaggggggctttttgaggtcttattttaaacaaaataagttgctcattcaaagttctgatgcagacaaaaaagaaaaaaaacccttgcatcaacttcatcatttatc

SEQ ID NO: 41708 - DNA, 599 bp, Chicken  19866894277743_1
  misc_feature (1)..(146): n is any nucleotide
nnnnnnnnnnnnnnnnnnnnnnnnnnnnnnnnnnnnnnnnnnnnnnnnnnnnnnnnnnnnnnnnnnnnnnnnnnnnnnnnnnnnnnnnnnnnnnnnnnnnnnnnnnnnnnnnnnnnnnnnnnnnnnnnnnnnnnnnnnnnnnnnnnaatttggcttttacttagattttgagaaaagctgcagatctctctaaaacaagaccaattatgttagtatccaacttaagatattttaagttttcaaactttggcctaattttagtatgttcagacatttctttctgtagtcagctcgcctttsttatctgggctgctgtgttctcctttacaacgtaattgaacagtgtcctatttatgttaccctctggtgataattttccctgtttttctctctcagtatttgcttttatgacactttatttttacatcatctcctgctcctattgtagttgattaataattcagccacaagaacacgctagtgacataaagcacgatcattagctgctagtttctgaactaattcctgatgttgacagagctatcttctctgtctaccaacatgatccctgaaagaaaagccactactagcaatggaac

SEQ ID NO: 41709 - DNA, 600 bp, Chicken  19866894277743_2
gttaccctctggtgataattttccctgtttttctctctcagtatttgcttttatgacactttatttttacatcatctcctgctcctattgtagttgattaataattcagccacaagaacacgctagtgacataaagcacgatcattagctgctagtttctgaactaattcctgatgttgacagagctatcttctctgtctaccaacatgatccctgaaagaaaagccactactagcaatggaaccagcacattccaaagcagtgatagaaagaactgtaaatttctgcatgagagagaawgaaaaactctgcccctttttttttcccttctgaattcgtctcttctacctatccttcctaagtttcycacatgactccttcagtgtaaactaaagcactgcattttaatatcataatgtatctttattttttccttttgtttcatattggaggcagctctggtctaatgccattcatcttttaagcatcatataaaccttgggcaatgaccagaccacaagcacattaaaacaccwtttctcgagtatgttttatggctgtcttcttaayrgcaacattcaccacgtgcataaaatgtgt

SEQ ID NO: 41710 - DNA, 600 bp, Chicken  19866894277743_3
tacatcatctcctgctcctattgtagttgattaataattcagccacaagaacacgctagtgacataaagcacgatcattagctgctagtttctgaactaattcctgatgttgacagagctatcttctctgtctaccaacatgatccctgaaagaaaagccactactagcaatggaaccagcacattccaaagcagtgatagaaagaactgtaaatttctgcatgagagagaawgaaaaactctgcccctttttttttcccttctgaattcgtctcttctacctatccttcctaagtttcycacatgactccttcagtgtaaactaaagcactgcattttaatatcataatgtatctttattttttccttttgtttcatattggaggcagctctggtctaatgccattcatcttttaagcatcatataaaccttgggcaatgaccagaccacaagcacattaaaacaccwtttctcgagtatgttttatggctgtcttcttaayrgcaacattcaccacgtgcataaaatgtgtacaggggttctccttccttcaccgctatttggacctacgtggaccatgtcaagaaactttctacaac

SEQ ID NO: 41711 - DNA, 600 bp, Chicken  19866894277743_4
aatggaaccagcacattccaaagcagtgatagaaagaactgtaaatttctgcatgagagagaawgaaaaactctgcccctttttttttcccttctgaattcgtctcttctacctatccttcctaagtttcycacatgactccttcagtgtaaactaaagcactgcattttaatatcataatgtatctttattttttccttttgtttcatattggaggcagctctggtctaatgccattcatcttttaagcatcatataaaccttgggcaatgaccagaccacaagcacattaaaacaccwtttctcgagtatgttttatggctgtcttcttaayrgcaacattcaccacgtgcataaaatgtgtacaggggttctccttccttcaccgctatttggacctacgtggaccatgtcaagaaactttctacaaccttggccgtggccttcaccagctggggctactgcatctggcaatccactattaccaaaaagtacttgagcttcctcctctcaccttggaggtactgtatctttgtgagctgcatacaagtagtcagatcaatgttaatttctcagccatagttaagtacataagatatg

SEQ ID NO: 41712 - DNA, 600 bp, Chicken  19866894277743_5
agaactgtaaatttctgcatgagagagaawgaaaaactctgcccctttttttttcccttctgaattcgtctcttctacctatccttcctaagtttcycacatgactccttcagtgtaaactaaagcactgcattttaatatcataatgtatctttattttttccttttgtttcatattggaggcagctctggtctaatgccattcatcttttaagcatcatataaaccttgggcaatgaccagaccacaagcacattaaaacaccwtttctcgagtatgttttatggctgtcttcttaayrgcaacattcaccacgtgcataaaatgtgtacaggggttctccttccttcaccgctatttggacctacgtggaccatgtcaagaaactttctacaaccttggccgtggccttcaccagctggggctactgcatctggcaatccactattaccaaaaagtacttgagcttcctcctctcaccttggaggtactgtatctttgtgagctgcatacaagtagtcagatcaatgttaatttctcagccatagttaagtacataagatatgtgtagttgagaacaattcgtgttggaattctgtg

SEQ ID NO: 41713 - DNA, 600 bp, Chicken  19866894277743_6
gaactgtaaatttctgcatgagagagaawgaaaaactctgcccctttttttttcccttctgaattcgtctcttctacctatccttcctaagtttcycacatgactccttcagtgtaaactaaagcactgcattttaatatcataatgtatctttattttttccttttgtttcatattggaggcagctctggtctaatgccattcatcttttaagcatcatataaaccttgggcaatgaccagaccacaagcacattaaaacaccwtttctcgagtatgttttatggctgtcttcttaayrgcaacattcaccacgtgcataaaatgtgtacaggggttctccttccttcaccgctatttggacctacgtggaccatgtcaagaaactttctacaaccttggccgtggccttcaccagctggggctactgcatctggcaatccactattaccaaaaagtacttgagcttcctcctctcaccttggaggtactgtatctttgtgagctgcatacaagtagtcagatcaatgttaatttctcagccatagttaagtacataagatatgtgtagttgagaacaattcgtgttggaattctgtga

SEQ ID NO: 41714 - DNA, 600 bp, Chicken  19866894277749_1
catcccgacacatggcaaagaaaactgaggcaaacattcaaatctgacagcttgttggagaagggaagaggaaatcaattagaagggaggcacagagcttctccccctcctctcccagcgctgggtggcagcggccacgtttgtcatctggcactgagggacgaggctccgaccctgccccgatgggttgctttcagcaaaaacaagatgttaacacagcatccgtttgtctgccaacagcatccagctcttttgcgactggaacagcttctgctgagaagcagacacgaagcaggctgygagcacacagagacctgggctttctctgaggtcactcaggagatgaagcttcarctcttcccataaaaaagccttcaaaggctctgcagcaacctgaacagctcacggayagcactgagcatttcctaytgttgsctatagatgtgagcctctgtacagctaagagaaataaaactgcagattaatgctcatctggcttattgattctgaaattaagaagaaaaggcaccgcaggcaaaggaggggaagaggagaaaagaatggtgatttctgtatgctgcactggtgagaaacaccttc

SEQ ID NO: 41715 - DNA, 600 bp, Chicken  19866894277749_2
ttggagaagggaagaggaaatcaattagaagggaggcacagagcttctccccctcctctcccagcgctgggtggcagcggccacgtttgtcatctggcactgagggacgaggctccgaccctgccccgatgggttgctttcagcaaaaacaagatgttaacacagcatccgtttgtctgccaacagcatccagctcttttgcgactggaacagcttctgctgagaagcagacacgaagcaggctgygagcacacagagacctgggctttctctgaggtcactcaggagatgaagcttcarctcttcccataaaaaagccttcaaaggctctgcagcaacctgaacagctcacggayagcactgagcatttcctaytgttgsctatagatgtgagcctctgtacagctaagagaaataaaactgcagattaatgctcatctggcttattgattctgaaattaagaagaaaaggcaccgcaggcaaaggaggggaagaggagaaaagaatggtgatttctgtatgctgcactggtgagaaacaccttcctgtgccatggcctttgtrcagagccaggcagcagtatgtgacaccacatgggc

SEQ ID NO: 41716 - DNA, 600 bp, Chicken  19866894277749_3
tctcccagcgctgggtggcagcggccacgtttgtcatctggcactgagggacgaggctccgaccctgccccgatgggttgctttcagcaaaaacaagatgttaacacagcatccgtttgtctgccaacagcatccagctcttttgcgactggaacagcttctgctgagaagcagacacgaagcaggctgygagcacacagagacctgggctttctctgaggtcactcaggagatgaagcttcarctcttcccataaaaaagccttcaaaggctctgcagcaacctgaacagctcacggayagcactgagcatttcctaytgttgsctatagatgtgagcctctgtacagctaagagaaataaaactgcagattaatgctcatctggcttattgattctgaaattaagaagaaaaggcaccgcaggcaaaggaggggaagaggagaaaagaatggtgatttctgtatgctgcactggtgagaaacaccttcctgtgccatggcctttgtrcagagccaggcagcagtatgtgacaccacatgggcagtgctctcagctccacctgtccagtagacatagtgggatctgatctgaagggtca

SEQ ID NO: 41717 - DNA, 600 bp, Chicken  19866894277749_4
agcggccacgtttgtcatctggcactgagggacgaggctccgaccctgccccgatgggttgctttcagcaaaaacaagatgttaacacagcatccgtttgtctgccaacagcatccagctcttttgcgactggaacagcttctgctgagaagcagacacgaagcaggctgygagcacacagagacctgggctttctctgaggtcactcaggagatgaagcttcarctcttcccataaaaaagccttcaaaggctctgcagcaacctgaacagctcacggayagcactgagcatttcctaytgttgsctatagatgtgagcctctgtacagctaagagaaataaaactgcagattaatgctcatctggcttattgattctgaaattaagaagaaaaggcaccgcaggcaaaggaggggaagaggagaaaagaatggtgatttctgtatgctgcactggtgagaaacaccttcctgtgccatggcctttgtrcagagccaggcagcagtatgtgacaccacatgggcagtgctctcagctccacctgtccagtagacatagtgggatctgatctgaagggtcacacatggcacagtgattgg

SEQ ID NO: 41718 - DNA, 600 bp, Chicken  19866894277749_5
cacgtttgtcatctggcactgagggacgaggctccgaccctgccccgatgggttgctttcagcaaaaacaagatgttaacacagcatccgtttgtctgccaacagcatccagctcttttgcgactggaacagcttctgctgagaagcagacacgaagcaggctgygagcacacagagacctgggctttctctgaggtcactcaggagatgaagcttcarctcttcccataaaaaagccttcaaaggctctgcagcaacctgaacagctcacggayagcactgagcatttcctaytgttgsctatagatgtgagcctctgtacagctaagagaaataaaactgcagattaatgctcatctggcttattgattctgaaattaagaagaaaaggcaccgcaggcaaaggaggggaagaggagaaaagaatggtgatttctgtatgctgcactggtgagaaacaccttcctgtgccatggcctttgtrcagagccaggcagcagtatgtgacaccacatgggcagtgctctcagctccacctgtccagtagacatagtgggatctgatctgaagggtcacacatggcacagtgattgggttctg

SEQ ID NO: 41719 - DNA, 600 bp, Chicken  19866894277749_6
ctttctctgaggtcactcaggagatgaagcttcarctcttcccataaaaaagccttcaaaggctctgcagcaacctgaacagctcacggayagcactgagcatttcctaytgttgsctatagatgtgagcctctgtacagctaagagaaataaaactgcagattaatgctcatctggcttattgattctgaaattaagaagaaaaggcaccgcaggcaaaggaggggaagaggagaaaagaatggtgatttctgtatgctgcactggtgagaaacaccttcctgtgccatggcctttgtrcagagccaggcagcagtatgtgacaccacatgggcagtgctctcagctccacctgtccagtagacatagtgggatctgatctgaagggtcacacatggcacagtgattgggttctggaaacaaaagtcttcagaaatcaagctgaagaggggctgaatgtcacctccatgcccaggcaccatacaaaatgcccttcattgctttccaaactctttttcttggtttatctgccaggattttctttctttcctttgtcacaaccatccttacaacacccgcactgctgggaaaactcttccc

SEQ ID NO: 41720 - DNA, 600 bp, Chicken  19866894277753_1
cagaaaaaaggcttttcttttttctttcccctttaaagagaacaagctcttctagatgtatgctctgtggatcacttcttccaggagtagagcatggaatgaaatggaaaagcaaacagtctttctctagagaagagcaaggatgttaactccggccacttatttttgggccggggaggtacttggcagattttgcacaaaacacataaattgccagtaatgtagccaaataacatttccagttttactgctgatctgaataaaatgaattttatctcttttacagaaagaaaaaaaagytgggagttgggggagggggcagggaggaaatccccctacctataaattcacaagacaaccggctatggcaattgattccctcttyacctggaagaggcctagaggatgaggacaggatgaactcagtccattccccagcaatacagcaattcctgttctagagcagctggctgagggtgcccacttgacatatttcacwagaactgttcattgtaayacacrctcccagtgcacttagcaactcctcccccttaggtcttcacagcacaaaggaaaataggaaaatacatgcatcaacat

SEQ ID NO: 41721 - DNA, 600 bp, Chicken  19866894277753_2
agtagagcatggaatgaaatggaaaagcaaacagtctttctctagagaagagcaaggatgttaactccggccacttatttttgggccggggaggtacttggcagattttgcacaaaacacataaattgccagtaatgtagccaaataacatttccagttttactgctgatctgaataaaatgaattttatctcttttacagaaagaaaaaaaagytgggagttgggggagggggcagggaggaaatccccctacctataaattcacaagacaaccggctatggcaattgattccctcttyacctggaagaggcctagaggatgaggacaggatgaactcagtccattccccagcaatacagcaattcctgttctagagcagctggctgagggtgcccacttgacatatttcacwagaactgttcattgtaayacacrctcccagtgcacttagcaactcctcccccttaggtcttcacagcacaaaggaaaataggaaaatacatgcatcaacatcaaggccaaagctaggtaagtagatgaaacagacacttgctacatgactgtgctcggctgctggaattcatcaccacatccatga

SEQ ID NO: 41722 - DNA, 600 bp, Chicken  19866894277753_3
aaacacataaattgccagtaatgtagccaaataacatttccagttttactgctgatctgaataaaatgaattttatctcttttacagaaagaaaaaaaagytgggagttgggggagggggcagggaggaaatccccctacctataaattcacaagacaaccggctatggcaattgattccctcttyacctggaagaggcctagaggatgaggacaggatgaactcagtccattccccagcaatacagcaattcctgttctagagcagctggctgagggtgcccacttgacatatttcacwagaactgttcattgtaayacacrctcccagtgcacttagcaactcctcccccttaggtcttcacagcacaaaggaaaataggaaaatacatgcatcaacatcaaggccaaagctaggtaagtagatgaaacagacacttgctacatgactgtgctcggctgctggaattcatcaccacatccatgaatttcatagtgaccttctttctttcttctcccctttctctctatactaacctctagagctcattgccctgggctgtaataccactaatcgctgctggatggcaccaaactcttt

SEQ ID NO: 41723 - DNA, 600 bp, Chicken  19866894277753_4
taatgtagccaaataacatttccagttttactgctgatctgaataaaatgaattttatctcttttacagaaagaaaaaaaagytgggagttgggggagggggcagggaggaaatccccctacctataaattcacaagacaaccggctatggcaattgattccctcttyacctggaagaggcctagaggatgaggacaggatgaactcagtccattccccagcaatacagcaattcctgttctagagcagctggctgagggtgcccacttgacatatttcacwagaactgttcattgtaayacacrctcccagtgcacttagcaactcctcccccttaggtcttcacagcacaaaggaaaataggaaaatacatgcatcaacatcaaggccaaagctaggtaagtagatgaaacagacacttgctacatgactgtgctcggctgctggaattcatcaccacatccatgaatttcatagtgaccttctttctttcttctcccctttctctctatactaacctctagagctcattgccctgggctgtaataccactaatcgctgctggatggcaccaaactcttttgtagtggatcacagaaa

SEQ ID NO: 41724 - DNA, 600 bp, Chicken  19866894277753_5
tagccaaataacatttccagttttactgctgatctgaataaaatgaattttatctcttttacagaaagaaaaaaaagytgggagttgggggagggggcagggaggaaatccccctacctataaattcacaagacaaccggctatggcaattgattccctcttyacctggaagaggcctagaggatgaggacaggatgaactcagtccattccccagcaatacagcaattcctgttctagagcagctggctgagggtgcccacttgacatatttcacwagaactgttcattgtaayacacrctcccagtgcacttagcaactcctcccccttaggtcttcacagcacaaaggaaaataggaaaatacatgcatcaacatcaaggccaaagctaggtaagtagatgaaacagacacttgctacatgactgtgctcggctgctggaattcatcaccacatccatgaatttcatagtgaccttctttctttcttctcccctttctctctatactaacctctagagctcattgccctgggctgtaataccactaatcgctgctggatggcaccaaactcttttgtagtggatcacagaaaggctt

SEQ ID NO: 41725 - DNA, 600 bp, Chicken  19866894277760_1
aacacctgtcagagctaactcaccagtgattgttcaaatcttacatggaggcgaaaaccacaacagaaagcctttcccatctccgggggattaattctggggggaaaaaaaggatgtggagctggttgctagaaatgagaggggaaagaaagatccaattctcagctgatcccattattagaaaaatgatgtaaaaaaaaataaaaatagagctgggagagtgaggagtttaatcatgattatttccctcttgtgaggcagtgtgaaaatctgccaaacccaccttggcttggttccccygaggtgtgagagggaaggagatgtcaatgggaggcaatgtgttggaggggcactgtgatggagcacggcacgggaactaattgccacttgcactgagaaaaaaatgccamgtcttgtgatattattaacgaactatgaaactcttgtaaggaatttgtgtctgtgtgttgttattacaactgtttggcagagcagaatatagctgtgtttgctgaggggttaacaaaaaatctttgacttgtatatrccatccccctcttcccattacatactgtgttcaatatctcatttccgtaattc

SEQ ID NO: 41726 - DNA, 600 bp, Chicken  19866894277760_2
aggatgtggagctggttgctagaaatgagaggggaaagaaagatccaattctcagctgatcccattattagaaaaatgatgtaaaaaaaaataaaaatagagctgggagagtgaggagtttaatcatgattatttccctcttgtgaggcagtgtgaaaatctgccaaacccaccttggcttggttccccygaggtgtgagagggaaggagatgtcaatgggaggcaatgtgttggaggggcactgtgatggagcacggcacgggaactaattgccacttgcactgagaaaaaaatgccamgtcttgtgatattattaacgaactatgaaactcttgtaaggaatttgtgtctgtgtgttgttattacaactgtttggcagagcagaatatagctgtgtttgctgaggggttaacaaaaaatctttgacttgtatatrccatccccctcttcccattacatactgtgttcaatatctcatttccgtaattctctatctttacaatgcctatcatatattatctccttataatatctatccttagtattgcctctttataataataagtatattagttggcagttttcatatcttctctcat

SEQ ID NO: 41727 - DNA, 585 bp, Chicken  19866894277760_3
ctcttgtgaggcagtgtgaaaatctgccaaacccaccttggcttggttccccygaggtgtgagagggaaggagatgtcaatgggaggcaatgtgttggaggggcactgtgatggagcacggcacgggaactaattgccacttgcactgagaaaaaaatgccamgtcttgtgatattattaacgaactatgaaactcttgtaaggaatttgtgtctgtgtgttgttattacaactgtttggcagagcagaatatagctgtgtttgctgaggggttaacaaaaaatctttgacttgtatatrccatccccctcttcccattacatactgtgttcaatatctcatttccgtaattctctatctttacaatgcctatcatatattatctccttataatatctatccttagtattgcctctttataataataagtatattagttggcagttttcatatcttctctcattcaaatcacattttgcttgagcatgacaaacaagcgcaaggagtacttttctgaggttttaaagcacagctgtctgaagtccttacagctctaaacagaatctgaaataaaacgtagaagtt

SEQ ID NO: 41728 - DNA, 600 bp, Chicken  19866894277766_1
tatattatttaaaaatatttagcaataaagtttgcttgaatcaatagttttaatgtaggtactttaagcttttaatcacaataagagctgaagtatatttacacatctaatcacaaaggattggttttatttattgtttttgaactttttcagaaagctggaaagtatttgtcatagtctttcgcctttttgcctttctgcctttttattttctacattatatccaggagacgtcacaaaaattaatgttgctatattcctggcccagctccattacagctatgtatctgggaataattmttttcttgcaattctgtaattcttaactgttaatacatgttttagatgcaggcataggagtaattgatttttttttttaaagaaaatatcaggattaacagaagaaaacattctgttagtattttcttgagatatccatttaaaaataaacagtattaacaggagggggtatgactgtttacgagggtggatagtgataggacaagggggaatggttttagactaagacggggaggtttaggttagatattaggaagaagtttttcacatagatggtggtgatgcactggaacaggttgc

SEQ ID NO: 41729 - DNA, 599 bp, Chicken  19866894277771_1
  misc_feature (1)..(16): n is any nucleotide
nnnnnnnnnnnnnnnntgttgtctgtgggcagcattaaatcctgacaaacaaccttcctcctatcagcatccaagcgtggaataatctgcactaacatccaacaaacacaggaagacctttccaaaatgcttggcattactcaggaatgatttaagatgatctattgtaaaaattaccaggtcttttttgatctctgccaaattcttaccttcagaaactactcagaaatttataggtaatgttgcaattaattctaacagtgtaggcagggaagcatgagaataatgttacagaaacayctgaaatgacatctcataactatggtgtgaacaaatttgactgtatcataggaaccacaactcttgaactcaccaggtttaatatcagtattgttgcattattgttcatttcccaattaacagcagttgctggggctacaaaacatattattctgaccatcgagaatgcaaattctctgcagctgcattcatttatttattttttgtaatggactaaactcaaaactgagttttccaggtcatgaaagggattttatcagtaagattattgcttacaaatatgaatgtagaaattsttt

SEQ ID NO: 41730 - DNA, 600 bp, Chicken  19866894277771_2
acayctgaaatgacatctcataactatggtgtgaacaaatttgactgtatcataggaaccacaactcttgaactcaccaggtttaatatcagtattgttgcattattgttcatttcccaattaacagcagttgctggggctacaaaacatattattctgaccatcgagaatgcaaattctctgcagctgcattcatttatttattttttgtaatggactaaactcaaaactgagttttccaggtcatgaaagggattttatcagtaagattattgcttacaaatatgaatgtagaaattstttctgataactctccacatgttgtgctcgcttctctaatggaaaagcctaacaatgcacacataccaccatgttttctcacagttcagacaggaaccctcctgattcaaagctgtttttctttctaacacgatcagtgacattgatgtaagtgtagtgatatacatttccattaatttaggatggtcacactactagcaagtcctaaaccagcttggaaggtacctgatcaattccatgtacaaggaattaggtcttttacatgattaacctatacaatttcacaacaaactttcaggt

SEQ ID NO: 41731 - DNA, 600 bp, Chicken  19866894277771_3
cagtggttaaaattgaaaatctgaaataaaacctggcaaaggatttgaaatattgctgggtttttttggtaaccagacttttttttttttttggtaaactggactttacagttatttttcactgttctgtaaaggtaaaagtaaaaactacaaaatgttctgtccctaccctgtatggcctctgctagagttgaactgagtggtttttttggagaatttacttgcttttcttcagatgatttccaagcaaatctcaggatagcctagaaatagccctttgaaaagggtaaccttacaaaygcagaaaaaacctgcctttaattcctatacatctgtgctttacaatgctgtaaaacttgggttgtgcctgatgtgaagttaattgttctgttatttgacctctgcatcacacygcagaacctggataattaaaaatgagtacggtgagaagatgactgagtgctattccatgtcttttccacccaaaaccaatttgattgtattagatctcatggaatgatgtaagtcagaattcactcacaatctgtcatctgtgggctgaacttcctatagttgtagtactgctgaggtgtagtgaaa

SEQ ID NO: 41732 - DNA, 600 bp, Chicken  19866894277771_4
atttttcactgttctgtaaaggtaaaagtaaaaactacaaaatgttctgtccctaccctgtatggcctctgctagagttgaactgagtggtttttttggagaatttacttgcttttcttcagatgatttccaagcaaatctcaggatagcctagaaatagccctttgaaaagggtaaccttacaaaygcagaaaaaacctgcctttaattcctatacatctgtgctttacaatgctgtaaaacttgggttgtgcctgatgtgaagttaattgttctgttatttgacctctgcatcacacygcagaacctggataattaaaaatgagtacggtgagaagatgactgagtgctattccatgtcttttccacccaaaaccaatttgattgtattagatctcatggaatgatgtaagtcagaattcactcacaatctgtcatctgtgggctgaacttcctatagttgtagtactgctgaggtgtagtgaaagaaagggattaacacatatcaaatacttccaattagtaagtatttccctttatgtccttgtctccttttggggtggtctgagtaagatacagaggctctaggtccaccccaaa

SEQ ID NO: 41733 - DNA, 600 bp, Chicken  19866894277773_1
caggaaaatgattcttagtgcattaagctgtccaaaaagcacatgaagattaaccagaatttaaaggtattaggaaggggataacagactctctgaagaaattcaaaccagaaccagttttcttctttacatctttgtgtctctaattgctttaaaggctactgctttaagggttacgggcttaatacagctatacaatctgtccctcttttcctggggatctcttcccagatctctggttgaactgagctcatggcctgcaggtagcacaacaggttacaaatccctcacatgcactcrgagcttcatcttgccagctggctgatactctcccactcctctccacacttgccctccttacacagcatttttctgcctcccatttccagctatttctgcatgaacgtgtcttttatccacacagctaaaggctccctgctatctttaactcaatcctatccgctctctgaagctcttttactctcttaatcccaaaacaactttgtcattcccagcrcaataagctcatttactcaaaaatgcaaaagatagrgaagagaaataaaagtgatcctgctccaaaccctaaatacatgacac

SEQ ID NO: 41734 - DNA, 600 bp, Chicken  19866894277773_2
ggatctcttcccagatctctggttgaactgagctcatggcctgcaggtagcacaacaggttacaaatccctcacatgcactcrgagcttcatcttgccagctggctgatactctcccactcctctccacacttgccctccttacacagcatttttctgcctcccatttccagctatttctgcatgaacgtgtcttttatccacacagctaaaggctccctgctatctttaactcaatcctatccgctctctgaagctcttttactctcttaatcccaaaacaactttgtcattcccagcrcaataagctcatttactcaaaaatgcaaaagatagrgaagagaaataaaagtgatcctgctccaaaccctaaatacatgacactacagaagatttcagaagcaacatcttgcaaggctctttgcagtatactttttgaactacagctctgttttacatctgtgcagcccaagctagagcagctggcagaaagtttgtaacgttgaaggctggaggaacatgagtgccatgcagcagtttaacagttatagacttgttgaattactcagcctgtgtgtttgagcatacatggaacttatca

SEQ ID NO: 41735 - DNA, 600 bp, Chicken  19866894277773_3
tggcctgcaggtagcacaacaggttacaaatccctcacatgcactcrgagcttcatcttgccagctggctgatactctcccactcctctccacacttgccctccttacacagcatttttctgcctcccatttccagctatttctgcatgaacgtgtcttttatccacacagctaaaggctccctgctatctttaactcaatcctatccgctctctgaagctcttttactctcttaatcccaaaacaactttgtcattcccagcrcaataagctcatttactcaaaaatgcaaaagatagrgaagagaaataaaagtgatcctgctccaaaccctaaatacatgacactacagaagatttcagaagcaacatcttgcaaggctctttgcagtatactttttgaactacagctctgttttacatctgtgcagcccaagctagagcagctggcagaaagtttgtaacgttgaaggctggaggaacatgagtgccatgcagcagtttaacagttatagacttgttgaattactcagcctgtgtgtttgagcatacatggaacttatcaaactgcaagctaacacactgaaaaagcagttgacag

SEQ ID NO: 41736 - DNA, 599 bp, Chicken  19866894277776_1
  misc_feature (1)..(179): n is any nucleotide
nnnnnnnnnnnnnnnnnnnnnnnnnnnnnnnnnnnnnnnnnnnnnnnnnnnnnnnnnnnnnnnnnnnnnnnnnnnnnnnnnnnnnnnnnnnnnnnnnnnnnnnnnnnnnnnnnnnnnnnnnnnnnnnnnnnnnnnnnnnnnnnnnnnnnnnnnnnnnnnnnnnnnnnnnnnnnnnnnnntgggtgatgagcactgcccccatgcatgaagcttcttttttcattggtgggttgactgatttttttttttttccaaaatcccgtgaaagcacagaaaaccagctctcatttgtgtccctgyagaacaacccttaacatctactgatgcatttttgatgtgttatttactctgggaattcatgtgtgatggggcagtgccaaatctggatgaaagtcaagagattgtgtgttggaagctcttcctgtgtaagacgtaccagataccatrttcatctggcagcrtcctgcctcctctgaattctgactacattgttggaggacctgaagaatactgagctttcaaaacatgaatasaagatatggctagaaccctgatgctgttttcagtctggagatgccctgcacttgaccattctcaac

SEQ ID NO: 41737 - DNA, 599 bp, Chicken  19866894277776_2
  misc_feature (1)..(32): n is any nucleotide
nnnnnnnnnnnnnnnnnnnnnnnnnnnnnnnntgggtgatgagcactgcccccatgcatgaagcttcttttttcattggtgggttgactgatttttttttttttccaaaatcccgtgaaagcacagaaaaccagctctcatttgtgtccctgyagaacaacccttaacatctactgatgcatttttgatgtgttatttactctgggaattcatgtgtgatggggcagtgccaaatctggatgaaagtcaagagattgtgtgttggaagctcttcctgtgtaagacgtaccagataccatrttcatctggcagcrtcctgcctcctctgaattctgactacattgttggaggacctgaagaatactgagctttcaaaacatgaatasaagatatggctagaaccctgatgctgttttcagtctggagatgccctgcacttgaccattctcaacttcagtttcccataggaaatatcttcacctttgatcctgagtgcatctgtttgttggttttaccatactttttcctgaccctgctgaaggaaaaaaaattgatatctgcctttccttgggttctgctgttcagytgaacttacaaaa

SEQ ID NO: 41738 - DNA, 599 bp, Chicken  19866894277776_3
  misc_feature (1)..(18): n is any nucleotide
nnnnnnnnnnnnnnnnnntgggtgatgagcactgcccccatgcatgaagcttcttttttcattggtgggttgactgatttttttttttttccaaaatcccgtgaaagcacagaaaaccagctctcatttgtgtccctgyagaacaacccttaacatctactgatgcatttttgatgtgttatttactctgggaattcatgtgtgatggggcagtgccaaatctggatgaaagtcaagagattgtgtgttggaagctcttcctgtgtaagacgtaccagataccatrttcatctggcagcrtcctgcctcctctgaattctgactacattgttggaggacctgaagaatactgagctttcaaaacatgaatasaagatatggctagaaccctgatgctgttttcagtctggagatgccctgcacttgaccattctcaacttcagtttcccataggaaatatcttcacctttgatcctgagtgcatctgtttgttggttttaccatactttttcctgaccctgctgaaggaaaaaaaattgatatctgcctttccttgggttctgctgttcagytgaacttacaaaaagtaaaataagatg

SEQ ID NO: 41739 - DNA, 600 bp, Chicken  19866894277776_4
actgatttttttttttttccaaaatcccgtgaaagcacagaaaaccagctctcatttgtgtccctgyagaacaacccttaacatctactgatgcatttttgatgtgttatttactctgggaattcatgtgtgatggggcagtgccaaatctggatgaaagtcaagagattgtgtgttggaagctcttcctgtgtaagacgtaccagataccatrttcatctggcagcrtcctgcctcctctgaattctgactacattgttggaggacctgaagaatactgagctttcaaaacatgaatasaagatatggctagaaccctgatgctgttttcagtctggagatgccctgcacttgaccattctcaacttcagtttcccataggaaatatcttcacctttgatcctgagtgcatctgtttgttggttttaccatactttttcctgaccctgctgaaggaaaaaaaattgatatctgcctttccttgggttctgctgttcagytgaacttacaaaaagtaaaataagatggggcacatgtgcttccactcagctgactttgataaccctgagaactcaggaagccacaacaatgaatacactg

SEQ ID NO: 41740 - DNA, 600 bp, Chicken  19866894277776_5
taccagataccatrttcatctggcagcrtcctgcctcctctgaattctgactacattgttggaggacctgaagaatactgagctttcaaaacatgaatasaagatatggctagaaccctgatgctgttttcagtctggagatgccctgcacttgaccattctcaacttcagtttcccataggaaatatcttcacctttgatcctgagtgcatctgtttgttggttttaccatactttttcctgaccctgctgaaggaaaaaaaattgatatctgcctttccttgggttctgctgttcagytgaacttacaaaaagtaaaataagatggggcacatgtgcttccactcagctgactttgataaccctgagaactcaggaagccacaacaatgaatacactggtgttagacacatgctgtagaaatacaacatttccaacatagtttttaagggctttttccagtcacagactggaaacctgaagtctcttatgaatgaaaaggtattgcttctccggtaagaaagacaaagagaggctgtggggtctcctcctcggagatctcccaaagccacttgtacgtgggcctggacgccctgctct

SEQ ID NO: 41741 - DNA, 599 bp, Chicken  19866894277783_1
  misc_feature (1)..(179): n is any nucleotide
nnnnnnnnnnnnnnnnnnnnnnnnnnnnnnnnnnnnnnnnnnnnnnnnnnnnnnnnnnnnnnnnnnnnnnnnnnnnnnnnnnnnnnnnnnnnnnnnnnnnnnnnnnnnnnnnnnnnnnnnnnnnnnnnnnnnnnnnnnnnnnnnnnnnnnnnnnnnnnnnnnnnnnnnnnnnnnnnnnntttttttatggattttcaggaagaaaaactgaagaaaggattgttgttgtcaagtaaattgaacaaaagcagaaaaccaaagctatatatgaggagctgttctgaatttctgttcttaccrgaaattagatggctcttggatctagccttcacctaagctttcctagatttgaatgtatttatatgcatcccttatgtctatctgatcaacacctcttctactgcctcatcttctgcactttagtttagatatgaatttaggttaatttttctaggactttagttaatatattatttaaattgatctaattatcttgctagggtatttacaattttcttatgatttgtaaatatcatcattatctaattaaagttaatttaaatgtaaattattatcactttcagtactgcgccttcaga

SEQ ID NO: 41742 - DNA, 537 bp, Chicken  19866894277807_1
ggcttcttctagagctaaaatttgcaaattttgaacagcttacaataaaaatcatatttatgtcataaacttgcttctaaaatcaacataaacaatttaaatatagtactaaagatatatatagagagaaattgtatataaatttgtaaactaaagagattttgataagtaatatctaatatctttgggtgaaattgtgctccaaatgcttattatcatctattaatttactactgtactcatctactcatctataaaaaaacctaaaatggaaattataccaaggctgttgaaaagtgkaatacttatatcctattgttgtttaatggaagaagttgagttgttaataaaagaagaataaagaggcacagtaagcttcaatgacactttcaaacacaagataatttgagagaaagacatagcaggttctgaaatatgtaaacaattttgacagaaaaaaaaattgttaaaatgaaatgcaagataggtaagtgactattcagggtttgttttttttttaatacttcaaaattggaa

SEQ ID NO: 41743 - DNA, 600 bp, Chicken  19866894277808_1
tgcatccctctgctggactttaggagctgcatggctttcccagcactgcagatattactccagatgtggcctctcccgggctgagtagaaggggaggatcacctccctcgatctactggccacaccttttttaatgcaccccaggatactattgttcttcttggccacaaggacacactgctggctcatggccaacctgatgtctactgggatacccagctcctcctctgcacagctcctctccagcaggtcagcccccagactgtgctgatgcatgcagttactctgccaattgagtartagttccactgtatgagcagtgcaggtccagctgctcatggtagttgggctggaagctgacaggctttggacttgagttgagccggggcctacctggctgcagctcagggttggcagaagatgtgaattcatctctgaactcgcaccagcagtggctgagaggctctccggtgaagtgctaactgttttgcaagtgctgctaatgaaaaaactgcgtttgaagtcttgttgggaagtcagtggaatttctcacctcctcttccactgactttaactgtatgtatactaaatcaaagagat

SEQ ID NO: 41744 - DNA, 578 bp, Chicken  19866894277808_2
gtagttgggctggaagctgacaggctttggacttgagttgagccggggcctacctggctgcagctcagggttggcagaagatgtgaattcatctctgaactcgcaccagcagtggctgagaggctctccggtgaagtgctaactgttttgcaagtgctgctaatgaaaaaactgcgtttgaagtcttgttgggaagtcagtggaatttctcacctcctcttccactgactttaactgtatgtatactaaatcaaagagatctacctaaaaaggcagacactactttcacagatcattgcmttttcttaagatactattttcagtaacaacagctgttttagagtttagtgttcttcatcccaaaagtatgtgcagatgagcagccttagtcaggcgggtttgtttaggcggtaagagtgaccagacaaccagatacaattttcatgctttcttccagctgacaggctcgtgattastcataggtattcctctcttgtgttcaaaggacttgaaagccacagagctttcctctgcttcttgcctaattttctgaaactcctgacaggaaaaccaaagca

SEQ ID NO: 41745 - DNA, 402 bp, Chicken  19866894277808_3
tttgaagtcttgttgggaagtcagtggaatttctcacctcctcttccactgactttaactgtatgtatactaaatcaaagagatctacctaaaaaggcagacactactttcacagatcattgcmttttcttaagatactattttcagtaacaacagctgttttagagtttagtgttcttcatcccaaaagtatgtgcagatgagcagccttagtcaggcgggtttgtttaggcggtaagagtgaccagacaaccagatacaattttcatgctttcttccagctgacaggctcgtgattastcataggtattcctctcttgtgttcaaaggacttgaaagccacagagctttcctctgcttcttgcctaattttctgaaactcctgacaggaaaaccaaagca

SEQ ID NO: 41746 - DNA, 600 bp, Chicken  19866894277813_1
caagagacttaagatattatggtgataatgcttgtgaggaataatagcatttaatggtcattcctgtcactgatgctgtgattttatattaataattctttcaccatctgaatgccagaagggtaaattcactaaaaggaaaattacatataacatagtaagatgacaatgcctagaacctattgtaaggagaccatgacagatatttttcattcaaccatatttggcacaacaggaaatgatttcctctaacactaaattaaataaataaaggtcagatggcttgtttatctgcatttrtgtgcacatttctgccagttgaaacaggatgttttctattaacattgctccagatttcctgataacaatagcaccaaaataaggaccagattttgtctaggttcagtcctcctgcataaaacactatgcctagaatctatgatgaaaaaagtggaagtaagatgtcagrttgctaaattcatgtgtaagcaccaggatggaatctgtaaaatctttttacagttaggtatttaggtattagtattgagtctccattgagactccaaggagtcaagcccctttgttcttaaagctttttga

SEQ ID NO: 41747 - DNA, 600 bp, Chicken  19866894277813_2
tgcctagaacctattgtaaggagaccatgacagatatttttcattcaaccatatttggcacaacaggaaatgatttcctctaacactaaattaaataaataaaggtcagatggcttgtttatctgcatttrtgtgcacatttctgccagttgaaacaggatgttttctattaacattgctccagatttcctgataacaatagcaccaaaataaggaccagattttgtctaggttcagtcctcctgcataaaacactatgcctagaatctatgatgaaaaaagtggaagtaagatgtcagrttgctaaattcatgtgtaagcaccaggatggaatctgtaaaatctttttacagttaggtatttaggtattagtattgagtctccattgagactccaaggagtcaagcccctttgttcttaaagctttttgaggagtccatccctgtaaaatttaacagcatcctcttatttgctcagtacacgtgggatggcatgtatatatacatatatcaaacagaggaggcaggaaaccagcaaagctaaacaaggacctgcaagtcaaactgatgaataagaaggaaatgtacaagcagtggaagc

SEQ ID NO: 41748 - DNA, 600 bp, Chicken  19866894277827_1
attaagtcatttctagtttggggcccaatgggaatctggagtttaagaaaagagggtggttgacttctgtgggaatggatatagtttcctcttgtgcctgctttgtttctttgtgatggcctctctacttctggctgtaaagaagtattttctagaggatgtggtctggcagagatatttcagaaagattaatactgtgctttcaacctctgtttagctaagtaaaatgacattgaagtatatctacaatacaatattttattgtcaaagttatttctaatggcactgatgtttgtttcmtttgtgccttccttcgtagtaccgatcaggaacaccagcttgggcagtgttccttatggtgtagtggaagatggccgtgagaccacttttctctgctctgtggaagaaggatcttggccaatccacttcagaatttttagaaaaatggatcgtgacattcttttatttgaaagaagtgaacatgcagacagartwgtgtggcagaagaaagagatgagcaggcaggacacggggacgtattactgcattgcttctaaccgagctaatgtgagtgcgaaaagccatccaataaccatcaat

SEQ ID NO: 41749 - DNA, 600 bp, Chicken  19866894277827_2
actgtgctttcaacctctgtttagctaagtaaaatgacattgaagtatatctacaatacaatattttattgtcaaagttatttctaatggcactgatgtttgtttcmtttgtgccttccttcgtagtaccgatcaggaacaccagcttgggcagtgttccttatggtgtagtggaagatggccgtgagaccacttttctctgctctgtggaagaaggatcttggccaatccacttcagaatttttagaaaaatggatcgtgacattcttttatttgaaagaagtgaacatgcagacagartwgtgtggcagaagaaagagatgagcaggcaggacacggggacgtattactgcattgcttctaaccgagctaatgtgagtgcgaaaagccatccaataaccatcaatggtaagttaaattttgtgataagctgtatactctgccatcatggcaggcaaggcttgtgttatcagagaagttattaggtacatgaaggttaccaagtgttactgcctttcttgatccaccattgatagaagttaaacagaaagaccatttataaacagagattgtcttacctatatccaaaagttaacaaaa

SEQ ID NO: 41750 - DNA, 600 bp, Chicken  19866894277827_3
tgtgctttcaacctctgtttagctaagtaaaatgacattgaagtatatctacaatacaatattttattgtcaaagttatttctaatggcactgatgtttgtttcmtttgtgccttccttcgtagtaccgatcaggaacaccagcttgggcagtgttccttatggtgtagtggaagatggccgtgagaccacttttctctgctctgtggaagaaggatcttggccaatccacttcagaatttttagaaaaatggatcgtgacattcttttatttgaaagaagtgaacatgcagacagartwgtgtggcagaagaaagagatgagcaggcaggacacggggacgtattactgcattgcttctaaccgagctaatgtgagtgcgaaaagccatccaataaccatcaatggtaagttaaattttgtgataagctgtatactctgccatcatggcaggcaaggcttgtgttatcagagaagttattaggtacatgaaggttaccaagtgttactgcctttcttgatccaccattgatagaagttaaacagaaagaccatttataaacagagattgtcttacctatatccaaaagttaacaaaagc

SEQ ID NO: 41751 - DNA, 600 bp, Chicken  19866894277841_1
tctactcaaatttgtcaatagcttttgtcacagaaaaccttttggagtttgtatgtacaaacattaaaatacaaatgcaaacttgcatataaatctctgagctctgtctgaatcacttaaacgatctcccaaaataagccaaatatgattttctaagttcccgactccacagatccaagtcttctacatctatcaggcagccatagcacaatatttataaatgcatctcttataaatttactgtttcatcctatcagggaaatataacataaaaaaatccaattatatttttaaaaaacwtttttttttttttggctaagatacctatagcttgacactgtccgttaaacaattaaacaacattatacttgtgaaaaccaacacaaccagtttaggaataaacaaatttcatttaagatttggttgcttctctgatttccctgtaggatgtataggttagtcaattcagacagaaaacaaaactggctttctttcccacttagagcaatcccattatctgcaatagcatcgttcaaatgaagcatttatttagtggtgcagtgtttataaagaaacaaaaaacaaccacaacagagttcg

SEQ ID NO: 41752 - DNA, 600 bp, Chicken  19866894277847_1
gaatttggctctccttgcatgtgccatttggaatagtttattttgcacatgaggtttggcagggatttctctaaaataatttcccccagaacccaccctcaaatccagcctacaaatttcaaaacatctttgcttccttagaacagctttttagaatacaacccaatctgaagccttcatcatacagagataagtagagaccataaaaaggttttgattggtgagctaatcatgcatcctcataaaacgcttcagatcatgtcaattaatatgtcgtaaaaccatatactcaaatacttytgatccagagtttcaaagcaattacatcctaagtcattgttttttttttctttcattctttttttaaattcaatgttttttacggactgtaagctcaaagtcttgaattcacagcagtttctgctatatggtttcacaaagtacataaaatgatcacttctcccattgcactagaagacaggaatgttgttattctggaaattggaattttggtttctaaccatgatccaacacaaatgttagtgtgatttgggaacacaacctatttgacatgcagcgtcctgaactcggatttaatga

SEQ ID NO: 41753 - DNA, 600 bp, Chicken  19866894277849_1
cagaatgatgggtgctgttagagatgtgcagaacatactccatttgtgtcccagagcagatgagcagcatgtgagagactgcaaagaaagctatggacagcttgtagcttgaccagtgatccactgggagaagaagtcatctgtgaagactaatttagattgctagtgtagactggcctctgagaaatggaggttcttccaaggggtgattcagggtagaagcttaagctaagcactaagatagtttcaggaaaaaccttttctctcttatctctctctccactgattgtataaagagaytatgaagatcagcctcactcaacattacgtctcactgactttctccgttatcatgaaaagagggttttttagtaccattgtgtcatgtctgtgcaatattccagtttgaaaccctgctgtgatgcatccagaatttgacagacattacactggagtttgatcatctctgctgtagcaattgattttgcttagaaatgggagatgatggataaaggatttctgttagagactttcaggtggtaactttataaagatgaacatttcactttttgaatgagctattgagacagacatacatgg

SEQ ID NO: 41754 - DNA, 600 bp, Chicken  19866894277850_1
tacaatctcattatatacaatttgctagagttctttcaagaccaaagagtatcttacacttcattcttaatgtataaaataatctgttctcatagtactatctgcttgagacagctgaaactcagtgtgagtacatataaggttggacctaaggttggcacaattgtatgcatctgcatgggcagcactttaagatttttgaggtgatgactttgcatgtaatgccagtatactcatatccactcgcttatatactctgagaaacacagacacctgatcaaaagcagaggaggatgagaygattttcatggaaagttatcacttgcagttgggtgaaaataattttggatttggttctttaaaatatacatgtatttattcttcctacccatgttattgacaacaaaattatatccacyccacataaactgtgcagaaactacattacacaatattctattgtgtatgaagaatgaaaagaaacaagaatatgatgcaagtacttatgaggtagcatatgaactcagattagggatttcagacacattaaaacctttttgatgctattttaacccagtgaatacaaagcaacccagcaag

SEQ ID NO: 41755 - DNA, 552 bp, Chicken  19866894277850_2
actcagtgtgagtacatataaggttggacctaaggttggcacaattgtatgcatctgcatgggcagcactttaagatttttgaggtgatgactttgcatgtaatgccagtatactcatatccactcgcttatatactctgagaaacacagacacctgatcaaaagcagaggaggatgagaygattttcatggaaagttatcacttgcagttgggtgaaaataattttggatttggttctttaaaatatacatgtatttattcttcctacccatgttattgacaacaaaattatatccacyccacataaactgtgcagaaactacattacacaatattctattgtgtatgaagaatgaaaagaaacaagaatatgatgcaagtacttatgaggtagcatatgaactcagattagggatttcagacacattaaaacctttttgatgctattttaacccagtgaatacaaagcaacccagcaagaagaagtcttcttagcccagatcaattggctgatgctataaccatgaggctactcttaatacttaagccag

SEQ ID NO: 41756 - DNA, 600 bp, Chicken  19866894277861_1
ggatgcagacagccgaggggacagcctgaccttgccaagtggacggagctgctgtgcaccaccagcagtggtcccagcaggcactcccagactgcagcaggccctctgtgggaaggggatgctccagggctccgaggaaacaattccagataccttcagactctgatggctaacttttaggagcttaacataggggtttaggctaggaaattccttttctttggctcctttatagtcagggaagagattccgattaggcacaagcctgaactaggtgctgtgatgatcctttcccagttmcttctgtgttctaaaaactcttcagctctgggggtcgttgctcagacccatgcgtttccctgagctccagctgggctgtgcagcagccatccctcaggtaggttcaggacagtgcctgcgagcagcctgggtttgccagctctggtgacttggaatacgcattagattacacacttgtctgatcatctaggcagcaaaacggagcttgagaggggccagttcagactttctgatataaccctaagcagctacttttctactgggtatacaacacgttgcctggcttttcctcagcagttt

SEQ ID NO: 41757 - DNA, 599 bp, Chicken  19866894277864_1
  misc_feature (1)..(30): n is any nucleotide
nnnnnnnnnnnnnnnnnnnnnnnnnnnnnntggtggtaaagactgcttgcagcatgccagagcgctggcagtgagagagctgcggagactgaacgtttgtgttcggaaccgacgtggtgcaaaatgagtgtcgtgtgaacatgcgtgttgtgaatcatcatccagagggtggcttagagttggaggccagggttcaaatgggaattcttttcatatttcagccctttacttaaaggctgtggtggaaggcagaaatgctgaggtaatgctcttccccacctaacgtattgcacattttcrtggaaattctgtcgtgataacttagtaggagtaatatatttctttgtttccaataatgaaatgatctgaccacgctttgcttgctgttgtrtgcaggaaggcaaacaagcatcsctygcggcagatttctctatcactcagtttaaacatctgggtcgtttactgatggtgcacggacggaacagctacaaacggtctgcagctctcagtcagtttgtgatccacaggagcttgtgcatcagcacaatgcaggtgaggtaacgtcgtgtgagcttttcccttgaagaggtgcccaaaga

SEQ ID NO: 41758 - DNA, 600 bp, Chicken  19866894277864_2
aacgtttgtgttcggaaccgacgtggtgcaaaatgagtgtcgtgtgaacatgcgtgttgtgaatcatcatccagagggtggcttagagttggaggccagggttcaaatgggaattcttttcatatttcagccctttacttaaaggctgtggtggaaggcagaaatgctgaggtaatgctcttccccacctaacgtattgcacattttcrtggaaattctgtcgtgataacttagtaggagtaatatatttctttgtttccaataatgaaatgatctgaccacgctttgcttgctgttgtrtgcaggaaggcaaacaagcatcsctygcggcagatttctctatcactcagtttaaacatctgggtcgtttactgatggtgcacggacggaacagctacaaacggtctgcagctctcagtcagtttgtgatccacaggagcttgtgcatcagcacaatgcaggtgaggtaacgtcgtgtgagcttttcccttgaagaggtgcccaaagaaaggcaaaaagcaaaggttctgcttttcagtttgagtgccactgtttctcaggaagttcttcatgggttggagactgttactctgttacgaa

SEQ ID NO: 41759 - DNA, 600 bp, Chicken  19866894277864_3
tggtgcaaaatgagtgtcgtgtgaacatgcgtgttgtgaatcatcatccagagggtggcttagagttggaggccagggttcaaatgggaattcttttcatatttcagccctttacttaaaggctgtggtggaaggcagaaatgctgaggtaatgctcttccccacctaacgtattgcacattttcrtggaaattctgtcgtgataacttagtaggagtaatatatttctttgtttccaataatgaaatgatctgaccacgctttgcttgctgttgtrtgcaggaaggcaaacaagcatcsctygcggcagatttctctatcactcagtttaaacatctgggtcgtttactgatggtgcacggacggaacagctacaaacggtctgcagctctcagtcagtttgtgatccacaggagcttgtgcatcagcacaatgcaggtgaggtaacgtcgtgtgagcttttcccttgaagaggtgcccaaagaaaggcaaaaagcaaaggttctgcttttcagtttgagtgccactgtttctcaggaagttcttcatgggttggagactgttactctgttacgaaagcacacaggatcttgctgttgg

SEQ ID NO: 41760 - DNA, 600 bp, Chicken  19866894277864_4
tgcaaaatgagtgtcgtgtgaacatgcgtgttgtgaatcatcatccagagggtggcttagagttggaggccagggttcaaatgggaattcttttcatatttcagccctttacttaaaggctgtggtggaaggcagaaatgctgaggtaatgctcttccccacctaacgtattgcacattttcrtggaaattctgtcgtgataacttagtaggagtaatatatttctttgtttccaataatgaaatgatctgaccacgctttgcttgctgttgtrtgcaggaaggcaaacaagcatcsctygcggcagatttctctatcactcagtttaaacatctgggtcgtttactgatggtgcacggacggaacagctacaaacggtctgcagctctcagtcagtttgtgatccacaggagcttgtgcatcagcacaatgcaggtgaggtaacgtcgtgtgagcttttcccttgaagaggtgcccaaagaaaggcaaaaagcaaaggttctgcttttcagtttgagtgccactgtttctcaggaagttcttcatgggttggagactgttactctgttacgaaagcacacaggatcttgctgttggaca

SEQ ID NO: 41761 - DNA, 600 bp, Chicken  19866894277864_5
ctgctaagtgcactgatctccaggtgtgttttaggtcaggacttcaaacagtgggaccaaaggtaggcacccagctgacggggcctggcctaagttacagttagatgggggctgctctctgggacgtgtattcctgtgccatggagtgcaaacaccttcgtcaggagtactaaagcgttttagtaaaatacttgagctttttgagaaggctcatccttccctcccatccttttagaataaatgtgttggagacagataagtggaaacaagaggctgaaactcaagaggacaatgaagctrcttcagcagcagcaatgtatcaaaaactttaaaaaaataaaataaaatcagaaaacaaactcctaatttccttaactgacaaaaagttaatcttgaactctttggagtttgtagcttgtatgagtgagtgttagttcttttcacgttgcaaaggcatcatccagggagaggggcatgaggaagggcacacctgtcctttatggcatcaggacagctttggtcagagcagtgggctctggaggaaacttttggtgttctcttctctggaactgcatcacaaaatgttttccaagtccagtt

SEQ ID NO: 41762 - DNA, 600 bp, Chicken  19866894277866_1
cttcactgcttagagctttcaaatgatgctagaccttacgtagtatcaaataagtaccttttggtgttgaaaagaataaccattctgctgacagactgaaattatctgtgatcaacactgtgttttcttctacaacaaatgtagtagtccaggggttaaaaatgatggacttaagggggtacacaaatgctgtttggagctttaagctatcattaatgtttcttctaccttacgacactcagaagagtccagaagcacgctctgtagagcatttgtgattagcttttaacagccaaaccycaatgtgagtgagtcattccctcatcaaggaacaggtgtggctgagtaagtacgctgagagggcatggcttaatcaggtgtaaagtgagttgacttatttacgaataacataggaattaatcggtctcagtcttctctacaaacttccttgcattctcatcagcttctcaagtagcagtgggtaactttaatggcagtgttaatggttcgtgtagctgtgggagcaggcagggagagggccccagcatcgctcctggcctgccgacctttcggtgctgcattggaagttttcataacaaa

SEQ ID NO: 41763 - DNA, 600 bp, Chicken  19866894277867_1
catcgtgcttttgtccagcagaattcctggaaagcaatctgaattgctctatgcacccacactgtttgtcaggcagagcaggctgtgccaggggatgccctgctccaccccatcacctcccacagtgctcacagcgcagcagagatctcccagggagttcccaaaccaatctgtttttctgaaactcctttgtgtaacacaagaaaccctcaataaagccacaggtaattaaaaattaataaaaaatacttccagctgtgcatttttatagagccttcgctatggctcaagaagacttcyatacagcgggagggtttatggcataaacacacaattccacccagataatggctttattcacagcttgcctgatcttgcagaaatgctcccagaaatgtaactgaagaagcattacagggcaaaaacaggtatttactttcattcacaagaacaaacctacgaaagctgagccacataactgcatcagtaaggtaaactctcaaaccacacaggtttgtagtgtctctaaaaagttcatttttagtaaatttgcatacaggaagcctcaaatccagacattaattcattaagtagttcatg

SEQ ID NO: 41764 - DNA, 600 bp, Chicken  19866894277868_1
agaattccaacaagcaactgggcagctcagctgcctcctgtacgggtcctggcacggccatctccctgcaggtaagctatttttgctttaggatctttggtttggatacaaacgatgcatacagtggaagccggggcatttctatacacctacaactatttctgcagttgcatcgaggaaatcttatctgcaaggatatctgttgaaggcaaaacattcaatgacaaaatgaagaagtggggctatggcctcaggtcctacagactttacctcattaaagcctgagtaggtggagagaamaattccaactcggtgctagctaatccctgagtttcaaagagtaaataccaggttaaaacatccatttaaattaagtttcctactgcagccttcttgcatctgcatttttcctcaagtagaaccagcaaaatggtaatagctggatatcagctgaaaacttccttgtgaaatctagacttacactaatgaagctgaaatcagaacggggactagcagcttctttcctgtcaagtgtcaccttgtgccttttttccccacacaaattccaggggatattgaatgttttcagaagggaaaaga

SEQ ID NO: 41765 - DNA, 600 bp, Chicken  19866894277870_1
gccgaggaataaaacacatgctgctaaatgcagctctgagcaaggaggccttcccctccccacactgaaaacgtttagaaagggatctgagtttcatcctcagatgtagggtaattgatctaaaatgctttctgataggtgtttttcattatttttctctcactcaggaggaatttagttcttttccagagaggagagggaacacagcatgctgttagtctcagtggtggtctctgtcctggactggccccttgtgagagccccatgtgagaggtgttggcactgccctcctgggcaccsagcagttttccagctataatggtgactgcatgctgctaaccgaatcaggaggccacagcaggcagggacaggagatgacagcagtggaaaatgggcttccccaccagcaaccccagcagctcccaccacgctttgacaaccccgtggaagtgaggcaggaggtcccgggctgccccacatcactgggacatgcacacggcagagcagagctggaaagattccagcaaagaaacccagcgctatcccagctgcacaaagttcacaggggacagctgggaggggcaatcagcagcccaggga

SEQ ID NO: 41766 - DNA, 600 bp, Chicken  19866894277873_1
cccttgcatagctgctgagccagacttgtcatagacccactcctcactgacagcaatcagcagctacagtgtactaaggtacataagatgcatctggatctggagaaagacattgcagggataaaagcactatttccacgtagagtagtttctgttatttttcctatttatcaccaatataatacatcttagacttgactgcaattctttctgaaaaacatcagaagggtcacaagccctcagattggtttattctccagcagcattcaggaattcaccagaacaaatctttgcactctyacactagtaaagctttcttcaacttaatcaaggagttattaataataattctccaatgttacttcaaaataagtggatgatttgtatgattatggttccaaggtacatgtattgattaaatacttcttatgaacacrtatcccctttaattttatatgcaaatgtgcttgtgtatgtacacatgtaaatgcatatgcatgcatattatacaggaaacctatagagatatgcatatttgtatgcatctttgcttacatacacatatgcaaactgaaagcaaaygtgtaatgctcagacaca

SEQ ID NO: 41767 - DNA, 600 bp, Chicken  19866894277873_2
acgtagagtagtttctgttatttttcctatttatcaccaatataatacatcttagacttgactgcaattctttctgaaaaacatcagaagggtcacaagccctcagattggtttattctccagcagcattcaggaattcaccagaacaaatctttgcactctyacactagtaaagctttcttcaacttaatcaaggagttattaataataattctccaatgttacttcaaaataagtggatgatttgtatgattatggttccaaggtacatgtattgattaaatacttcttatgaacacrtatcccctttaattttatatgcaaatgtgcttgtgtatgtacacatgtaaatgcatatgcatgcatattatacaggaaacctatagagatatgcatatttgtatgcatctttgcttacatacacatatgcaaactgaaagcaaaygtgtaatgctcagacacagacatttaatgcagcaaaaaagaagaaaaagaaaaataaatcttaaattgcccagttatggagaaaattaccaagtgtaagattgagaaagacttccaaaaatatgatgttgaatatagctgtgtaattatgcaagc

SEQ ID NO: 41768 - DNA, 598 bp, Chicken  19866894277873_3
acaaatctttgcactctyacactagtaaagctttcttcaacttaatcaaggagttattaataataattctccaatgttacttcaaaataagtggatgatttgtatgattatggttccaaggtacatgtattgattaaatacttcttatgaacacrtatcccctttaattttatatgcaaatgtgcttgtgtatgtacacatgtaaatgcatatgcatgcatattatacaggaaacctatagagatatgcatatttgtatgcatctttgcttacatacacatatgcaaactgaaagcaaaygtgtaatgctcagacacagacatttaatgcagcaaaaaagaagaaaaagaaaaataaatcttaaattgcccagttatggagaaaattaccaagtgtaagattgagaaagacttccaaaaatatgatgttgaatatagctgtgtaattatgcaagccatcatatttctttctactggtttgttgcctagttaaattaaatatacgaagagtgcaaaaaaagatttatattgtatgaaagcagctaaacacttcaaattgctaaaaacattatcttaattatccgcatattatgctcaga

SEQ ID NO: 41769 - DNA, 600 bp, Chicken  19866894277882_1
ggccaacaaatcaaactaagtgagagagagtgcatccaaatcagaggccttactctatagactgcaggtggaccacatgtttctctgctgcaaagaaaaagagagagtctgcagacctgtgaggcagctccaccttctccctctgggagaaaagtcctctggggaatgccactcctcccctcccctcctagaacaaagtacccagaaatggcagtccacagaatcagaacattaactctttaactcctactgctttgcatgatgttatgacgtggactactgtaagagattattcttttrtatcattgactcaaagtttgctgaggaacaggtccaggcaagtcctgggcaaaggtagagaaatcttcagtctggaggacactgatggacaggtcctggctaagggttgtgaaatcctttaaggagcacagatggacaaggccaggggcaacaagagagagataagctgctgatcatggccgggaaactgtcttttgtgtggacttatctcgaggaagatggccatctcaggaggtacgcacatgactcttgctcaagcacccagggatatcacatgactcttgctcaagcacccaggga

SEQ ID NO: 41770 - DNA, 600 bp, Chicken  19866894277889_1
tttctacttcgtaattcagtttcaaaatttttaagagattgcttgagtttttttttaaaacatgatttatttttaaattcaacgcttcataaaagcccgacttacaaaaaattatgtgagagagacagcagtcacatagagcatcctctaaagttctttattatgtctttgcagcaataattttttcacctgagtgttttctgcccaacaattcagctaggagtaaatggagggggagcaagtggaaattcacaacgggggaagggagtgataaagccatgcccatccacgctatggaasaagagcactgtatgtcccttggtacacarcactgtaagcaggtggaaccccacagctgtctcagccccactctgatgccacaycactgcagccagctcaggccccaaaacttctctacttcatacaaagaaaccaacatgtttgaggcgaaggcagagaatgtcttcatcgcattcctttcctctgcatagacatgccttcattgtttccactcagttttgttaccctggagctgtagggtatttcctgcagagtcatctcctcccaccagatcagaggttcagtctcatctaccagaca

SEQ ID NO: 41771 - DNA, 600 bp, Chicken  19866894277889_2
tttaagagattgcttgagtttttttttaaaacatgatttatttttaaattcaacgcttcataaaagcccgacttacaaaaaattatgtgagagagacagcagtcacatagagcatcctctaaagttctttattatgtctttgcagcaataattttttcacctgagtgttttctgcccaacaattcagctaggagtaaatggagggggagcaagtggaaattcacaacgggggaagggagtgataaagccatgcccatccacgctatggaasaagagcactgtatgtcccttggtacacarcactgtaagcaggtggaaccccacagctgtctcagccccactctgatgccacaycactgcagccagctcaggccccaaaacttctctacttcatacaaagaaaccaacatgtttgaggcgaaggcagagaatgtcttcatcgcattcctttcctctgcatagacatgccttcattgtttccactcagttttgttaccctggagctgtagggtatttcctgcagagtcatctcctcccaccagatcagaggttcagtctcatctaccagacagcatggcttcaagggccatgccaaaactg

SEQ ID NO: 41772 - DNA, 600 bp, Chicken  19866894277889_3
gcttcataaaagcccgacttacaaaaaattatgtgagagagacagcagtcacatagagcatcctctaaagttctttattatgtctttgcagcaataattttttcacctgagtgttttctgcccaacaattcagctaggagtaaatggagggggagcaagtggaaattcacaacgggggaagggagtgataaagccatgcccatccacgctatggaasaagagcactgtatgtcccttggtacacarcactgtaagcaggtggaaccccacagctgtctcagccccactctgatgccacaycactgcagccagctcaggccccaaaacttctctacttcatacaaagaaaccaacatgtttgaggcgaaggcagagaatgtcttcatcgcattcctttcctctgcatagacatgccttcattgtttccactcagttttgttaccctggagctgtagggtatttcctgcagagtcatctcctcccaccagatcagaggttcagtctcatctaccagacagcatggcttcaagggccatgccaaaactggtgctgccagcacccagactcttcagtttcaaagtaaaaaggaaacagtaatac

SEQ ID NO: 41773 - DNA, 600 bp, Chicken  19866894277889_4
atacaaagaaaccaacatgtttgaggcgaaggcagagaatgtcttcatcgcattcctttcctctgcatagacatgccttcattgtttccactcagttttgttaccctggagctgtagggtatttcctgcagagtcatctcctcccaccagatcagaggttcagtctcatctaccagacagcatggcttcaagggccatgccaaaactggtgctgccagcacccagactcttcagtttcaaagtaaaaaggaaacagtaatacagaatattccatgagaactgttcaaagctgccgccgarcgtgggtgcatgccccctggattttctatattcatatcacagcataaagaaatggtcaggggtgtccaagagatgactagggatggtcagaagtgatcaggagaaagctacctctagtgctgcagacctggaggaatagatctggccataaatggtgccatttccttctttgtaccaaaggcaaagtcattagtttaaataaagtgacttagtaatagctgatattacctgaagactggtcttctttttgaggtagtggaatctacagtaagaaatgattgaaaactgcatttttcatgt

SEQ ID NO: 41774 - DNA, 600 bp, Chicken  19866894277902_1
ttggaagaatgtgaaccaagctcagcccccaagcctcttcacagctgggttggtgtgaagccagcccataggttttaggaaactttcagtatttcagctgctgggcacagtatttcccaactataaagctaatgtgcattacatcttgagagtacctgcctctctgaacctcttccatctgagctgagcccaaactgttcagcatttaatagagaagcaccaaagaattcaaaattccacaagtgagattaagtccagagactacaattagtcacctttcctttaatccctacgcctccrtcaccagcagtgcataatccacgcagcagaggaagtcatgcctttctcatctgctacagagccgagaagaatagaaaataactgtgtctgaagtgctgatgcgcagagcagtgatgctcagcagccctcagtgcctttctctgcaagaggagtgacacagaaaggcaggaggcaatgcagcttgtgcctgcagtgagctgaagagaggggacccactcgtatctatataataactggtaaaagctagaaacgaacaagccctatgcagagttagttctcgtggagcattttgtagtgttt

SEQ ID NO: 41775 - DNA, 599 bp, Chicken  19866894277908_1
  misc_feature (1)..(195): n is any nucleotide
nnnnnnnnnnnnnnnnnnnnnnnnnnnnnnnnnnnnnnnnnnnnnnnnnnnnnnnnnnnnnnnnnnnnnnnnnnnnnnnnnnnnnnnnnnnnnnnnnnnnnnnnnnnnnnnnnnnnnnnnnnnnnnnnnnnnnnnnnnnnnnnnnnnnnnnnnnnnnnnnnnnnnnnnnnnnnnnnnnnnnnnnnnnnnnnnnnncaaagacggttcttttcccctccttggctcccacagtatacttagagcacagagaagcctctgctctgaactcacagagagttcctctaccgagttcttccttgsaggaacctcatttctccatttctctgcaggatgttctcagaccatctgcagtccccagagctagcakcaagccacacaagcctgatacacttatttgcactttcaacctgcagygagcatccagggmagagcactaggtgtggcagtcaggttgcaggcaaggcctgcaaatgtctgtagctacccgaggcttgaccaaagagaaccaaaatgctgaagtgagtagttgtgacaccccccmaaaaaataagaccctttcagtttccacctaactttagaggcagcaccactcacgtttg

SEQ ID NO: 41776 - DNA, 599 bp, Chicken  19866894277908_2
  misc_feature (1)..(128): n is any nucleotide
nnnnnnnnnnnnnnnnnnnnnnnnnnnnnnnnnnnnnnnnnnnnnnnnnnnnnnnnnnnnnnnnnnnnnnnnnnnnnnnnnnnnnnnnnnnnnnnnnnnnnnnnnnnnnnnnnnnnnnnnnnnnnnnncaaagacggttcttttcccctccttggctcccacagtatacttagagcacagagaagcctctgctctgaactcacagagagttcctctaccgagttcttccttgsaggaacctcatttctccatttctctgcaggatgttctcagaccatctgcagtccccagagctagcakcaagccacacaagcctgatacacttatttgcactttcaacctgcagygagcatccagggmagagcactaggtgtggcagtcaggttgcaggcaaggcctgcaaatgtctgtagctacccgaggcttgaccaaagagaaccaaaatgctgaagtgagtagttgtgacaccccccmaaaaaataagaccctttcagtttccacctaactttagaggcagcaccactcacgtttgaccttatttttttctaagcactgcacctgagtccagccatccaagtctgcttcctgccatgagccag

SEQ ID NO: 41777 - DNA, 599 bp, Chicken  19866894277908_3
  misc_feature (1)..(81): n is any nucleotide
nnnnnnnnnnnnnnnnnnnnnnnnnnnnnnnnnnnnnnnnnnnnnnnnnnnnnnnnnnnnnnnnnnnnnnnnnnnnnnnnncaaagacggttcttttcccctccttggctcccacagtatacttagagcacagagaagcctctgctctgaactcacagagagttcctctaccgagttcttccttgsaggaacctcatttctccatttctctgcaggatgttctcagaccatctgcagtccccagagctagcakcaagccacacaagcctgatacacttatttgcactttcaacctgcagygagcatccagggmagagcactaggtgtggcagtcaggttgcaggcaaggcctgcaaatgtctgtagctacccgaggcttgaccaaagagaaccaaaatgctgaagtgagtagttgtgacaccccccmaaaaaataagaccctttcagtttccacctaactttagaggcagcaccactcacgtttgaccttatttttttctaagcactgcacctgagtccagccatccaagtctgcttcctgccatgagccaggtattgaaatgacatagcagggtacggcttcagacatgccaaggcca

SEQ ID NO: 41778 - DNA, 599 bp, Chicken  19866894277908_4
  misc_feature (1)..(68): n is any nucleotide
nnnnnnnnnnnnnnnnnnnnnnnnnnnnnnnnnnnnnnnnnnnnnnnnnnnnnnnnnnnnnnnnnnnncaaagacggttcttttcccctccttggctcccacagtatacttagagcacagagaagcctctgctctgaactcacagagagttcctctaccgagttcttccttgsaggaacctcatttctccatttctctgcaggatgttctcagaccatctgcagtccccagagctagcakcaagccacacaagcctgatacacttatttgcactttcaacctgcagygagcatccagggmagagcactaggtgtggcagtcaggttgcaggcaaggcctgcaaatgtctgtagctacccgaggcttgaccaaagagaaccaaaatgctgaagtgagtagttgtgacaccccccmaaaaaataagaccctttcagtttccacctaactttagaggcagcaccactcacgtttgaccttatttttttctaagcactgcacctgagtccagccatccaagtctgcttcctgccatgagccaggtattgaaatgacatagcagggtacggcttcagacatgccaaggccacgttcatttgcct

SEQ ID NO: 41779 - DNA, 600 bp, Chicken  19866894277908_5
gcacagagaagcctctgctctgaactcacagagagttcctctaccgagttcttccttgsaggaacctcatttctccatttctctgcaggatgttctcagaccatctgcagtccccagagctagcakcaagccacacaagcctgatacacttatttgcactttcaacctgcagygagcatccagggmagagcactaggtgtggcagtcaggttgcaggcaaggcctgcaaatgtctgtagctacccgaggcttgaccaaagagaaccaaaatgctgaagtgagtagttgtgacaccccccmaaaaaataagaccctttcagtttccacctaactttagaggcagcaccactcacgtttgaccttatttttttctaagcactgcacctgagtccagccatccaagtctgcttcctgccatgagccaggtattgaaatgacatagcagggtacggcttcagacatgccaaggccacgttcatttgcctacacgtagccacgttgtgctgttttaagtacattagtttcccgtgcacagcctccaaccagctgctttacccatcccrgaacacccaaaacacccatakgagactggtgtgtctg

SEQ ID NO: 41780 - DNA, 600 bp, Chicken  19866894277908_6
accaaaatgctgaagtgagtagttgtgacaccccccmaaaaaataagaccctttcagtttccacctaactttagaggcagcaccactcacgtttgaccttatttttttctaagcactgcacctgagtccagccatccaagtctgcttcctgccatgagccaggtattgaaatgacatagcagggtacggcttcagacatgccaaggccacgttcatttgcctacacgtagccacgttgtgctgttttaagtacattagtttcccgtgcacagcctccaaccagctgctttacccatcccrgaacacccaaaacacccatakgagactggtgtgtctgacacacggcccagcagggacgagcaaagcaggatgcaatagcaggatgaaataacatcaggcaactccagctgggcagcccctctgtccatcaggctcagaccacacaatggctgtgagtgcatgcagcttgcaacaacagcaattacatggcattgcatgcagcaaggtgctgatatcgctgctccaagagcgaggaaaagcagagcagggagggacagaggcaccctgcaaacagtaagcagtcctgggggtagcaaggga

SEQ ID NO: 41781 - DNA, 600 bp, Chicken  19866894277908_7
gttgtgacaccccccmaaaaaataagaccctttcagtttccacctaactttagaggcagcaccactcacgtttgaccttatttttttctaagcactgcacctgagtccagccatccaagtctgcttcctgccatgagccaggtattgaaatgacatagcagggtacggcttcagacatgccaaggccacgttcatttgcctacacgtagccacgttgtgctgttttaagtacattagtttcccgtgcacagcctccaaccagctgctttacccatcccrgaacacccaaaacacccatakgagactggtgtgtctgacacacggcccagcagggacgagcaaagcaggatgcaatagcaggatgaaataacatcaggcaactccagctgggcagcccctctgtccatcaggctcagaccacacaatggctgtgagtgcatgcagcttgcaacaacagcaattacatggcattgcatgcagcaaggtgctgatatcgctgctccaagagcgaggaaaagcagagcagggagggacagaggcaccctgcaaacagtaagcagtcctgggggtagcaagggagcttaaataagggtgcttaaa

SEQ ID NO: 41782 - DNA, 600 bp, Chicken  19866894277914_1
atactcaaattctgatttctgttttccaattacagtggtaaacatcctacaacagagactagaagcttatggacagattctctgcgtgttcttttccatcacataaagaatatattagaagcacgaatgataaaagctttgccagccagtgcagcaaacctttttcatactacaaaaaagggaggcaatcccagtaagaaaatagtcagtctagcagctatatcaagggactgatgaatacatgacttgctctatccatctcaagctcacagaatattttgggaaccaaatttcacaacycgatagtaatgcattcttttatttcatagtcaaggtgcaaagagtatcaagtcaaataaatgtgatacagataatttgtagggttaagtctagtatatgcaaaaatctgacttgagtatatcatgaagcattacacatctacaatacaaaagaaatacattaagaattggttcaatgactgtaactttagaactctacaaaataattgattaggtgagtttgcttcttcccagacaataaaatatgaaacaaaataaatgtgagcctcactactttcattcgtttcatgcacaaaagcct

SEQ ID NO: 41783 - DNA, 600 bp, Chicken  19866894277914_2
gcagacaccattccattttctcagaaagaggctgccatacaagtggagcagtattagataaaatgaggtctaagacatctgagaaaataaagcagatgatggcattaagagtcatctgaaagttccaaacatgtctctgaaaacatacagtgaaacacagaacagaagtgtggatgatcaaaaagatcacaagagtgagaaacagatcaggactatggaatgtgagtaaaatttgcagaggaaaatgtgaataagaaatgaccatggctcgtaacataaaagctaagggcttttgcccaraaagctaaggacttaatgacactatcatctgatttgatgatcagagagggctggagtgcctctcctgtgmagaaaagctgagggaactaggactgctcagtctggagaagagaaggctctgtagagaccttattgtggtattccagtacttgagaggagctcatacacaggagggagactaaccttttacacaggcagatacagacaggataagagggaacagttttaaactaaaagaagggaaatttgggttaggtgttaaacagaaattctttactcagagagcagtgagttactggc

SEQ ID NO: 41784 - DNA, 600 bp, Chicken  19866894277914_3
taagacatctgagaaaataaagcagatgatggcattaagagtcatctgaaagttccaaacatgtctctgaaaacatacagtgaaacacagaacagaagtgtggatgatcaaaaagatcacaagagtgagaaacagatcaggactatggaatgtgagtaaaatttgcagaggaaaatgtgaataagaaatgaccatggctcgtaacataaaagctaagggcttttgcccaraaagctaaggacttaatgacactatcatctgatttgatgatcagagagggctggagtgcctctcctgtgmagaaaagctgagggaactaggactgctcagtctggagaagagaaggctctgtagagaccttattgtggtattccagtacttgagaggagctcatacacaggagggagactaaccttttacacaggcagatacagacaggataagagggaacagttttaaactaaaagaagggaaatttgggttaggtgttaaacagaaattctttactcagagagcagtgagttactggcacaggctacccagagaagctgtagatgctccatccctgacagtgctcaaggccaggttggatgggtcctg

SEQ ID NO: 41785 - DNA, 599 bp, Chicken  19866894277915_1
  misc_feature (1)..(76): n is any nucleotide
nnnnnnnnnnnnnnnnnnnnnnnnnnnnnnnnnnnnnnnnnnnnnnnnnnnnnnnnnnnnnnnnnnnnnnnnnnnnactttagtattcacttcataattgctatgtgagtttgtgaaacaatttaaaatgagatgtagaatgatttacagacaagacaaaacctgtgctaatgagtctttccttgtaatagtcattcaaaggtaaagtcacatgcagaacctactgctagtaacactcacctgtgtgcttacagtgttaatttatctaacatctgatgtatgcattgatctccgtgctcrtttatggttgcttcactgggtgtagagcatacaccatccaatgcttaaatggacttatgcatgragctgtttcctatgctcatgggaactggaatacaggcagatatacagaagatgtacagtgtaactcaatggcaggagtcaagcaggactcgggctggcagagaaggtcagtcacacacggaatcacagaaccgtaggggatggaaggggcttctggaaatcatctagtctggctgtcccactgccacgctccaccaatcgtgcatctgagagctcttctgccagcaaatcggtgc

SEQ ID NO: 41786 - DNA, 599 bp, Chicken  19866894277915_2
  misc_feature (1)..(12): n is any nucleotide
nnnnnnnnnnnnactttagtattcacttcataattgctatgtgagtttgtgaaacaatttaaaatgagatgtagaatgatttacagacaagacaaaacctgtgctaatgagtctttccttgtaatagtcattcaaaggtaaagtcacatgcagaacctactgctagtaacactcacctgtgtgcttacagtgttaatttatctaacatctgatgtatgcattgatctccgtgctcrtttatggttgcttcactgggtgtagagcatacaccatccaatgcttaaatggacttatgcatgragctgtttcctatgctcatgggaactggaatacaggcagatatacagaagatgtacagtgtaactcaatggcaggagtcaagcaggactcgggctggcagagaaggtcagtcacacacggaatcacagaaccgtaggggatggaaggggcttctggaaatcatctagtctggctgtcccactgccacgctccaccaatcgtgcatctgagagctcttctgccagcaaatcggtgctgtaagacagagtggaaaaaagcacagggacaccacaatgtccttgcaacagtgtgagccagag

SEQ ID NO: 41787 - DNA, 600 bp, Chicken  19866894277917_1
tgaggagcgttgcatcctcctaactttacattaacaccgtaatctgaagggtaaacttcctgtgttgcccatttgccagcttctgtaatcataacgttccagatcctaattaacttgtaaattacatgccattccttggatagaactattggttgaccccatttcagagccttccttagagattaaccatcagagtctcatgagagttatctgatggtgtgctttactaatgggatggatgtgctggtgtgctgctgatatgcacacacacattttgcaggacatttgtcattgtttagmttcccacaaaggaaatattttaggcgagttgaaataaagcctaaatcacacagcctaagtgatgggaacaaccaggaaagaaagggtttggccacctcattgcttactattattctgaactccaaactgacctcctgtcctcagatgccctttaattaaaggaatgttgatatcttgacattttatcttgaggaagagaaaagctaagagctggtgagtggttcaggcagctacaagcctgtaatcttgctaaagcacttcagtttgtttgataaatatcccagatacagaacaatctct

SEQ ID NO: 41788 - DNA, 600 bp, Chicken  19866894277922_1
ctgggagggctggaggggacacagtaccgcatgggcagggatgttttcctgttgccgagcagcagttgggcttagccaagaggtgcaggcaggaggaagaggaggatggagcatacggggaggcaggttgatgttgggatggggagaagggtgatggagtgggatctgagcagggtgcctgggaatacagagtggttgtggggttggagcagcaatgggcacagtaggctgggagttcttgttggcttttccagggcacagtgccatgggactgttctgaccctaatagcacgccccccrctaagatgtcttcatctccagagatgaggagacattccagggggcttgtgggccaagctcagctctgcatgggcattctcaaagggttggaagaagtctgttgtcccttggcaccatgtggccctgtctcctgtgcactctcccagtgcatgtcacccacctggggcccccgcagaccccatactcactttgttttagccactgaccatgagctaaatgtgccctgctgccacctaacacagcagcacccactcaccagcactccccctaccccataaggtgagctcatagggtgccact

SEQ ID NO: 41789 - DNA, 600 bp, Chicken  19866894277928_1
caagaagtgccagcacctctgagatacgttgccctcacgttaatccttgggcatcctccagacaacctaatgcccctcaaagctctcaaagctacagacattgcccgtgaccccagcacactgccttgtgatgtgacagcagtgagaggcacagcgtgcagctgtaaacacggggctgctgctgtttacttcagctccgaacagcagccacaagcaggctgggatggaaaactgcattggcgtcaccaggaatggaagcgtcagcaaatgtcagctattccaaacaaagctgtcctcccrgtgcccggcattcagggaatggggtggtcgcactgtgccagagctggtgaggctgtctgagatggcaattaccagacaggagaaggcgttttggagccaaagttggcacggtatttttccagatgcttcattcttggcatcagcagtgggggattcctgctgaatcaaacattcctcaggtgggactggcatgtagcaccgtgatgacctctttgccagggcacaggtcttgttttgtggcaggtcgatgccaccagctgcacaaggctcttcttaccagcctggatgcagcagttgcaa

SEQ ID NO: 41790 - DNA, 600 bp, Chicken  19866894277931_1
tgagaaataggttctgtatcagcagactgggttttgccactttccaaattacaatgacttttgtaactacccctgtcatagctcacttatattttcctactccttttcatactagatggaataaacgtaacttgggaactagcaacaatttggaaaagcattgacacagggctatgatgagttgaggtggatggtaactgactacaggagagtaattctacagaggaaaatcattcatgacctgaaacaaacccctgacagtgggtacagtcacaggctgcaacttgacctgcagaggaracagtttctgatcaagactgagcatccgcctcaacaatgcctccaacagattctgtaaactgaggagtaatttgctaagtagcagtaaaaactgtaccactaggactgtgcaacttcaccccagcaccagaaagcaattggttggtgccttgtcaggatagcctcatttacgtgatagattgcaaacactgccttgagtagtaaaccaaaactgatttctcaaaggagcaagcacactcaagaaaaaaaatgaccatcttctctcatcctgtaatctgcagaaagggaaatgctgctcat

SEQ ID NO: 41791 - DNA, 600 bp, Chicken  19866894277931_2
attctgtaaactgaggagtaatttgctaagtagcagtaaaaactgtaccactaggactgtgcaacttcaccccagcaccagaaagcaattggttggtgccttgtcaggatagcctcatttacgtgatagattgcaaacactgccttgagtagtaaaccaaaactgatttctcaaaggagcaagcacactcaagaaaaaaaatgaccatcttctctcatcctgtaatctgcagaaagggaaatgctgctcatttatccactggcaatgaagtgtgactagaagaagctagatgcttcctayayacaggggctccagtttcagaactacaaatgaaactaaaaaacacaactgcaaccccttcctcacttctcacaacactgtgaatattctctgcttcaaagaaacaaacaaacaaaaaatcacaatttttgtggaagtattaactgggtttggttatcctgagacttgtttgatctcaagagcaatttagttttatttgtatttcaaatttgaattcctaaacaaaattctttatgtccacctgtttaaaaaaaaaaaacaactacaggaaattgcaagcatttcttacctrggatgcca

SEQ ID NO: 41792 - DNA, 600 bp, Chicken  19866894277931_3
tctgtaaactgaggagtaatttgctaagtagcagtaaaaactgtaccactaggactgtgcaacttcaccccagcaccagaaagcaattggttggtgccttgtcaggatagcctcatttacgtgatagattgcaaacactgccttgagtagtaaaccaaaactgatttctcaaaggagcaagcacactcaagaaaaaaaatgaccatcttctctcatcctgtaatctgcagaaagggaaatgctgctcatttatccactggcaatgaagtgtgactagaagaagctagatgcttcctayayacaggggctccagtttcagaactacaaatgaaactaaaaaacacaactgcaaccccttcctcacttctcacaacactgtgaatattctctgcttcaaagaaacaaacaaacaaaaaatcacaatttttgtggaagtattaactgggtttggttatcctgagacttgtttgatctcaagagcaatttagttttatttgtatttcaaatttgaattcctaaacaaaattctttatgtccacctgtttaaaaaaaaaaaacaactacaggaaattgcaagcatttcttacctrggatgccagt

SEQ ID NO: 41793 - DNA, 600 bp, Chicken  19866894277931_4
cttcctayayacaggggctccagtttcagaactacaaatgaaactaaaaaacacaactgcaaccccttcctcacttctcacaacactgtgaatattctctgcttcaaagaaacaaacaaacaaaaaatcacaatttttgtggaagtattaactgggtttggttatcctgagacttgtttgatctcaagagcaatttagttttatttgtatttcaaatttgaattcctaaacaaaattctttatgtccacctgtttaaaaaaaaaaaacaactacaggaaattgcaagcatttcttacctrggatgccagtggtcagtgcccataagtaggccttgttcctgggttcccttcacacaactgaagtgtagtatcttaggaaagcagtaggaaggaactatgcctagatattcactcagctcttcattgatccttgcattgstctgcccctttttgagacctcgccttttgccactgcaatgctcttgaataaaaggaacaaaattccagttctgcatatctgttctcaaacagaaatcctaatcaattggacatgacagctccctaaaggtaagttctcagccatgacagtcagggttattt

SEQ ID NO: 41794 - DNA, 600 bp, Chicken  19866894277931_5
tggaagtattaactgggtttggttatcctgagacttgtttgatctcaagagcaatttagttttatttgtatttcaaatttgaattcctaaacaaaattctttatgtccacctgtttaaaaaaaaaaaacaactacaggaaattgcaagcatttcttacctrggatgccagtggtcagtgcccataagtaggccttgttcctgggttcccttcacacaactgaagtgtagtatcttaggaaagcagtaggaaggaactatgcctagatattcactcagctcttcattgatccttgcattgstctgcccctttttgagacctcgccttttgccactgcaatgctcttgaataaaaggaacaaaattccagttctgcatatctgttctcaaacagaaatcctaatcaattggacatgacagctccctaaaggtaagttctcagccatgacagtcagggttattttccaaggatatggttactgggttagtatttctagtttctgcctcctcggatggctatatcttttcactaaarggatggaaacggtatttccaatcatgattaaatcccctgtgaaatatgtattcacaaactgaacagt

SEQ ID NO: 41795 - DNA, 600 bp, Chicken  19866894277931_6
ttaggaaagcagtaggaaggaactatgcctagatattcactcagctcttcattgatccttgcattgstctgcccctttttgagacctcgccttttgccactgcaatgctcttgaataaaaggaacaaaattccagttctgcatatctgttctcaaacagaaatcctaatcaattggacatgacagctccctaaaggtaagttctcagccatgacagtcagggttattttccaaggatatggttactgggttagtatttctagtttctgcctcctcggatggctatatcttttcactaaarggatggaaacggtatttccaatcatgattaaatcccctgtgaaatatgtattcacaaactgaacagttttatcttcctgaccagcatgtaccttgagataggcatcagctcagatgaatttcagcaaatgtgctccagagagaatgcaacctaaaagttcttttggtgtgaataacaaccagcacacagagcacttgggaagcaattccgttttcccaaaaacacccacgggagttgggaatgttacacaaaccttctcagtgaaaagcagcagcagtcacagataatcaatttccatcc

SEQ ID NO: 41796 - DNA, 600 bp, Chicken  19866894277939_1
cattcctctcttcttaaaacgtttggacgttgtcatctaaatacatactctagggctaagcaaacaagcacagggacctcagtgctgtttttgagtggtgatgggatagcctgcagcattttagatgttttcacaatggttctttctgcagaaacaagctacttgtctttctaatgccagcacaactgttcccaggcccctgatatttctttcctatggttgtgttgttcctccatcccaaaatgggattctagtgttagtgatggttctgtttcctgctggaaactgagccggtgtgtyccagagctcgcttttactccttttgagtcccaaaggcagcacagctcatctttaatacagcaaacttgagacatctatgaagatattcagtgtttttagatacatacacttgtgtaaatgtagagatgattgagactaagctcttagtgtggctggagagaagatggatatttaagatgtgttttgttcctccagaattgcacaggatacttgttctatgacagaggaacagaagagtggcactcatctcttgctttgctatacttaacccctgctcaagatgtgtggaaattacatcct

SEQ ID NO: 41797 - DNA, 599 bp, Chicken  19866894277940_1
  misc_feature (1)..(166): n is any nucleotide
nnnnnnnnnnnnnnnnnnnnnnnnnnnnnnnnnnnnnnnnnnnnnnnnnnnnnnnnnnnnnnnnnnnnnnnnnnnnnnnnnnnnnnnnnnnnnnnnnnnnnnnnnnnnnnnnnnnnnnnnnnnnnnnnnnnnnnnnnnnnnnnnnnnnnnnnnnnnnnnnnnnnnncacttatgccagcaaaagctctgcttctgcagttgcacatgtttgcatccactgaaatccagaggaattctcaaatgcataaacttaagggtttgcagctttgcagcatcacagctcgtgtgggcatctgtggytgctctgccttcatgggcttcacccagcccctggaaatgccttctctttcccactcctgttgaagcagacaagggctcacagcactcttggaacagatgccrgaagctaaggttactaacacatggttaatacacaaacgaaagatctttgctcttgattaattcattacatctagaagtaaagatgcaaagtttctagaatcatgtccccattccagcctgttgcaaatatcttctgtatctgcacacaagcttgagcattctacctgaaagatttacttactttgcattccaggggt

SEQ ID NO: 41798 - DNA, 599 bp, Chicken  19866894277940_2
  misc_feature (1)..(64): n is any nucleotide
nnnnnnnnnnnnnnnnnnnnnnnnnnnnnnnnnnnnnnnnnnnnnnnnnnnnnnnnnnnnnnnncacttatgccagcaaaagctctgcttctgcagttgcacatgtttgcatccactgaaatccagaggaattctcaaatgcataaacttaagggtttgcagctttgcagcatcacagctcgtgtgggcatctgtggytgctctgccttcatgggcttcacccagcccctggaaatgccttctctttcccactcctgttgaagcagacaagggctcacagcactcttggaacagatgccrgaagctaaggttactaacacatggttaatacacaaacgaaagatctttgctcttgattaattcattacatctagaagtaaagatgcaaagtttctagaatcatgtccccattccagcctgttgcaaatatcttctgtatctgcacacaagcttgagcattctacctgaaagatttacttactttgcattccaggggtaaaaagtctgcctaatattattgatggcatctttcactgccaaatactgaattatttatggcttaattgtaaaaatgatacccacgagaagctgtttggttg

SEQ ID NO: 41799 - DNA, 600 bp, Chicken  19866894277952_1
gatcaaaacagaaacccatccaacaaaaatagaaatcaaataagatagtcagtagtgggaaacaagcacgttttaatgggaagtgaaaggatggagacttattccattctcacttttcctagtaagtgctgctggggtcttgaggtctcttttttttctcgcgtttcctgctgtgatatatacttttgtttttttaatatagctttcagcattttcttctttatttaatttctggggaaactgcagtctgcaaaggttgctaccttgtagctgggaaagagaggagccatggagatttckttcaggtacactgcttagggttgctttagcatattggttcccacagcagctttaaagctgtggagccaagtccttctctagtgcaccagcgygggcagagattgaagccaagggacattccccataccaattcatgtgagtttaaaaaaacagaatctggtttatatttggcctttcttctagtaaaatttgtattcgcagaatcctagaattatttcggttggaaaagaccttcaagatcatcaagtccaaccatcaacttgaccagtgttttcaagtatcttttattacattccttgt

SEQ ID NO: 41800 - DNA, 600 bp, Chicken  19866894277952_2
ggagacttattccattctcacttttcctagtaagtgctgctggggtcttgaggtctcttttttttctcgcgtttcctgctgtgatatatacttttgtttttttaatatagctttcagcattttcttctttatttaatttctggggaaactgcagtctgcaaaggttgctaccttgtagctgggaaagagaggagccatggagatttckttcaggtacactgcttagggttgctttagcatattggttcccacagcagctttaaagctgtggagccaagtccttctctagtgcaccagcgygggcagagattgaagccaagggacattccccataccaattcatgtgagtttaaaaaaacagaatctggtttatatttggcctttcttctagtaaaatttgtattcgcagaatcctagaattatttcggttggaaaagaccttcaagatcatcaagtccaaccatcaacttgaccagtgttttcaagtatcttttattacattccttgtagtacagatatatcttttccttcaccagtatgtactgaacaaaacatttgaagctgcatttaacccttacagcaaggaactgatgtttgcag

SEQ ID NO: 41801 - DNA, 600 bp, Chicken  19866894277953_1
agagctacatatacaaaagactgccaatgacagtaagcaaggctatgaatgtcaatattctgggtgcgctcaatggataataatattacttctgcatctctccaattactcacatcatcttccatgaccattatctacactctattgttttgctgaatttcttaattttaaccctactgtaaatcaaaatctattaaaaaatactgtaatgtttcgcttcagatcatggagagagagcaaaagacaaaaaaaccaaacagtacatcccttcttcctcacatttcctctatttgtctcttyatgattttatgactctttataatgcttagcctctactttttgcaaaacacctcactgttgttcagcaccaattatactccatatggtcccaaaaagacatgttcagaggcatatgctgaggcaatatttcatgttaaatactgttaaccgctgttctccaccatcttcaaatttgcagggaagtactgttatattgcatctggcaatagcatagttggcaaaaaaaaatgattagggaaaaaaaagtagaactgtacaacacagcttcagtaactttggtgtaagaacagatgatgagga

SEQ ID NO: 41802 - DNA, 600 bp, Chicken  19866894277955_1
accttccatatgtttattcctctgttgtgcaaggaccactaatggcccatagggatagcatctaattcataactttattgccctgctccttctccaaatatgcacagaacacatcacactgtcatggtctcataactattaataaccaaatgaggtggggaatctggaagtttagggccaaaggcagcagcaattagaccactgaagtctcacttggtgcagagaaggctgcagcatctctgtcctgacaagctacttctgctccctcttactctgacatttccaccagctccttcagcycctcgacctgagaagtgagtctgggatttggtcctaatgaataagcggaaaaaagcatacacatttcagaagaatctcataatgtgaaagggaaaaatcttgttacagtgcactccaaacagctcagactattcaaggtaatcacatttatatttattaaatgaggcagcattcacaaaatgtcagtgttgcagccaagacataaacaaagttacccaagacatagtccagaagcaacaaaatggtttatgacacttcctgttttcagagttctcctttctcattcctaatgatccttaa

SEQ ID NO: 41803 - DNA, 600 bp, Chicken  19866894277961_1
tgtggaggctcaggtagcagaagcgtcccaaccagcagatgaataatgtgaggtttttctcctaacgtcagtctcatgtttctgaattcttattgtgaagtaaaatctgagcaccgctcaggatgtgtttttcaaacttgaattttcaagctttccttggtctggtttgcacatctggcaaactatgcagacttgtcagagatttctccaatcccacctttctgtttccctttcttccttagtttttaagacaaagcattttgaatagccgcagaatgagaagccagatccctaaaacayagraaatccaatgtcatatgtgtcctggtgccccatttgctctggacctattctgttggcagctgtcaggaggtgatgggagaaaccctttggcagcatctgctccttctgttaaggaaaatatctgatttggaaactcttctgttgttgttgtctcaatggcagcagtttcaaagttaggaatgacgcctgtctttttaatgtgagagtcctgcattgtcctggctgtctttggaccaagaatttctttgagaagtgacacttaatttcacttgtgacttttggaatatgtaagaatgc

SEQ ID NO: 41804 - DNA, 600 bp, Chicken  19866894277961_2
ggaggctcaggtagcagaagcgtcccaaccagcagatgaataatgtgaggtttttctcctaacgtcagtctcatgtttctgaattcttattgtgaagtaaaatctgagcaccgctcaggatgtgtttttcaaacttgaattttcaagctttccttggtctggtttgcacatctggcaaactatgcagacttgtcagagatttctccaatcccacctttctgtttccctttcttccttagtttttaagacaaagcattttgaatagccgcagaatgagaagccagatccctaaaacayagraaatccaatgtcatatgtgtcctggtgccccatttgctctggacctattctgttggcagctgtcaggaggtgatgggagaaaccctttggcagcatctgctccttctgttaaggaaaatatctgatttggaaactcttctgttgttgttgtctcaatggcagcagtttcaaagttaggaatgacgcctgtctttttaatgtgagagtcctgcattgtcctggctgtctttggaccaagaatttctttgagaagtgacacttaatttcacttgtgacttttggaatatgtaagaatgcatg

SEQ ID NO: 41805 - DNA, 599 bp, Chicken  19866894277975_1
  misc_feature (1)..(19): n is any nucleotide
nnnnnnnnnnnnnnnnnnntattctgtaaaaatccaaatgaatttcctcttcggactcttcattgaatcatagaatcatagaatggcttggattggaagggatcccaaggatcatcaagttccaacccccctgccacagcagggccaccaacctccagatctggtactagaccaggttgccgagggcttcatccaacctggtcttgatcaactccagggacagaacaacctctctggacagcctgttccagtacctcaccactctctctgtaaaatatccaatctaagccttcccttctygagctgttctttaggattactttgtttaagaaggtttaaccagcttggagtgacctttcactactccttagaaagattctacataaataaataacccatagtaaagccatattcttcaaccacattttatttctgctgctgttattctttttattgtatcactttttccttagctcttttactccctgacactgttccctttgcacatatgggctcactttctttttactctctctatctgtaggtgttgcttctgtcactgagttttcctcatgtcactaaagctccttcttcacttg

SEQ ID NO: 41806 - DNA, 600 bp, Chicken  19866894277985_1
gtgactggttataagccatctttcactttctttgtccttgccttattaaaaacagctgttatatctaggatcaattcacacatagcttagaatcacagaacccttggaggtggaagggatctttaaaggttatctactccaactgttctgcaactaacagggacatccacagctagattaggttgctcagggcctgatccagcctggacttgaaagtcttcagggatggggcatcaaccacatctctgggcaacctgttccagtgcctcatcagcctcactgtaaaagactttttccttrtatctatcctaaacctaccctttttaagattaaaacaaattccccttgttctatcaccatagaccctgctaaagagtctgttcccttcttccctgtagcttccctttagatactgaaaggctgctatcaggtcaccttggagccttctcttctccaagctgaacagccccagctctctcagcctgtcctcacaggagaggtgttccatcccttgcatcatttttgtggcccttctctggatgtgctccaacaggtccatgtctctcctgtactgagggctacaaatctggatgcagtacc

SEQ ID NO: 41807 - DNA, 599 bp, Chicken  19866894277987_1
  misc_feature (1)..(206): n is any nucleotide
nnnnnnnnnnnnnnnnnnnnnnnnnnnnnnnnnnnnnnnnnnnnnnnnnnnnnnnnnnnnnnnnnnnnnnnnnnnnnnnnnnnnnnnnnnnnnnnnnnnnnnnnnnnnnnnnnnnnnnnnnnnnnnnnnnnnnnnnnnnnnnnnnnnnnnnnnnnnnnnnnnnnnnnnnnnnnnnnnnnnnnnnnnnnnnnnnnnnnnnnnnnnnntaccaagcatttaatttacacttctgtaactgaaaatacatgtggcgtaccacaaactttttttggacagcaatcctctacttccatgacaagsacaatcacttctccttctctttcacaagctggtggtggatcctcattgcattcaggttctacagcaacaatacttccattttctaagcagctgtatatgcaacagcccctcatggacccattccagatctccccagcagagcggggttgtcctctgttatctgtacacgctgagagaaaaatgttacatccctttgacaagtggagagtaagtctgcaagcaacaacacatttgtttgttatctaggtgaccttactgcttaaaataagagcacttcagagcactatgacgaatcaaga

SEQ ID NO: 41808 - DNA, 600 bp, Chicken  19866894278000_1
aaggacatgtaagtatgatattactatggcttaatgtagccatgcatcagccaggtgtcagcagcactaaaacacacaagaggcttatgctttaatgatgccattgattttttgtagtagcacaagtggtagtagttgtaaagggacagaaggtctcagtttggtcagggtcaggttatgctggatataaaatgacatagagaagtcaaatcttagcctgaaagagttttaaacttaattaaagaaggagagaaagaaagaggaatgccagatggatgcaagctagttaacaactcaatyggtcagcgcaggttcattttggagctgggcagatgcatgggatgacaaaaaccagccaacacttgatggcacgatggttctccacaggtgctaaatgttgctggccatatgccaccatccacatacaagtccagctcagttcctctgcaataggcaaagtcacacagacatgtcacctgtgttcagtaagagttaaggaagtagcatgggctctacaaggtctcaaacccttatctatgctaaacagaagacccctagctcttacaatcagcaatgtcagccaaatgaaaaaagcactac

SEQ ID NO: 41809 - DNA, 599 bp, Chicken  19866894278009_1
  misc_feature (1)..(143): n is any nucleotide
nnnnnnnnnnnnnnnnnnnnnnnnnnnnnnnnnnnnnnnnnnnnnnnnnnnnnnnnnnnnnnnnnnnnnnnnnnnnnnnnnnnnnnnnnnnnnnnnnnnnnnnnnnnnnnnnnnnnnnnnnnnnnnnnnnnnnnnnnnnnnnntggtacttagttggtaggtcatttgctgcaggggagagggaagggtggactggtggaccgcagatagcatttcccattgggaaagaagttgtaaacacaattagcagctcttaatttgggaagcagaatacatgttatttagtttgtttgtatttcwcctgyagagaaggcttctaaatcttacttggttgttgttttagtactagatcagcacatttatttgtatatttagactagattagcatgtatacaagctgctataaaaataataacatctgggaagattgaaaatatttaaggtttactctctgtgtcttccttaaaacagctaagcaaacaaaagtggctttacaaagaagtttgaattggggttaaaatttattccatttcaatttattttcaagagaagttgtttttttttttttaaaacaaaatgtactttcttaaagactaaaa

SEQ ID NO: 41810 - DNA, 599 bp, Chicken  19866894278009_2
  misc_feature (1)..(138): n is any nucleotide
nnnnnnnnnnnnnnnnnnnnnnnnnnnnnnnnnnnnnnnnnnnnnnnnnnnnnnnnnnnnnnnnnnnnnnnnnnnnnnnnnnnnnnnnnnnnnnnnnnnnnnnnnnnnnnnnnnnnnnnnnnnnnnnnnnnnnnnnnntggtacttagttggtaggtcatttgctgcaggggagagggaagggtggactggtggaccgcagatagcatttcccattgggaaagaagttgtaaacacaattagcagctcttaatttgggaagcagaatacatgttatttagtttgtttgtatttcwcctgyagagaaggcttctaaatcttacttggttgttgttttagtactagatcagcacatttatttgtatatttagactagattagcatgtatacaagctgctataaaaataataacatctgggaagattgaaaatatttaaggtttactctctgtgtcttccttaaaacagctaagcaaacaaaagtggctttacaaagaagtttgaattggggttaaaatttattccatttcaatttattttcaagagaagttgtttttttttttttaaaacaaaatgtactttcttaaagactaaaatatct

SEQ ID NO: 41811 - DNA, 600 bp, Chicken  19866894278023_1
acacaagctgtgtcagtagcttatttgctaatgacgactttggatatcataatctaaggttatatcttttgggctactactgattgttctgtgaattaccaatggattaccattgctgttgatacaatgcataacttactgtgttgccgtattgcttttatgatagtgtcaatgaactatcctcaggatttagttcagttttaatcagagatgcaaaattagtcaagccctgacttatactttacatggaagcaaacataacttgatggagagtcctcagaagcaagctttaccatagaygagccagtcccccttgcctcttttaacaagcatctgaaagaagctccttccaacagtaactcaaaggatctatgtgtctcttgtctatatccagggagaaagctaattttcctagaataaggtcaagcctgtggaaattactctacattttctctattagacacaatttctgctttgtgtcagatcacagtattcagcacttgtaaaatacagtgcaaaaaattgtagtagttggcattggcagacagtgcttgtgtgatgattgccgtacggggaggacaagaaggggaagatacattt

SEQ ID NO: 41812 - DNA, 599 bp, Chicken  19866894278029_1
  misc_feature (1)..(144): n is any nucleotide
nnnnnnnnnnnnnnnnnnnnnnnnnnnnnnnnnnnnnnnnnnnnnnnnnnnnnnnnnnnnnnnnnnnnnnnnnnnnnnnnnnnnnnnnnnnnnnnnnnnnnnnnnnnnnnnnnnnnnnnnnnnnnnnnnnnnnnnnnnnnnnnntttaaatcaattaagtaatttttttttccgtagccaatgtgacagtataggtcattcctgtaggatgtcacatgaggccaaatagtatgatctgagaaataatggcaagctgtaagtatttcttgctgctgttggtaatacatgcaggaggatatrttaaaccctmtccatcagagctcagtttaatttctgaagttaaaagataggagtaagacctttctagaggggttactgtcccrtggcctacctccagttcatgtgtctgggaggcagttctgcatcccttcagcagagatgtgatactgcagtacgggatttctgggcaaatccagtgtggttctgatcttgtttcagtgaatcactgagtgttccctttaagtgagaatttacagcatagcctggtagggcatgtgcatatgtgcacgttttgtacaagctgttgtgtttgcttctgg

SEQ ID NO: 41813 - DNA, 599 bp, Chicken  19866894278029_2
  misc_feature (1)..(134): n is any nucleotide
nnnnnnnnnnnnnnnnnnnnnnnnnnnnnnnnnnnnnnnnnnnnnnnnnnnnnnnnnnnnnnnnnnnnnnnnnnnnnnnnnnnnnnnnnnnnnnnnnnnnnnnnnnnnnnnnnnnnnnnnnnnnnnnnnnnnnntttaaatcaattaagtaatttttttttccgtagccaatgtgacagtataggtcattcctgtaggatgtcacatgaggccaaatagtatgatctgagaaataatggcaagctgtaagtatttcttgctgctgttggtaatacatgcaggaggatatrttaaaccctmtccatcagagctcagtttaatttctgaagttaaaagataggagtaagacctttctagaggggttactgtcccrtggcctacctccagttcatgtgtctgggaggcagttctgcatcccttcagcagagatgtgatactgcagtacgggatttctgggcaaatccagtgtggttctgatcttgtttcagtgaatcactgagtgttccctttaagtgagaatttacagcatagcctggtagggcatgtgcatatgtgcacgttttgtacaagctgttgtgtttgcttctggtctgcatgtc
